United States Patent Application Publication US 2008/0114160 A1 - sequence listing, part 81

SEQ ID NO: 36933 - DNA, 1067 bp, Oryza sativa
cccccccccccccccgaaattttttatttttgttttatttgtttgatattttttcacgcttagggacacacaagaaccaaccatagaaaaattgaactcaaatagacgtaatatgtgacatgtagaatttttcctctcctctcttctctccgaactagtgcagaggagagagatgtgcaacttttttatttttattttattttttgatatttttttcacccttaggaactcacaggaaccaaccatgtaaaaaataaactcaaacggacgaaatatgtggcatgtggaattttccaaagctccaccgaaaaacttctctcctcgaaaacacaatcttgcaagcggaatttgggggatttaatatcaccgaacccggcaaagctagggagaattggatgtaactttttctgtagatgtccgtgcatatattattttcctgatttcaagtccgtatgagaaagttacgcctattttaatagatgacatattttgtccgtttcgatagagttttggaaaattctacatgtcacatattttgtccgtttgagtttattttttatacggttggttcctatgttctcctaagtgtgaaaaaaatatcaaaaaaatgaaataaaaataaaaaaattgcatctctatgtactgtttaacttatatatgtcatttcatgtggttatattttgaattagattaagtaatttcatatagtggtagagtgcattatgtttaacatgctgatcaaagggttttagtaaaggagttatggtctaattttagtgaaggtgcaaagtagactaagtggtatgctagatattttcagacttagctaagtggtagttcgagtttaaattttttttgtggttggttgtatcgtgatcctgagtgtgaaaaaacatccgaaaaaataaaataaaaatgacaccgttgcaactccatacagagaaacaggaatggaggcggcggcgccagccatgctggcgccctcctccttggggcggcgccagcatagctggcgccctcctcctaccacgttggttcgcgtgcgccatggtggcaggaggacggct

SEQ ID NO: 36934 - DNA, 586 bp, Oryza sativa
gctgaaactatttggctgagctccagcttcaggaggggtggagtaaacgcaagtactataagcatcttatcactaattacaagatgccatgtagactcaaatgatgatgtggaggagaaaaaagaagagagagagaggagcagccacccctcatgtaaggagcaacctccacacaagtttcaagaaatatgagagacagagagttggacaaaattagatgtgaccacctcctctgttataaaacttgacctaagaaggctacctgctgctgtgcttgctttgattattgcgagatgggatcactcgatcagggccggctggctgcactcaatcagacgatcaacagccctcgtcggcttcttcgcttcgaggtcaggagagaaggcgcagagacgatgggagagaacggcgcggcgcagccagtagatcgatgggatcgaagacgaagcgacgtgcggtggcctgggctgaattcctgaatggccgcgcgcccacgcgcccggtgagactcggcctctactggagtactgggccctgtacgtcggctgccacgggtgggggcctgggggatggagagttggtgggt

SEQ ID NO: 36935 - DNA, 524 bp, Oryza sativa
ctccagctccaggaggggtggagctggagctgtgccaaataggcccgaaattaacttaggatttttcttgtttgcatgattttttttcttgctatttaatttactttagatgttatacgatgctactaaaaagcatttgtcaggtactcagaaaaaaagacaaaagaaaaaagaaaaggagacaaacaatttattgattcgcagcaaaggtaaatgagagaccaaaacctgagacctaccggggataaaacgactctcacaattcttaccttagttttcttttaatttttgtacaactatttcaaatgcatataactttcatgctatataaaattggatgaaattggcacgttctaaaaaattaaatccacaaaagagattcaataacgagagggtctagttagacaactgtgagggccacatatccatccgtcctattctttctctttcttctccatcaagaatcactaggcaaacatgattatatatgtctttttctaaaccgtatgggccagcatacgtgt

SEQ ID NO: 36936 - DNA, 528 bp, Oryza sativa
ttgcataatacactggtggagaaaggggctttactcgcgggtgggaacccccctatactcccggttgtataaccgggactacgaatccgggactaaagatgcccatctttagtcccgggtaaaataaccgggactaaagatggtcggagcagccccggttaattcttttttttttctcaaattgatctggtccctaaatatcctcaatcatatcctcaaattatccacaaaccaaactaacatcacagatctggaaagaaatgcatcacagattctcaaacaaaaaatacattacaaatcctaaaagaaatacaccacaactcaaatacatcccagatcaaatccaatatcacatacatcacagatcaaatccaatccaatatcacatacatcacagattaaatccaatgaatcacatattaaaaaaaatccggcagcagaggggagggcgccgccggccttccgtcctctcgcccccgcgccagcacggcccggcgcgcccagccgactggctgcctggccgcccgg

SEQ ID NO: 36937 - DNA, 854 bp, Oryza sativa
acgatgtaagatcggtatctatcaccaggcctctgtccttgcttccttccatccctacaatactactactgctaatcctctctctgggtcctctcactgtgctttgggctcctcacctaacaatcatccctcctttttatgcctcttcatgatgcacatttacttgcactgttgcaggcaccgatcaaaaatggatcacatgtaaggagtagcaccgttgcacagtgtatgtgtgtacaatgacgcgcacaatgcgatgcccattggtttgtgttggaacacagggatgcatgcatcccactgaaaatttctccagacaatatcattctcgcaggtataattgtcgtatgcttttactctgttatttcagactagtgtattgcaagtagccaagtaaccaaagcagggagcaatccacttagatttttccataattttctagtcatatttcagactagtgtattgcaagtaaccagagcagggagcaatagatgtttcagaactaattagtagctcacaggtttcttgtattcagccaacactacactgggtactacctcatttagggccaatccaccccagccattgtctgcacattcacttctctgcatataaaggccccatcacccacccgccagtgaaagagggtttaatacagaagcaatgcaaagatatcatgtttggcctctgcctgtgcagaagaggagaagatctcaagatccatatcatcatgtactcccaggccccagctccccaataccacgttaaccagatcgaaaacatcatgatacgttcatacgcatgataaatactcttatcccccggtgcattttgggtccattacaccatagccg

SEQ ID NO: 36938 - DNA, 707 bp, Oryza sativa
atatcgcgctcccaggtgaaagtgtagccacacaggaagtgggttagggacagccaaggtagggagcagcttacaattttaagaggtccgagaaagacctgaaatgtaagctgacagtagacagagatctgaaggaagcgaaggggtatgccttgcagatttccagagaaaatcacccaggcagagagaacagtgagtgcaaagacctagcaggggtgggaggtgggtcggagaaggggcatgtgcgcctgacgtcagggaaaccatggggagctgccatgtgactttcaaacacttgaggatcaagggcaccacagtttccaatttaattaagctcactacagcaggtgaatacttcccattaaaatgtattacatgcgaatgctatttctgcggctctttgggatgtgagcttcacataaaattgctcggtcatcgagcatcgtggcctccatctgcacagccgccacctcccactagcaatttcatgcacgtgatgaactctccagcaaatttataggatattattcacactttggtttttctcagaaggaagaataataatgtatgctgctccagcaaattatcttttccacagggctttcatgcacggggtctcctttaatttgaagctcacaaagcatgaaagggagggagctgtaggcgcgccctacacgaggaaactgaggctttcaaggggtacacac

SEQ ID NO: 36939 - DNA, 560 bp, Oryza sativa
acaaaaacccatcaaatcagtcagtggaaagaaattggtgacggattggacaagttgatatctcaagtggtgttctgtctatagttttaggttgtgtttagttcagcgcaaagtttgaattttggttaaaattggagatgatgtgactgaaaagtcgtgtgtgtatgacaggttgatatgatagaaaaaaactgaagtttggattcaaactttggatctaaacacagccttataagggcaaggcattgtgccaattgcttgtttttcacatgtttttttaataagttttgtctcttcctcctaaatgacgttcttatagacaagtttaacaactccgcatgattttagcatctatattagttggacaattcatctccaagcaatcttaattgtctacttcaatttatgccaacaacaaaaatgaatgcccttttggcaagcttgtttagacgcttttatgaagggcaacaccatagctttcccaaatccaaatgcaattggctttgatgatttaatgtttctttaagagctacacggcgagtatatttgcaatttgaaat

SEQ ID NO: 36940 - DNA, 5453 bp, Oryza sativa
cgctgcaaatcctgtaacgccccaatttccgtatacccttaaaaactatttaataaaattctatgttcaaaagtttggttatttgagtgtatctaggtttgagtaccaaagatctcaattaattcattcctttgtgaactcaaaatcttgaccaaaatattctatcctaaattaaatttctaagattcaaatttcgaggttcgagtcccctcctaaaccattcaaaaattcatacaagaactcatataaagtcgtagaatcattagagttccaaggtcctaagcaaagtccctcgaaatttcatttcctaaaattcctggaaattggaaaatattactattccggcacaactaacggaggaggaggaggaaggggaggatgaagagcggcagaagcaagatgaggtggtagagctgtacaacctccgccatggctggtgggttagcttggatcaaatcaaagcataaaggattttgtatctaagcaatggagtttaaatgcttgcattttgcttgctgtttttgctcaataggtggctgattgttgggccttgtttaggggagccgcagatttgatattcttctgctggtaaccaacttctgaaaatttagagacgctgggtttttcagcttttagatttttcattttctggattctacaactatggatttttagaaaaatttgggtaacaatatggaccgtttgaggagctgaagattccgggtgtgtttagatcctaaaatattttggctaaaaatatcacatcaaatgtttggacacatgcatggagcattaaatgtggacgaaaaaaaccaattgcacagtttgcatgtaaattgtgagataaatcttttgagcctaattacgccatgatttgacaatgtgatgctacagtaaacatttgctaatgatggattaattaggcttaataaatttgtctcacagtttacagacgaaatctataatttgttttgttattagtctatgtttaatacttcaaatgtgtgtccgtatactttaaaaaaatttggccaaagaactaaacacggcctctgtgagaagctatagctgctaaaagctcttccaaacaatcccttgttcttagtcagctctgcattctgcacccagctagttttttgaattagaaattattgccaaaaggaattatgaaaattaatggaatctttgtgtattctatccagtgtttcataaaaaaaacaatttgttgctagcgtttcgttggttatcagaaatttagaaacaatttaatgaaatttcgaatttaatttgttttaatttatccagattactcagcggtttcttgataggaaccggctaagataactgatggccacagtaaccaggtgatattttaactacttgatcattggatcgttattttgaggaatctaattatttactatgatagatggatgatactcattaattcggtatatggtgacttttatatccctcattgcactaacgagatggttgactaacctatatcggttcctgatttcctacaattaaacgaattgtaagaacaagtgatcaattaactaaggctatagctatagcctcgattattggtcagatctgcatcaacctaatgaattactttcaaagaaaactaatgtcatctctgtgtataataacagcctgatcactaagcatctaagccgccaaagtaaatagaaaaggcatgctgctaacattcgcatcccacgccatactcgcatcccgctaagctacgagctcatatatgatatatacaactagccaggcaactgcacgtacatgataaggattttctatacatggatgtcatgaaacccatcatttacgcgcgacttagatagttataggaaaaagtaacattaattgtgatgttataaatcgatacacaaacgtacaagattagattgatatacaactagagaaataacactactacacgaatgatttttcatggacgccgggcccttttgggcgggccatgagtggaaccgcacgggataatcgagcgaccggcatcgggcggacgcccacacgggaaaatcaattatcccgtgctggcatcttaatccaaccgcacgggataatcctcattatcccgtgcggtcaacttaagtggaccacatagaaaaatcgattttcgcgtgcgggctttttaagtggaccgcacaggaaaataaaatatcacttcctattttctctctcacccacttcaattttttttgacaccctctcttcctttttccctattatattcctctcctcccctcccctctctctcgtctctctctgcctctttcctctcctcccctcctctcctcaccgagtgcgcacgggacgggtgccaccgccgatggcgtgggaggcgacgcggagagcgatggagccgcggccgcgccccctcaacgacgatgacgactgaccttgacgatgatgacgatggtggcgagctcgcgccaacgatggcggcctcgggagacatatccatcgtcggtgggctcgggggaggcggatccattgccggtgggctcaggggtgcggcggaggctgccgacgacgatgacgacgacgaggcaacgcggcggccgttgccgccgacgacgacgaggaggcggtggccgggagcagcaccgccgctgcctccacttgaccactcttcccctcctcccaacgctcgcgcaaggcgtccgggagcggcgccgccctccccactcccggatccggtggcggcggctaccccacgccggatccagtggcggtgggagccggcgcggcagtggcggcagggtgccccgatctatggttaggatttcaattttttgaaattttatttttttttcagatttttatttttccgtgcgggtgacataagcacccgcacgagaaaatcacgattttcccagacagcccgctccaaacgggcgaatctaccgcacgcaaaaatcaaaacatccacacgcaaaaatatctattgtagtagtgtaaaaataatagaaactgatagtaaatagaacctgtataacgcagataaaatttattattttttcttcatgtgtagatcaaatttagacttcatatttatatagagtcttacatcgtcatagtttatcttatcaaattttatgaattttttatataactatttgaactacatgcatacacttaaatgttatggcacctgggtgtagaaaatacttgcccacgtagactagcatcatgtgcaaacacagtagcaacagttctttagctagcttgagaaaattcattgcaatggcaacctctggctacacaactgcctccctaggctcccatcggatggcctaataagaaaaaaaaccaaattttaaattttcaaacttaattttgagaatgactttgagatattttcaacgtagatttttttagcattggcttttaaatcacaaagaacacatatataaaagttttacctacaaattcaatttttattttctaataagccgttttggcttattagaaaaaaagcgaaacgatggcgcccctaaagtccctatggtggagctttagctcgtgcttgtcgcagggtgactgtgaggcagagagaagttggggaaagaaagagagtggtgctaacaggtggcactcatattttggtggtgtttgtatctcctgaagattaagataaagataaagtgtttcaggtaaaataaggtgataataacgtatgattaattgagttttaattattataaacttaaaaaaatagattaatctattattttagaacaactttcgcatagaaagttttcgcacgaaacacatcgtttaacagtttgaaaagcgtgccacgaatattcaaaactttatccactctttgtggtggaaacgagacctttattttattttactgacagatgggcagtgcagatgttttctataattcagcatgaaaccagcaggggcggatcgaaatagtgctaaactgaagttgctgtaaagttttcgtacgaaacacaccgtttaacagtaatatagacaaaataatgtagatgaacttgcataataattcaaatatccagtaattaaacatccagtgatcgcatagtgctaaactgaagttactatcctgaaaaaacacaaactatatactttatactagatacatatgagcaaaataaatagcaccacaagtatttttctttgcacaaacatgatattataaatgaatattaaaaagcttagaccaggtggccgtgcagtatccaaccggctatacagtaccaaagaacaacacttaacggctcagagccttagagccccaaaaatctctagaaataaaatacctaaaccaaagaaatcaatagaagttttaaacattatttaggtgacatgttatgtaaatgtaagtggaaaagaaattagtttgcaaactgaatgggaagttggagaaattcattgagacattgggatgtgcgtagttgattagacacaatacgtttggctgctcactgcccagcaggcaatagctagtcggctggatagtattagctaattttagctgaagcaatttaagcaaatgtgatgggttttcgtggctgcttccatggacgattaaatttgacaaattgaccctctcattaaacttattataagaatagactgtgtcaaaaactaattttaaaattgagtcgtgatctcagcgccatcgggattgacgctgaggtataacctctcagcgccaatgtttttggcgctaagatcactggtgcacaacccatctttaacaccggttcgcaacccctttagttccggttttacaaccaggacaccaaatccggaaataaagatggatatctttaattctgattaaaataatcgggactccatctttagtcccggttggtgttatcaaccgggactaaatttttagccagttctttttttttctgctcacatgatttgggcacaaatcatttataaaatcattcataaaatcatccttaaatcatttgagcaccacgaatcattcctccataaatcattcgagcaccacaaaacattcaaaaaatgcccaaagctgcattttctccatatcccattcacaaaattcccaaatacatcacaaatcattcacaagataacaaaaacatctacaaattctaaaccaaaattatccacaatttcatccacacatcgcacagatcggaaaattcatcacacatatcgggaaaggaatcgcatagatcgagaggagggcgccggccatcgccggccttgctggcctcgctggccgcccgtgggagcgggctcggcctcctcgccggccgcccacctgccgctccgccgcccgcccgtgggagcaagctcggccgcctcgctggccggccggccgccgctccgctgcccgcccgtgggaacgggcttgaagccctcgtcggcccgccgctcgcccgcta

SEQ ID NO: 36941 - DNA, 3210 bp, Oryza sativa
caaatttgtgattcattgcatggatctgagatgtataatcgatctgtgatgcatttggtttgtgtgtaatttgtttaagatttgtgatggtttgtaagatttaggatttgtatttgtgatgtgaatgatttggtatattacattgatttggggatttgggtatatgcatggcactcagatttggggatttggtttttgatttgtgtatatatatccaactcgatttgggagaaaataaaaagaaaacggaccaaccgggactacctctatcgtctctttagtctccaaccaggactaaacaccaaccgggactaaagatcgatctttactcccgttatttcacccgggactaaagatagcgatttttagtcctggatttacaaggggttataaaccaggagtaaagatgatttctccaccagtgcaggtttcagagcatcgccgagctcatcccagactaagccaaggccaccgacgatggcatctaccacagcaccattgacatctaacacccaccttaaatttctgttgatacactcttagataatttttgttgatagttttctagggggcaccttttagttttagaaagccaattttaaccaatcttttggagggatgaaaattttaagaccctaaattctagttaggattcccataactcttggttatacagtattaccaatgcaagaaagaatggtaacaaaggagtaaaaaacacattaattgaaggtcaaacaaccaaagtttcatacaaggacattcacacatggtccttaccaacttgaggggatataccttcatgaaaaggaaaggtggctttagcagtttcttgagttttgataataaaaacctttaacaattattgggttcttctaacactcttgcacagtatacacgatggtcatcatcagttcatgattcatcaccacatgcaattattgctcatcaccggactgaaaaacgaaaaagtctattttgaccctctcaactattttcggaatcttatgtgtatcgttcaaccacaacattgggtatatcagaccccaagtattaaaaccaatacaaaatgactcccttggttattttcagggtggttttgtctggcgtgacgcactaaccttggttagactggctggttttagggctagtacttgaggaaaaaagagagagtaaaaatataacgggatccacatgtcagtgaagtacccctcctttcttcctcttatttagctgccctcttcctccttggcaagcggcaagcggcaagttgaacttcaggtagagagaggaaaggctagggagagagagaaaacgcgcgcaggtgggggatgctttggggcttgagaaagccgtggctgctcgtcatcgtcgtggtggatgactgcggaaaagaagcagcaacaatagctcgcaatcttttgcccctactgccagctccccttctaggatctagagactgttgtgcctccatttaggctccgcccaaagcgctgataactaacgggcgtggtggggtgcagcatgacgacatgggagatcttcatgttggtggagtcgtcgatgacgacaaaactgtacagaggggacactgaggtgagcaagacaggctacgcatctgctatagaggatgctggcatgaccgatggacacctcatccgtcgccaccgcggaagagatgatagagggaagaaagaagatgagatgcgggatttacatgtgggtttcattgctttttttgctttcatgatacccacgtaggataaagactagttcaacgtgccacttaagcaccacgtgacatgatcgatgtccaaactgcttggggagacaaattaaactggtattaatagtggagagatgcaatttacctgtttacagttgagggatacaaaacagattcagcttatagttgatggaatcaaaatggacttctcctaagaaactatgagtcgaaaggcccatactaagccttgtaataaatgacgcaaaatgagcccataaatggcccaccaggggcccacctatttccaacgtgtgcaaacgaatccaagccccataaatggcctacacgacacaaggccgtaaactgcgaacgcgattactcgacaggataaagcagagcaacgggagccatggttctgcaccaaccgaactaaaagagccgttcgttgctccacttatgatttcgcagattagtgatgaactgatgatattctaatttttggtttaggcgtgctttagccacagaaattagaaggcatggataaatgctaccggagtatatactccatttatctcgaaatacatcttatatcaatatttgtggtgatagctaggttgtgtctaatccagtagtaaggtactacatccgttttgctgctgacttttgggcacacgtttgaccattagttttatttaaaaattttatgtaattacaatttattttgttgtgttgttttatcactaataatagtttaagtatgatttatatcttatgcatttacataatttttttaataagacgaatggtcaaacatgtgttcaaaagttaatagcgtcatcaattaaaaaatggagggagtactatattttgggatgaagggtatgttactttagaatgatgtctaattcgcatatctgaattctttctttttaagatattgatttcttaattgttatatgacattgtacattgaagctttattaataaggttttgcctcatggagtggtttattattcgttgagctgatgaaatagtaaacgtcttctccaaaacaaatgacaatactgaaacttacgtacttgatggccacgtcattcatgtcgaactcgaacttatagataatcatcagtcatcagatctgcgcaaatttactccaaggtcaatatcacatttgtagttcaataggcctaatgtcaacttgaagttaccaataggcgtgtcaactaaaaaaaaagatgggctctagaaacacaaatagattaaagtagaacacagaaggttctcaacatcactaaacgcaagggtaaaagcatcatcggtttcttttcttactcagaaactgataaaaaccagagttcagtggagggaaaattaattctgatttggagaaaattaactgcaaagatctgaggtccaaaaacaccctagttaatattcggagtaaaacctgaaaacattgggagtcagcatgggctgcaggaat

SEQ ID NO: 36942 - DNA, 735 bp, Oryza sativa
catcatgcatgggcgaccgtggaggccgccacgagcactgacgtgtccaaccttggcgcgccgcggcgaggcatcagtggcgcgtgcagcctgagggcgtggtgtcgaggcatatacgtacgtatatccggatcggacagacaaggatggcggacatatcttcaccctgattatcgaccatcgccgacttcagcgaccagtacacgcactaacaggatcgacgacaagctatctaacaacgacgacgggtggctcgagtacgtttcgctgcgacaactggcgcgtgtgctgcagccgggccgggcaccagcgcaagccgtagctgaccagtgccctgccaacaagcctgggcgcccgccacatcttcatccgcaccggcgccggcggcatcaaaaaccaccgattacttccacaaggcgcactgttccaggcaagccaaacgtctctcatttccttaatttgcatattatttcttatactctcaagctagaacatgcagcatggctattatttatcacgctaatacactgaaacactaggtcgaatacgtacgtgagctgagtagacatacacaaacaatcttttatactagcacaagggttcactacaaattgttcaagtcccaaacggttcagaaccagcggtccatagcagcacagtaaaaatttctaatgcacggacctgatgggaggaggtgatcaaccgcaggaggtacatgaggcagaggggcaaact

SEQ ID NO: 36943 - DNA, 673 bp, Oryza sativa
catgacatatcataaagatagttaaaatttccaatttgtgaaacagttggtatacattaagtgagtggagtattaccggccaataggtacgtactagcagcttctcccttgttcgggtctgttctccacccttgaacttgtagtactagtacgcactgtatggatatcataccgtttcacattaaggaggatatttatttataatacattcatataaaaatgcaatagtcataatcacttactactgtaagattgttagaaattctttatatgactggtgtttgtaatcgagagggtccaagactaccacggttccgtctttagggtggatgagtaaacagatataatgatcgctacatattaacaacatcatagttagttaataccagctaaaataagacatatgtgcagaagataaatgtacccgacttacttaaaattataagcggctaggacaactctcttattttgaaagtgcaagaagactcgtccaatgtactgtgcgacagtaatcaatttctccttgtgcaagcccttcttgtattcagctatctcttttgaagtcttgcccttcagctggtctgaccctggtgctaggctcacagtatgttgtgtttggcagatccgagttggatccaagaagccgataggttcttttgtcttcttagcatct

SEQ ID NO: 36944 - DNA, 1507 bp, Oryza sativa
cctgtgtggagaggcgtttgaagacactaaccatctcttcaatgtttgccccatcttcagaaaaatttggcttatggtgtgccaatggcaaaacatcccgggggcacagcctgtagatgacaacgcagcttggtgggctgatctcaatcaactacaccctaaacctttcaaattcagggttaaaggatctcttctcgccacttggtggaacgtttggttggaaagaaatagaagaatttttcaaaacatctcttacacagaggatcgcgttgcgagaatagtaaagaaggaacttgatctcagacacactgctttccaaccccctaattgtcttttctttttcggattccctttgttctttctggtttctcccttcttttccttcgatgtcttcccctgtattctatgaactgtttttctctcctctaatgaaattaatgaaattccggcagagctcctgccgtcgttcacctcaaaaaaaagaaaaaaagaaaactctattcactccttatagggtatccctcttttttcatgttacttaaaaaatcataaaaaaaagattaaaaaattagtaagataaatcaataggtgatatatcacttcacaaacatactcattcaaattcaacttatacatgtagaaacgaaaataataaatttaactatgaatataatgtatatataattcacggtcaaatttgttatttttatttgaattgtacatataagttgattttaacttgcatatttgtgaaaagatatatcatatattgatctatcttggtaaaaaaaatttcgaattttttatgattttttgaatgtcatgcacaatatgagaggatgttctctggaggaaaaaaatcacttcccgctaatagaatcatttctgttggctatacaaatagccacgtcaacttattgtagctaatgccagaaagtcaataatacaataatatatactatacatgtccatggctgcacggctgcacgtttatggacaagtatgttttttctaatctcggctttggattcatgattggccggttggccgctgagaagaaagaaggtataactactaagaaaagcattatcgcaagcggtcaaaacggtcttcgcaagcggggcggccgtccgcctgtaagccaacgactgtgaagatcgccgatcttcgcaggcggggcggctgtccgcttgcgaatataattttcgcaggcagacgttggctagtccggtccgcctgcgaaaataggaatcggccgcctgaaaaaaaaacttccgcctgcgaaaataggtagaaaatattgaaatttaataataatttacgtaaattacttttaaactatttaatagaaattcttgcaggtagaatattatgtacatatattagaagattatcaagcatttggtactgataaatgtacatatattacattactcaaaagtgttgccaaaatatatatattacaatattttttttacattgtcagggtaccgagctcgaattcgcc

SEQ ID NO: 36945 - DNA, 582 bp, Oryza sativa
atgtggcgccacctcttcgcctcggacaaatctttccaagcatttttattcgtgttcatgtcctttcgatcatatttatacctacgtgaatcagtttattttaaaatagagggagtaatcttagtcggtgatgcactgattagtaagtaggcacctaggccaactagttagaggatccaatatagtagccgtaaaaatattttccacggaatagatacgctactccttctggatcaaaataaaatgacacatctaattgatcgagggttgtttgagggagtttttggtagctgcaacttctcctagcattaagagctctctcaaactgttaaatatgtgatctgaattttgggaccacaatatattcggatttgttttctagtaggagtttctattaggtgtctttcttttatcccctatatatactcttgtaagccgtacgggaaggggtgacgtttccattgtgattcccttagtttgtaatcatctcctctatagtgattattgccggtcggcgcccatagttttttcccgcaagaatttttcatataaaaatttgtgtttccgttgtgcatctatttt

SEQ ID NO: 36946 - DNA, 2230 bp, Oryza sativa
tcaaaaaatcctaagctattattagaggggcatcaaacatacagaagttatcttgaaaggaggggctaagtggctatggagaagaggaattccacagactgctgcttatcatcaatctccagccaccgctggccttcgtcagccattttgcctcttcgcccacagttgtccagcaggaactcaacctctggccgcttccagtcgcccacgcaacaatctcagatggaagcggtgggctgcaccgcgcctcctcagcggttggcaaccaggaggatggaggtggccacgacatgagccccagtcaagaaatcaaagatgaatgtttttttttttttttttgaaatgccattgcaactttaacactgcacttcatttgtcccctgttaggatctggcatgagcacagatcacttttcagtttgccccatacgttaagaacttggaaattaagatagttgtaacaccataatgtccatcagaaaccttttgagacagcaatagaatgtaatctgctcaatctctgtagctgaaactaagctacctatgcctatgtacacagtcaaaaactcacaatgtaactgcttatataaccaggaacgggaaattagtaaagaaagacatgaattttattcagatagttgatcatgcatgtgcacttaaaaaaaaaatatagaactttcagattttggtcatacaaacaaagtaaaatgtaagctgtgcatattcttggaaaggttagggtatgtgtatattaatctgatttcatttagaagtattgaaaatcaacccagacttaatagaggaaccatcataaattattaatcatttgaattgtagaatagcatgcgaaaccagttggttatgaatctgggttaagtttgcatatgtatctagttctttactacgaaacacagaaaagagacaatagaagtacatctaagtatgcatatagtgataaatagtcgtagttctactaaatttcaataacttaacagaacatataagttttttttttctaccaaatcatttgtgtagcagaacgaatgtttaaaatcatactctcagaataaaaccacagtaaatagttagttaatcaatagtttatttttttccctgcatcaacaactctaatctagtaaattatagtcatgacatacagtcagtagcagtaaatcatccaaagaaatcagttaccatctatctgtattcaaggtgttccattctctatagtacatatcttggcatgattttcaaagtatagtaccatgtaaattactgcatcattcaataagatttattctagaatatgatcctgctgttgtgccaaattcagttatttcatcatgcaagcatatacaaggacttaattatgttagtgtgattttcattagcttttctaattccagtactgcacttgcatcagcattcattcattcactcatggcatacagaaatttattcgtccaaccctagcaagccaatttatctagaaccctagaaacagtaagtacaatcctgattatagcatcatcaagttggtcgctaggattagttcacaagcatcacaattcagagcatgctatcacacaagagagtaccaatcaaatcacatcacagaagtagggagaaaaggggatgatcagaaaggaggaactcgggggagacaagccatggttggctcaaggggtgttgaagctgggaaaaatcccaatctggaactctaggcgggtgtcttcgtcgttgggcagcagcatcgattggagagggttagcttgggggcaggctcatgagaagcatgaaaccgattcaggccggcagcggctgcggggcgcccgccgaagccagggagcagcggccggcgtgtgaggtggagcgccggcgatggcagtgagacctgaggatgcggcgggcggcggcacgggggagagcgagaggaaaagaaagagagcgagagaaagagagaggataggaagaaggtgggctaggtgggtcgttgtggctgatgggctttagagagtgggctttatatggggaataagttcactttaggtccctctatttgtcgtccagtctgatttttgtccctgaagcgcaaaccggatatgacccatcccccaacttgcgaaaaccggacaaacaaggtcccttggcggttttggctggcgtggcgcccacgtggctattttggctcggtcttcatctgacgtggcgcttatgtggcaatccgatct

SEQ ID NO: 36947 - DNA, 539 bp, Oryza sativa
tcttgaatcttgttaagaaaactgtccagatttgtggtattagatatgtcacatccacctaaaatctcttatattacgaatggaaagagtacatgtaaaacaagacaaatgattaatgtataattgattatgtattaactatcataaacaagacaaatatttgattttcattagaaatttcgatataggaagttttctaaacaatagtttgaaaagtatagttaagctccgttcgaatggatggatgggtcaagcttatgagctacacgtaaaacatgattagtgattaatgcatatattaagtattaactatcataaactttgattttaagagaaacttcgatataggaagttttctaataaacatactgtttaatactagtttgaaaagtatgctcaccataaataaggaaaaaccaggaagtactctcactatcaagaggatcaagcccggctttaatctgtcactaagaacatcatcggttctcttctcttatatttgcttacattctttattggtgtacatcaaatctgaatca

SEQ ID NO: 36948 - DNA, 564 bp, Oryza sativa
ttgggatactcacaaaaaatgggattttgttttcagtcaaatcattttatgatgcaatgaaaatagaaacaagtggttaccctttcaagaagatgtgaatttaaaatttcagttaaactcgaagtgttcatttggttagcacttatcttgactaaagataacctcattaaaaggggatagaaaaaagagaacatgcggagagcgcgtggagcctcatggccacgcgcgcggcaggtgagtgatgggtgggtgagcgacggtgtcctccgcgtctctcttcctcctctgcctcgcagggaaacaggaagtagtagtacaagaggtgagaggagtagtgtgtagtgcaatgtgcacacgtataccggtagagtaattttaccatccaacatttggtacatcgaggtaccacattttgcatataaagttttaaaacctcgaggtactaaattttatactacaaagtacctcgaggtactaaattttatactagaaggtatctcgatgtaccaaaaatttgtggtacgtacctctgggtatcaaatgttagatggtaaaattgctcat

SEQ ID NO: 36949 - DNA, 609 bp, Oryza sativa
gaaaagataaacgccgctgggagacgggcggcttgtgagctatcatcatacatgtgttgcgaataaccggttggctaccaatcaatttttctttactataatctgtgccacgcctcctgtaaacagcttagcgtatgagttaatgtggagatgaattgttaccaacaaaaagagatgaaggttatttggtgagggtagaaagaaaattcagttttttcctgttggcagcaattaatgcataattagtgacaaactgtagtggagtatcatcctatttttttcccagcgttgtcagtgaggtgtaggtgtggagataatgaactatatgccacttttagatgtggcaattaactatttgccattagacccacatatcatagacatatgtggacccacatgtcattgagataggtatgccaaatagttaattgccaaatctaaaagtggcaaatagttaaatgccccgataggtgtgtatgtactgcaaatgcatatatattttacattactgttcatacgcgtataataggaaaaaacataattgtcatcatccatacataaaagtgtttacacattgatccattaatccggaacccaaaggctcagtta

SEQ ID NO: 36950 - DNA, 581 bp, Oryza sativa
tatagccatcgacggctgctccttcactgagctaatcattgtctacccatggtcattaccgtcagtagctatcccgtgccccatcatcgctctgcactatcgctatgcctcagcgataggtaaatgcggaggatcccagagcctatgccgctaatggttgctcgtcgtggtggcacctatccccatagctcagtgcctcagtcaactggaggggcaacgacaatggtgctgcaaacagagcgaaggttcgtgaggacgatcatggcggtcaggtttcctcatgtgtttggccatcatgcttgccacttccatcaccatcagacttggcatggtgcttctgcacattgctcaacaaggctgtggcaaagctcaagaactacgagtaacctgttacgccaaagctcggctgggcctagcacattctcgtcacgacatggaggtggcggtgtggaggcgagaaagaaaaggattgcgcatcaaaggaggcggccaagggagagacaaagaggatccctctcaagcctagagcatggactaaaaataggtgacaatttttatttaattggggatcctctagagtc

SEQ ID NO: 36951 - DNA, 643 bp, Oryza sativa
ggctctttttacattatttctagtagggaattttttgttgttaaatgtgtatgatctaatggtgtagaggtccaagtggctgtttatgttttgtttgactcgctgacgcatcaaaatctaatccttacgatctagatatattatgatctaaaaatgtagatttttcttttctatagcagatctagaccttacgatctaggtatattatgatagaacggtctagaccttacgatctatatatattatgatctaaaggtgtaatttttttctttttatagcagatctagaccttacgatctagatatattatgatgtaatggtgtagattttttcttttttcttttgtctaatctttttttttgttttttggttaatatgggattttctaacccgtgagagtgaacgtggtggctttttttctaattacattgtatttctaatcggattcttcttaactggaattttagatatttccagattgtatttatagatggactcttacctaatatcaattatggcggcgggcctcggctagggtaacagtgccggcggcgacggctggattagggttagggtttgtttattctttttttttgtttcgattttttatttttccgtgcgggcggcacgcgaaaatcgattt

SEQ ID NO: 36952 - DNA, 680 bp, Oryza sativa
cggccatgatggccgcgagtggagtgtgtctcaagcagcaaggcggcgcgcgcgggaggggagggggggacaggcatgatggcgtggggagtactgccgcttgcattgccttgcctcccccgcggtggtgggacgctggaccaccggacatgcgagattgctcgtcgagattgtacttcacgggctgtctgctagcgaccactctcgttcgtttccagattatgtgtgtctaggtctcaggaattcttgtcccatatagtagaaattatttgttcttgccttacgtgatctcgtggcattccattccatggcttggtttatatggtgagatttcttctatcgctaacaatgtcatttgagtagctagtagcagagccagaaattttctaaaccgtgggcagtgggtaagcctaaataaaacgactaaaatcaagtatatatgtctaaattatcactaaagttgcacatcaaaatatataatgtttttatataaacagtccaaacgtgcatataaatgtttatacgttgaaaaaatgtgaataacttaaagcggcactgctgattgttcagaatttgctatttaaatctaagcattgatcatgagcacagagcacgcggtacaggaaagaaattcatttagccggacgttgcatacagcatagtacgtaatatgcatttca

SEQ ID NO: 36953 - DNA, 510 bp, Oryza sativa
taatagatacaattgcctcctcagaactctatccatgcgtggcaatcatcatgaagcacatcaacctaaaccgacaacgtatgctgtgtcatattgtcggattcggctcaatcggctaaccccgtctgactcgaactctgccgatcttagccatagccaattcggactccagccgattctcactctgtttccgggacgatttccatctcgatttcttctccatcttcgatccttggattaccaaatttgttcattaacatacccacatgttagtgggccccacttcctcacctcatcccctctcttctatatgtatcctatcccctctctcttctatgagagcagggttgagcggagagcggcggcagacggagcaggcgggggtggagcggcggcgcgcctgggccatctccattgcaccacctctctccactggccgagcgcgctgccgaagtgaggcgaggggatggcacggttggcagctagagggggttgggcagcgatcggaga

SEQ ID NO: 36954 - DNA, 1214 bp, Oryza sativa
acagtaaagtatttaattaaacaatattaatccaacgctatagagcatacccgttgcataggcccaaactttctgaacaaccattcctggctacacagttctatctccaaaccaggaatataccattccaaaccaggagctaaacaagttataatcaattacaacatcatatattatggtgagaggtgtgagactaatcatgaaagacattgttagacccacccataaccgcgggcacggctattcgaatagttttactctggctagaggtgtaccactgtacccacaagacacaacctcaacatcatgtcaaccatgcgtcgcgatacttaacaagtacccgaatagagattgtgacaataccctccgcataacacaattcaaagcagtgcaccattcctggatcataatcaccctcttataaaacaaggcatggactccccagcgacccccgtgggcttatctctgccacttctcagtctggtgcccacaatgaaccacactatacaaaatgtaaagccgttgcccacgctggcttgtggttggcacggttaatgtttcacaactgaaaatcgtgaaccggtccttaattgtcatgagcacgaccatcaaaaccatgtgctcacaacccacctttaccatgttttagttggcatcttaattaatcatcctatcatgattgaccttcatgagctaccattaatccatcattaagtagtagtgaatcattagttatcccattcatatgagctagtgtctctaagcatggctaagcatcctaattactttagctaaaaccatataatgttctagctaatccaattattaaccaggtgacaaagtataggtaatcaataacaaagggctataacaaaggaaataggtcgttcccacccggtgacattcaaaaataaatgcaatagttgaatagaaacaatagctttaaataggatcaatgtcacatcctcattttcgtttcaggatttataaattatctaataaattattaatagaatttatattaaatattctttaatttacaagtgaagtcaaatgtgggaaataaaatttcctaaatttaaagcatggatggatttaattttcattaaattctccatgattaattatactctctgaaattttctcggatttttcggagctcaattcctaaatgatacaaagaacagttcagtaatatttaatcattaatgatc

SEQ ID NO: 36955 - DNA, 567 bp, Oryza sativa
tatacgtatgtattaaaaaaccaaaaaaagaaaaagatacggaaagaaaaaaaacacgtcatgtatatacatatatactttatatacataaagtatatacatacgtatatttctaatatgtatatatgtataaaaattatatacgcatatacaaagtttgtatacgtcgtatatacaatttgtatatgtatgtatacaaaatataccaactttatgtatgtatatatacaaagtttgtacatctatatataaaaaggtactcacatacaaaatttatatacgtgtatacaaagtttgtatacatatgtattaaaaaaccaaaaaaagaaaaagatacggaaagaaaaaaaacacgtcgcctgcggccccatctccgcgcgcgggggagtgtaacagccctctctccagaaccgtgtagcccagaccaatcgacaagcgggcccacttacacataccaccccatttacactttcgtcctcgtttcgtgtaaaagggttaacccgggagtgatatggttggagggaagatgccttataagtcggttccactcgtgctaaacttgcaagg

SEQ ID NO: 36956 - DNA, 765 bp, Oryza sativa
  unsure (1)..(765): unsure at all n locations
actacattaaccgaattaacatcagtacgtctaccaaactaactccgatatattttctaaattaaaggactacattaaccacataaaagaattctggtaggggtttcttcaaccggtactatgagccgctctctttaggggtttcttgagtagtgacacatgggattgttagtgggcgggtgatnnnttnnntntnntnntanngatcncnngtnncttnnttntantnctnttttttnatttntntttttttacttttctattacatcataaatttcaaaaaaaatcgtaaaaaaaaattaggagaaaaaaattctaatactctcatttgtgtgcacagactttataccgtaaactttacacgcataaactttgtgtatagaaatattttatatataaaatatttgaatccaaatttgaatttgaatcgggtataataaacttttgacttataaatattcgctctacaaactttagatgtgtaaaatttaggtatataaacttactaaaagaggaaaatataaaatatttgaattcgaatatgaatttgaatcaggtatataagcttttgacttataaacattcgctctacaaactttaggtggataaactttagatgtgtaaactttaggtgtatcaacttactaaaagaggaaaatataaaaaatttgaatttgaatttgaattgggtatataaacttttgacttataaacattctctttacaaactttaggtggataaactttagatatgtaaactttagg

SEQ ID NO: 36957 - DNA, 692 bp, Oryza sativa
agagggagcttgatggtatgtacatgagtaattctgagaaaattaacgatttcgctttaaaggttaccacgaaaatttcatagagtatgttagttaatgaagaatttaagaaactaacttggaccatgatttattaagaaatatttattcccttgtttacttcattactttaattaatttgcacattattttaaattctaaaacaagctaagtaatttttaaattcttacaaactcaatacaattgaaacacttgatttgaaagaaaaataaaaaagacacttatgatgaaccaacattgtcatgaacttacgatgtttgtgggttgatctcttatgacaaaacaacaattgtcatgataagccgtgggattagttaatgatgatttgtccttaattttgtgacgaacatcttattttcgtcattaggccacaccgccctccaccaaacgtcataaatgaaatggtataatgacgaacaactccgatgtcacgagaaaattgtcatagaaggtcacatgtgttgtattgcgcctttccctcttctcctccgcctccccccttccaataaatgttcccatacactcgttttgactttggtcaaagtcaagtttaactaagttatagacaaatataataatatttataatactaacttagcttcatcaaatcaataattgaatatattttcata

SEQ ID NO: 36958 - DNA, 853 bp, Oryza sativa
acgtcagcgccacatcagccgtagacccgtggtagatcggttagatctcggcctttcgttttgtttagattagatctcagccgttcgttccgagactgcttctgtgcactcggtccaccgtgaacccgagccccgctgacgcaataaatcctttttccttttcaaaaataattctttattgcgtcataatccaatgaaaatctatataaatgatttaatccgatttaatctttaaaaattaataactaattcatcttagctcagatttagctggttcaagtctctcaatttctctaaaattgagatctacatgttaaaaatatccacatgtgctgtttatgattgtttatgtactgttttggtgatttttctcttttatgcttagattccgacgtttccagagagtccgattttgcaggagaagactttgaacaattccaaggccagcaaggcaagtcacacagatcccaaacaaccctttgtgcatgttgattgtcacgcccggaaattcactagtaatttccgaacttatttgtgcataaaatcctcgtccaggaatcagccgaggtacacaaactgacaatttaatatacaaatccatcataataataacgttacatacttacaaaagaaaagaaaacagcagtggaattacggtctagcgaagctccggctccactcccacaggcagctcaactagggtataagccaaacgtcttctccttcgcaacttgtcttcaactcaggtttgattgattattgcaagaatgagcatatgacatactcaacaagccacacagcaaatatgcaagtgcacaaggataccaaaggatggcataatatagggctcatt

SEQ ID NO: 36959 - DNA, 501 bp, Oryza sativa
tagaggatccccgcagtgtgaaaataacttcggttaaaaaaaatatttttagttttaatacaccatagcgaagcacaagtattttggctagtaaaagaccaagttaaattgcaatgtaggaccaaaccaccatcaaaacatactacgaaggtataaattgatccggtttaagtagttgaggaaccctccacactttgttttacagttgacaaatgcgaaaaggaaaaagtatactttgactccctcaactatcgcccgagtatgattcatgtcctccaaccacaaaaccgggtatatcgactcctccaactatcaaaaccggtacaaacaatacccctgggtggttttagaggtggttttagatgacacggcgcctacgtggcgcttttgaccgaatctttatcctatgtggcgcttacgtggcattagaataaaaaaattaaaagaaatatgtgggatccatatgtcattcacacaaataaagtattatgggacccacat

SEQ ID NO: 36960 - DNA, 529 bp, Oryza sativa
ggcaccatggtttcaaatgcacaaaattactcaaatttttcaaaaattttaaattgtgagtatatacctagttataagaattcgattcatacatatatctatcaacaaaacaactcaaatttaactttatttcacaattcatgattacatacctaactaattatatgtatggatgctatatacctagaatcaaaatctaacaaaaacaagttcaaattcagttcaaacttgctttgaactagttagtaaagtagttaatgttaatacctaaataattgaaaaagtttcatactcatttgaattggttatatactcaatttcaacaatggtgcccgggcaccatggagcaccaaacaaatttactatatatatatatatatatatatatatatatatatatatatatatatatgtcggtggtcggagggtgctactttcagccgcgggggccgggggtaaaacgctacatcccctgcgtccctccgaagaagtgggacgactggaagagcgactggttctacacccccct

SEQ ID NO: 36961 - DNA, 742 bp, Oryza sativa
ccatgccgagccagtataaatcacttagatcgaaatatatattaataatgagactatatatattcatagcatagccgatcagatagatctagcatgtatcggctaatactccgataccactctatactaagatatcaaagcaagtaaaatatatcaaacaaaagcctaatatacttaaatgcgacaagatcttaacataaagggcagatttaacatatcaatgaagcatataaggtaaacatagttaaatcaggtaagatcggctgaaaccccgatactaccctaatcggcaaccaagaaacaggctagagattgatattctaatcatgactcataagatcaaactcaactgatacagctataagtatgaaagaaggacaatatctagacaatcaagccattggaagtttcatagagtggtggatatcctatataatctaagccaacgtcattatttaacctaatcggctgccctccactgacagatgttagccgattataggttagatagcgatattgctagagattatgtaagatatatgataactcaacgaattacataaacaagattagagtatcataaagatggaagcactaatcccgagaacgcaagccgtcataacaagttttacctcttgttgaagatcaaaaacgatgcagctcaacctgaaagcaagaactcgtcgaaataaaactaaagcaaaaaggtggcgatgcgccgaaattgtattgaacgtgtgtt

SEQ ID NO: 36962 - DNA, 1368 bp, Oryza sativa
cggtgattatggatggatgcttctcaattggtgtacaaattaatgtatggattgtgcgtcgtgctaaattgttacttatatgtatcagatattcagaaggtagctaggcttgttcatcttgccgagaccaactcgtacaaaacttctcgtgcataaaaaatgttcaaaaagagaagttcacacacacataattgtgtcatacctgcacgtgcagtagattagaaggagggtttttttttcggttgtatacaccctattacgtacacggaagaagattaggagtggtggatttttaaaagatctaatctaatggtctaaaataacataacaggtccaccgatttaaataaaaatagagggtttagatgtttcttgccacgtgacggtctaagagtgtttatagagtgtcatatggcggcttagtagcgtttataggatgtttcatggacttttagtatacaataactaggaaggtagcccacggattcacgcgggcatgtatcttaagatgtgtttgagatacttatatagttataaggatggaatattaacagtagaacaccgtcacgcttcgaaaacaatttctatgtgcattttttttgtcatcattgcctgtaattttttttgtcatcattgcttgtaatttgattaatccccataagaagaaggaaaacttagtttgttttaaaaaatatatctaacaaattaacgtaaattaaaaatcctaaaaatggaattattagatcccaaattgataaattgttgtttaaatggaattattagaaatgattttaaaagcctagaagaaaagatctaattttaagtaataaattccaatataaaagtgggtaaatttttattaaatacttcccttgattctacagttcctagatttttcggggatttatttgagccaagaaagtatttttaataaatagaattgcatttcatgaataatttataaggaaaaaggtttaaaaatccttcttttggttttgggccgaaagtcagcccaagtctctctctctctctcaccggcctatgcgcgcccggctcaagccggcccagttcgcccctctctccctcctctctctcccgctgacaggtggggcccacctgttagggtcgtcttccacctcccgccgccagccgcgccctagctgcgcgcaagccgccgccccttccagattcggtcgcatcttttccgattcgatcaaattgatagaggggaaatgatccctttgatctcctctatcttttcccctatagaaactttagctaatttcgtttcgaaatcgtcggattcgagctcgattcggatttgatttcttccctccaaccctaaaccttccattgctgctgttggtcg

SEQ ID NO: 36963 - DNA, 720 bp, Oryza sativa
ccatgttgttacccatgtttcgccaaaaggagagccgctcgccccaaagacggcacgtgcgaaattcagttcacagtgtggcataatagtaagggaaaagatccccatcacggtcaaggactgggatcatgtatcgaatggggataaggaagtcctatggaaagagttgaagaaaatcttccaattcccggatggatcagaggcagcagtgaggaattgtgcactgcaaacaatggccaagtcttggcgtggttgaaaaaccaccttgaacacgaaatttgtgaagacaggacacacactgttttcgacgtatgccaacataaccctgaatcagtgggacgactttctgacgttgaagaactccccggaagaaattcaaaggagccaaaagtatgcagagttggccaagaagaacaaatttcctcatcgcttaggctccacgggatacgcaccaaaggtggagcagtggacaaaagaggaggaggaaatgaggaagaaggggcaaccggtaccaatggaggaatggacacagagatcaaggaactgggtaagagctagaactcctaagatcacggatgaaggaaaagtatcgtttgaatttccggagctgcagagcgttgccaataaaatagagaatttatccagttcacagaagaaaggatttttcaagcctaagagggagaaagatgtgctaagtacagggctgggtactcctgagca

SEQ ID NO: 36964 - DNA, 589 bp, Oryza sativa
tatcaagtaaaaggacttccattttaatcacgcaattgtgatctgataggatagttcaactccaagaattttacttggctcaaaaaaccacattttgccttccaaattttgacaactaatttgtcagcattaattttcttccttaatatatagacagactttaacaagctcattaactgtaataaaagggaaatttgagccttctttattgtacttgctaattcaatgtaaacacatataagctgtaacagatggtttcaaatttgatccttttttgctgtacaagctcattacctgcaacaaatgctcattgttggaaaataagagaggagatcaatccagaagtcagctcctctagttgccaagctgcaaacgcatgtgaatggaaaaaacaacaaagcgagtaagttaggagaaggtgaccttttctctttttctgaagtaaaggttggagctctgcccattatattaagaagttggtttcggaatacaattcgaggatattacatggaacaaaaagcaactgaactttcccccataaactccattgcatagcgaacatagtaagatgcacggccagtttattttt

SEQ ID NO: 36965 - DNA, 638 bp, Oryza sativa
ggcaacgactttaccttttgtatagcatggttcattgcagggcaccagactgagaagtggcgagaagtccgtggggttcgctggggtgtccatgcctctgttttttttgagggggtgattatgatccgggaatggtgcctgtggtgaattgtgttgtgcgaggggtactgtcacagctcttttccgagataccgtggtggtattgaggcgcatggtgacatgttgtggagctgtgtcttgtgggtacagtggaacacctctggccagagtaaaactattcgaatagccgtgcccgcggtcatgggcgggtctaacaatgtctttcgtgattagtctcacacttctcaccataataaaagatgttataattggtaataatttgtttagctcctggtttggagatagatctgtatagccgggtatggttgttcaggatagttgggcctgtgcagcattggggtgctgtgcagtgttggttaaaattgatgattaattactctattgttttactactcttaaatgtttgctaaatgctgcttttgcaaatgagcctatgtatgcccatcctttggtacccttgtgcacttgcatatttgctgtgtggcttgttgagtatgtcatatgctcaccttgcaata

SEQ ID NO: 36966 - DNA, 606 bp, Oryza sativa
gaaacatacggtgaagtagatcgatgtggcgatggcgatagggttcggcccaccggtggctggaggcgtgctgcgcacatgtgcggatcagaccagacgagataaaaaacggacttaacgcgtgtgcgaaaaaaaaaccttccacgtgcaaaaaaaaaatcagaaaaaaggcaaaaaaaaaaaaaaggatgaaccaacaaaaaccggaagctttatgtattttttttattattagctataaatatagacataattttcttcctcttactaaaataaatatataagaatggcttattgggtatgcagaagcatatgtattcacagaaaatatacaaccatctggaatctaattcggaaaatcagttccaacttgtatagtgttttttttaaaaaaatgttctctttgttcccaaataaattacttgttagatccatagcaacgcacggatggtacttctagtgtaacgttaaccggtcagccataattgaagctttaatctgctggtgtcatggttacactattaattaactacaggaaaaaaaaatggcagtaacagtcaacatatttttttccccttatgttgctgtctccgctaggtttggttt

SEQ ID NO: 36967 - DNA, 964 bp, Oryza sativa
tgagtatatagtaggcggtacaaatactcatataagaaaccgtgttgaaatatctctgtagctttggagaaggggcaaacataacatttcatgaaaattaaaaaagttataaaatcatattttgaagtcagcttatatgaaaactctataagtatatttgcaaagaaaaaattcaattggaaggatgggttattagaaaattccaaaacaatgcagcgctgaaaaaaaaatgaaagtaggaataatgcttgtcaagaaaaaattacaccccagtgtgccctattggaacatatgacatgtctcatgtaaaattgtttgaagtgcatgtcacttcgtcacacacaaataaattgaaataatactttatgatcaaagcagaaaagagaataacacagtacgtatagctagagatactaagggttggattctttggaatagcacatatgtattgttaatcggtatggactacacagatcaaccgagaatggaactatgcaggttacaactcagaagtacctgtggctttaatcctctcaggcaaccatggtttcagtgtcactgaaacaccctgcaaacaacgctaacctatgaaatcaatgttccattaaatattaaacaatagtagcagatatagaaatgactatagcacaagaaaaatgttagctaacatacatagggccagcactgattttaaaaatgtagtaattgcggtctagtaaagttcacaaatactgaaatcttcaatcgaaccaaataaatatttgttcgctagatgtacaacataatctgtgattactgccttgacttatagacccaatattgacccaatgtattggttacaatatgattcgtagaataatggagcttcctccagataggaggctaaaagacctgcaccatgaaatcatatcattaccttaatatcggcacaattatctgtctatactgagccgtaaagaccctg

SEQ ID NO: 36968 - DNA, 671 bp, Oryza sativa
gcctgcaggtcgactctagaggatccccatctgaaaataagtacatttttatacactgacctaattcatgtataaaagtaaacttatgttgggatgggagaggtgtagataaagtaagggattgttcgtttgagctaacgatgggttatcgcgagcacgcttttcaagtttctacacggtattatctttgtaagaattttctttgtcatcatttctcgaataacttttttaaatcaaccttttaactttctaatatttaattcatccgtttgcacccttgactaattgtcatatactcagatttattcatgatccatcatccatcggcactttagaaataggctggcagagcataaatgaaaggagaagaaaacaaataaataatgtatctacggagcataaataaaaggagaaaagaagaaacaaatactagctggacaggtatggggagagtgatgatgtttcatactgatctatctatatatgcactgattgagtatggatttgatgttctaggcctaaccatatgataataacttgacagctctatgtatatcaattgggtgttcttggctcatttgattctgtataaattaagggatataatgaacagtgcagcttgcttgaaaacaaattggaaatattataatcaaatgatggtaattatatac

SEQ ID NO: 36969 - DNA, 655 bp, Oryza sativa
  unsure (1)..(655): unsure at all n locations
ggacgagggggggggggggaaaaaaagtttttaggggaggagaggggggggaaaaaatacgcccccaaaaaccccccgcggaaatgagcccaccgaacccccnnnnngnnnnnaaaaacaccccaaacaaaaaggccccaaaaaaaaccacaaaagaacttgggggggaaaaagaggggggggggggcaagggggggaaaaagggggagaaaaaggggggggggggacgggggggagggaggcgggggaaaggggaaaagggggggggggaaaaagggggggggggaaaaaagggggggggaaagaggggggggagaaagagggggggggaaggggggggggaagggggggggggaagggggggggaaaggggggggaaaaggggggggaaaaggggggggaaaaaagggggggaaaaaggggggggggaaagggggggggaaaagggggggaaagacggggggggggaaggggggggaaagaggggggggggaaaagggggggggggggagaggggggggggagagacaaggggggggggggaaaaaaggggggggggagaaaaaaggggggggggggaaaaaaagggggggggggggaaaaaggggggggggggaaaagggggggggggaaaaagggggggggggggaaaaaa

SEQ ID NO: 36970 - DNA, 667 bp, Oryza sativa
aataagggaaataaaagggaacccgtagaaaacaaagaacctggcttatatattctagtggattttgctcctagcctacatgtaagttagatttcatgggtaaacgggcaaagcgggcatgggtagtgattacctatatccatgcccatttacccatcgggcatagcttttgacccaataagaaacccatgggtataaaatggagaacaaacccaaccctaatagggtttttacccacgggtaaacgggcaaacaggcacaattgccatccctagacacaaacaacttcctccaaaattattcttgtgcttattttctacgaatcatccaaagtcataaactctagtgttccttttaaaacactataggattctacatgacattctatattattgtgttttttctgtccctatggttttagaatcccacattccgaaggagccctaaaccagtactaattcttctgttgtacaaaatgtcatcttttgtacgtagccaaatatattgatcaataaagtttatcaacccaatgttttatggttttaacattttagttttaatcttcaaacatattagatatgcatcctactatgcattgtcacataataggtgttggatgattatatattgttagaaaacaataattcttgatttcttgtcattttca

SEQ ID NO: 36971 - DNA, 555 bp, Oryza sativa
gatcccctttacatcaagagttagaatctacatcagaattatagccgatagctcaaaaccctatcgctatcggttggtatctgcatcggctggaattactctaacggcttgttagccgatcagctcattgatctactatttgtatatcttgtcagttgcaggatcaaactgactggcacgcccgcatctcaccaacctttggacttgcactggagctaagcagatctcccatgctagtgtgtgtttttcgcatcaacactcctcaacaagtctttccagggaatataatgcttgattttgggcccttttttaagaacttaatatatgccttctcctgttgttgcaaggggatgtgtatcacactttttaatgtaaaatttttaggggcaataatttttttctatttgtgaatataaaactctatgggcttcgaatcttctggagtaatgaaaagttattgctccatgtcataaaaaaatggaccgcccggtaatatcatcagccaaacgagctgtcagatacctcaaatagtgaaacatcacaaaggtctttcaa

SEQ ID NO: 36972 - DNA, 641 bp, Oryza sativa
atagaatacatataagaatttaaaattcaaaataaaactaataaaattaaagtagaatttagagtacatatagaaatacaagttacaaataactaaaatttaaaggcatatttgaagttcgctctcataagacatgtaaaattatattgtcattttaatatatttgaataatacattgagaaaatatatatgctattataagagagaaaatataataatgctagccgcacaatctgcatgggccactatgctagttttcctaaattacagtggtacgtagccaatatcatgaatagtagtcgtatttatctaaaatagaatatttgtagtgacattgatgcaattaacctcatttttaaagtgagtttggcagtttgcatgactaacagtgtactggactcatttgcagcctatagctacacaagaaagctcgacacggctgcaacgagattaattaaaagttactagtcaccgggttgtttaatctctctattacgtttgataccgaaataatatcgtcagagatcttcaccgactacatgaaaaataattcagcagatctagtgcatgccttgcaaccactaccaagtgtactggttcatctgcaatttttggcctattatatatgcatatatatttac

SEQ ID NO: 36973 - DNA, 575 bp, Oryza sativa
ccaagattttcctgcaagtcttaatccgcacaatcaattcacaataatcgctgtttctcatgtgttgacaagtgctcattcccaaacgataaatttacaatggaggacagaaaatttacaagtgctcattcccctttggtagaacatatattcactcaggtacattttttactatagacgacgtacctgttaacaaacaaaacattgtcataactttatcagaaatatcgatcccttcctcaaaggtgcttataggattccactttgtaagaaacttcctgttgttagggcaagccggccggcgggaaatagcccttgtgtaaaattattatggttattctatcaacaacgacgactcaaatctgatgtggtgatggaattgtcgtggatacatgacttcactaaatgatgtttaaatcttaataattataattatataaaggtggttgcaatttcaataaaaaaatatgagtaaatttcacaaaactacaggtatttttgaacaatttatcacaaaactacagatttaagagcttgtttcataaaactacagatttagtgtcttcgtttatcac

SEQ ID NO: 36974 - DNA, 617 bp, Oryza sativa
tcctgaaccatgaacagtattggcttttctaattttttgagtagcaccaaataaccaaccgtgtaccaacataattggaaatatagggtcacacacagccacgtgatgagaaatggggtcactaacatggatgtacaaactataattaaccaaaacgagctctgtgaatccgagtctatctacaactaccattaccatgttctatcatctggttctttttactgaattacaaatgtgtacaaaatttaatatgcatactacaattttaatatactttcaagtttcaactcaccaaatcaagcatcaaaaacttaccaaactacatcctacatttggcaaatacttaaggatacatgacacaatatctattgcttcagcaggcattcacttgtggaagatctgcagtaataccattgcaaaattacttcatggagaactcctaacggatgatgcaagttatatgcatagtgcacactgaaatttcacgtcttcatttgtctgacaatgttgactcaaactgcacatacttctcaatccaccaatgaagtattgaatttaaatggtgcagtattacgagagtggtccacataccttgtgccatagacatgcttttatct

SEQ ID NO: 36975 - DNA, 690 bp, Oryza sativa
  unsure (1)..(690): unsure at all n locations
gcattggaggaagctgtccgtggcggccatggaggacgacatggaggcagctgagcagaggaagacgaaggcggctagggcgcttaagcttcgcgacgacatggccatgtntgcgtcgtgcatgcaacgatcgaacacgtactagctgctgtttgcaacgaacgaacgatgcattgttgttgcattttgcatggtgttgggctctacatataggcagccatcccacgatcgatcgagagcgacttgtcacacgtgcagagcacgcttcaagaaaacggctcgtgccagttgccaactagtgtgaaaagattattttctttcttttccagcttggctttatgagaaaaagtcatggtcaactaactggcttgggaaagtctaaatatagtataattatactctctcccattatttcctagctatatacacgtcgcctaaaagtgcatgttgtcattagtctagaattaatatattattttgtaaggtgcgaaataaaaaattaatgattccaaaacttaggatcaatgaatacaaaattatacatcatcgtggactctccatttagtttttcttgattaaatcatttcaacatttaggattagaacaaacaagttgtatttggtttggagtcaattataaatttccattaataattataaaagtatgggtaccgagctcgaattcgcccta

SEQ ID NO: 36976 - DNA, 905 bp, Oryza sativa
  unsure (1)..(905): unsure at all n locations
tcttgggaggatcnnncccgagnnatttnngatctcccaatgggcctgtattnaaatttgttttatgggtacccatctatttatganngtgtgaggggcggtnngcatgtnnggtatanntgcatanntgagaatttggctttaaaaccctttatgggatttttatcagccaaccgaaagttaagctatagttgaagcttaagctaaatcttaagctaattaagggattataaagcaacttcttaccttcggaaacacattgagttctatacgtagcaatcaattgaatcttagttgatgaagaaagatgtgtatgacatacttcaacacaacatgatcttaatcgcgaagattattaaatatgctagcttcaattaatccagcccacaatttttagcgagctaaacctcaattaattaaggccccatcaggaacaggaaatttataggatcactgtatgaatagccaggaagattccacatgagattctcaccaaaatctttgtcgaattccttaagtacgttgcaaaatggggcttagtggaactgcttatcaaacagaaacaagggttggtgtttgtatggaatcagatttgtctgcatcgttcaataaattccggtgactatgcgcaagtgaattgccacagaacagcaagctgacgtcttcgtagtatatttatttggaatcgcagatgttaactatctttctaaaactttgttaaagttagagaagtttgacttacgacaaaactaaaaccacctcagtcgttttacaatgtagtgcccgggaaaacctaggcgttatccaacataatcgccgagcaggacatccccccttgaacaggcggagcaacacctgataggcccgcagcgatcacccttcccggcagttgctaaacgataatg

SEQ ID NO: 36977 - DNA, 948 bp, Oryza sativa
ccggcgtcggggtggccggcgtgtcgaagaggaggttcttgatggaggactcgaggacggactggtacgaccgggacgcgtgcgtgtagacgacgccggcagggaggctcgcggcgaggcagtcgagaaagccggcggtctggttcgccggagcggctgcggcggcggccggcgcgtggtgcaagaaggaaatgcaagccgcgagcagcgtaaaagcgaagctcataggcgccgcggccatcttgtagtggttagatgcttagtagatcattggtttgcttattgaagaacatgctgttatttgtggctatatttataattagtttggaaatggaagtcattagtcgttgctgctaattgaatcgagtcataatcagagggcgtgttatgtggtttgcttttgcttccagaaaattaaaaataataattcgcaaaaaaaaaaagagagagagagagaaggaaattccactggtggaagtcattgacacgcacaagcagatcatcggattcgattggttgccatttggcaagccagaatgatattctacgatttttggtcaaggaaaacttcttggtttcacaatatttttcaatgaaatgatttaaaataccttatgcttataatttcgtttttccttgaatatatactgacgggagagctacagaacgcaatactatttatgcatgataattttcgtttttaacctaaaactgttaatgcatatttttcatgttagtggtaaacttgcagcactatcatgagagctagatagcgctagctccagggaaaccaagcccctcagcggagaacacgagagtgagggtaattcgttgtccgtttttccggccggatcggcgagacaatgtagaagccggcgaatttggctacatttaactataaaaattaatatatatatctatatgcttattttcactactagaaaaagc

SEQ ID NO: 36978 - DNA, 656 bp, Oryza sativa
atcccccgcgtgcctgcgcgcttacctcacaccaggggtgggtttatcaatacttgccggagtaacgcgctcacgccctttgtcgcaaaaactctatgatgttatgtggaataccctctgcaaagaaaggagacgacatgtgctggaagcgagctaactggcctaagtgtaacactatctctgaaagatccgtgcaatgaacaatggcaagtcaatctcatcgataacactgcttgttgatacatgtatactaactttatcatatgccgccaatggagtgaacgatgcacacatgtctgatgccgtacaagctccatccactgtgcgtgatcgaaacacattgtcactaaagcgcaccatgtgccgtgctaaatgccttacacatacataatgatgagaatctgatgcaggatccatctgcctttcaagacactcatcctatgaaaatgctgatcctgacggggccttaatctattacggcatatctcgataagaatatgtgcctggatgaaatgaagctaggatactccatagattttccagatacgatcatggtaaactacaagtatgtcatacacatctttcttcatcaactaagattcaattgattgctacgtatagaactcaatgtgtttccgaaggtaagaagttgcttt

SEQ ID NO: 36979 - DNA, 647 bp, Oryza sativa
agtatttttataggaactgaactaattaggcctagttctgttgttctaaatggataaatagatgatggattatttgattttctttctaaaataatattctagggttcaagcgaatgaagtaactattataaagttaaaaaaatattttaaaaagtattctaaggaacttatatatgtagaaaccgtttgcaaaaatcacagcttagaaagcatgactgtgataacctgtaatctataagaggaaaagaagaaggcccttgtaaaattcttgtgtttcatgtgaataaattagttatacaaaatttaaaagttgatctaaagatgtattacaagaaacttatatatagaaataggaagctttttaccaaaaaaaaacgtaccatttaggtgctttgaaaacatgaatgtgataatttattatctgtaagagaaaaggaacatacctcaagtcctgtaaaattcctatattccaaaggaatcttgactattgctatagaatattatagtaaaataatatttttctgaaatgtttggttgtatatacacttgtggatatagagaccggatttttatccattatataaaaaaaatctcagcgaaacatcattgtgaaatgatcgccgcgaaacaggtttctggatgtaaaa

SEQ ID NO: 36980 - DNA, 564 bp, Oryza sativa
tagggagtgtgaactggagatggacctcttcgatccgcagtggctccccaccgcccatggtcgcgggctccacgggtgcactccatgccattgccactgctggcgccgatgtgttcctggaggacgaactttgggctgacccgtattaccacgcatcaaccctagcctcccgtcgccactgctgtgcaaggactgactgtccgtgtagcagctttgccccggcttgggttggatcggcaacgagaggaagccgagatgtggaggcaacggcactggagggatggggcctcgggatggtatagtccacgtggcgaacaaggacgtctgggcgatggacacggtggacggcttggcagcactgtgccatgagtttggatgaacccaggagtcaagtagcagcggtgccatgagtttggatgccggctgcgacactgctagcttgtcgaagagcatggagaggcccgcgccatggtctagacaggctcatcaccagggatgccggtcaaatgtggccattgctccctcatgtgcagtggcggtgaccgccaacgggtcctgcaacac

SEQ ID NO: 36981 - DNA, 1609 bp, Oryza sativa
ctgaaataacagtaaagggttataccctgtgaaagtccctccgcttggattgtgagacagaactgcctccgttggtgttgtcgatcggtgcaccagctcccggatccctaaaaacctgatcacccgcctacccagtgcagatctcaggcgaaggtgtagttccagaggccctgctcgttccaatctctcgtgcgcgcaagcgatcagaactggggaagcagtagcagcagcacaggcagcgtgaggaggaggaagaaccagtgtttggaaagcaatgcaggagatctgatcggggttctctctttccttatagcgcaggagagaaatccgcccgttgccgtagtaacgacgtgatcaatggatattgaatcgcttgcccgttacagcatcgcctcgccctcgccctcggcccgggcccggccggccggctcggcgcgagcgcgcgtgtggctttccaatccccacctcaaccggtcaacagtgagcctctaataactttctatttaagttgagatactccttaacatttattatgggcccttgagatttaaatcgggcctagcccatttattctaacaggtacatgtggcggctcatcgaatccaaggcgccacagacaccgccggccatccctatcaagccacctgcaccgcctgaacatggtgatgacctcatgctccagcagcagcatcagcaatagcagcaagccagcaacagagtgtcatgcaaatgtttgatcctcttcagatgctcccagggatgggttgaattcggtatctgttctgcagttatgctcattacttctctgtattagttgggttgttcctccgtgaatccaatgcttgttttatgtacctttgttcaatgttgggggagattggaagagagtagaactgaaaatgaggaattgggagaattatttaatgaaccaattagcttcatgctaatcatctcgtcaacttcttggtaatgttgggtcgttagttgggtatataatgttgggtcgtaagaagggcagcggggaggcattgccggcggtgggattcgggtggagcacaagaccaagagaaagggtgagaggatgagggaagagagaggtagaagatgagggcagttttgttcaatacatgtaaaatatgaattttagtggcaccattgagattataaacgagtaatagtagcatcattacaaatatttgaatagtaatggcatatttccaaactgggatattttcaatggcatggatctaattaacccttaattatattacttggattggaaaaagttttggtgaggactatgcattgctatagaacctagcatccttgtcagcccaactatggtagagtcatgcgatccgtcacaaaagcactaacctgtgaagggctgaaaagacccggttgaagattcggccttatgacctaacccaacactgatgatgatgcaagttatccgcctgtcaaagattactatatatgaccatcaccaataatctctaatctataacaactataacaatacaacccgttagagataaaaaaaacatacctctaacgggttattctctctacctgtcgctgatgaggccaaactcgtcatcgctgcatt

SEQ ID NO: 36982 - DNA, 759 bp, Oryza sativa
ggctatggccatctcgccattggaggcgaagggagaatgggactaaggtactacagttccctaccccgaccctgagcacaggatatggatccggtcatctggccaccggaggcgaagggagaaggaggcaaggccggagcttgtggcaaggaggtggcagccactcgtgtatttgcaggcaaagggggagatgagaaggaggttgatgcttggggttgcaggttgcggcggcgccgatgcttgggaggtggagagggagacgaggtgacggccaacactcactgatgtaggtggtgccgttcaacattcgggcatttggctgtcgttggatcccctcccccctcccctagggtcgggtcacttctagagaattgatcttttgttgtggtacaaaaaacattaagaactgatactaaagatgtatttagtactgattctaaaagtccaagtcctaaaaacatctttagttccggttggagttaccaaaaatacatcttgagtaccggttggtaacaccaaccgagactaatgatagaggatctttagtcccgcttgataacactaacccagactaaaaatccatttttagtaccggttggtaacaccaacccgagtaaagatgcttccagggttagttcaaaaggaaagcacatctatccaagttagatgtgtggagttggtgggatggttagacgtgtgagggctgaggtgacaggtcttgagttcaaatccctatccccccgtccccaaaactttttt

SEQ ID NO: 36983 - DNA, 595 bp, Oryza sativa
tttttgcaaaaacaaaattttatataaaagttactttaaaagatcagattaatccaaattttctaatttattttagctaatatttaattaatcacgcgctaacactactttgtttcacgagctagggaagggagcgagggttcccgaacacatacccacagctagctccttgggcatttttttttttgagataatcccttatatgccactgaaaattggtttgatcccttatatgccactgaaaattggctcttcccttatatgccattggtccaaatttgcgcaccctctcatgccactaccgtcaattgaccgtgtgttgactgttaactctcaagtaaaaaagacatatttgctctctctgagttgttaggcatgccctataatcagaagggtaaatatgtctttttttcttgagaattaacggtcaactgacgggagtgacatgagagggtgtgaaaatttagatcaatggcatataagggagtagccaattttcaatgacatataaggaatcacaccaattttcaggggcatataaggattctctcttttttttttcactgggctactgccccccaccggtaggtaccct

SEQ ID NO: 36984 - DNA, 602 bp, Oryza sativa
tgatatatagctagaaacaagtcaaattgcaagctatttgggaagatacatatgcgaaaagctggaatgggatctatatatgtgtggtgatggcgtctgtatgataagaagcatgcaggtataaaagacaggagtttgtgaagttatgctgcatgtactgcccatatatatgcacaaaattcacaattgcattgaaccctgtttgctgcttaaaattgaacatgaatgggtagtttcatatatagctgagtacagttgcacatggtcatcgtgtattagtttccacattaacataataacataatatcatctatcttctattacatattaaaagtccacaaacgctctaaagtcgtcacatgacacttctataaacgctcttaagccgtcatatggtactttttaatcttaccgttgattttcatttaaattggtggacccgttctaatctcactgttgatttattattttacactattagcttagatttattattaaaaaaaataataacttcctcctcctgtatatatgatacaaacacgactgctgttctgatccgtaggaacgtacgtacgtacgactgaaaacacgtaggtagtacg

SEQ ID NO: 36985 - DNA, 563 bp, Oryza sativa
accattcctatatttttcctgtgtttttcaattctttttttgtcaaaatcctgtgttttccgatccctctgttttttctaccctgcgattcaaaagggcccttagtaatgagaaaacataggaataggaaaaacgcgggattttgataggaatgtaagtgtaaaacacaggattgcaaaacataggaaaacacagtaatgatcatttgattggaccgcaggaaaaacacaggaattagaggagagataaagactcaaaggaaagtttctaagaggttttaccgcatgttagaattcctccaaaacttgcatggcattagacaatctataggaattttataggattccataagatccatttctttgattcaaatggctacgtaggaaaaatttctataggaataaaatcctttaaaattcctataaatttcctttaaatcacagggggcctaattgttttttcttctattttagtctccatcgtaccagcaatatcgtaggttcaagacgtaattgaccagctccagcagtgtgcggccgaattaagagctcgtcgatcactca

SEQ ID NO: 36986 - DNA, 927 bp, Oryza sativa
ggtgtcggattgaatatgcttgcaagttctgttggtagcagcaaccgaggatcatacttccatcgtattagaacgtccacactaactatgtagagtactccctctcctataaaaaataacctagtaattaatctttacatattataaaagtttaagatatttttgccaatattttggtacgtcatctgtatttgagtaggttttaatacttttttcagttttaatctctactacttaaattccataattttagaaagggtgaaaaaaaatcatgcgggaaaagaaaacgcatcgtaatgaaacgcgaaagaaaaacagcgaaaaaaagtccgatccggactggaaacgggaaaaataatgtggcggaaaaaagctgaaaaaaacagaaaaagccgactgtacaaaaatataaaagtcgccgatcgtaaaaaaaataaagaaagccacgcgaaaaaagaaactgtcgtctaaaaaacggtgtacaaaaaagaccgtaaaaattaccagagaaaaaaacacattataaaacagcaaaaaaaagtccctctcttttatccgccttttttttcttttttttttccggttttatttttttcccatccgctttttttgtccttatattttattcgcaatttttgtcatgagaaagggtctgtgcacattgtgaggattctttttttttatctacccggttttttcgtcgtcgggccgaactctagcaccaccgccacatcgatcggccttctcatgctttccctcctccaattgattgaaaaatcaattctccactactccatcatcattttccccataattttttcttttatttccgctttaatttatcagattcaatctctatatttagaagacaccatttatatcctagagttttatggattcgctgcggttttgataaaaacggaaaga

SEQ ID NO: 36987 - DNA, 1067 bp, Oryza sativa
cattatgcacgtgacaccacactcggatcctaccgattaaatatgtggttttatgatactccatcttaaatatgtagttctgggataaatttagtggttaatttgtagttttatgaaacatcaccttaaatctatagttttgtgataatttagctaaaatattatgaaatttaatcaaaactttaacaccggccaatcaaataacaaaaattttgttcatcaacaacaataagcatgtgctcttaaaaatataggcgtaccaatagatacactgattttgtggtaggataaaatggacgggagatgattttctggtaggataaaaaggatgggagaatgagatctcagaaaatggattaagggttaagatgtactacaccctggcttgatgaatgagtaagatcacaagataccctttagccttgggatttggaatattttaatcctatagataaaatttctagaaaacctggagaatttcaatactacaggagaaattcataaggtctttgaacaaacatttgaattaaatcatttcctttataagtattcctataaaatagataattccatatagattacgggaaaaaaatatctcatgtttttttttctacctgcaaactttaaatcatttttttgaacattcaatatattgaacattaaaagcacaaaacgtgcactggagatacatgattgtttttccaaagagcagcttgtaagagttgctttgtaggataagtattgtcattacaagtatgactaatattttgataattcagcacttcagattcaactttaaatcggggcgtcctcatttgtgtcaaggagaagtttcctttctttttttttaatttcggtaggaattcaataagcatgtaattccatttctatattttcttctattttatgttttttacatgcgttttacagggttgcttagtgggtgggatgttaacgattccgatatggcactacccgttccgaaccttggcggtacgacgtatttcacgtaatccggtggaaaaccaatatattcctaacaaatttcgtgaactaaaatttaaaca

SEQ ID NO: 36988 - DNA, 857 bp, Oryza sativa
gagtaggtttttcgagagatggccaagacttgaaggtattcttccagtgacccaggttagggttggctagtctaaaggggatccggttggtttcaccgatgatgaaatcagtgtggtcgagattgtcgattaggccaagaaaatagtggtttttgtgtgaaaggctaggaatcgcgactaggttggaaaggtgcaacaaatctaaaggaattgggaagcagaaaacatgaggagaaaaggagaaatcaatttcatgcgaggaaaagggatctagctggtgaggacttacctcagcgtactcggccgatggcgcagtagaagggctggtggaagacgacatcgccgcgggcggagatctggtcgggaacgaaatcgcctggagatcgccttgtgcgtcggggagatcgccggagagagagagggcaaagttggtttcagtggtgaaaacggaggaggacggtgtgagatttctcgagggtaacggttagtatttaaagcacggcagtaatggtcggaaaacggcaaggtgcgaaacttgctcggagtcgatttacagcaaatccgaaacattatcaaatattccgtacttggggggcatgtgttaacaaccaaatttggtaatatcggcatcgggaaagaagattggatcgaagcaaagtcggaggcggagatcgagttcggaagcggatcaggaatcggctggagtccagatcggctacgagtaggatcggttgggtctgagtcgggctaggtaagccgatgcaaccgattccgacaatgcaactgtatgatatcgggttgaattgaggcgcttcaaggtgattgccgcacatgatagagtcatgagaaggcaattg

SEQ ID NO: 36989 - DNA, 585 bp, Oryza sativa
ccgcacgtttttaatccaacgggagagggtttgcgcgttcgtgttcttcaatatcatgggacatttaattatttgccagttttaagatgtgccaattaatgatttgccacttgctgttatgacatgtggaccctcacgtgacaaatcatttaaaaccactcataagagtgacaaatagttaattattccaatattggagtacggtgggggtcggagttttataagcccatgaagcggcccaatatctgagcccaataaccttgaaaccggcgtcctcaggttatccttgcacggaagagaagtctgatgagccaattaaaaaaaaaatcagaacatgagtcattcacaaaggaacactacccaaaaaaggaaaagaaaagaaaagaaaagaaagaggattgagacattcagtatttcagtgctagcatgttgtatgcagagtccaacagagagttatttttgctgcttttttattggcaggaaagaaattaaacttaatggcgatttcgtttctcagaacagaagaaggcatcacatgcaaatgcaaagactagagcataaccaaacaacatggatgcattcaag

SEQ ID NO: 36990 - DNA, 1831 bp, Oryza sativa
taatacatgttaccttgtattctaataaaccaccaagctaggggattctcaagaaataaattttttcttggctgctacacccgccaaggaaaatcttcgaaaaacttgatatatattaatccgtacatggtctttgttttaattttttatttaaaaataatcaatggatgcacctctgctcagtgctcaccctgtatcgtggacgtaggttgtcctgacggcgaaagacgacgtgcaccaagatttgacggaactcatcctactcctcccccctccccgttgccacacatgccaagtaataagctccttactgatcttaattatatatcttgactgtcagattatacagatgaccacattatcttgaatttttaggagctgcagcatgtactgtacatggaactaaatttgtttaacttttgttgcttcataggacctggagtacgtggacgccaatattggagcagacccaagaacctgacaagagggagccggctatagttacttcgatcggttttacttaacaataaaatggaaaacgtacctgcagccctgcaggagcatggagtatttccataccacgaagcagatctatacgtgtcataatgggtgttgcaaaaatctttttcttcagtttgtatgtgtgtgtatcttacgaggaattaatggattctaatctttaaggatgttcactcatgcatttttttaaaaaatccactacaaatagtcctgaaaaattatgataatgtaaaatatagtgacatctatcggtacaaaagaagtcaattttaaattcgatctatacattgagaagaaaaaaaaaagataaattcagatgtgaacaatacgctaatattcaatcatacattgaatttgtctttatatatatgtatatatatatcttcacatgtagtttggacctaagattttgtgaaagtggtatatttatatatgttgtatgactgttatccagtttttcaagaatttttgtaactgtctagatgggttttaaacaaacgatgggacatcctttgagatatcaaaataatgtccccaccctgcacccttgctcactcctttctcaattgtagcacctaagcttgttttctcttcttttacttcacatatatcactactgaaaaataggggaaaaacaacactatatgagtcgccaagtccacaaccgatacctatcgacgtttgatatcacgactacggtatttggacagtatggagatagtcggtaccatggtatatgcgagattgaggtaaaagagatggagacatgaatttttatacaggttcgggccccttatctgacaggtaatagccctacatcatgttggccgaagccgatatgctctttattaatctggaccacacaagtacaatatttgggataacctatctgactgtcgtcgacttggcggcatggataatcagctcatagtcaatgacagagtagtcttcctcctcaaatataaacccgtcgagatcagaaatggcgctagattcctcttgccaaccttcacaggcaccggatggggtatatctaggctaatctctaatatcgagatctggcggcgtgtgttggcttgtgtatatgttgtgtcttgttgatcttgtggcttgtcccctctcctcctaggggggcttgtatttatacccataggtgcccccttgtccaagtaaaactagggagaccaatatggatacaatccgattagtccttatcttttccatatagaactctactcatcattccttatctggaactcctatacacgaggtttgtttccgtataagacatggtatatggtgggccctgccg

SEQ ID NO: 36991 - DNA, 541 bp, Oryza sativa
attgtctgcttgcccccgcatcgtcctccctcacgggcgacatgggaggcggaaaccgccggcatcgccgctccccccttcctctctctgccgcctcgccgccgctggcaaagccgcgcggccacaagaacggcggcggcggggcttcgtcgccttcgtctgcctctcccgtcggcggtgggggcccgcgcgagacagcgaaggctacccagatccgggctgccgcggccggatctggcggggaggccgccggcggagggtcggcctgaggtggcggcggcagttggtggtggtggcggcggggattgaagatggcgggctggcgacggcagttggtggcggctggtggcgggggtgacggcgttgggaatggtgagggggcgccagcggcggggatggaggtggcggcgaggctgatgacggcgggtggatctggcggcgaggctagcgacggcggccggatccaggcgtgctgcaggccgatctgccccccccccccccctccccgcatggcgacggcatcggggcggctgcgttggag

SEQ ID NO: 36992 - DNA, 763 bp, Oryza sativa
atttgaagatgttaaattacttctactaaactgatctctttttttgcatgcgaggtcctatatttatcaccaatctttaaaagtgatcattatttcaataaaatcgcatcttttgctcttcattatattttcttttcttcatgctttaagttgtaatatagtaatatcaatctgttccatcaggctattgaggaaaatggagtagaagagagccaagaagatgctgttgaggttgatgttgaagctgatggttcgactgatggtgctgtccttgtgaacggaaatgataccgaggaacagtggggtacgaacaacgaagaatcatcagcataaaagctgtagttgagcaagtgtacagtcctaaaaccctttttttggtcctcgtttatcctcccagtgcaccaatgatcacaatgaaaacttgatgctggtgtcctcaaaaagaaagaaagaaagaaagaaagaaaacctgcttctggatacaagtgtttattctggactatatcctttagtttaatctgttgggataatttcagttataatttcattttggtattcgagttaatctgttggtctgaccagttttcttagacagtttgaacatgagagcaaaatttgtgcttgctatacatgagttgttgatgttttctaacgactatcttgccttttgcagtattgactcctgaccaatagtgaatcagcgggacagcaacctgatacactgattcagcttgtaagggtgaagtgtttttcatctatacaa

SEQ ID NO: 36993 - DNA, 1034 bp, Oryza sativa
attttaatggcgggtgatgatctgaaagtggctagctagctttgatcgcagatcataatttcttttttgttgagattgtgatcgatcaatgcagcgactaagatagattacggggatttgacagatgttgggaagaatggcttaggaagaagattgagagggaggaagggtgccaattggcaaggcgagaagaagaagaggcatattagaaaagctggcatccaacgaacggaatatggacgtgcagtggttgaaggggttcgtgcttctcgatctctgtctccatttgtgtgttggggttgactagtgtacatagatatgcagaatatatgtgtgtgttgtggccagcacgcacggccctctcccccgcgctatttttgggctttgccatatgcttttacatggatgcatcatgggagacaatcagtggtttaaagacattatttttttgtcaatggtttaaaaggcactaatcttttctgaacatcctctgaatgattaagaagtttacgatcattggagaggaaaacaatataaggtgctaaggtacacattttttttcatatatcttttttctgactacatcaaagacagtaacacacacggctatgtacgcgcaccattctcgtataccaacgcgtgcgccctttaacgcatacttaaaaagacgaaggtcaacggcaatttcatgttctcactcaaatcctattagaaatgtatatgtgcatgtgggagtacaaaactcctctagcgagaaggcaagataccctctcttgagagttcgggtagggtgcgagttcagagcccatgagtatagcgtgcgaaacaaaagaacaaaataggggatttatataggttcaggctgttgataagcgtaatacaataatcctatgttcttactatatgggaagatgatcgagttgttcaatggatgatgtggtgaaatggaaggtggtgaacacttcttcaacgagtttttaaggctagatctaacctagtctacttctagagcttggaataaatttttcggaacc

SEQ ID NO: 36994 - DNA, 830 bp, Oryza sativa
gcgtgcttttttttaaaaaaaatctaccttgtaagataaaaataatagatcaccgatttaaataaaaatcgatggttggattagagtgccacttggcgacctaggagcgttcgtaaggtaccacttggcgaattaaaagtatttttaagatatttaatgaacttttatatataattatcttttttttgaaaattctaaggagtatgtgatatagtagcttagaggtgtttataaaatgtttaatggattttaacccccgcataggggtggggagggagggagagaggtttggggtttttttcttattaaaaaactaacaaatcaatagccaaatgttttgttctttttttaagattttctagcattttatttaatttaatagcaccacgtagcagtttagaggcatttgtagaatatttagagtcaaagagcgagaggtgctagacctaataggtggaggtctctttgtgattttttaatgtaaaaataattttgattatgatttctcatgaacatagctcgttggtacgtacgtgacgggaggttcggaatgtgtgctttttttttaaaaaaaaatctaaccttctaatataaaaataatggatcaccgatttaaataaaaatcgatggttggattagagtgcacttgacgatctaggagcatttgtaagataccacttggcgaattaaaagtatttgtaagatgtttaatgaaattttattatataattgtctttttttttgaaatttaagattttattttatttaagtatgtgatatagtagcttagaggtgtttacaaaatgtttaatggatttggggatcctcta

SEQ ID NO: 36995 - DNA, 602 bp, Oryza sativa
cttcttcaaggctaacaacatcaaacactttgaatgtaaatggacatgttgaacaaagtaggaaaaggaagaaatactctgagtgacggaaatgtttcctttgatgtttctcagcaaatgcaaggttcggtttatccactgagcaaccaacatgctcctattagaagtaaaagtgctgctgatagtatccagtttcctgttgaaagagattctaaatcagttgaccatttcgttgagaagaaaaggtccaagagcaagaatcatggtagctcttctgatggggggttctgtctactgtttttccttcaattctcctagtttggtttcccgtatgaattcactctagttgcatcatttggttatgtttcttttctgaaactttcttttattcaaatacaggccatctcgtgaaaagatccaagaagcattcaaaagtaaaaagcaagagagagatggatcatgatgaatacagaacttctaggaaaattaagaaagaggagcggcgccagcgccagtctggcatagattctaaccctggatatgatttagctagtggagacgttcctgatgaggccaaagctttgccttcaaaatcgatggcc

SEQ ID NO: 36996 - DNA, 764 bp, Oryza sativa
tagaaatccaactaaaagtataaaatttaaacttgtggatgaaaaataaagcgtcaacggagaatccaataaatcgttcggtacaagcaaactaaggttttcataaaatcaaaaggatgcaaccaaatgtagataacttgcccgcaaccaaaatattttttcgataaatagggaaacgtaactctagaactttgttataagtctaaatgtcagagcacaaaaaagccgcaaggtttaaatgcaagcaactattttcttttcacaaatagtaaccaaaagtttatacaaaatttaggtaatggagatttcaaaactaaaataaagctttgaagtccaaagagaagttgggaaaagataaaactttatgattgaagaaatccaactaaaagtaccaagttgaaactcaattatgaaaatacaaccgtcacgcgagaaacaaaagtaaagtttttatataccagatatcaaagttcaaaccaacttaaggaagacgaacggtgataaccgaaaaatatggaaactccaaaaaggatatttgaagaatcgatgcaagaagaacgtttgaaagtaaaggaatccaactaaaagtaaaaaaacataaacttattgatgaaaaatgaagcgtcaacggaaaaaccaataaaacgttctggacaagcaaactacgattttacgattttcatgaaagtgtactgttccttaaaatagaatataaagaaatggatttctataggatatacatgcacagcaatcaaactgaaaat

SEQ ID NO: 36997 - DNA, 652 bp, Oryza sativa
actccggtctaacccctccttctactcctctcctcctcctcgttccgtttttctacttcgcttcttgttccaagctatgaaggtggagatttagggagagcaatttgttgtagagggaagagatgcgaacacaggaggaggggagtagaaggtgccggccagggagaggggtgacggcactatgaggggaggtgggattcggttcccctctctctaggtttcaggggagaactaatggcctgggtttatgggccttctcacgctggcccacttctaaagatatttttcttttatttatttctgttaacatttttattttaacaagtcaacccaaactaaaaaaacctaactatcttttaatatacggggtattacaccagggaggcaggaaatacatcagatgtgatctgatctcaattgaattgacctacaaatttaaagcaaatccaagggatagaatcctagcaacttaagagataaagaactaacaaactccctaacaaactctaaaccggaccacacactattcctcgtcacggattgccgtcgttgttcctgttgcggcgccgtttatactataatccccacatgacatctctccctccctggagaagcaactcgtccgtgagttgaaaatctggataccgagacc

SEQ ID NO: 36998 - DNA, 543 bp, Oryza sativa
aatgttgacggtagaactatccattttttttttcttttgaggctaaaattatactctaagaagatttggtggaccaaaatgtactccattttttttctgcagcttgtatttgttagttctgtctgagaagctccctagtttctcactgtcaattcgatgaacgtggcacgggctcactctgctctctcaatatacttggcataatattttgcatatcattccgttcaaggtttttcacatgtgagaactcccttcccctcaagatctatgtggtgatcgaacaattcgaatatgtatttatatggcatctgcctatgtaatatatgtcgctttcaaaaatgtcactctacagctgtagagagaggatcaagcgcgatcagtagatcgacaacctgtttggcaccattcaggagatcacaatctggatagaagcaggagtcttcaattgttcaggagagtagcatcctagttgtaagctgatttttgcccctttcttttgggaggatgttttttaagcattctcctagtagctccgacagcctc

SEQ ID NO: 36999 - DNA, 1119 bp, Oryza sativa
ttcaaactcatattcacagaagtacatgctttcaaaagttctcggtcatatggagcaagataggaattttctttttctcaaaaaggcaaggatgtatgctatggtatcacgatgaacgaaatgatgcgatgcatgtatgaaatgatacagtgcttatgaagatatcttgtattgcatacatgccatagaacaatccttttaggaaaattgttctcgagactattcatcctactcaaggtttttcatgggcatgggaagggttgcaactctttataggctataggctaggataaggtgacacaattaaatatttttttaactcagactcgtaacaaacttctccttatcgtggaaaaagatgataattttaaaacaaatggatcatcttcgagatgttttcaaaacctacaagtcaagttcccaaaccatgtttgtgagttgctgcaatgtacaaatcttgcatccgaccgtaaaggggcacaaaatttgcacactgagccgtctcaacttaacttacatagtttgcttatgacttgttcctagtatgatatttccatttaggcttgtgggtttctaaggtcatggtattctatcccccttaaaataaaataaaatttagcaatggtgtttatcaagaaattttaatggaagagctaaataggtctatgtgctagtctgccagatgctgtcctatccaatcccaaggcgcaaactgaagcaaaagactataagatgcaaccaaatgtaaacggcaattttcataaatagggagacgtaacgtattttttggataaatagggagacgtaactctacaactttgttataagtctaaatgtcaaagcacaaaaaagccgtaaggtttaaatgcaaacaactattttctttccacagactagtaagcaaaagtttatacaaaattttggtaatggagatttcagaactaaaataaagttttgaagtccaaagagaagttcgaaaaagataaactttataattgaagaaatccaactaaaagtaccaagttgaaactcaatgataaaaagacaaccgtcacgcgagaaaccaaagtaaagtttttataaaccagatattaaagttcaaaccaacttaaggaagac

SEQ ID NO: 37000 - DNA, 887 bp, Oryza sativa
tatataatgcaactaacaaaaggggtaatggagggatctacttaaattgtttggtaatttgggttccacaaatcaaattccatgtgtcaagcaaaaatacacaatgcagtagcatactttagttcctctcttgccaacaacgtgctaaaaaatcatttaatagatatatgcttctggacagggataagcttaatttcccaattatgccagtgcaggctgtacaaacgaaggtttgcttgtatgctaatgtacagatgtaaatataattgctcgtacaacaaattaattttccatggtaacagaagagccatatcccaatttcacattaataccaagaggctgagctttttctcatgatagagaatctaaaaaagaaaataacaaaacctattgacgcaaccaaagctgccagcttatcttgcatctataccattgagagtatgaggtacattctgaaatgctaaatcgagcacatgaattatcataaggatagtcctaaacattctagtacatattaagtttatgttcctagcttgttgtacatgtcactgtgagagtattttaccggtaactgtgaagaaacaagtagggcggctaaaagatgtttcatttggcagaaagtatcatgttccattttgcaaaaagtatctcactaatttctgttaaataggactcatcagtggatttcccatcaggtattccaaatatcatttaagcagtaaaatcaacgtgtgtgtgctccataagaaaaataaatgaagcatgacaaattgtattatgaaagaaaatactacgtcgtttttactctgcataatctctcacaaaatgtagatctgcttcaatcacacttgaagctctgaccctagaaactcaatcacacatcaaat

SEQ ID NO: 37001 - DNA, 4275 bp, Oryza sativa
cgtcgaatcctacaaaatcgtatcagctcgggtggcggtaatcctttgtggggtaagtcgtaagctaagagagattaattttatagtccttttattaaaaaaaatacatgaaggtatcaaatttttatactaaaagttttaacttgagatatctagctagttcatggatgtactaagctttacattaaaaaaatggtatctctaggtctcggtacctttaattttcaagaataataaaaataccccagttataatatgatccagaacttattgtttgtgtagtaaatggatctatatatattctgatatgtgcagtttattcaagtgttaatgtgttatcaccaggaactagactactagagaagctacgctaattaattaaactgatgagcatatatactctcctatcattttctctcacgtccacgatttaatctgacttggagttatatatatgtttcagacccgagacacgaccctccttgttgctaggatttgagcagagccaagtacaaagtttgcaccttaattttacggagaagtattgtaggtgtggtgatggagttatgggggcaaacaactccattgaccaaggttttaatccttgtgtaggcataatttgacataggtatttccttactgtcttgcaaacaaactagcaggatgatcggcatttgcgcgataagatctactaaagtttatagcttcaattcatatatatattacactcactttcttcatcgtttaattgtacaatgttatccttattctaatgtaactttatagaatgtttattttttttatttcgtcgagattgtaatactattgtaatgctaatcaagcacatctatcagtgtcgaggtctgctaatgaaaaattcctctcatttcaattaagtgaaactatttctatttcttcgtgaaaaattctatatatagtgctctttttcgatcgctttgctctcgtccttgtcaccgataattcactttgtttaaccaacctgagtacctgaccttcatgaggaatcatcctcgctaaattagatgaaaagcaaatgcgggaagggcatagaatgattcattgcggggaaaaatagcgtgttatgtgtactgtgtttctaaaacaaatagcgtgttatgtactccgtattagttctatataatagaaaaactaggtgggcacggtcacacggagaaagaggatagagtggtgctgacggggctcggggataccggatcttgtgctattaatgacgcacaagggaaatgaatgagaaacgatgcgctgatactgcccacctcactttggcttgagagaggagaggagagagatgtgaaacgagatataaacttacagccagcttaagtttaggaactaagaaaatctgtgagaaagacggatggaccatatacttataatgaaaagctaattactatatgagtgagctgagagataggctataaatatctatacaattaacagctggctgtattgttagccttgctctgatgctagctcctgtttcgccctgctccgacatagggggaagtctaattcacatatttttataatagatattttatctgtttcaaaatactataacctagaattagattatacacaatctagtactacaaatctgaatctaaagtggtcctagtgctatgaatctaagagcctgcttgggggagcttaagattctgagaagcaactgattggtagccagcttctgagaatctggagaagctagatttcctaacttctggcttctagttcattttttggattctacaactacagcttctcagaatctggaccaaaagctagactgtttggggagcttctgattctgggagaagctgcagctgctagaaggtccccagaaggccctaaataggactgtccaaattcatagtattaggtgatatctaattcgattttaaattattatattttacaatggagggcatcttccctacactcatcatggaaacatttccttcacatgcgtcattttgtaccatgaacattttgcatatctgcccccagtaaactagttttgatattttccatcaatcatgcatgctcgtcctttgaaacaagcgtgcacaataaacaaccgaagaaatcatttttaggacatgttattccagctttactcacatatgctgtgaagaaaaagttggctcacatttgacatgatgaacaattattaaacatgtttcaaaataccactaaactcataaagtgagcatagctaaactgattagatcttgtatggtggaacaaacccatgtgagtttaagttctaaacttcgcatgagtgttcacatatgcagataattattcttttagggttggcgacaaaagacaacaagacgtactagaaaacccttaatagggactggctcataggtgtcgatctaattaaaaccggcagttataatatagtataggtacccggcatttcaaaatcagtacctatactcggcacccatggtcaccctgagcaccgacgaggagcggtatgggcagcggcagcagccggatgtggtcgtaggtagaacagccaccctgagcacctcctcgttcgcaacatgattccgacgacggagatggcgatggcgcggtggaaagcgtcggccaccaggtgagatggggagtgcgctccatgccgccgctcctcatcacctatgttcctcgtccctgctctgtattgtgagtagaaggcattggcggagaccgctcctcgtcctagcttcgctccgccgccactccgtctcaaggccgagccaccgctcctagtgtcgggctccctctcttcactagctgtggaatggagggaactcgccaaccaccttgcagtgttgggctagagagagaaggaaaagagaatagaaatcaagcacatgaaaaagtgactaacatatcagaccgcatactgacttagctggttagacttggtcaacgtgccacgtcagcgaaaattgctttcaaaaccgttgaggaggttaaattacactgtttcaatagttggagggtcaagacagggttgagagatacaaattagattggagatatatttgagggagttaaagtggatttatttcggaggagaaaatgcctccaagaacaagagtgcccaattcttgtgctgtttagccacattgggccatgtaatgggttgtactcattcttcttctaactaggcgaaaccccgcgcgttattatggaaatttagtatggtaacaataaatagaaataatgtgtaagatagctggatgatataagcttacatatgttgacgtggtttacaataatttaaatagtatatataatgattatttaaatgtgaaagtataatgtgatgtggctttatgagagaaaaaaagaggaagataatttaaactatagattaatcatccaagggcaataaacaattgaagtggtatggcttaatgagagaagagagaaataatattaactaagtgatggcgaactatataagcatatataagatattaaaaaaatgatggagagatatattaaaatattatgtgaattatgtgggatgatgatttaacatgcttgcatttcaaagcactaaaatttaacaaattatagaattatagataatatagtatacttacatgatgtttaagatgtaataattgttagtggatgatgatgtgcatttttgcatgttaagctttataatttagtgggttataactttatagtaagatgggatagtggaaaaaatggctgagtggctgtagtaggtgagggggagagagagaaaaaaaggggttaaatactcgcttgataaattggaggcgtcttggtggctgcggcactggacctagttggatcgagttgctgaattactctattggtgtgtttggttgggtggaattgttaaggggaaaatgtgagtttgaagggtggcaacttttaaatctattgtttggttgaatcgacatggggggttttaggaggaatttggaaggggagtataagagcgaaccctcatcttttcaatacgtggatagagacaggtaattggaaggaaattcccatctaagtacgacgagatataccagagccatatatcatcacttagaatttaattcacatccatactccccatgattcttatctctactagtaccaaataagaaactagaagtaaaaataagactcccatgaatttccaatccccttcccatctcttaccaaagccgtgtgtccagagagagagagagggaggcgcta

SEQ ID NO: 37002 - DNA, 2112 bp, Oryza sativa
tgttgttggggtgatgaagaagtcgttgagggtagtccaaaccgaaaaaatgttaaaattacccgattcaaaatggaaagattagtttaagaaaggtccaaagtaaaattttgccaataaaagatggcctacactgtaattctctctaaaataaaatccaatgttcctgtcaaagaaaaatacctcaatcccttgcaaattcgagttaattttatttgtataagcagatagtacatatttctttgatagcttcaagggaggaggggatgaaggagagaggatgaacacgagagagaaggggatgaaacaagatccccaacaaacaatcagtcagcaaagaccacattcaaagacaaactatcggttggcaaaatttttgctgaccaacttcaatggttggaacaagtctagtcggcaaagaaatttcccaaccaacatatttttgctggtcgaccatctgaccccaatagcatatatttgccgaccgatatcattttttccgaccgacatgtttttcccgacccaccacaattaccgagctggtatcggaaactttttgccgaccgaccataagccaccaaagtttattattaccgacagattgaccgtcagtaaaaatttacataattaccgaccaacaatcggtccataaaatttgggttgccaatcatccgttggggttggttaaaaagttataccgaccaactgcctattggtatagatggatattccccgtcggaagtcgatgggaatgtatggacatggtgcagtgataggcaccgtttggacttgactggtgcacggtctatttttctccgttaataaccttatatatattttaagctgagtattattattatcatatcattataccgtagcattcgttacaactaaatctttattaacaagatcttgcatggttatatccagataaaagaaatattgatgggagcttctgcaatatgtttggctctatggttgtgtaggaatgatatggttgtgtaggaatgatatggtttttgacaaatcatcatctattacatatatgcaagcaattttcagggcaacctattggctccggttttggacacaactacaaaggtgtaatgaagatggtgagcttttaaaagttgcatgtcgtaagcttgagataacggttatgcagctttttgtcaattatggatggagattcacaaatagacttcaataatgtgttctcctgatcttgttttggttaaatttacctttgtgtggtcatttcttatgtcatttctgaactacacttgttttagagtgctagattgtaataatgagctgtagctctctttgagcaaaggccgggatgactattccattatctaaaaaagataaaagaaatatatattgtaaattaattttatcatatatataaattacttttggatttgattaaatcacttcttagatatttatgaaagtaaatttaataaagacaaaaagtattttacacaaattataaaaaataattaacacaaaaaaaagtaatttagcacagaactaaaagtaaaccagttgtggaggtaagaacatgagtctatctaaaaattaaattgaattggcgcaaactaccgaactaactaaaaacaacaataaaataacatattcataacattatgaatgcctaagaagtaatttaatcaaatcaaaaggtgatttatatatatgttaaaaagtaattttcacatataataaagcaatttataacacatgtatttcttttatcataacgtaattatataagattttgttagaaagatttaaatgcagtgaacacaatagtataatcggattatagattggataagtaatttaagagaaaattttatttgaattttatgaatattttcttttttacatgctttcatactcccacgtggagaaatcatacatattgaaatgatagctggttataactaattagtgtacagtgcatatttgtgtccttttgagttcttgtacctacatcttaacaatgccacaagcagatctccataatctaacaattccagcactcgccaccaaactttgacactactccctccgttccaatatataagaaactaggaccattcg

SEQ ID NO: 37003 - DNA, 1577 bp, Oryza sativa
tctaacataagtatgttatttttttattaatgtaaggaaattatgtagtcaaagctatgcccatcaactatgacaagtccaaagcaacgttcttttgtgacacgaattcgaaggattacggacagctctaacgaatagtccaaggcgaactgattttctggtagtttgaatatgtttcacttgtctttcaaatatcgcaaagccaggtcaaggtttgcaaggtttgtcaatattttattatcatacattgatactataatgcagctaaagatgaatgcaaccgcgcgttcgttaagatgacattaatgataagttgattttatgtgctatctttgacgctgagctcacagcctcaaaagtcatcaggtcctatctgatatttttgattagctgatgaccaactcaacacaagtaatacccatactaaccagtatgtggtcaatatatatatactaacatcagagaatacatgctattatgatatagtagtataatcatcataggagacatcacttttcagtgtcagtactctactcctcgaagcacatcatggtctgaactcatgaacaaaattgtttgaaaacagctgctatgttctactctatatttagtatggctatatatcaaagttcaacaagagttacaagaccgtgtcaagtcggcaccctctgtttctttgccccattcttttggctgaacccgttagcactgaagtaatattcgcaatctagagcgtaattagttttgaatttacgtaagttaactaacaagttggaacatcatttgtcagcaaaacttacatgatggcgaccatgcaaaagtaacgtcatcaataattacacaaggtaactagcaagtggaacatcattgtcagcaaaaaaatacatggtggtgaccatgcaaaattcacgtacgtcaagtacgttgtcatctagtcctacttatgtaaattcattaacaactgtctatctaggtaaaacagaggatgtgattattgacgtaatattaccttgtcaatctgttctttgtgttaaaaaaaatacaattttgtttacctggatctacagttgatcagttccatccttggttgatgtacaggcaatgtctcaaaagtctcatccaatggatggacttcctctcttgctaccacaggctaatctgaaccacatcctgaaaagaaacataacaagcaaattaaatatagaagtatatctgtaatatttattgtatgaatggttaggaccgtacgcaaatgaaaacaatagtgatgaccagtcaagagtacctataattccagctcctggttgggataaggaggcatgttcaaatgaattaagaagtctggcttgcacatatgctgtttacaacaaataaaactgtagcatttaaaactagatatcatatagctgtctgtcaataatttagtttgagtaaattatatgtcgctaattagcacgtagggcgccggaaatcaatagatcttgataattaacatgcattgaactgatggttcagcttcccctagcttgctattcagtaaaaaaggaactgccaatagcaattaaagatgcaggtca

SEQ ID NO: 37004 - DNA, 3738 bp, Oryza sativa
aaaattggtgggagagacaaaaatagtgtacatttcacactttatatgccctagtctgtactaagtcgttcaacgaataaatagcatattttgggagacaaatccagtggaattatatatttttatgatcaagtacatctttacacatctcattggaaaaacttaaaaacacctatattgtagataatataatggtatatggatcttgtagctgcaacatccccctttcaatctctcatcaatttccggtctatggggtggcaggagagacaggactgtagtgttccccattaggatcaaagcctgctaatcataagaatattacaaggcattttctatattttaattgttaaacacgcatgcatggaaaaaaattatgtacttctccattatataactacaaacacagactttcagtactaccgctagaaaataaattttgacatgttgttactcatgttctaaaatgtatttcaagttaataaaactaataaaatttaccacgactacgatatatttcattaagtaggcacatataatttataactggcggagaagtaacctggatttcggtagaacagaattcgacgatgcctattagttgccaagcctagaaataaccgacgtactggatgcttcttctcccagttgattactatcccgtgagatttgtctacattcactgcaaccaaaaacaaaataaagatgagcacaataagccattcgtgttttccaaaaaaagaataaaagtgaaattgtatgatttgccttaacaaacagtcgattatatgatttatcattgacgagtacgagttttataatataccatcacataagccattttttttaccgttttgtcattgtcatgagttgaccatttgttgacctctattagccccaacgaaaagtccattctgcctttaaaaaaatgtaacatacactaagcaagcacatattttcttcactgatattgaaataatagtagattttattgtattatttgcaactggcagcaaaatggcattagatattgcaagggtattttaggtattatgaaaaatacaaagagataatggaggttgactggcggtgatggaaaaaaaaagggggaaaaacagagggtatattgtagaacttgacaatataatgaaaattgtagaatttttcaaaacgtaatgtctgtttcatactatttaacaactgatcatgcatgcatttatttcattacagtagtaaatgggaaaatagctactggaagattttccatcaatttttagccatcaaaagcgataacactatatataatttccggccccttcgaagtgtaactttgttcatctccaagtcccattaatccattcaaaatcaagacaaccaaattacacctgattaataaaatgtaaaaaaagacaaaacaaaaggacatggcaattaattaaagaaacaaatttgcaagagagctcacctccggcgtgctcacgacggccggcgagacatccgggcagcagcaagagggacaccagtagtactgccacctgcaacgagacacggagcctccggcgagcagccgccattgcgatcgctcggcctctcaattcagatttcagagctaattaagagatgtgtgttctcgcaattcagatttcagagctaagagatgtgtgttcccgcaacgcatgcagggagctatttcaatggccggccggccgagaaggagacgacgaccagcagcggcgacgtcgatggaacgacggcgacgtggagctttgctacttgctactccctccgtttccaaatatttgacaccgttgactttttagcacatgtttgactgtttgtcttactaaaaaaaatttatgaaatatgtaaaactatatgtatacatataaatatatttaaccatgaatcaaatgataggaaaataattaataattacttaatttttttaataagacgaacggtcaaatatattttaaaagagtcaactgtgttaaatatttagaaacggagagaggatatctgcttaggctgattcgtgtggactcgttcagtatgaaactgatctgttttgggtggaattcctgcatgattcctacgttaattacagacaattattatacctacttggtctcggcatgtattggcttgaatatttggcatctgaatgcttcagttgtacttcaaaggtagagaaaactagtgaagtcaggtcaaggtaatattattaacttactatacattgttcacgtcagtagctgaaattgactggaatcgtgaatcgtccggtaaatatgagcattattgtcagttgatggtttcgtcagcccatagagcgaccagtttgtggtcaaactagtttagtatacgaaaataaattatggtaaggtaatcatccaaggagtcatgaacatcatcacttcatctactcgtcctgtagccttaaaagtgtcattgacattcttctaatcatggtttgaataattgaacacatttgtttgaacaatacgactgatgtatattatgtgtatcaaagtccaacaggagttacaagaccatgtcgagtacgctcctctgctttgtaatattctaatctgacgtaatagttctgaattacatacacaaggtaactagcaagtggaacaacactgtcagtaaaaattatatggtgaccatgcaaatgaaaagtcacccacatcaagtgctacctgggaaaattcaacaacggttgtctgtctgggtaaaacagaagatgcatgagattgctcgaatactattaccttgtcaatccgttctttgccttacaagaatcatgtttttttttttgtgtgggtctactgttcatctcatcttcatcaacgctcatgaacaggcaatgtctgaagtatcgtcgaatgcacagattccctcgcttgccacccgaggccaatatgaaccaggtcctgaaaagaaaagcgacaggcagattacatatagaagtacgtgttgtatggataggttcatatgcgaaccgtactgatgttttattcgaccattgcctataattttacctactggttggataagcaaggctcgttgcaaaagcgtgccttgcagatatgtatactgttaaagtgatagcaacaaaccaaactgtggcatataaaactagatcagtaagctgtttgtaaactactctctccgttctgaaatataactctttctggttatgtatctggataagggtatatccattatgtatctagacaagggtattcctagatacataactagaaattgttatattttagcatggaggtagtaaatgataagttgttaagcggtgccttgtactatttaccacataggtcactggaaattgatgtgttccatccaatgaggaaggatatggaagactgattagaaggatagttttctatgtgcatagaagtgttccatctaaaatcacttgagtagcatgtgactaaaatgtcttattagtacaggtgttcagaaaaatgattcataaaagaaactgcaggtatagcaatttgaaattacaggtcacatggataaattcacaaattacatggactcaacatgaaatacactttgtgcataatacattgcatgccaaaagtcagtttcgtttgcaagatagtaagacaggtcagaaagaaccaatatggaatggagaggattcttgtcaacacaggaagctactattatttagtgttgtgcatctatccatccaactgttta

SEQ ID NO: 37005 - DNA, 3128 bp, Oryza sativa
tcatgaggaaatatgtcggcagattttcagcaatactagaaatttactcactgacttatatcactttctactaatgataatactggcaatgaaactaactaacaaattgtagtagttatgagtgcatgctatacataggtatagcgttgaaaatagtaaagccctctttgaaatatagaataggaaaaatataggaattaaaattgtatgttttttcaatcttataagaaatgagaacatagaaaataggaagaggtcgttttgattgcaccacatgaaaaatttaaccaaacgaaagtttcacaaaaagtctacatcttacttatttcctatggaattgatcataggaatgcctatggcaattttcctatactcttccatgaatcaaagggctctatataaaaaattcaaagaaaaatgaatcctccaaaattcctctgtcaattctccatttcaatgggatcctaattaagtagctagaataaaaatgtgattcatagtatcggtattgttaccaaaaacagtcaagtagagtaaaaatgtgattcggatccttaagcagtttgttcagcgttacaattaacgtgattaatcgtattggttgtctatttccagccagcgagagtacaaatatagccgaagcacatcagatcagttaaaattttgcaaaggaaaaaaaagagaaaagaatcctcacatcttcaatagaacaaaacaaaaacgagtccctatctaagattaatccttcatccatttcatgttttggcgccaaatcttcttgcagagtcagggagtgacgggaggatcgtgcctaggatctgaaaatatcaatcacattcaaagatgagccctgtgtgcaagtcgtaattcatcaaattactgaaattaaatgatgaattgatcagccaaaaaacagatttaatgaaattaattaattcctcgttgcaacaactaaccgtagtttgccgaaagagatcttgatgctgatcttccaagaactaaccgacggcctcctcgcttctccaagctaatgatcactgccccatccggcttgctatcaatcactgacacacatatataacggcaacattttatttaagataacgaaaaatatattcaatctggtctttactcaaaagaagctatagccaattattacatataccggcaacattaccatcaagctaaacagagcttatttaattataagttgtgtagattacatagattcagttcagggtcgacgctaattaaatacctgaattagctgagacagatccgaagagaaacattggcagcaacaagatggagaggatcagaattgcctgaagatgatgagcacctctcattgctgtaagtaagctggttttctgctgcaatttgcaatcatggagaagactgcacagagagtgcggctcaatcgcgatgttgatttagcatctcctatatatatagagatacacacacacacacacatgtctgtgcgccaatcttgatacgattttgactttgggagatgatgttctacatgagattattcagccaattgaaaggaatggaacgagtcatattattcagtcataaccagaaaagcaatagagaagtgcaagtcagcggagagagccagagaccagctgcacagaaacattgtgaacatttccattctttgtttcccctcatacaagttgtattttaagcttaaagttttattaagacatagttgacagcatcatcaaagttacaaaatatttttgaattttttcatgactatttgcttaaagtttaaaatctcgatgtttaaatcagtcatagtgctttcaacccatgtaaacagtgataaaaaaatctaaaaattatgaagaggtaatttataatgcatctatgatcttatcaaattttagtgtaaaatagaaactaaaagagaaatacagttatggagtaaggtgagtcgttttcaatagttaagagagtaaaatgagccgagaaatcacttaggggataagtgctccgaggaaatatttcaaaggagtaaaatggatttttttccattaatccccaaacaataaatgcattacaatagattgtgataatgtttaaggacggatatgtttcaattaatcctttcccctaacaaatgcattactggctatatgcatatattattactccctgcatgggaacttcaattaatattgccctccctctgatttagatatgcagttattcacagcatcagaacgcctacataaacaagaaggccacaccctccaatttccctttatctgaccgtccaaaaattcccctccaaactgaacacacaataacaaatctccatcatcaatggagccttcaggcaagctctcctcttccgccgtcgtcctcgtcctcctcctcgtcgtcgccaccggtatatttacgatcagaaagataaacaaatccggtctttttttaagtattttttagttgggcatgtagcctactggttatattgacctgagtagcaccctaaagtcttgagttcaaatctccataggagcgaatttcggattgggttgtttgatgagctaagttcctaatttaaaaaggttgcatacatcgggttggatgtataggccgggtaaaaaatactcttctctaaagaaaataatagtaaaaaaaatctcttctgtaattttgtgcagagatgacggggatggtggtggtggtgcaggcgaggttgtgcgagaagccgagcagccatttcaaggggttgtgcttgcggtcgcagaactgcgacaacgagtgcatgctggagggctacatggacggcaagtgcaagtacttgactcgacgctgcatctgctccatggagtgcgccaccatgagcaacgttggcctgacgccgacgaagtgatggagacgtacttggaatgaatgagtgagtgagtgagtgagtgagtgaatgatcgatgaaactatagctgacgcggttatattaattcaccgcttgcagtaataaactttatactagaagctggtcattagctgtggtaatacactaatactacctacggaccgtttcaggttataagactttctagcattgtccatattcatatagatgttaatgaatctagacacacatatat

SEQ ID NO: 37006 - DNA, 1790 bp, Oryza sativa
acggttttcttaaaatcaaaaggatgcaaccaaatgtagacctctagcccgcaaccaacatattttttggataaacagggagacgtaactctacaactttgttataagtcaaaaatgaaactggtagagcacaaaaaagcccaagatttaaatacaagcaaatattttcttttcacaaacttgtaagttcaaacaaaacttaggaaatctgatatttcaaaactaaattaaagatttaatgtcctaagagaacatcaaaagcattaatacaagagaaagttcgaaaataaagaaatccaactaaaagcgttcagttcgaatgaaaagacggaacattgaaacgtgaaaacgatcaatacaaggaaatcgcaattttcgaaaaagcttcaaggagcaacaaaatgcatgggtccactttacaacaaagttattttttttcaataaaccggaagacgaacatcaacaactcaattaataagttcaaaatcagcgttagagcaaaataaaacggtcaggcttcaatgcaaaagaatattttgtttttataaaccaaaaaacaaagttcaaacaaacataaggaagctgaaccgtgacaacaaaaagaattggtaaccctaaaaaggatatttgaagaatcgatgcaagaaaaacgttacaaaatcaaggattccaactaaaagtacaaaatttaaatttatggatgaaaaataaagcgtcaacggagaatccaataaatcgttcggcacaagcaaactacggttctcataaaaccaaaaggatgcaaccaaatgtagttgtttcactcgcaaccaagatattttttcgataaacagggaaacgtaactctagaacttagttacaagtctacgattaaaacgtcagagcacaaaaataccgcaaggtttaaatgcaagcaatcttttcacaaactagtaagcataagtacatataaaatttaggaaattgagatttcagaactaaaataaagttttaaagtccaaagagaagttccaaaaagatagtaccaagtggaaattcaagggtgaaaaaactaccgccactcgagaaaccaaaataaattaagtccaaatagcatgtaaaaagcatgaataaatagtaacattccaaaataaagaaatccagctgaaaccataaagtttaaacaaaaggacggaaagagaagcgtcaagggaaatacctagaaacgtttgtcacatggaaactgcgattttcataaaagcttcaaggtgcaaaaaaaatgcatcaatccagctgacaacaaagttatctggtttcaataaagagggaaacccaacaatacaactcaattataacttcaaaattaacgtcagagcaaaattaaacggttaggccacaatgcaaaatgaatattttgttttattaaaccaaaaaacaaagttcaaacaaactttaggaagacaaaccgtgacaaccaaaaaaaaattggaaactccaaaaaaggatatttgaagaaccgatgtaataagaacgttacaaaatcaataaatccaaccaaaaatacaaaatttaaacttatggatgaaaaattaaccgtcaacggataatccaataaatcgttcggtacaagcaaactacggttttcataaaatcaaaaggatgcaaccaaatgttgtacacaacttgcccgcaaccaagatattttttcgataaaaagagaaatgtaactctagaactttgttataagtctaaatgtcagagcacagaaaagccgcaaggtttaaatgcaagcaactattttcttttcataa

SEQ ID NO: 37007 - DNA, 553 bp, Oryza sativa
ttaatttatttagatggcatgcaaactgcaaaatgcacagtctataccacaataacatattgcttatatatagcaaaacattggatgtaaaattgtcaatttaattataaatagagcaatgttttaatagaatataaattagctatgtacatttaaattatggtcaacttaactcgtttttaatttgataacataaaataattaggataagaaagagatggagatataaaagaataggaagaggaagagacaggaagagcgtactactttcttatgtttttttctttttccggcccacggttatacgaagccacacgtaagtaagtacggacgtttttttttataatttttttttctttttctggcccacagtagaggaagggattactttcttaaataataatagatctaatcaaatggtctaaaatatcgggtctaccaatttaagtgaaaatcgacggtgagattatatagtgccatgtgacggtctaggagtgtttgtaggagtgacacgtggcggattgagagcgtttgtaggaagttaatggacttt

SEQ ID NO: 37008 - DNA, 1921 bp, Oryza sativa
cctgcaacccgacgccaagccaagcagctcccatctagcctcacttgttggttattggtgcaggaagctcaaacatatgtgcctataataattgtagtaacatcattcacgggcatgtcaagtttataaatagaaggcaagtagcaagaactgggaagagtcatatatgtgctggactgaaatttcaacgcttttgattttgagttttgagtctaagtcaagggtgaataaatttggttgttgaaattggtgattgattcgataatgaccattcaaggactagaaagaaacatgtactccctcttttctaaaatacaagttgtctgtgaagggaatttacctaattacaatatcatcatgaaaaatattagggatgagaccaagttatagtgtatgacgggagccaaagatcttagtagcatttgaccgtagatggtcgtaaaccctttgtatttacttcagcaagccgttttggactcttttttaatgatgtgcatttctcctatgcgttcaagaaataaaatacatacataagtatatgaacttgggatattcttggtctaatttcttcaggttccgttaaaacttctgacataactaatgtaatcattcgtttttatcgacagatggaagagtaaggctgcgttcgtttggagaacaatgggagattgtttgtttcgtttttcgcgcgcacgctttccaaactactaaacggtgcgtattttgcaaaaaaaattatatatgaaagttgctttaaaaaatcatattaatccatttttaaagtttaaaatagttaatactcaattaattatacgctaatagctcacctcgttttgcgtatcttcccaatcccctctccctcaaaccagcctaagtcaaatgtttatttggagagatcatgcatgacatcaatcgattagtgtcttatatagttaaacatctatcttatttctatactggggcaggatcttactaggtgaaggctttgtatggagggtaattatctatgtaatccagattctactcagtcatcggtcatgtatatactcatgtgcacgtcataaaaaatttttgttgcaatcctttgcagtacgtccaagtcagaggtcaaagtcacagcaagaccatttcgatcttctgtttccaatgccgtttcgtgctcattgcccggccatgtatatataataaacaacccttggaggacaagcagcgaatcgagtttttttagctattacaattcatggattgaatgtgtttgttatcattccagttgctttaaattgatcagccagcaaaagaaaaaaaaatgtgactataatcttagcatttttttttcgaacaataaggtgtttcctctcgcacaacagaaagggaaatcaaattatgtgcatctcgtaagaaaaatgggagagtatatatataagatatgcgccagattttataaagtcactctaatctttctatcatgtggttaacattacaaagacttcagatctaatatactcatatctattggatcccgttagagtaaaagtacaatagcagactacaagttagctatgaacataaacatacgtggagatgataagagaacaaaagagaagaaaattgatttgtagtcagctgtaacacgaacttcaaatcgttatgtgtatatgaaagctggagcctgggactatatatgaattaatatattttgattgaaaaaatggaagacacaataatgacttcaaacgaataagtcaggtcatctgaaaactccagcttaataattatactatgtagttacactataaaaaaatcatgcatgcttgtatctcaattttttatttttattattttaaaatttacataaatatattttccttatacaaaatctacaaaaatatgcttctcaagccttttgggagagttttttttt

SEQ ID NO: 37009 - DNA, 2079 bp, Oryza sativa
ttgctcctttcagactatttaattaccaaagaaaagttgttgagtcaatatgataaattaatagagctgttgaaattagttggttgattggaaattcaggcatttgactacggatacctggtgtgtatgtacgcaagaaccagagaacataagatccattcggagtagaaatttaacgcgacaaagaaggtggacactacgtactaattgcttaatttggaaggtttcaactttcaacaagcgtcgatatcatattaatttcacgccgtggactcatagaattacatttattttgggattaggggtagtactattgttctccataacgcaggaagacgccatatcgaagtaaggtgcaaaatgaaggaaaacagaaaaccaagtcaagcatttactactacgactgctatcagcctcatcgatcgtttgcactaatatagaatcagctattgccaaaatttagattgtaaaattgaatttttgagttggttttatgatattttcaatgtaggtttatatatttttagaattggattttaagtcgctaggaacaaacaactaaaagttttagaattgatttttttcaatggaggttttatgatattttaaggcacgcacgaatccggcagaggaggtggcgcaggcgagggagcacgtggaagaggaggcggcacgggcgagagaggtaggggaggggaggcgaggcgatgcggaagcggaagggcacccgatattttcccctctcatcgggcgcccgagtcaaaggattttcgctttttatctagtggttgactgacaaccagcatgtttcgcagaataaatacgaagaaaacttaagtatggcaactaaacatatcatgatatacacaatacaatgttctttatacagaagtgaactttttttttcttggggagtgggggttggtctcctttattttcatcgagtgaaaaatatatgcgcatgcacatcacgcttatacacatgtgagagtacatgatatttgacacatacttttgaagtagacgtcctactataaatctataaaccttatataaccataaatttataaaccccaataaagtcatttaagtatccatatgcacacaattgtggttcctgagatttaaatctgatgcaaaggctgggatttatatcccattattcttttttaaaaataaaccttaatggatagagtttatgtcctaagactctaccaacccacacctacttccttggccgatagagagactttgttcctagctctgctcaaattcctagcaacaaggagggtagtgtcccccatctggtcctcctaaaacgtaattccaaatcagattaagtcgtgcatgcgaaagaaaatgataggagtatgctcctcagtgaagagtttcactatattcaagtattattacagttgtgtcaaaagataaaagtattctggttttcgacaatatggggttggaactttggatctgattctctcatcaacggcctctccttccattgctaacaggaggatcgtgcccacctccagggtctgaaaaaataaatcccgagtcaaataaaaccatgtatttcgctttaaaaaaaatcatacatgaaatactcgaaattaaaccatatatttttttgctgacaaacaatctggatcctctcaatatatcaggactgaacttactcgcaggaactccaccagacagaaaccgaggagaccttattgccggtggcttcctacgagtctcccggccgccggccactagctcgccggagttgccgcctgagctgccggcggcgaacaccctgggcagaaacggcaacggaagcaagaggaacatcactaggattgcttgcaactcgacgcgaatccgagaagctcctcccatggtcgatcgctttggaaatattctttgagatgttttggctcccaatctgtgtgtctcggatgtccaaattacttgctcttaatttgcagggtatttataaatccacagagagtttggtggaattgggatgtgtacgtacgtgccaaacagaatagaacaagaagaaaaatattatgcagagcctatcgatctttt

SEQ ID NO: 37010 - DNA, 530 bp, Oryza sativa
atagaatataaagaaatggatttctataggatatacatgcacagcaatcaaactgaaaataaataagccagtaatttacataatttacatatattgaattagtgaagtgagcattggatgtacctgcactgtctcaagatatctacaaagtaggcatctctagtacacagtctcatctcgccactgcaaagaaataaagttaaataaatgaacagacaaaggtgaaaggaaaaaaatcattaaacgaagtccaatctcaaaatactctcctcaacccctaaacttcacaaaagaacaagaaatcctaaaaccatcacagtttctgcaaactggaaaagcaggccgttgtatgatcttctcatattgtgttttatttcctatgaccaacgtagtgtcgcacgccaaaacttgtttctcacctcccatgacctgatgtcaccaatgcagtgcacctcgatgacgaagaagatagacgacagtacagtccgcctgctggttgcactcaagctctcacatggaaggctctgcct

SEQ ID NO: 37011 - DNA, 4494 bp, Oryza sativa
taattagtgtcattagcagttaattaattaattattttttatttaattaacatcattagtaattaattaatcattaattatacgttaatcatgatccatgtcaggccatctcgcacgctgctcaagcgagatcgcttcttgttttgctgtcacgctggtcccgtgtcctggtgttgcgagaccgtgcggtatcgctccaacaacctgtgagaccgtggtctatcgtcacgctatcgttactttcgctgaatgaatcagcgatattgttttgctttcgcactttcaatcagcgactatggtatatttgtgtaaaaaattttacatcccgaatattaatgaaaaaaaaatgaatgaatggtatattttaaaattgattcttactttctccgtttattttcacacaattctttatttaaattcattaacacctatataaacacctatataaagaacatatataatatacgaaacacatatatgcatccgttcaaaatgtagactggaatttatagtgcaaaaccagggaaaaactataaaaaaaaacgaaactaaaactgaatgtagcatatatatatatatatagtagtataatgtcatgtgcagttttagatttgtttttttagactgagagagtaccaccaaaccaaccatatgcgttcgcgcacgacaacgacagatatacgacttttactatacggctatacgcctctctctctatcaggggcggtaccacccattaggcggggttgggcggccggcccagctacggcccgcgccaccccaaccctccatatcctttttaggccgcctaccaccatatccaattcacaattgacccataaataagcagtccaagtgtccaattttaatcctgcatatgtaatgctttcctgagtcaattcctcgacactgctcacccccgtcccctactatagttagctgcctaatgtttttctctctctctcccttctaagcaaaataataatcatcttattctgggtatgcgatatcttctcatatatttattttttaaaagatatctatcaaccatgctttatgaattgactcatatttgcaaattgatatgtttatctttttatgtatgatgaattatgtatggcgcaaaaattattactttatttttaatatcatttttgtttttgtttgccttaatttattgtttatactatatatttatatgattacaacataaatatggtattttttgcgtttagttgttcttattgagacgagcatcttcgcctcatctttattttaatcttgcgtccgccactgctctctatgaatatcgattatccatgttgcctctataaataataatgacccggcacgaaatgctggtatcagatatgagcagcgtgcagatcgtttgagcagctagcaacaaattacaagagggtggtagctaggcagctagctagttaggccggatggcgcggctgcagcgacgacgtctcgtgctgccgctcctgcagctcgccgtggtgctctggttggcggctaccagcggctgcttgtgccgccggccgccgaccccgatcgccggcgtcccgtcgccgccgattctgccggacggcgaccggacaccggagtcgcctccaggtgatcagagattcatttaaccatcatatatacatgcacctatacgcagctcaagctaaatttcaaagcccattgcgcgcatgagcaaatcaacttatatattatcttacttttcaaatatatctgaataacttgtcgtttaattatttgtcttatttagaagaactatatgtaaatgtcgtctaatttcctcgtggcttgttttattataaggaatataaataacttataattttaatatctgtatttaatttgtgataatatgaatattcaaacaccatcacaaatgtataaattcaaaagcaaagagagattatttgttaatcttaatttgtgcgacataataataaataaatacatgtgacgatatattgacgcagtttgctttttcccttgttttgcagctcccgtatccgcaaaacacccgaacttctcggtccttccgccgccgggctgctcgccggattgcaccgaccagcaacgtcagccttaattagttagggactatcaacgacgtacgttcagcatatatactctggttgcaaacgtgtaattatatagtatgctctgtaagttcgttccgatttcaaatgtaatgcaatttagcgcattgtatatttgtattctcaactacttgtaagtgtaatttctattgctagtgtaaatgtacggccgagcgatcagacttggccgctagctaatcaacgacgagactagtacgcatgcaactcctaccgccgtcaagcccggcgtgcagttagtgtgcatgaacctgcgctattaaccaccttcttcgtccacgaaaataaaacatgacaaatatttccgataatgctttaaatcgaacgtttgatacgacgaaatatcggacgcaccaccgagtgggtcccacctaaccactttcccacctttttctctctaccggtcaaacttatctctatctcaaccactcattcttctctctctcccctcaacacgagtgttcgtggtttcgccaggaagaaggagcatgccagcggccactatggctaggggtggaaacgagccaagccgagccaagctcggctcggctcgtgaaagcttggtaaagaacaggctcggctcggcttgataaagagaacgagcaaaaaatgcagctcggcttggctcgtttcaaagctcgagccagctcgagccagcttgtgatgcacaacagcaagtaaatacttcaacaatagtgcaatcaattttcagcaagttaacagcaagtgtgcattacagattctatttactacacaaaacatatggctcgaattaagtatagtatattagtgtaggtataacaattttgatctatttgcctcaacctttctgtgattgaatcattgataatagcacacactgcacacatacacatcaattcatcacgcatatacacatcaattcatcacgcatatacacagctactgagaaatgaatcacaaaaatcagaaaatacatcacgaacctcttcatcctaggctcgtcgctgtgtgaactgtcgtcgatcggttggcgtctcggcgaggtgatggacggcgtcgaccgtcgagtcagggacgcgggtagcacaggagagggaggccgaaggcggtgcagggtagagaggcggcgccgcgacggcactggggtcgagcgtcgctgggcggctggggagggaggccggagccagcgcagccgcgcagggcgcaggggagggaggcggctggctggcggaactgaggctgccgcgtcgagcggcgcgccggcgcttctgctagggactgggagggaggcggcgggccagcggccggcaactccttgcgccgcccagagggagggactcggtctcggtgcgatggagtagcggcggcgacgaactgggaagtgggaaggggaatagtttctgtagcaagggaaggttagggttttcattaggcctgggatggggaattgttaatgggccaaggtcattttttcaccagcttgacaagcctaccgagcggcttgtgagctagctcgggctcggctcaatttacaaacgagctctggaggcagctcgggctcggctcgttttcttttcgagccaagccgagctttgcgagctcgagccaagcccgagccgagctcacgagcccgagctttttgtccacccctaactatggcggtggtggggcggcacgacgcaaaaagggaggagaacaccggcgaccatgctagtggcagcgaagaaggccgacacgaaaggaaggaccggataagacattggacctttggtgtcggcagagtagccgcgagcccacgatgcgaaggaggtcgcgcgacttgccctggcaaggtcgccctcctgcatcgctacttgccatggtccacgtgaccacgtctacaccatgccaatcggttgattccggtgagcggacttgaagaagatagaggtaggcgctgctagggaattttagatgttgtagcttgtttgttctattaagttgtttcatttcattttagtgaagttggaattttagtgatgttgcagcttatttgtatttttgttgcaatttgttctattaagttgtttcattccgttttgattcattgttacataaattaatttcttggtgttacagtgagtatgtttgactattttcatttggttgaaacaattttgtttaagcactgaaacattttctctggtagtgaaacatctgaaatattttcatttaaatatttttttatcaacaagtgaaacatgtgaaacattcttaaacaacaccaacaccgtccgataatttgcacaaaattggacgtctgatccgtagcaacctccaaatacttcttaagcaaattaaagattggtataaaattattggcaaaatt

SEQ ID NO: 37012 - DNA, 1212 bp, Oryza sativa
tttgataaacagggaaatgcaactctagaaactagatatagaaactagatataagtttatgataaaaacgtcaaagcacaaagacacaaggtttaaaaacaagcaaatatttccttttcacaaactagttagcatacattcaaacaaaatttaggaaattgtcatttcagaacttaattaaagctttaaagtccaaagagaagaccgaaaaatatatactttgtaactgaaaaaataaaattgaaagtaacaaattgaatctcaaggaaaaaaaaccatcacgctagaaaccaaacaaaaattttaaggtccaaatagcttgtcaaaagcatgaatacaagagaacattcgaaaataaagaaatccagttgaaaccatatagttttaacaaaaggacgaaaagagaagcgtcaagggaaaaacctagaaacgtttcacatggaaactgctattttcataaaagcttcaaggtgcaaaaaaaatgcatcggtccagctcaaaacaaagttatttgttttcaataaagagggagatccaactctacaactcaattataaattcaaaattaaagtttgaaagtccaaatagcatgtcaaaagcattaatataatagaactttcgaaataaagaaatcctacgaaaagcatatggtttaaacgaaatgatggataatgaagcatcgagagaaaacaagaaatgtttgatacaaggaaactgtgattttcattaagacatagatgtgcaacaaaatgcaagggtccagctcaaaaaaagttttggattaaaaatgaagcctcagtagagaaaccacaaaatcgtttggtacaaccaaacaacgattttaataaaatcaataagatgcaaccaaatgtaacgtctaggccgcaaccaagatatcttttcagttataaatccaaaaataaaacatcatagcacaataaagacacaaggtttaaatgcaagcaaatattttctttcacaaacaagaaagcataagttcacacaaaatttaggaaattgacgtctcggtactaaattaaagctttagagccaaagagaagatcgaaaaagagactttgtaaccgaagaaatcaaactgaaaataccaagttgaatctcaagaatgaaaaaggaaccgtcgcgcgagaatccaaagtaaagttttaaagtccaaatagaatgtcaaaagcatgaatacacgagaacattcgc

SEQ ID NO: 37013 - DNA, 1991 bp, Oryza sativa
aagacgcaaggtttaaatgcaagcaaatatttattttaacaaataactaagcataggttcgaacaaaatttaggaaattaacatttcagaactaaagtaaagctttaaagtccaaatagaaaatcgaaaaagaaaaactttgtaacaaaagaaatcgaactaaaagtaccaagttgaaattcaaggatgaaaaaacaaccgtcactcgagaaacaaaaataatgttttgaagtccaaatagcatgtcaaaagcattaatagaggagaacgttcgaaggtaaagaaatccacctaaaaacataaagttaaacgaaagcagaaggtttaaacgaaaggatggaaaatgaagtgtcaagggggaaaactagaaatgtttgatacaaggaaaccatgattttataaaggcttagatgtgcagcaaaatgcatgggtccatctcacaaaacgttatttgttgtcaacaaacagggagacccaactctacaactcaattatatgatcaaaattaacgtcagagcaaaataaaatgcttaggcatcaatgcaaaatgaatagtttgttttattaaaccagaaaacaaacttcaaacaaactttaggaagacgaaccgtgacaccaaaaaaaatggaaaccccaaaaaggatatttgaacaatcgatgcaagaagaacgttacaaaatcaagaaatcgaactaaaagtacaaaacttaaacttatgaatgaaaaatgaagcgtcaacgcagaaaccaataaatcttttggaacaagcaaactacagtcatcataaaatcaataggatgcaactaaaagtagacgtctagcccgcaaccataatattttttcgataaacagggaaacataactctgaaattaaattagttataagtctactattaaaacgccagagcacaaaacaacctcaaggtttaaatgcaagcaactattttcttttcacaaactagtaaacaaaagttcatacaaaatttaggaaattgagatttcagaactaaagtaaatctttaaagtccaaaataaatgaaaaaagagaaagttagtaattgtagaaatcaaacttaatgtacctagttgaaacttattgattacaaaacccgttacgcgaaaaacaaaagttaagatttaaattccaactaggagaacatttgaaaataaagtaatctaacggaaagcataaagtttaagtgagtagacagaattgtagcgtcaagggagaaacctagaaacgtttgaaacaaagaaaccgcgattttcataaaagcttcaagatgcaacaaaatacatgggtccagctcacaacaaagttgtttgttttcaatacatagagagacccaactctacaactcaaatataagcttaaaattaatgtctgaataaattaaaatggttggtcttgaatgctaaagaatatttcgttttcataaactagaaatcaaagttcaaacaaacttaaggaagacaactgtgacagccaaaataattggaaactccaaaatggatatttgaagaatcgatgcaagacaaacatttcaaagtcaaggaatccaactaaaagtacacaatagcctctacaaagaaaccaagaaatcgtttgttacaaccaaacaacgattttaataaaatcaataagatgtaaacaaatgtaactctagcctgcaaccaaaatatttttaataaaatcaatgtgtttttatttatagaaatgcatttgagtatttataaaatttatatttgagcacttcttgacgtgaggtgatatccttaaacttagttttatacccaacatgcacagaagaactcaaacgtaaccatgccctatacgtgtatgcatggccacactaagttactcaaaatttttcattttgggttggaaaggaaaagtttaattcgcccttaaattctctatatgcaaaggttggattgtcttcaccttgcttcaaaatgaatatttgaggttcacataaatggattagttt

SEQ ID NO: 37014 - DNA, 2906 bp, Oryza sativa
cagcattaatatatggtcatacctatcatacacacattgcattttggagtccatgttgcagctggctacttatctgtatcctgttactctttttgttatcttttatcttctcgatatgtgtttatagttggattatagtttgctattgtaccaactctaatagatatatgcagagtgaggcgtatagtaagtatatcggtcgttgtcgtgcacggacgcatatggttggctggtcgccgttgctatggctaactagtactccctccaccctaaaatataagagattttggatgaatgtgatagattctagtattataaacctggctttctattcaaattcacagtactaggatatgtcttattcatagaaattctcttatattttagaacacaaggagtagatacttctccggtttaacactataagccattttagattttgaacggatatatatatatatatatatatatatatatatatatatatatatatatatatatatggtgagattaaactacagaggaagtactatcttcgtctaaaaataaatgcagttatgaatatttgtgtacaatgtttgaccacccatcttatttaaaaaattgttgaaaaaaataaaaaattagtattattcatgttttatcatctaataacaataaaaatcctaatcataaaaaaaaattaaataagatgaacagttcaacgttagatatgaacaatttaaaactatatttattttagggaacaattcaaaactatacttagtttgggactgaggcgcagcagtagttactgtcttactggtacgatgcatggatggtgtgcttaatttgacatgtcactaaaaccaagggtccatgcaggtctggaggagtcaagcagaagcggcaacagacttgtctgtccaaggagctctaaattaacactgtactgcgcactctacacgtctacttcctctgtcccataaaaatcaacccaataccgtataaaacactgtactgcgtatactacatgtctactccaaacataaatatttgtacaattgaaaatttatagatacaagttataaacatttttagttacttcattctcgccaactactcatgttttaatttcgttatgatttctgccaaccagggatttaacatgggcactgaaataattttggcaaaatttgctacaggacaccctaaaatcgtgtaattggctgtgggacaccgtaaaatcttggctttgcccacggacactacgaaagttgtgaaattggctgtgagacgccggaggcaatattttataatttccgaggcaaaagaggtcagaaaattttctaaatgaccaatctacccttgcgcgccgctacctctaagcctgactccatcccccctccctccacagcctgattccccattcccaaacctaaccctaggcgacggcggcggcggggccggcggcgacagcggcggtggcggggccggcggcggaggcggcagtgttgaggacggcgacgacggcggcctagtcggcttcggttggtgcggcgatggacagctcggcgtcatcttcagtggtacggcgccgtggtggtggcgagttgcccttgggcaaatgtccattgtgccactgatggggattgttggctcagaaatgaagggagttgaaggagtgggacgaattttagtgtaccttggagttgtgcaagctttattattactgttgattttggtagttgtcattagcaagtaatatggactgtaataggcaatttagtatttggaagcaatgtaatgttgaacttatgaatgccctgtggaattaatgaatgtagtatggttttcagatgaaatgcagccattcgaatttggtttgatatggcatctgagcaattggaatttttgcagtactctgtgatgttgctttgatatggcattgagtaatagtgcacagcatttgcagtagtatatggcatctgagcaatttggacaacatgttgacaaaatttggccagagaaaaatttggacagcatgttggcaaaatttggccagacaaaaaattggacagcatgttggcatctgagcagtaaatgtttgctgtctgaaacattggcaaaaaatttgcccagacagcaaattgacagtttggcaaaatttcagacagcaaactggcatacatccatacaacaaacatttacaagcatgttggacagtaaacaaaattttatacagcaataatttagaagccattccagaaatactcactgccattccacatcaactagtgccatacatccagtgccacacatggtactgccactgccattaagcttggtctatacaaaagccatacatgaaagtctttaggcacattttgcctagcaaatatgagtagtactgcccattggctccataacaaaagcagtgcacttagcacataaaggagtccatgccattaaaagctaacatcagtgaacatagcatcctacatttatacaaaagcaaatttcatgtcattgaacttcagtcttcagatggcaccagctgccttgttgcttggagcatcaacatccaaattgagagctctagccctgctccttgttattgggcttgtttgagttaccccagatgcttgtgatcttgaaggtgtggacctgcaaaaaaatgaaaatcaacataaatatgtagagtaaatatagcaaatgtatggcataaaaaagaaattttgctgttgacaacatacacagtagctgttgggacttgtatgacaggatcttgcacagaaagcacaactttcttcactctttttctcttgggctttttctcttcccagcacacttcttccttggcgacatcttcctagctgccgctcggccgcctaccaatatgacagctccatcggccaccgtcgtcg

SEQ ID NO: 37015 - DNA, 630 bp, Oryza sativa
gttttgagctaccctgaaggaaccaagattctatcccttctagattgggctacacaaattcgacaacgagtttacttattgttttcaggttgggactaagcagtgttttatgaatttttagaccatgatgcgaagacaaaaaatttagcctaaattcatggagtctactgggtatgtctgcaagctactgttaaaagatagcatgactatcttttatagtttggactacataaaaagatgaacaccgctgtctacagatttcagaacacggttatgcacactaattgagaccgaactctacaactcaattataagaacaaaataaatcagttaggccttaatgcaaaagaacattttgtttttataaaccagaaaacaaagttcaaaaaaacctaaggaatacgaaccgtgacaaccgaaaaaaactagaaactccaaaaaggatatgtgtcctacggaatatgaaccgtgacaaccgaatacaattggaaactcaaaaaggatatgtgtggaatcaatgcaagaagaacgttacaaaatgaaggaatccaactaaaagtacaaaatttaaacttatggatttcaaataaagcatcgtcggagaaccaataaatcgttcgaaacaagcaa

SEQ ID NO: 37016 - DNA, 964 bp, Oryza sativa
ttttttctttctttcttttgaccggagaaaatatgaccgttttttttacgggagaaaatatgaccgttgctttgagaggagagtgagagagaaggaaaggttttttctttctttttttatgaggactagaaagaaaatatgaccgttgctttaagaggagattgagagagaggaaaaggtttttttctttttttatgtggactagaaaatatatgaccgttgctttaataggactagaaaatatgcccgttgcaacggattcattagaaactaaatatttatctgcttaagaaatctaggatgttttttccggttgttcctcatatggtcctttgttggtcatatctgtgcgatgagtgtagagagaccgggtagtacagaccgacagagcctgcaactggaccattccgaaattctcaacttgagcatgaaggtgaaagaactttaatttgtcagcaaattggaccctaatccattcaaataaaatcattagatagatccacgggatttcaccataaagaaatagataaatggaagctaaaattgtgcaggagtgcgagtgacaagagtgtacgacaacttatgtcgagacagcttcggccaagtagaacttgtccgccactgcaactgcagattacagtctttcacttggttacccttctcacacaccatcgctatcgcaggccccatggcagtcgtgctagcagcgccatcaccagcgaggtgcaccgcacggatctcctaggccactcgacgtgggtgatgtaagcagatatgcgggggagttgattgagcagggctacggtttgcgagggacttgactggtgtttgatactaatgaaaatgaatattaagtaagggcataaaaacaaaaaactagtagcatatgattaattgagttttaattattgcaaatttgaaaaatgaatttatttgatattttatagcaacttctatataaaaa

SEQ ID NO: 37017 - DNA, 1045 bp, Oryza sativa
tttgcatttgcatatggtcctaaccatacatacaataaatattactgatatacttgtacatttaattattagcttgttatgtttcttttcaggatcttggtgcctgtggtagcaagagaggaagtccatccattggatgagatttttgagacatcgcctgtacatcaaccaaggatggaactgatcaactgtagatccagctaaaaattgcattttttttaacgcaaagaaaagattgacaaggtaatattacgtcaataatcacattatctgttttacccagatggacagttgttgatgaatttatataggtaggaagatgacaacgtacttgacttgcgtgaattttgcatggtcaccaccatgtatttttttgctgacaatgatgttccacttgctagttaccttgtgtaattattgctgacgttacttttgcatggtcaccaccatgtattttttagctgacaatgatgttccacttgttagttaacttgtgtaaattcaaaactaattacgtcaggttggaatattacacagtatactaacggtttcagccaaaagaatgagacagaaacagagggtgccgacttgacacggtcttgtaactcttgttgaactttgatatatagaacatagcagctgtttcaaacaatgttttcaagggtttcagaccatgatgtgtgctttgaagagtggagtactgacaacaagtgatcatagcatatatttttcttatgcgagtgtgaccacaaactggttagtacgggtattagttacttctgttgagttggtcatcaggctaatcagaaatatcagatgggacctgatgacttttgaggtatgtgagttcagagtcaaagatagcacacaaaatcttcaacctggagagctctgttggtgctgtggcttgctttcgctcatgacattttaagtgcagacaggaacacacttgtcttatactgcttcttgccccaatacgaaagctgtgttctagctctgggaaggaaggaaagtatgaattattgcttcactatttcttagtcag

SEQ ID NO: 37018 - DNA, 549 bp, Oryza sativa
tttgagaaattcagagaaaagaaatccatgaagctagctagatcatgccgtagaatttctgtacactttcttgttactgttggccggtatccctcacacgactgttttttttttcgaccaacaccagacggtgcaatgattcattaaatagagcatgagaaaattacaagactaccatagtgagaggcagtaggcaagaaaaggaaaaaaacacaccaccacgcaccaacagcgcatatacataacccaggagaaggctagcgccggaccgaccgccgctaagtgtgaccaactgtcgctaaaccaacaaagaagcaaacaccgaaaccgcgaaaaacaaacctaaacgagcgccgcactcacatggctgttttgcttattttttcctggtggattctgaaccatcttcctctttgtttccttttggcctaactataaacaatctcacagttaccaatacctgccaccaaactttgcactttactttccacagtttttgctagatttcatcatccgatagttggtatatttaccccggccggtgtacat

SEQ ID NO: 37019 - DNA, 1221 bp, Oryza sativa
tcaacttttccatcacatcaaaactttcctacacacataaactttcaacttttccatcacattgttctaatttcaaccaaactttcaattttgatgtgaactaaacacagccagttaccggtttatgttaaactggcatactatatgtcatttcaaaaagttacaatcatgccttcaaagtcgcaacaagactccactgaccattgctcgactgtaagtcaataacaaccttgcggcacaaatagcagaatattgtttcctaatcatcacctacgtcaatcatggctgctagtcagtgtctttgaaatgatcaacagcaaaagacagtttcagctgaaaaattgacattaatcttgaaattttacgaaatcttgcgtttgctttctttataataggaggaggtatctgccctttacaaaaagagaaaaggacacatgttcagcaaattcatctttctcatggattgcacagatatactcagctttcagactgagaaatttacaagtttcgtttcactttcatatgccttcttatagtcagcgtcacagcaagaccgtttcttcatttgaatttcaagagaagtgaccaatgcacatgattaattcttgcatagatatctaggattctcattaataaatttagtcaacataacatcagaatgaagattgacaaaccttgaaaactttagcacaaaaaattaaccttcagcgagaaaaattaggaagaaaatttggcaggacttataggtggtgcaaaggatggaaccaatactactaggcaaagcagctggtttcattattgacatttgaaattctgagggaagtacacataacaacagaacaaatacatgaactgaccaatacacatcactctgttatgagcaaattgcattttggattggattttattactaaaatctcattttgaactaccgttcacctaatatttttattttggattagttaattttatatttgttgtattaatattgtgaaccattatatttatggatatcaagatttttaatcctgataatagttatccacgactccatcaccaccacgcatgaaattctacaaatatggtggggttctcaattgagccccggcatttatctccatttgtgctacttgtgtcccggggagaagggaggattgtgtctcccatcttcacctgaaattaagcaacgaactccaagtcaaataaaaccttgcacacaaa

SEQ ID NO: 37020 - DNA, 638 bp, Oryza sativa
catattacccgtagttcaaaaaaaaaaaaacgattacccggttcacactccgcatacatgaatgatcgattaatttgtcgatctaggactaggagcagagggtaatcgcagacttggccactagctagtcaacgacgacgagactagtacgcttgtcggcttgtgtccattcttgcagctcctaccgccgtcaaacccggcgtgcggttggtgtcgatgaagggaaatttaactattcaccaccactcatgtgacatcacaattaacgatttgtcacaccctgttaatgatatgtgggcccttatatatctatgacatgtgggactagtggcaaatcgttaagcaacatccgtaagagtggcaaatagttaaaagccccgtgcatgaactgccaactgtcgctattaaccaccttctacgtccacaaaaataaaacatggcaaatatttcttaagcaaattaagattggtataaaattatttcactgcccatgttaataaatccctggttggcagaaatcatatataatggaaattaaaagatgaataattggctagcacgaagtaattaaaaatgtttataattaacttatatctataaatttccaatgctacagatgtttatactacctccgtttt

SEQ ID NO: 37021 - DNA, 758 bp, Oryza sativa
caccctgattgggcgagtagaactccagttatggttgttttagtgtggacagtctgaaattctggacagattcggaagcctgctttcaagtgcaaattagaccatttaaatggcagaataaaaatatgctttctacatcaaagttgtaggtattgttctgtagattttcaaaatgtatacattttcagtcatagccttttcatatttcaagatataaaggtttgaagcagcagtcttgtgtatagtccaagcggcgttccttgttattgagttttgataggatggcgcagtaggttcacctttttcattgttttatacacatgtttgaatgtgtttgctgaggttttgtttgtgattaggtggtggtccaccagatcgtgcatgatactaatccttcgttggaggcaagtgcatgacgaactaattgtgtgattcatggattgtttactctatctatttatttctgatatatttctatgtgataagtgactaatgttcagattattgttcacgctatttacattttgagttcatcttatgtttacgatgttattcttgtttcaatattttgtattctggatctagttaaataattcaagtaccatgcttgccatggatgtgcaatatggtttcaatttggttctttgattctggttttcaattattcaaggaccatgcgtagtcatgggaattcaatttggatctttattcatgttcctgtgggtaagcgctgatcacgcttactcggctttgccggc

SEQ ID NO: 37022 - DNA, 526 bp, Oryza sativa
aaaactacaccacaaataaagattatacttatgtctgcttcggcatgcaatagtgctctgcttaaagtagaattagaaaagagtatatagtactagcatattgcccatgcgttacaacgggattttaattaaagaaaattataattaacttgttataattaccatttgtatatatttaatctcttaattcttgcatatattttttactgacatgtggtctatgatccttctggctccataatatcatttttttttcaaaacaaaattagggatttagtagcgagggtggttgacatatggatatggcccctctagctccataatgtttttttccctttccaaaaaaagtagggagtatgtctgagaggattattgttggctcaatccgtaatagtgacatcctagaggcctcccgagctctcccctacccctctttatgaggtttttgtgattattgagaaatgttaagagttgggttgagagatttgaagtttgagagcacaagacaacaaatcccatcactcaa

SEQ ID NO: 37023 - DNA, 1680 bp, Oryza sativa
aatcgttcgagacaagtaaactttgatttccacaaaatcaataagatgcaaccaaatggagacatctagcccgcaaccaacatattttttttggataaagacggagacgtaactctagagcttagttataagtcaaaaataaaaatgttagagcacaaaaaaagcccaaggtttaaattcaagcatatattttcttttcacaaactagtaatcatatgtacaaacaaaatttaggaaattgatatttcaaatctaaattaaagctttaaagtccaaagagaacatcaaaacaattgatacaagagaaagttcgaaaataaagaactcaaactaaaaggtttagttcgaatgaaagggcggaacacaaagcgtgaatggacaaacctaagaaatcgcgattttcataaaagcttcaaggtgcaacataatgcatgggtccagttcacaacaaagttatttgtttttaataaacaagaagatagacctctacaactcaattaataagttcaaaattaacttcagagcaaaataaaacagttaatcctcaatgcaaaaagaatattttgtttttataaactagaaaacaaagttcaaacatactttacgatgacaaaccgtaataacaaaaataaattgaaaattcgaaaaaggatatttgaagaatcgatgcaagaagaacgttacaaaatcaagaaatccaactaaaagtacaaaatttaaacttatggatgaaaacgaagcgtcaacagagaaaccaataaatcatttataacaagcaaactatggttttcataaaatcaataggatgcaaccaaatgtagccatctagcccaaaaccaagagattttttcaatacacagggaaacttaactctagaacttagttataagtctaaacatccgagcacaaaaaagccgcaaggtttaaatgcaagcaactattttcttttcacaaactagtaacataagttcatacaaaatttaggaaatggagacttgagaactaaaataaatctttaaagtccaaagagaagttccaaaaagagaaactttagagttgaaattcaataatgaaaaaacaaacgtcatgcaagaaacaaaaataaagttttcatataacagatatcaaagttcaaataaacttaggcctcggttgtttcaacttaagattgttgtaatccagattattgagccagattaataaaagctgaattataataagctatagtcgaataagctatgagttgtatgttcatgtggattatggtataataagggtagtgagtctctagccacccaacaatttgaaaaaagcacgtttagaggagattaacagattatactaatcaggcttatagattattataatcaatcataataatctacctgtttattttagattattactaataatctagattataataattctaatccaaaaaggatatttaaagaatccatgcaagaagaacgtttgaaaataaaggaatccaactaaaagtacaaaagttaaatttatggataaaaaatgaagcatcaacgacgaaactaataaatcgttagggacaagcaaactactatttttacaaaatcaataagatgccaccaaatatagacgcctatccatcaaccaagatatttttctcgataatcagggaaacataactctagaaattaaatt

SEQ ID NO: 37024 - DNA, 698 bp, Oryza sativa
gcatccaactccaatagcttattctttttcagtaaaaggaggacccaactctacaactcaattataggatcaagattaacgtctggacaaaataaagcagtcggctacaatgcaaaagaatattttgttttcataaactagaaagcaaagttcaaacaaacttaaggaagacgaacgatgataaccgaaaaaattggaaactccaaaaaggatatatcaagaaataaagatttcagaactaaaataatgatttaaagtccaaagataatatcaaaaaagagaaactttgtaattgaagaaatcaaacaaaaagtactaaattgaaactcaaggatgtaaaaagcaaaatgaagtagtttagaccaaatagcatgtaaaaagcattaatacaagataacgttcgaaaataaagaaatccaactaaatgcataaggtttaaacgaaaggacagaaaatgaagcgttaagtcagaaacctaaaaatgtttgatacaaggaaaccttattttcatagaagcttcaaggtgcaacaaaatatatgggcctagctcacaacaaagttatttgttttcaataaacatggtgacccaactctacaactcatttacaagtgcacaattaatgttagagcaaaataaatcagctaggccttaatgcaaaagaatattctaattttataaaccagaaaacaaagttcaa

SEQ ID NO: 37025 - DNA, 529 bp, Oryza sativa
agattcatatcgatgtaaagaacttgcgtcaaaaaaaaaagtaaagaactgctcccaaactggacaattcactattgtaagtttgtaactaaaaacatcttacataactcttataaacaaagctctcaactgtttgattttactatatgggagttacaagaaatcttggtttactcgtggcatgccacatcagcatctgtatgagttctgtacccatagcctttttctttctggatctaggaatagctacacccatttaaaaattttataatgtgtgaactttacaaaattctgagaaaaatgtacacgtagatacgtaaaacatgttaatgtattagcacatactaaagttgagaagtactccctctgtttcacaatgtaagtcattctagcatttcccacatttatattgatgttaatgaatctagacagggaaatgctagaatgacttagattgtgaaacggaggaagtatttgatattttgagcgatatatgtactataagtaccatttatcctatttgtgaact

SEQ ID NO: 37026 - DNA, 549 bp, Oryza sativa
ccctgtaggattgcgaaccccaactgaaaatcgctcaactgcaccaaacatcacagatattagtgacttctcactgtcagtgattaatgaatgtaacccactggtgttgtttctggatgcactaagtgcagcactataatctggcatttcaggaaaatgctccttactcagatataaactcttgagaaattataatctcagatatataccaaatccaattaggttgccatacttttgcaccgcacgcgatatgcttagtgctttctccttcccaattccaatctaaaaacagatgtgcaaattatatctcattcagagtgaagaatactctttcagtctgttattctttaccaaaattatgaaactatgatataagtaaaaatggcaaataaatccctgctttataccttgctgcttatgtcttcagatgctcttgtttgcctaaaaagtttacctagatagaatggaaccatatcactaatacaaacgcccctgaatggaaggatgggtcaggtaacaaaagatggtccatgattaattgatgatcga

SEQ ID NO: 37027 - DNA, 729 bp, Oryza sativa
tcagagtgataggttgaattacgactgaagaacttaaaaataaaatttacatctatattattaggcttctaaataccaatataaagttttaaaaatagattatgatgtaaaaaccccaaattaattgtaaactaaattttaaatttcagattttgattgcagctagtaaacaaaccaacaaatgataaaaactgaatgacaactggtccaggatgtttagagtgagataggtctggactctagcatacttcggccgaggcccagggctcgacttgagtggggaaaggagacagaggagccgaaaaagctaatgggcagccagtctctcccgcgcgactggacatgtgtcgcgcgtggagagggcggcggacggcgcgccatgacggaggtgcgatttttccctttttttggtttctttcgtttctcttctgttcttttttgttttttcgtttctcttctgtttttggtttttcccttttttttaagatgtacatattgcaaagtttgtattcgtgtgtataccaagtttgtattcatatgtatacaaacttatttgtattcatatttttttctcacggtttttaacatgtacatatacaaagtttgtatacgcgtatgcaaagttggtatatgtgtatattttttatacgttgattttttggtacacataaaaattatatatacatgtatatatatactttatatatatacgtataaactttgtattat

SEQ ID NO: 37028 - DNA, 1522 bp, Oryza sativa
gtgggtccaatattatacaccgttagataaattgatcttaaaacaaacaaaatactatgggtcccacctctcctctttatacgtgcataggtaggtcacgtacgggtatgtagtacgtacgcctccctcccttttgtttcctttttttactacttttttccatttatacaattgataattttataaacaaagaatataccattatataactctttataaacacaggtaactaaattagctctataatatttgaaaataaaatttacaccatattatatgtttacccattaaatcaataatgtaagatagtttccacttaaaccggtgtactaattactttgtactattatttttaaataatgcactattttaaaataaaatttacacaattatattgtgtacctatcaaataaacaatttaagatctatattaactaatatatacatgcacttaaacagatagacccattatttaaatcattggatctatttttataattactttggactattattctcaaataatacattgttttaaaataaagtttacaccgttatattgtgtacccattaaattaacaatttaaaatatagattaactaatttatatttatactagaacaagtacgacccattatttaaatcatcggatctattattaataactaaagtgtctaaagttctctttttggcctgctgcataatgcacgtctacaccttttcctttcgcatgtgtgacaaagcgtcatgtctgaggcatctcaggtgatcatgaccgctgcagcgctaccgattttgttaataacatgaaaagaaaattaaatgtgtgatgcagtgagagaagaattaagcaccgtgttaacacttagctctgtttaagccgaaatcgatagttgattacataataattataatgtattgtgttatgttgtattcagattttgtattatttgtttgtacaattgaaagaaatcattatgttacaaatgtgagcacaatattaacgaatatcaatagaactcttactaggataagagtgttataagggagtttaaggcgctattttttccctgattccatcttttggattttcgtttgcacgctccacgctttccaagttcgtaaatggtgcttttcttaaacatctttttaactttttagaagttaattcattcgtttataatctcaaatagctatcacataaataagataattcatcaatttaagttgtcctaaaccctaaaccctaagtagtacataattataattttttcatgcgagtcatgatgatcagtaaattggtgatcaacgcataatcaaagtcgtaagatgaatatgtaagagctactataaataattgtaaatatgactatatataaacatggacgaagctagaatgaatattaacatatatcccatacatatatattacatggttaatattataattacatgtggtaagtccattaaaatttcttaaaatgccctcaagctgccacgtgatgctctaaaatattagaaa

SEQ ID NO: 37029 - DNA, 1164 bp, Oryza sativa
atatatattacatggttaatattataattacatgggtaagtccattaaaatttcttaaaatgccctcaagctgccacgtgatgctctaaaatattagaaattataagaaaaaaagcaaagtatctattacttgattttcacttaatcgatgggtccaatattataaaccattagattaaattgatcttagaacaaaccaaatactacgaggttccacctctccaccttcggtacgcacctacgtacgtgggtacctacgcttcccctcccttttttccatttttccctttcttctttttctccatgtatacgcttccctccctttcttattgtatcatgcaccttcatgagacgatttaatcacaagaattttaagtatcttgctctcactttttcatttgtagccatactacaagcaatagtttattatttactcgagaaaaagaacatgattcaaaaatcgtaagtacttaatcaatctcctactcaaaagtttatgaatggattttaaagataccttaagaaaatagaacccttaaattattataaaataacagtatctaaactttagtttgcccttaatctatcagacaaaatttttaaacaaacagtaaaaatcttacctttcaaataatacaagtgctgcgcgggccaccttcctagtttgttataacttgtagaagtcgaaaacttgcatgtttgcatggtgatatatctcatattaacctatcttatcaattttttatttacaactataggtgacatgaaaaaacgaggagataaaaccagttttccgtataattaagtcattgaatatacgaatatatttgagatatctgattagataatctgttatatatgggtggtctctgtatgttattgagccccgttgtttcgcttatttgtggaataagccatatgacatatttgcaaatgaaaagtaatttgtgaataaaacttatatatacatgttcttaacgatctaaaagcaaaggctgaaaaataaactacgatgaaaaatcctaaaataaactctatatttaatattgaaatttgaaattttggttgataagcataagcatacgcaaaaagatgaggcctataagttgtaattaaaatgattatacagataatagtcgtctaaatcccagtatttatgctctg

SEQ ID NO: 37030 - DNA, 787 bp, Oryza sativa
tcgccgcggcgcagcccggcgaggccgtgaacgtcagcgagcggatcacggcgctcatctccgactcggcggtgcgcaccatcatgggcgacaggttcgagaagcgggacgaattcctggagggtctcgccgagggggacaggatcactccgggttcagcctcggcgacctgttcccgttcgtcgaggctggccagcttcgtcggcggcacgacgcggcgggcggaggcgaaccaccgcaagaattcgggctgatagagtgcgctctcaggcagcacggggagcggaggaccgccggcgccgtggacgacgacgaggacatcgtcgatgtgcttctcagggttcagaaggatgggagcctccagatgcctctcaccatgggcaatatcaaagccgtcgtcctggtaagtagacaagtacttgctgattaatactgtactaatctcccttaattgcacacgaatacttctgagcttagagtagtatttatcttaccaataattaatttttcaatcgtatctacaatcgtaccctaacgtacgttctcttccctaatttagtgaaggttcaatcacactttctggatctataatccattatattcgtgaaaggatgaaatataagacatattttaccaaacctcttttacctgagtgcactaaaatttgactactgttaatgtcaaaatctacaaagttttaccgtttaagaataaaattaaataactttaactgatgaatggagcgagtatatatgaaaatgggtaccgagctcgaattcgccctata

SEQ ID NO: 37031 - DNA, 695 bp, Oryza sativa
  unsure (1)..(695): unsure at all n locations
tgtgtttggcgtgcttgcattntgaaatacggtgttaaatatgtagtactgctgttaggagcgcagcacgttccttagcatttcgagcaccaaacatgtattagtctaagcctacctcactccacgtcctgtcatcccgctcccatcgctcccatcgttatcggagtaaatgatttacttcgataataaaaacaactttcctacttccgatcccaccccacgtcccatcatcctgctcccactattatcggagtaaatgatttacttcgataaaaacaacttcccagattccagtatatattctatttttcccgtacccaaccaaccactctcgcccccactttattttttcctctttttttttgggatatgcatcgatccatcatcccagcccacagatcggtgacgcaccatggaggaggacgacgacaggcgatggccggcgagcggtggccggtggcggttgatgcgaaggcgctgcttcgggcctcgctgccgtacgtcgagcaacaccttaactagtaaagaggcgttcacctaggtcaagagcaacaatcggcggctgctccacgtcggcgacattgacagaacaagcacgtaaggaaatagcactccgatttgcatctgcatactctagtttaccttcacgcatgaagccccaatttttttttgccaatccgattaacgtgcaatct

SEQ ID NO: 37032 - DNA, 547 bp, Oryza sativa
ccgaagagccgacaacgtatacacgaacgcgagtcgcgagattgccggctttgcaaccgctcgccgcgcataacgtgtcctcaggatcaacactgcgcaggataaaacctctattcttctaatatataacgtgcaattcttgtgtgcgttaaaaaaaaacactacgcaggatagcatccgccgccgtacgtcgcccgtcagtcgttcatcctgtctagctcgtttcaggcagccgatcagttccatctgctgccgcatccgcgcatccgagtgccttgccgagttccgtcggccgtgtagcgtagcgctgtcgccgagcgtccgcgcgagtgctaactgttgcaagcctgaaactgcagctgctaaactgcactgaggcctgaatcctaacgatcaagaagaggtgagagcagcaggcaacagcaacaccaccaacgttgccatcgccaattgaggccttgtttagttcacccctaactactccaaacttccgactttccatcacatcacatcacaccacatcacatccaaaacttttctacacaca

SEQ ID NO: 37033 - DNA, 681 bp, Oryza sativa
cggtggccactggctttgcttgacttttttagaattttggtgtcgggaaaatcaatgaaaaagatactctctccggctctataatattgatgttttagacaaggttaggttaaacttttataactttgaccattaataactttaaaaatatttactttaaacaaactagaacaacatatatagatttgtctttcaaagcactataataaaagtaaacatgcatttatttattgtatatattatagtagaaaaataagatcaaagatatattttgtaatccgtgtcattgtccaaaatgtcaattaaaatgaaaccgaatggagtaaatgagtgatctcaaactgtgaaaacgatgaattgagcccagctggcagagtggcagttatgagagaggcaattgattttaggctggacccttgctactctctgtgtcttgtggctattttgatggtttttttccaacacaaatatcttcttttttcaattaggatctgttgtaccacattcaacagaaaattgagggaaaatctgtcaattttttgccactggatgcgtgtcaagatttgtgctccatgcgagaaacagcgagtagctgatgtgagttgatcccacaaccctagacttaaatgcatggcccttccatttcaagccacggtgtcggttatgaattacatccgactt

SEQ ID NO: 37034 - DNA, 656 bp, Oryza sativa
agctataagctactataaacttatgtagaggagagaagtaaataaaagagaaagatgttggttctcatgtaagagctggcttaacacaagctccaaaacaacattaaatgtataagtgagagatagagatagaagaagaaaatcatagctaaccttatagttaatctattatatgtgttaactttagtataggctaatagtaggaaatgtgctatattattatccttgctctaaaacaacgaatctaaacaagtattgactatttagattgttgtttcaagaggatgtttgggagggaggacaccccctaaaattttataggtagtaatattttggatgaagttagtattctgcaggcacacctatatactcctgtcaagtcaacaccaagtagtcgaagctctcacgagttgccatgaaaaaaaagaagataatactcgaacaaccctcaccatgtgccattccaggtgacagcatggggcacatatttcgaacatcaggtatggcaccttaaataatactatctttatattttaatatatgacgccgttgactttttatttaatgtttgaccattcgtcttattcatcgtcaaatgtttttaagcacggcataaatattttcatatttgcacaaaaaaatttgaataaaataaa

SEQ ID NO: 37035 - DNA, 1122 bp, Oryza sativa
taaaacaaattgttcttaagtctattttctcaacttcacctctcttctttttcacgcacattctttccaaactactaaataaaaatttctatagtaaaattgttttaaaaattataagaatccattctaaatccttttctaatagttaatcaattatatgctaatacgtgcttcattttacgtgttggagaggagatgtcccctctcctcccgaacacattctaatgatctttactttaagtatgagggagttgctatatctctactacttaaatcatccttctccacctccacctccacctctacgtaaaaacctactaccataaaaaccatccatctaaaaagcagacttcttaaaaaaaaagctaaataaccccactaagtctaaattctctcggtaaatttaataaaaaatcgttgaaatgcatgagcctataactactactccctctatttcagattataagatgttttaaagtcaaaatgtttcaagtttaaccaattttatagaaaaaaatagtaatatttttcgacccaagataaatttattataaaactatatttaattattaatttaataaaactaatttggtaatgtaaatattactatatttgtctataaaatgagtaaaacttgaagtagtttgactttgaccaaagccaaaacatcttataacctaaaatggagagagtactaattaactaaattctgatcatctattaggcgaaacatgttactctctccatattttaatgtatgacgccgttgacttttcgactaacgtttgaccattcgttttattcaaaatttttgtacgaatataaaaatatttaaatcatgcttaaagaacatttgatgataaatcaagtcacattaaaataaataataattacatattttttttttgaataagacgaatggtcaaacgttacataaaaagtcaatgttgtcatacattaaaatacggatgtagtatttcgatatagattttattgagaattcatattaaataaagaatgaagttgaaaatagtttaattaggctcttttttttgaactcaaaattaattattacaaatataaggctgtactatatttgcactaccaacttattacattacc

SEQ ID NO: 37036 - DNA, 1584 bp, Oryza sativa
agttggacacggaaaccagggtttgtcttttttttttttttgacggagggagtagatgcacgcgtcgcatcatatccgccgcggtagcgtgcgatgcctccaacctgcacacgtcccgtacgtctcgatctgcatctacctgattcttcggatgattctctacagtagttcagaacaattcttgtaacgatgaggaatatggtaagagcctgaggtgagactggagtcggaggggttaggagtaaagacgaaaagaagattgagcaggaagtgattgatcagacggtgcgcaaacgcagaaactttctgtactatatattggttgtgttgtctctatttgtttatgtggctacaactagatatggtggaagagatgtcctttaaatatttttaaaaagaaattataaatttgttagagattaaaaacgatacattggggttgaaaccatacgtcctttactattgtgctatcaattacatctctttattttttagctgttgcttgtaatttcatctggttttgcactgtcatgtatcaatctaattgggcatacaatctattatatattaaaagtccatcaaacattttcaggaatgctcttaaatcatcacattatgctaataaattagagaaaatcttaagaattttaagaaaaaaaaattcaaccgttaattttcacttagggctcattcgaaaggtagaatttgaaaaaaaaagtaggaccaaaaaatacatataaatgggataagaatgtttgtgtaaaatagatgattgaaaatcataaaaaagtgatgttcggaacaaaggaattgctaataagcataaaatctttttaaagcaatcacattagttgcttgcattgttctcaaattataaatcgttagattagattgatcctaagaatagaacgcccaactaaacccagctacagatcggttggctgtgcacggctgcgatggaggcctggagaaggcgcccgatcgaggcacggaagagactccgggatactatcactctctccgtttctataatataagagattttggataatgtaacacatcttagtacaatgaatctaaatatacggtacgtctaaatttattgtattagaatgtgtgacatccatctaaaatactttatattatgggatggggaatagtagctagctgtacgttgcctatatgcaaatcaaagactcgtccttccagtgaaacatgccactctatacatcaactgccctacagctttgcaaagtgcatgcaaacagtgtcctacagcttaatttgcgaagcgtaagaacagtcagcgacgatcatctggcctgccatacaaagctcgatcacccgtaaaccacggcctaatataaccacatcctggtaaaacaaaccacacaaacacaatgatcgatgaacaatgcgggcacatgatctcacctaacaactactgagattaaaaacgaataaattgatgaggaatagatatctaaggctcatgttgactacggtttttttttaaaaaaacattatagatcacatatatcatacaaaatgaggtctagaatatgtatatctcctccatcttta

SEQ ID NO: 37037 - DNA, 693 bp, Oryza sativa
ctatagggcgaattcgagctcggtacccgattgttcaatatagttgtgtaaaaaaacaattttatttataaaaacagaagctaagagccatatattgaatctaattgttatacaaattatagttgagtatgaaagtcaattatgttttttttttcatgtagatattacaattgcatacttgtacttataaaaatggaagataagagttgtaattcaaatctaattatacctttgttaacgaccaaatttggtaatccaagtaacggagatgaagatgggatcgaagcggagtacgagatggagatcactccggaaacagagtaagtatctgaagtccgagtcggttgcgatcaggatcgacagagtccaagttggacagggttagccgattgagccgaatccgacaatatgacacggcatgcattgtcgggttgagttaatgtgcttcataatgattgccacatatggatagagtcctgaaaaggcaattgtatctattaattatgacatttcatgtaatttccttagagatatgttttgggcaaaagtctgccgcaaagacttatggtatcttagagtttgttagagataagagtcatgtacgatatggacatattttgtaatctcgggtataaatagaccccgaaccctatgtaatcaatctaacacacgttcaatacaatcttggcgcat

SEQ ID NO: 37038 - DNA, 538 bp, Oryza sativa
tggcccgttggcttttgtttcagaaatcagaacacattttctctacatttcaaatctaattcatcagtaaggatcatcaaaatcataatttgtgctaattagtaattttcatttgttttgcatagtatgccgcatatcgatcagcttttacaaatcattgtgacatatacatttttcagtgtagtataaatatagtaaggcaactacacgattgctattggccagcaaataagagagttttttctcttttttttaataatggtatgaaacatcccggcctttgctcacaagagctatagtccattattacaaaagtagcacactaaaaagcttagtccaaagagttataaggctgatgattcctgcacgttaatgctaataagaaggcagcggaaatcacaccacagccaagctgtattaatgtccaaacctccaaatcgctttgcgcctttcaatttgcaattatttctcttgcctatgttttcattttgcaattatttttgtgctagacaacaaataataaatgaatcaacttctg

SEQ ID NO: 37039 - DNA, 1520 bp, Oryza sativa
atattcgcaagggtgagtaccaaccgtactcagaagccaccacagcaacaatgcatatgaaagggtatttcaaaggatagctatggttcttttgcgcaaagcaagttttgtaattctttttacaagcctcagacctagcattgactgatcaaattttagtaccagtgtttgtatttaaacaacgatggttctgtccaccatccattgtgatcccaaggatagcttcccgccattgagttgttatggttttctgaggatgcccaccttcccccttctcaggaagtggctccaacagcataaaaattcgtcatgcaacaacccatcccacacaagttaagaatttagagactagccaagtgtaatacatgtcccgatgctcaataaccgcgagcacgactattcgaatagatttggtttactcacacttcagtggatgtacactttacccgcactccgcgactgcccaacacatgagcctcgtcccaacacatgagacgtgtcacggcaaagcttttcgataacctcgcattggcagtacccgctccatgaactttatatcctcatgcactctaggcgtacacgatttctagcagtgagaggagttctggcgcacccgggaaaggaaaaacacatgcactcctacgttgcttcctgtcgttgtacccagtccatcatgattgttctcttatgggtatcctcatgtagtattgccaagccagtctctgaccatccggaacgggcatccaccatccacctggccatctgaaccgggcatccgccagcagactgcttgccgcatcacacacctaaaagaagaccactacgcatggatactgcctccgctcagctatctactccgctaggtctatacccatatgagaagtgcggttgtacgggggatcgtttcattcttaacttcatggctcggtccttaactgaccagggacggcactagccttttccggacatcacccaaatcctccatccgccccagtcgaaaacatttgtttagttttattttcctttcacaaattatgtcatcaatatcatggcaatgtggcgctcatgtctccacatgccgcatctcaattaccttcccaaaggtaattgcccaagcatatagcatttgataaatatgagtatgcataaatctagagtagcatttctaagcatttgtcatagttgactaaggacttatacgtaaatcatagttacaaggatttaagggtaaacaataatcaaggcatggcataatcacaagtaggatgttcataactgcatgcaattttatttgtaaacaaaacaatttcgcaattgggattaatatgttcaaggaatagtgatgacttgccttgctctaggtcttgtgggccttggccttcacccggatccgcggctccctcggtctctatagttacatgcgtaagaacaatttgaattcgatcagaattcaaacaaaatccacataatgaccgtattgaaaaacgagcgcgggaggtgaattttatataggctacttt

SEQ ID NO: 37040 - DNA, 705 bp, Oryza sativa
gttttttttttttgaagtgagtatattggcaaaactcccatactcttgaagacttatttctccacctcgtgcaataattcaaaagcaagtgaatatgtagtgtaaatcacttatgtctgaaaatctccacacacatacagttatactatatatgtttccaagctcatatctttctacggatcactctcaatgggtcaaatcggcttacaattacgtacttggcctagtttagcccaatgtatttagaattatcctttttatgtgcttctcgctggtgaagacacgtcctgctgcaatttgttcttcatcagcgacaccgtacgtccaggttgttgtgagatatttaactatttatcactctaactggcaatctggcactaattcagccatgaattaaaaaattgccaattttcaccgtgagttcagtagtcagctttgcagttaaagcgagccatacattaagtattgcattaatggtttgacttgaagtttgcaattttcaaaggtcagctttgtcatagatagccaaaaattccagctgcctctgctgcataataattactactacgaccgtactaaaatataagtatttttgaacggatgagatactttctagactatgaatctagatagatagtatattgatgtcctgaaagttgtctcatctgtttaaaatcttttatattttgagacaaagaaggtata

SEQ ID NO: 37041 - DNA, 1281 bp, Oryza sativa
gaatgcccttactttttacttgcatgaatgtccccatatcgtgcgacaccattcctagatggtcgtaaaagaactactacctgcttaaaacactagtaattcttttactagtgttataaatattgtttagatttcgtggtctgcgagtaaaacaattaccaccttcctctcgatatagcccatgatctcgtagctactatgtagtaatatgtttactgatatgttcagtacactgtataagagtaaaagctgagacttcgtggtctgcgagtaaaacaattactacttttctctcgatatagctcatgatctcgtagcaaccatatagtaatatgtttactgatgtattcaatacacggtataagagtaaaaaatgatactaaaagtattgttaatctatatcacaaaatgaccgtacgaataaaaaaaattacaggctcaatcacatacaaatgataaaaattactcacaagtgaatcaaactagaaaagaaaaaaaatgattcaaccaaaaatccatcgtgaaactaggattctggtggctttcttggatcttgctataaggatggagatgccggtctgtgtcttgtgacaggtagtggagagggcaaccagatggcgagcggtagtcgatgatggaataatagaagggtgtagcggcatggtatagagatgggctcgacattgcgcagtagcagccatccatcatctagcaagcacgaaaaaaatgcaagaacattctcgttcatgttatagagacgacgagcaaaagaaaaatagcaaaaaacctccatcatcggcaaactccaccctatcctctgcggcgaaccacatggagcatgatgtgcaaatgtaggacctatgcagcccatcaattcagatcaagtaatattggagattgcacgttaatctgatttgcaaaaaaaaattggggcttcatgcgtgaaggtaaactagagtatgcagatgcaaatcggagtgctatttccttacgtgcttgttctgtcaatgtcgccgacgtggagcagccgccgattgttgctcttgacctaggtgaacgcctctttactagttaaggtgttgctcgacgtacggcagcgaggcccgaagcagcgccttcgcatcaaccgccaccggccaccgctcgccggccatcgcctgtcgtcgtcctcctccatggtgcgtcaccgatctgtgggctgggatgatggatcgatgcatatcccaaaaaaaaagaggaaaaaataaagtgggggcgagagtggttggttgggtacgggaa

SEQ ID NO: 37042 - DNA, 1031 bp, Oryza sativa
tatagggcgaattcgagctcggtaccccgacaccgtccaggttgttgtgagaggggttgtgagatatttaactatttatcactctaagtggcaatctggcactaattcagccatgaattaaaaaattgccaattttcaccgtgagttcagtagtcaactttgcagttatcgtgaaccatgcattaatgtgtttgaattgcaatttgcaatttgcaaaggtcagctttgtcatagatagccagaaattccggctgcctctgctgcatcacaattactacttcatccgtactaaaataaaatataagtaattttgaaccgatgagatacttttcagactatgaatctagacatagagtatatattgtatttctagaaagtgtctcatctgttcaaaatcttttatattttaagataaaggaagtatattgctgtgccagcatcatcagcatgggtgttgtgcttgttggagtgatcatacaggagttgcaaattgcaactcaaatcgttaacaatagtacagaaccattgcttaactgttctaaataacagcacatttactagctagtggatgcattccaatggattagtaaggacagacgcaatgtatcttgctggggtcaacagtagtgtaggccccaaatcaaatggtagttatcataaattgcatgatatgctatttttagagaaacaaattaaaccgtatctagttaatataaactcatttttatgtttgatatatttgttataacatgtagaagtggaaaacttgcatgttaatttgcatagtgatatatctcatatcaacttatcttatcatttttttatttacaactatttaggtgacatgaaaaaaacgagaagataaaaacacttttctgtagaattaagtcatcgaaatacgatatgtttgagatagctaaatagataatatgttatgtatgggtggtctctgtatgttataagttgtaattaaaatgattatacagataatattcgtctaaatcacagtatttatgctctgaactcaactg

SEQ ID NO: 37043 - DNA, 1644 bp, Oryza sativa
taatatatgacgccgttgactttttatttaatgttgaccattcgtcttattcatcgtcaaatgttttttaagcacggcataaatattttcatatttgcacaaaaaaatttgaataaaataaatagtcaaacgttgattaaaaagtcaacgacgtcatacattaaaatacggatggagtaaaaatattagttcaacagtttcccttttgtcttgcaccgaaaaatagggagtagatttaacttaaaaaataggtagtttcccttttgtctcgagaacggtgatcgatatcccatcaatatatcagaattgttttctcaagaaatatattgctaaaaagaaaacttaatctgctcctactgaggcacaactacaagtctacaacttcaaatgggggtaatgcattgtggatggcaaggattggtttattaatttacacaaagttaagttttattttctttacaaaagaacttaattgatgttagagctataatagaaatagactgttttgaataaattaactgtcttatctatctgaataaattaaacaccttgtctactcgtccaatgtttgtcataattttttatttttcctgttgcaacgcacggtcacctctgacagattaacaataccaatttattcctagtaaaatcctaaataaaatatttttaaagcacataaaaatcaactagtagatatatatttgtaccattataataccaccaataatagaaggggtcgtagatgcaccccctacataaatagtagtaagacgtagtactgattaattcaagtaatgatattttcttctttgactataccagatattagagcttaatcagatgttgcgtgtgtttgggaaacacaacaatatatgaacttgaaaccttgataccgctgacattttttttgtgttcattgcaacacgtgtatgcatggtaagcacagcaatatactaattccccgagatagctgataacaactgcaaagttgacaattgaactcactgcgaaaattggcaattcaattttctagctgaaatagcgcctgcgttgcaggttggagagccgtccaaatcaatgacccagcgtcgcgtcggtcactctcgcaggataggatcctctctacacaacactccaaatagattattctaacagatgattccgttaaattttagcataatattgacgtgtctggttattcgtcttattaaaaagaattatataatcatattttattttattatcaattgttttattactaaaagaatattaagcatgaattatatattttttaaagtttttgaaatcaaattttgaataaaataaatggtcaacgttataccacaggtcaatttcccagtctattttaaaaacaaagatatagtattaatttgaaaaaatgtgttaaatgccaatctttccaaataagaggaccgcaagcaattagcagacatcaaaacctgactttaattcttagatgcattatcatactaaaataacttttctatgtatattattatagtaattaaacttctctatatataccattcctagttgcccttaaggtattcgacaactaagctactagctagctagctcaatacgccatcagcgacaccgtccaggttgttgtgagaggggttg

SEQ ID NO: 37044 - DNA, 1440 bp, Oryza sativa
attctttactggacaattatgtaatgtattgctctctcgtttccttcttgattaatgatcaatcagttcatctcctctcttgaaatcggcctgtgctctcctgatgctccatgccattgttgaaggcgaacattcaggccctgccgccgccgctgccgaagctctccaccgccgacgaacggtcgatctgcaggcacgccggcgagtcaggtttcagagtagactgttcatttcacttcctacaagtgtttgtgttcatcgtgcagatgcagaatcactgattcatcactcaccagagttctcaaggagattctttttctcatttgcaaaggtcatattcaaagaagcctccatatatgctggtgtgtgtacagtcctggtctcaagtctcaacgatgatctgcacaaataaaaaaaggatgaacaatgttagacaattatactgtcacttttcacatttcagatatcttccttcttttatcagtgtttactgtcaaaggttagattgctacaaataacaccatttcacttttatcagtgcaatggaaatagggagttctcaagcatcaagaaaccggcgtgccatattagctacagtttctgtataaaaacgcatgaatactttgttgaggtaaaacgtaaaagtcgtttttaagtaagcatgtttcacaaaatggtgcactaagcactagtctgagttttgaactgctatttggtggtggctactttctcctgctccgttagtatgttttccaattgctactcccttgctaaatggtgcgttacgtacacaagttttactatatagaagttttttttttgaaaaaaatgaaataattgtactcaattaatcatgtctaatagtttgtcttgttttacacgttgccaaaaatcctagctgaatatctggttcgaactcagcgactgttctcatctaggacactatggaacaggtgaatcataaaacacaagaataagaaaaactaattagtttcatatatatgaatgcacctaaaaaacagagaagtgtaatatatatggaaaaaaatataggagtgatcgttaaaatcagaatacacacagaagtcaatgattttctagaatcaaattgccgccaatattagaagctatagtaaaattgctcatagtaaaagagacgtctgttgcctacgtcaagacagagtgattaatccacgtaatgaccttcttgttgccttgcattgacttactgccagagagattggaaaaaaatgcccccaagtgttatcagattattgtatgttgcgtaacacaaagaaactgagatgtacttgacagtgcaaggacaaaagatatgaggtttaagtgttatcaaattattgtatgttgcgtaacacaaagacactaagatatacttgatagtgcaagggacaaaacatgtgaggttttaaccttgtgatc

SEQ ID NO: 37045 - DNA, 871 bp, Oryza sativa
cgttgttttggcatccctagggggcgatcttgtatgtgttcatttgttggtctaacggcggtcggtcacgcttagcggcggccggttcggtgctagccttcttccggattgtgtgttggcgctatcggtgtgtgggtggtggtattcagggttgtaatcttgtactccctccgtttcaaaatgtttgacaccgttaactttttagcacatgtttaaccgttcgtcttattaaaaaattttgtgaaatatgtaaaactatatgtgtacatgaaagtatatttaacaatgagggcctcatcgtttggcatattcatatgcttatgagccaaaatttgaattttcaacgttaaatttgaagctaattttggggttttttcatcgaagtttatttttcagcctttgcttttagatcgctaagaacacatatataaaagttttattcacaaattgattttcgtttgcaaaatatgtcatttgacatattcagaaaatatgccaaacgatgaggctttaaatcaaatgatatgaataaataattgttttttttaataagacgaatgggcaaacacgtactaaaaggtcaacggtgccaaatattttgaaacggagggagtaattttttcctgctcaatagaacttcgcaccattaaaaaaaacaagcgagaacgtgtttcaaaaccgttcaccgggcgccaggcggtcacagctggtgatggcgcgacgtacgtactcctgtataacggacttgcggagttcacaccacacgcacggctcctggagcggtccccccagaaaacgacacaaaactagccgttacgccgcgttgccgacggcgagacggaaatcccgaccgtcgaagccgaaacgagcc

SEQ ID NO: 37046 - DNA, 2291 bp, Oryza sativa
ggtggaggagcgacgacggcggggtctcgtcgcgggcgcgcgcgcagtaggcgagcgcctcggcgcgcacggccggggaggcggcggccgcggcgggggaatccgaggcgagcaggatggcctgctcgaggtcgtccatggcggtggcggtggtggcggaggaatctggggcggggcggaggggggaaaggaagaggggcgaaggggaggcggagttggggttgatataggagaggagagggtttgctcctcttcctctccactgcggtgcttttctttcccttcccttctttcttcctgtctaatcttccgtttttgccggatttcgtgggtttatggacggttttggttttgggtttgggtttgggtttttaggtttaggactagggaggggagggtcttttgatatttttttaatctaaaaataaattattttgcattgtcctttgagaaatatctagctctaaaagaaatattaaaggaatattagcaatacttgaaaaaaataacaatgtcgtatacatatgaattgatcatgtgtcactctcagacattattatgcaagtattttttgcgcattacatatataatatgagttttgaagtttttatgcaggctccaagttgacaattgcaatccttagggtttcgactcctcagctggttgggacgttatgtgcatggaataattattgctcggggtatagaagttacgtgtttccttaattacaacataccaaacctatcgtttctatgaaaacattcaagatttgacatgtatttattttggtgttggttaaatcatatttttggacggtcagagattccttgtttgtgcatatcattattgatacatgacacaattagtagggatgtagatgggctgggtcaacccatttacccagtgacccaacccacgatctatggggcaaaaaccatatgggtcaacccacaatttcacctaggctaacatgggttggtggcctcgtgacgcacggaccacgcatggggttgacccatatcttacaccacgtttacgcactcacaggctccagtagatgttggtgggtggaggcgacgacggcgtgcatctgcgtcaacactacagcaaaatcggtagcctacttctcatgctcattacctcatcatctatatctccacctctgctcaccccttgtgctcgacgtcgggctcggcatccaattcaacatgtgtctcttggagctccggtcaccatgtttgtgaatttcacatagagaagatcacgggaggctgaggctagaggctcttagtagtgcttgcttgacggcccagtgtcctcatcgtgttcctcattgctagcatcgtctttctgctagagatccaacaaggcatagactatgacaaaatcaagatgttgctccagaggatcaggggcatcggcgttgtgggcgacaagttggacaatatcgccactatgaaagccatgtaactagacgagatcgaaccttttgcagtgccagtactcatgcatatgcttattcaacttttgggttatgggtcgacccatgggtcaactgcctaggaacgttgcgggggcaagatgacccatgacccataatctagcacggggggcgtggtgggcagggtttcccttaccggcggttaccggacttatcgcggggtacggtaatataaataccgcggtaacctccttaaattcaaataaatttaaaaaataatttgaatttttgataaattttgcacggtttttcatggtttttcacggttaccgcggtaaccgtgcttaccgccggggcgcggtaaccccggccccggcggtttaagaaaccctgatggtgggtcaagccttggggtcgacctaccagtatccctaacagttattctttattataggtaacggtattaccatattatcttattgttctcatcaaacacatgtgttgaaaagataaactaatagtagtgatattactcgacgagaaaagaaccatgtcaagtgattaacacattccacttccgagttcttacaatggttcaaaagacgcttctcttctcttattttcccctttctttgttgtctcttatctaactttctatccattgggatgtggcaatcttactgccaaaatgttaaagataaaaccaatgatgttttttaacaagaaaaaaatatttatcgacacttgtctggcttactatagtggtttgaaagacaactttctcctatttcatctatgtcacgtgattcctttagggctccaaccgtgtgtccggtgtgacatgggactc

SEQ ID NO: 37047 - DNA, 1016 bp, Oryza sativa
atctctctcatccaattcatgtgtttttcctgcggttcaatcaaacgatcattcctgtgtttttcctgcgttttgcaattctatgttttacacttacattcctatcaaaatcctacgtttttcctattcctacgttttctcaatcctacgatttaaaagggcccttaaaggattgaataggattcaatcccttaaaggattgaataggattcaatcctttgtttcaaaggccttcataggatttttttccataggattgaaatcctccaaaattcctacatttttcctacaaatcaaaggggcccttcatgtgctttggagtgtcacattctcaaggttccatactatcatgggttataagcactgaccacatcttagaaaaaaaatactttcatctaatggatttgcatggatatatttcattacttatgtccattatatgaaacaaaccgatgagaaaacactaacattgatggtggagttgaccatgtttaaatcctggttctccacgaatattatgcacgcacggataaggttttcaataggtatgtaagtgtgatacacatgtataaccgagcgagtatgtgttttcattttaaaagaaaagaagctaatggcttaacacctatgcaaatgcatgagtatattaactttccaaatctaaaggtttactaatacgaggtgtaaaacaggcacgagtgtggtgcgggtgtacagggatgtgtatgcatcttccatgtaatcaagaatgtacactggtgtgaatgtgtcttcagtgtaatcaggaatgtacgtaagatgtgtatgcgtcatccgtataattagaaaaaaaactagggcttaatcagattgtagccaaaataacccttatcaatttttcggtaagttgataatgttaccaaaattttggcaggattttttttatgtatttaccaaactttggcaagaagctaaatgtatacacacctttgacaattttatcaaaaataatataatttaaaatagtatcaatctga

SEQ ID NO: 37048 - DNA, 1082 bp, Oryza sativa
ggaccaagattctaatatggaaacttgtgtggagaaatgggatgtcgtgacgacgctcaagattgttgccgtcatcaaagcttgcaagaatttgacaaagctttcgtcattccacaatcaaatcctcacacacaaccaccctatgtgccagacataaccaccaattcaagaacaccacaaagctgaacccgcagccccatggcctcaagccttaccaacacaccaaaggcaggctagctagatccatgacacacgtgacaatgctgcgcagtcgatatcatggctctaccgagctgccacgacaccaggcataactcgatgatggtaggcttgaagtagttctaaaaaaagaggcttgaagtccaattacaagtgataagatatcattaaatcgctcttgttcctttcaactacgagtgataaattggtccaatctgtcaaacagacagaaggatgagcaagagaatgggcaaggtgtttattggatacaaatatgaaaaagaggagggaagggatggtgagtggttctttaaaaaaatataatttatgagtggacgagttgtaaattattatgatatataactattgagttggacatggttttggattgatctgagattttcatgctagaaaaataatagggtaatattgattacattatcgaaaaagaatttgagggtatacattccatcgagttatcttaatctatttgaatgtgtatccaaatgtgctcacaaggagcacaataagaccaatagagtctttcataagggaccgtgtaagctatagattgctgacatccccaactatccatgagaatatcatacccaagtatgaattgtacgagaaatctaattacttagatgtaggaaaatgcaatataaatatattggcatgtaaatatagtgtgccctagcaattctatgtgacaaggtcatgtcacaacaattcatctactattagcacatttccctctatctctctccattttttcataccttttcaccctcgtgatctacctagtttttcttcgtatgttttccatttcattataatctttcctacacaatgtcgaccctgat

SEQ ID NO: 37049 - DNA, 551 bp, Oryza sativa
agagtgttacctagggacagtcggacagacagacaatccagatgtagtgagaatgcttgaggggagggatctcaacagatcagcttatggagccttagcacaagatatcaaagcgaaactcctcttacttcaggaggtaaaggttggctgggtccgacaaatcaggcgtcgcataagttagcgcagaatagaatttttttaccagtgcttggtttaatgtatgtaacccctcattcttagaggcggcttttttccccttattaaatccagggaacttcattttccccccttattttactgtagaaactagcaagtgcagaggattcaacccaattttgtatatgagaagaaaaacaatgcatatactctatatcatatttcccacttttatctcaaaaggtacaagttttaccctgtgccataagacaatgtacaacttagatcaagtactctccacagatagccgcccaagcagttggcattgatatccccatcacaacgacgaatttggagctggtaacaagggtccgagctcgaattcgccctatagt

SEQ ID NO: 37050 - DNA, 1294 bp, Oryza sativa
gggtgatggcggagtcgccggccgtgcggctgttccggcgaagggcggcggcggcggcgttgcgcggggggtgaaggtggtggtaagagggctcgtcggcagggggcccggcaaggtgttcggccggtcgatcccggcggcaaggttcggccacctcgcctacataaggtgaaggcgcagctgcgtcctgaaacgtcagtgatctgatcttcttctcctctctcactctctgccatcgagggaggtgtgctttgtactagcttttttcttcttcttcttcttcttcttcttcttcttcttctttttttttgtttttgggccaatgatactttgtgctagctaggtgctcgacaaaatgcgtccttgattgatgcttggtgattttcactagatctgttcatacgacttgtaaatagtagaacatgctaggtacaaggtacttttcagattacactgttcttcagttcttgtacttagtacgttttcttttttttttcttcttctgtatgaaatacgctcgtaataacatcgatcttattaaggttgtttaactttttggtgttctgttagatctgcagttccttcttttttttatatatatggacaatttgatggtcagatgaacagaaggcctttaccaagtagtttctgaacttctgatgctagatctatacgaaggttaggatggatgcacagctgctggtttctacaaacatcagtacatcatatcccgttgcgtatgtggttgccatgagtcttttctgttttaaaaaagaggcagattagaatgttcgatacagctatgaatcattgatttgcttctgcattattcatgcatgcagccatacagctcaagtattcgttgttttgtctaatacggtgtactctgtatctgggtttctttcagaccacagtctgcgtcagatatttttcttctctaatccatttgtgtatttgtgttgttcaccagtagtgcacgtctggtatgtacttgctacttccatcttctgaaaacaacgagggaaaaattatctttggcttgtaatactaattaactccttacatattcttgaattcctcttcggtgttccagacactcttgtatgaaagtatagagctattttctcgtagtacaaaatgaggataaaatccctctcattacaaaacaaagagggaggttatgtgtcttatggaagaggccggggatgtaaaacatttctgttgtctttaaaaaaaaagataaaagagggatttgaagaattgtatttgaaattctgaattatacataacgaaa

SEQ ID NO: 37051 - DNA, 533 bp, Oryza sativa
cttgatcttagccaaaaggccgagaaaggtatgagttgttgcgtgatactaaccctggtattatagctctcctgatgctcctttctctgaaaactgacggtgtggtactaaacagagcactgcacctggtctgttacttgggctaattgtcttgcaatcataactctccagaggcccaaaaaagacacaggggcccatgtagatgcccttccaggcccaaaccacgggaaggccgaggtaaagccttccatgaatttttttcatttttaaatgtttcttttaaaatatttacagaaataatctatcgttggaaaaatttacaaaaatagaccctactactctagtgaagggcggcaaattgacgtggcagatggcagctcgatgacggccgattgaaaaagttgaattttttgcattaacacccttgccgcgcactgccagggcggcaaggggcctccatgcaaaaaagccaacccaggaagggccatatcaacagagttggaaagaagcatttgacttgatttttttttgca

SEQ ID NO: 37052 - DNA, 808 bp, Oryza sativa
atatatatatatatatataatatttctatacataaagtctatatgtacggaatttcatcaagtttatacatctaaagtttgtatacccaaagtttataagttaaaagtttaaatagcctgttcaaattaatttggattcaaatatttttttatatagaatatttctatacataaagtttatatgtatgaaatttcatcaggtttacacatctaaagtttgtatacccaaagtttataggttaaaagtttatatacccggttcaaattcgaattcgaatttgtaagtataaagtttattcacatgaatatatttttcaagtgtattagatttctttttatattttttaaatggtttaaaattgatagtgtggtagaaaggggagacgtgtgcggggagggacgcgggtgctgatagtttttttttatcgcttaaccctccctccagcgagcgatcgcgtactaggaccatccttttccctatggataatgataatagtattatctcccttaattttgataggacttattttattcaattttaacatcttcgacaccaaagctttaacttttaattggttgcaaaatagtacaaccttaataactactccatctgttcacaaatacagataattttaagcccttttgacttgtccaaaaatattaatgagtttaaagtactttttgtcttatcaatcatttatttttcaatcgtatcaccaatcactttctggatctataatccctatattcgtgaacggatggaatataagacatattttaccaaaccccttttacctgagtgcactta

SEQ ID NO: 37053 - DNA, 1141 bp, Oryza sativa
tgcaagacgtcaccggctacgtttgcctctccctggctctcgtcctgctcactctcgtgctccacaaggtggtggcgatcgaggaaggcgagcggttgtagtggcgccggccagccgaggcttccgccggggccgtggcggctgccggtcaacgatcggcaacttccaccagctcatgatgggcacctgtggaccctcgtttttataacaggaatcaatcgtgtaaacagtaccatttctctgaatcaagtagtctggtacacatgagctcatagctgaaataccaaatactcatacacgagagtctagtgtgaattattacaacataagcccgcaggcattgtcttaaatcatcggaccgagcggtccggaatacaaccaaaagcagaattagataagacagcggattttaggcagcggcatgccattgccacaggcaacgaccgtactaagacctactgggcgacatcgtcttcatctccctcctggtagtaggcatagggatcctccggagcttcgtctcccgcttctgattaattttatattcgcaagggtgagtaccaaccgtactcagcaagccaccacagcaacaatgcatatgaaagggtatttcaaaggatagctatggttcttttgcgcaaagcaagttttgtaattctttttacaagcctcagacctagcattgactgatcaaattttagtaccagtgtttgtatttaaacaacgatggttctgtccaccatccattgtgatcccaaggatagcttcccgccattgagttgttatggttttctgaggatgcccaccttcccccttctcaggaagtggctccaacagcataaaaattcgtcatgcaacaacccatcccacacaagttaagaatttagagactagccaagtgtaatacatgtcccgatgctcaataaccgcgagcacgactattcgaatagatttggtttactcacacttcagtggatgtacactttacccgcactccggactgcccaacacatgagcctcgtcccaacacatgagacgtgtcacggcaaagcttttcgataacctcgcattggcagtacccgctccatgaactttatatcctcatgcactctaggcgtacacgatttctagcagtgagagg

SEQ ID NO: 37054 - DNA, 552 bp, Oryza sativa
catctctctcacatcatgataaattcatgccattcgaatcagaaacaacaaacctttcatacatcacatctgtcgagtaggaaatgtccatctgatctccatggctccaggtgaagaaacagtaagggcaaggtgaagtctgaaagttcagaacaacatggccatttcttcgacaggtgagcagtgagctaggaacagaaagtgaccaagatattacaatatctcagagcacgcaagatgtggttattaataaccagcttaattacctttgacacgtcgttctacagcccatgtttatctgctagagatcactggtcttaagctaggtttaattattcttaccatatttctcttcaaagtgtaatattccaatggagcatgtaaagctagctgggctctgacgtacatctgtgtgttgattgtgttgactggttaattagcagttaataaagtaaagaaaaagagctagtactattagtgtgcaaggaaaacgaacgatcgagatggcactgataggatagataagtacgcagtgattgaaaggttggagac

SEQ ID NO: 37055 - DNA, 684 bp, Oryza sativa
atgcacgtgcaggaaacggacggcggcggtgacgacacgatgacgtgcgtgcaagaaagggcggccgccgccggcaacggcgacgcggacgcacgcagcaacacggggaaatcgacgagctagcctgcccagattgatcgcgcggcagaggtgcgtgggctgatcggtcataactcgaggtcaaacttcgctgacgatgccatgaaagacccaagccatgcacatcatcggttcagttcagatgatgagaatcttgaagattgcatgaatgaagaaaatgattcaggcctggtttagttctcaactttttcttcaaacttttaacttttccatcatatcgaaatttttctacacacataaacttttaacttttctatcacatcgttccaatttcaatcaaacttttaattttggtgtgaactaagcacaccctcagtgtgtgagtaattttgattgatgtactttgttgtgctcagtagatacggaatgcatacaaatttgtgtgcactgtacgtgcacgcgaccgccggaatccttccgcgcgcgagattagcgatagccagttaattagtttcatgcggttttgaaggtagaagtgctccaagatttgtgcacgccaggtgacagaatctcaataggtgtgccatacaatttttttttcccacgtacatatcctactagtct

SEQ ID NO: 37056 - DNA, 653 bp, Oryza sativa
tcaggatatattatgccggcggcggctagatgatgtctacaccgtagggttgcatgtgccggccgcaaccacccacaggttttatctgatgcggtgaaggtcagtgtgaggcaggcgccattgcaccgaccgaaacacacgaacagcgacaacagcaaacagatactagagcaaagcccccacaaatttaactagattggatatttagttatgctgtgtgttcaccaacaagcgcgggccgagcgacagagacatatgctatcctccaacagtagcatagctatgtactcgctccatttcagtttaaaagaggtttttgacttggctcacaatcaaactactttaagtttaactaaatttatagcaaaaagtagtaacattttaaacccaagataaatttattataaaaatatattcaattattgatttgatgaaactaagttagtatcgtaaatattactatatttatctataaacttagccaaacttaaaacagtttgactttgactaaagttaaaacgtcttataacctgaaacgaagagagtatttttaaaaccacaggaggggaaaagagaagattgagaaaatacgcaaaatgaggtgagccattagcacatgattaattgagtattaattattttaaactttaaaa

SEQ ID NO: 37057 - DNA, 1772 bp, Oryza sativa
agtggctggctagctaacctcaatgagaccaacaggagtcctgttctggccttctggggctaccagctgtgatggcattcacttgtggattttgtgaggggcatttgtctctttccattcttatcttattgtttggtattgcatctttgtcttcccttctctgggtatgtatatatgggcaaatcccataataaaatagtaggcaataattagtcccttggtacgttgaaattttcacaatttgaccctttgcaaaaactttttttacatatgaactgctgtcaaaacttatttcaaatttgactcttttggtcagcgctaaatcacctggcgctgaacttagacacctcagcgccatgtcaactggcgttgaataccgtgccaccgcggatgggtgactaagtcggcttgccaacgcatattcagcgccacgctatttagcactgagatgtcttagttcaacgccaagggttatttttgaaataagttttggtgacggtttatttgtaaaatagtttttgcaaagggtcaaattgtgaaaatttttgcttggtacgcatggatggtttttatacagtatgataacacaaagtaaaatgccttcattgagcagtctctctaacttttgcgcccttgtttgagatcaaattataaatgctccttcgaaacgtatgaattttacagcaaacggttcaattcttctaaaattttggcccacaaaattcctcaaatctgaataggtcctaaatatcaacgcacattctgcatacgccatagctggatatgccactgtccttttactagcattggcttgtttgacttgttgaaaacaacacgtcggtctaaatttgcaaagccaaagtgtcctatatattttaccccgccggcctccatcccctcaaaataagttcatttttcacccatatcccacgcttagcaatacaaaagcaaaaagaataaattataccaactttattaaattccattgtaattggctcctactttatttagttcgaatgcaattattctctatttttataaacttcgataccatgattgttaaaagttaattttttaaggaaaaaagaggacaaaatgttcttattttaaaacggagcaagtaataccaaatcggtcgtggtataaacaccaacatataatcatcgagtgtgtgatagtgataccaaatcggtcgtggtcatcaagttgtggcgcactaaaaattcacgtactaaatgagacaaaccaagacaacaggagtactaacagtagaacgcctgaaatattcaaagtactcaaatgaattggtcaaaaactacggccctgtttagatcccaccctaaaatttttcactccgtcacatcgaacgtttgaatacctatataaagtattaaatataagctaaaaatttaactaattgcacatattgtgactaatttgcaagacgaatcttttgagtctaattgctctatgatttgacaatgtggtgctacagtaaacatttggtaatgacggattaattaggcttaataaattatgtactgacggattctataattagtttttttattagtgccgaacactctatgaaacaacctatataatacccaatgtgacacgtcaaatctttacaccctgatataaacacccctatagctctttaatagtctcattagtgcattagttagtaatttagtaaaatctattccctgtactacaaaacgcattaaaaaaccacaagaaaaaccacattaacttgcacactcctactt

SEQ ID NO: 37058 - DNA, 527 bp, Oryza sativa
cgtgtaaatacactaaaatattagagggtagtgggtcttttggggtggagtggagctgtggagcagcaaaaacccagctccacccccgtagttcattttctaggagtagctctgccaactccactccaaaaaaagatgaatctggaccgtttggcacagctcccgctccaggtaagttggagttgggagctagagttgtgccaaacagggcctatacctatctatctgtttatctatccatctgtcaatccatctgtctatccgtccctctacctatcaacctacctttctgtctatctatctatccatggcattctaccgctatctcccttgttccatttttgaataatgatcttccctttttgaaatcctctgaaataatccttcatgccgccaaatacaaatccatcccaaaaataccaaaattcccgcttttgaagcccttccttgacccctcccttggatccaccttgaaccctcgtgtacaaatatacaaattgaattcaaattcaatctccacatcaaac

SEQ ID NO: 37059 - DNA, 1101 bp, Oryza sativa
agacgtcaggcaggccgtgaagcaaacgagtaaggcgattgccgggacttctagaaagtaaaaaaaaaacaaaccccattgataatcatattcgatttttaaaatctcaatgataataaaaaggagaagcagcaggcggggtgtataagagtacagttgcagagctgccgacggttaacaggacttctagaaaataaaaaaagaattctagaatcacaatgataataaagagttggcggcggacgggctatagaggggcatagtggcatcgtttgatgggacttctaaaaattataaaaaaataaaactacaagtccaatttttaaaggttttgaacttctaaaaagtaaaaaaaacccaatgataatcatgttcaattttaaaatctcaatgccaataaagaagggagacagcgggcgagccgtagaggagtacaatagcaaagccgctgacggtttggcgggacttctagaaagtaaaaaatgaacccaaacgataattatgttcgatttttaaaatctcaatgacaacaaagagaaaagacagtggacgggccgtagagtagtataatggcaacgtttgatgggacatctagaaattataaaaatgaaacccaacatgacaataaactctaaaaactataaaatccaatttttaaaggttccaagaagaatgaatgaaaatagtggtagatcgagcaagcaaataaataaggagatgacataagagttagcaactggtgtgacttttaaaaactatatgattagaaacacggggatagtaaggtttggtctttcaaagtcttaaagacaatgaaatagctagatagctatttaataaattttaagtaaaataatacttaaaaatatatgattttgtttaggtgctagccgcgcaattgcgcgggccacccagctatttaatatgaaatttgttttagaaaaataaatgtacatcattaattgttcggaaaacgttacgcatggaaacgagaaagtgataccatctaaaacgttgtacgatttatgctaatgaatactcgaagaagatgataacttgtaacccccatatggcgccaaagcgaaccgacgacggcaaact

SEQ ID NO: 37060 - DNA, 2440 bp, Oryza sativa
ccggttaaaaaaaattacctatattttatctattttcactatttatataccccgttagtttaaatttagacatctgtatcaagctaaatttgattcaaatcaaagtaaaacaagtaaatggaaccccttcgttttgttctagctccgccactgtgcgtcaccacatatggagtaggagtagatggagaaggttgcgtgctgcttcgacctcctcaaactcaaagctcacgacgaagctgaccgcggcaaaggcggatgacgatgaggcccgagcagcagcggcctccatctggacatgttccgtggctcgctctgccaccgcatactctcgtttactaacgctttatttagtcctttaaattcttttataaggttttttaaaaaataattaaatttataaaaatatagtaatatgtacaaaattaaattaatcttattaaatataccattgaatatatttttgataaaatatttgttttgtattaaaatattgatatattttttctataaacttaatcacactgtaaaataattaaaataacttataatataaaatggaaggagtagtattttttttctgatttactagtgataaatccctggccataataactttctattaaaaatgcatcattgttacgtaatattaatagaaatcaggattaatttaaagcttggtgagtcatataccacgactccattaccgtttatgtttgtactttctatctaagttttaattttcatttgtgataaaaaaataattttcatttgacaaaatgtaactcatctgctttgaacagaagacagcagcataagcctctaaacgtggaaacaaatgaaaatattaaattccattgacgggagaccagaaattagctctccgcctctccctccgtccttgaagttctacagctcaagttttgttttaaaatgaagctagatcacctaattagcttcattttaaaacagaacttaagcggtataactacgattaattaggggattgtgattggccgagaagagaagaggaagtaggtgaagaaaatgagtgaaaaatggttataattggttgcatgatccgctcaccattagtcgtagttgctgaaccgactttaccaatcattgaccaatatttccgatcaaaaccgaagtcgctacacatgtagcaaccaatatccaattgcaaacaacaaatatcaagcagtaacaatgtgcagtcaccagcaaggacgaagtgctactgtgctagcctccttgattcgccaccaccaagcgaatgggagaaaccatccctgctactaccgcagccaatggctgcggcggcaatggaggcggagtagataaggtgaagacgatgatggataggccaggttgggggtcagcggcccatgaggttcggaagtttttatgttcgattagtatcgatagacatgactccatagaacttatatgtacaccctcctagtcctctatctcctttctccagccaaaactgagccctggtccaagtatagatggccatatgatctgaggcccatggcttggcccaagcacggcacagcccgactagggtcgtaccgtgtcagcctggcccgacagccggaccgagcctgggctgcaccctcgaaacggtgggccggccggcacggcatgatcgaagaaaaatagtagaggaatccaaaatagacttaaataaccatataaggcaaggcccaaagacaagaggagtataaaacagacttatttttcagccattatggacatagccacagagtcgagggatgagaaatagactaattctgtggagaagcacgatggacccgagtcgtattggaccgtgtgtgtagcccgtgggctggcacgacacggcccggcgtgtaggtcaggccgtgcgggcccgaaaaggctcgaaaacctcggcccagacactgccgggcctaggccgtgctgtgccagacggcccatttggccatctatgggcccaagcaagccagttcaaccagagcctccctccacacatcagttgtgccctcctcatttgctggtttatcaactagtatcaaatttgaattttaaagcttagttttagagttaatgtggattttttatcatattcttttttaccttagtttttaatttttttataccctagataaagtagactaacaaatatttactcataaattatttttgatgcttgctcgtttttttcctgcactcataacacaactgatcactacttcgggtgcaaagttgtaaactcaactaattaccgtaagagggtcagggtttcaatcatttaggtggacgtccactcatttattgccgttctactatcttactgatggatcggctgtgggaagaggtgctcaattcacaatcagcctttccctttttagatcagtccgcggtcaccgaagaaatcgcggaaactcggcaa

SEQ ID NO: 37061 - DNA, 720 bp, Oryza sativa
aggacctgtccagcaaagaggaaatcgatcaacttctttttttttttgcggggaacttcaaatatctataactacctgacaaattttcactcaagtttcatttgcaatttccttaggaatgcattacattacagagagtgcacttcgaaagaattgttgaataggcatttcacagctactattaagtatttcacaacatttcttcagctaaactgttaattttgttgatcaaatcatatcaggtgaatcttcaatgctggaacaaagccaacgaaaaattgatctttgcaagcagcaggacaagaagctgtgctctgcaactctgcatgagagaagcaactggaacaatggcagactaatactagcacctaacactgaaatggagctgtctaattcacttgatcctgtcagctgtcagtatgcaaagggagatcgtgcaaaatcagaaagacaggtttggcttctatgctcatcttaatgattggtaggagaaaggacagacacagagcaccaactaggtttcaaattattttaaaaaattgtaggcatgtagcacacacccgatttggttgcaataacaaaatgactaaatgagtagggtgtgatgagaacttttgatgtagttaggtggggtccaattccaaacaaacgtctagacgccaaaccaaacagaattggttttccactcaggcaaaactgtaatcagagagcgatagacgt

SEQ ID NO: 37062 - DNA, 637 bp, Oryza sativa
ctccaatagctccctagctggttcagttgctccatctcgccatcagtgatatttgctctaatacctttaacaactgatttgatcaaatgaggagcacatctcatatgttgagcttgaaatgacaccatgaaactcaacttctgcctgaacagctcctgtcgggattgcagaaaacagtgtgcatcagtagactgctagaaaaaagttgcaacaggacacctcctagtgaacctatctgcaaaaatggggattttatttgtacatgaaaattctcccggtgaaccaaaggactgaaatgatatagtatgccaaagttaactctgaactaaaaattcagaactatatttattcacacatagtttcaatcttcagcaaagcgacatagcgcagcggatgaattttgatcccaaatctatcgccacacacaaactacaatcgctaatagttctcgttaggttctccgttatcaagattagtttaaagatgtaccggaattgaccaccgtcaaaccaatttcagccaaaaaactcctaattaaaaaactaccactaccaggcagcacaacttgaactagaaaaccaaaaaaaatccgatcctccgtccccttcaaaccgctagtagacgagctcggaatcgg

SEQ ID NO: 37063 - DNA, 777 bp, Oryza sativa
aattcgagctcggtaccccgaagctctcacgagttgccatgaaaaaaaagaagataatactcgaacaaccctcaccatgtgccattccaggtgacagcatggggcacatatttcgaacatcaggtatggcaccttaaataatactatcttatattttaatatatgacgccgttgactttttatttaatgtttgaccattcgtcttattcatcgtcaaatgttttttaagcacggcataaatattttcatatttgcacaaaaaaatttgaataaaataaatagtcaaacgttgattaaaaagtcaacgacgtcatacattaaaatacggatggagtaaaaatattagttcaacagtttcccttttgtcttgcaccgaaaaatagggagtagatttaacttaaaaaataggtagtttcccttttgtctcgagaacggtgatcgatatcccatcaatatatcagaattgttttctcaagaaatatattgctaaaaagaaaacttaatctgctcctactgaggcacaactacaagtctacaacttcaaatgggggtaatgcattgtggatggcaaggattgttttattaatttacacaaagttaagttttattttctttaccaaagaacttaattgatgttagagctataatagaaatagactgttttgaataaattaactgtcttatctatctgaataaactaaacaccttgtctactcgtccaaggtttggcataattttttatttttcctgttgcaacgcacggtcacttctgacaga

SEQ ID NO: 37064 - DNA, 846 bp, Oryza sativa
gcttcccctcctcgtggttgcacggcctcatgccgctctccccactaagtactgtaattaattatcaccaccatcaaatcatcagaatctaaaccaaaatatcttaagagttaagatgaaagcaaaccttaaccaaaagattaatttatcatcatgcccatgaacattggcatcagtaactgtaagttgatgaatggttcatatttgatacatatttccttttgttgactacttggatgagattctgaatctttttgtagacattttttgctgttgaaataactacacttttgacttgttgttcatggatggcatcgatattttctatctgaagaagactaaacctgatgctttacagtaagctgcactggacggcgaatactaatcccttatctcaacaatggtagagcaggtacaatagcaggctataaaccagctataaacatattttaaaaagataaagaaaaatagagaaaagtagcgggctatagatctgtagccagctgcagcacggactccaagacgtaatgtgtgtatgacaggtaagattaggtattaatagtatagtaaacaattgtatgaattggttattacattagctataaatgatttggagttagtattgggctatattattaaacttgctcttaatagcttatctactgcttgaccatggagtacgtcacagttgctgtcacatgaatacttttaacttttcttgcttgaaatttccaagctgaaagaaactcttacaaatagaaaccctagtgttttttttttaaaaaaacagattgctcaagtgagttcttacatttttttatttaaaaaaattcacttataaataga

SEQ ID NO: 37065 - DNA, 506 bp, Oryza sativa
aggtgggacccatagtattttgtttgttttaagatcaattttatctaacggtgtataatattggacccaccaatttaagtgaaatgaaggggtagatgttttgtttttttttagaatttctaggattttctttaatttatcatagcgccacgtggcagaaggaagtttaatggacttttagtatataataacataaatgtgagtttatgttaaataaattcagtttaatttgtttccgtaaaaataacatacagtatcatgcaatttatgataactactgccatttgatctgcggcctacactactgttgaccccagcaagataaattgcatctgtccttactaatccattggaatcactggtggagaagtgctttttagtcccggttcgtaacccccctgtagtcccggtttttaaaccgggactaccaatccgggactaaagatcgttatctttagtcccggttcaaatgcccgggactaaagatcgatctttagtcccggttg

SEQ ID NO: 37066 - DNA, 1820 bp, Oryza sativa
ccaaagcatggcgaagacgacgacgacgacgacggcgacgacgcaggcgacggcgtcgtacatggtgatcagatgatcgacgacgacaacgtaagtacgcgaacgcgagtgcaatgcaatgcaggatagctagctagctaggctagggaacagatatatacgaggcgatggagatgagatgacaaagagagccgtttcatctgcaagatcgatgcacggcgcacggcggcgccgtcttggcgcggggcgccattgcagatgagctcgaggctggctgctgctgctgcctgctgctacacgccacggaaaccgcgttgtctcgtcatgcggtggcgccgcgagcggtgcccactgaattgagatggcaacggcagatatcataagaggctaagatttttgcaacggcccggacactgtacttatccttgtgttttcttgctgcttttgaggccatgtatttacatctcataatttggggaatttgaaatatctcgttttcatgtgggggaattgaactgtaaacatagtaccgctcgaaaatctaattctcaatcccatgtaatgtgccacaaatggatgctatatatatctccatctcaattaatcaaacagagagaaaaacatacaaattgcttacttcatatatctaaagaagaaaaaaatgaacaaaaggagagagcagtaatgcttgagttgccttgctaaagtccccataaaatacattttatttgatgtcgttttgaggtggaggtgccacatagaccatctcttatctatctttttttttttgtgtatatccacttataaatatagagaacggatctctacccattatcaaaattaaatccatccatatctatctatctaactttagtgtatattcacttgtgaacacagagacaatatctctatccattatcaaaattaaatctatctatctatacctatcttttttttttgcgagggctatatctacctatcttgactgtatatagagactggttctctgtgcattatgataaataaataaatcaatcaatcaatctatctatctatctattaactgtgtatatccattttttgttacggaggttggatctatatccattattaaaaaataaacctacttgtttatatctatcgatatatctattatattaaaaaatagaaaaaaaatggaggcaacacgtttcttttggaggctaaaaattctcatattaatcgaagaataaaagaaagatcctggccattaaattatattgttcaaattatacctctgtatagattgttcaatatagttgtgtacaaaatacaattttatttataaaaatagaagctaagagtcgtatatcgaatctatttgtatttataaaatgcctctatatacaaattacaattgagtaagaaattcaaatttgtttttattttcatgtagatattataattgcatacttctatttataaaaatagaagataagagttgtatttcaaatctaattatacctttacctacctttgtgtgaaattatacacgagaatcctctagttattatatttcaaatttttctgcttgatctgggcatttttctctttgaaattatgtagctttcacttctatattgttaacagtagcaacatgtgtgtatattccaacatgcctccccccccaaaaaaaagaaaaaaatagcccatacaacatgtggattgaacatactagcgtagtatcgttcaactttccatctccaagttcatcctctgaggctttgaactctgtgaagaattaacaagagaaacgaacaaacctattaaccatgtagcct

SEQ ID NO: 37067 - DNA, 691 bp, Oryza sativa
aaattaatataaattaatcatcttaaaagtaaattttataaagcctcacgttttatgatcaaagttacagaaaatcgtaggtattatgacttgtaaaacataagagattttatggtctaatgttttaaaaattcccaccttgattcgaatttcaattgatttcaatacatctgaaataatacttttcaaagtagtgaagagttaaaccgacaaacttaatgaagaaataaaaaactaaaagtttcatatgcattacatgttttgaaacggtaagtaaatatttaccaaatatgtataggcgtgggattttgtcaaaataaatagatgaggctatgtgccactggccataatgctcaggattttatgcaacttcgatattataaaaatatggggtttgatgaaatttgctctaaattttaacttctctgtgtgaattgcagggagtccgtgcagcgatctgagcctgaacctgagctacgcgatcctgccggcggacgccggcgcgctggtgcacctggcagcgccgggggcgctgccgccggcgctgccgccggcgccggtgctggagccgggcgacgtgctggacccgccgttgccgcctgtcgccattgccagcccaccggaagaggcggcgacggcggcgaagcccaccgacagcagcagctcggcggcggcggcgagatccagcgcc

SEQ ID NO: 37068 - DNA, 799 bp, Oryza sativa
cagccatttaggctgtgttcttccccaactttcgcaactcaccttcctcgtgtttcacgtgcacgctttttaaaatgctaaacggtgtgctgcaaaaggtttatatacgaaagttgctttaaaaaatcatattaatctatctttttaaaagtaaatatttaattaattataagaaaatatggtactccgttttgcgtgcgtgggaggtgagtttccaacttcacatccgaacacagccttagtagtcttagtatctcaggtattagtatggaccaaaatttatttataacgaatataaagtatcttatggtaaaaaagataaaatcccccatatgattaaaattaatagctctataatggtatacgtaatactcgtcgacataggactgaaaccataaaacactgtagtatgtttgtatgcttccccatttatactttgattttaacaaagcaaccgaactagggtcaaaatttcggaaacccacccacccacaccccacccaaaaccccctctggaaattatttcggccgatttttttttggatatttcatggttttatgtatttggcaaatgttgttaaaatttcaaattatttcggatagaataactaaaaattgagaaacttcagtatccgatacaaataccgaaaatctctccgttttatattataagttgtttgactttttttctagttaaactttattaagtttgataagttaaaaaaaacagcaacacctaaaatatcaaattattttcattaattataacattgaatatattttaataatatgttggttt

SEQ ID NO: 37069 - DNA, 1786 bp, Oryza sativa
cagagggagtatttaacacgtaaatattccgcagcaatacgtgggggtgtcatctagttaatttatattttgaggtttgcccgtctataagggttggaacccctctcggcatacaaaataaacaacgtttctaccgtctataagtttctagacatctattggaatccatccaaatatttccgacattagaaatttacaaatgctgtctccggcgccgccgctcctgcagccacacttcagaactttctacttgctgtgtttctattgcctgtggaaccatcgacatgatgtggtcttttgaaacttgcaatctcttctcaaccttttgagacgatgtttagaagaaacaaacctctaggaacaccgtttcaaaatcccagagagaatagcagtccagtcttggaaagctatattttccaattctattttctctttgcatttgtaactgctagctgctagctagcttgaacacttcaattgtaccctatttttctcttcaatggaaatctaggtggggaacctctcccctccggtgattattaaaaaaaattaaaacaatgtatcagcgtatgattcattaagtattagtttaaaaattttagagaaagaaatctatctattatattattaaaacagctttgaaaggaggcaccacattcgctgtgggagctagaaattcccacattaatcggagaaaaagaaaaaaagaaaaaggagagtctaagtagaagtacaatttaaaaatagctaaaattcggaattaaaataagcaatattgaaagaagtttccacataagaacccaatacgagattaatcaaaattcgaaataaaaataaaaaaaaatctaaaactagaaaaggaaaggagagtccaagtagaaatacaatttaaaaatagatgaaattcggaattaaaaataaggaatattaaaataagtttccatataagaacccaatacgagataaatcaaaaatcgaaataaaaataaaataaaatctaaaattagaaaaggaaatgagagtccaagtatgaatacaatttaaaaatatctgaaattcgaaattaaaaataaggaatgttaaaataagagtccatataataacctaatacaagattaattaaaattcggaataaaaataattcccacattaatcggagaaaaagagaaaaagaaaaaaaaggagagtccaagtagatgtataatttaaaaataactgaaattcaaaattaaaaataagcaatattgaaagaagaatccaatacgagattaattaaaaattagaataaaaataaaataatatctaaaactagaaaaacaaaaagagagttcaaataggaatacaattttgaaacaactgaaattgaaaataaaaaataaaaacattaaaataacacaatacgatattaactaatttttttaaaaaaattctgaaattagaaaaagaaaaataagatatcaattaggaatacaatttataaataactaaaatttgtgataaaaataaagattattgaaagaaaagaccatctaaaacacatgacgagataaattaactaacatgcctataaagaagtagagtggtggcggttgatacgagatataaaaattgttaataaaacatcaaatagaatcctaatgacgattaaaaggagagacgtcaggcaggccgtgaagcaaacgagtaaggcgattgccgggacttctagaaagtaaaaaaaaaacaaaccccattgataatcatattcgatttttaaaatctcaatgataataaaaaggagaagcag

SEQ ID NO: 37070 - DNA, 2022 bp, Oryza sativa
tggtacgtcatccgtatatgagttggtttttaagttcgtttgcttttggaaatacatatccgtatttgagtcggtttctaagatcgttcacttttggtaatacagaagggatcatataataaatctgtttaaaaaactcgcatgctaacttgagatgatcggattcctaaccacagctcatgattttctatatatatatatatatatatatatatatatatatatatatatatatatatatatatatatccaaacgaactcctacagtaaatttcgtcttaactaaaccatataataataataagattaaaatagttttcacccgttgcaacgcacgggtatttttttctagttaagtataagagtcaaagattagtgttatcattggttacggcatggtacgggacttattgtcgaggtctagtaatgaaaactgcttgatatatcaaacaactttactactgtatttctcttttcaatacagctcgaatcttaataaaaacatacaaaatgactcaggatgtaagtgcacatgcatttgcagcgtcaaattcctcttcaactctacaaatacacacacattattactgacgagagtggaacatacagattaatattaataagaggaattgcacaatggactaggctttttttttctttaccacagttgaataatgggccatatatttacttcatgttttcacttaggactaggttttctcacactttattctcattggactagtttagacttggatctttttttctcatcgatgctgtccatccacaactcgaagcttgaccatgaccatatgcaattgagtctcttggtggcatcctacaggactttgcgtaacaccacattcaccttaggagaatgggcataaggtatagggctgacggataggccggccgacaacgatcatctcgagccacgggttcaaagtgtcaagtttggtaacaaaccatgattcaacgcaaatggttttctaaaaactagtctaatatgctacttagataataaaacatgacccagagtgaaatttggtcataataatatactccctccatcctaaaatataagcatttttactatagtgacgagtcaaacgtttttaactttatctattaatagaaaaaaaatattaatcacgtaaaattgatattattagatttatcattagacaaactataataatatgtaactctttttatttaaaacatcttacttttatagatattgttggtcaaagtagtatcacaaaaaccgtgtcacagtccaaaatgcttatattgtgggacggatggagtaaatgtaaacttatatatgttgtcggtcagcaaaattccaataaagcaaaagtcttttcaatttttcatctacaatgaaaaatgcagcagatacgaggagtggtaaaagaactagtaataacactctagtagtagctgctgcggaatgagttggcggctcagggtgtaacccatttataggtcaaaataagtggactcgcggcgcttattttagcatataagtaggtttcgcgggttagacacttacaatccttagcggccttcttcagagtcatagcaaaaggtttgtttgtgtggagagatgttatacaatttatggatatcttcacagtcatagcaaaatgtgaggtaaaggatgaagaaacctccttttgggggtgatgtatggaatagcatagtcagatcaatctctttcccaagagcatattcttttgtttccaacgaaaatgattcagtttgcatcgcaagtttaaaagacatatctcaaaccttcattctccactttataagaacatgcttatcaggaatatatccaaatgttctgaattacttgcatctataggaattcagtgccccttcagtcaatgattgttggttgaaacctgtaataaattgggattcgtctttaagctttgaagaaattctacatcaaggcagccaagatgtcacatgcttcttctcactctgttgaaaaggtcctatatgcaacat

SEQ ID NO: 37071 - DNA, 624 bp, Oryza sativa
  unsure (1)..(624): unsure at all n locations
aaatagcctgtaatgagttatatcacaaaacaccgtaatggcctgacataattgataacgacaacggcgaagttatgaacgtactcacggntgaaaattggccaatttctggttaaattaattatgcccgttggagagccgtccaaatcgcgctgacacttcccttttgtaattatccgcagtactatatgactagacaaaatctgctgccgatctatgctcctttaaagaatggaatggcttgtcaccagcatcaactccccaaaattctgacatgtgagactattgtccattccctcttaaaattaaatgtacggtaaaaacagaattaattgaaacaaatcaaaattgtttattgttggcgaggagaagcagaggagtggatggatggtgcggatcgatactcgatcataagctcgttgcggtcacaggctcgtctcggtagacgtcgctacgctacggcaccgctaatctcgactccgtgctattaagttaatcacatcgctaatctcaggagttgggtggggcccctataatcagaggcacggtccgacaaaaccgacatgccaagagcaagtataatagtaagctataagcctactataaacttatgtagaggagaga

SEQ ID NO: 37072 - DNA, 668 bp, Oryza sativa
ccgatacaaataccgaaaatctctccgttttatattataagttgtttgactttttttctagttaaactttattaagtttgataagttaaaaaaaacagcaacacctaaaatatcaaattattttcattaattataacattgaatatattttaataatatgtttgttttgtgttgaaaatagtactatatttttctataaacttatcaaactttaacttagaagaagtcataatataaaatagagggagtaatttgaaccccgaaccaaagtagacaagtagtgcctcaccttgtttggagtagcatgtactacgatccctccgtcccaaaaaaacaactcaacctatgaggggatgtggctcttcctaggacaacgaatttggataaagcgtagcccaaattcattgtattaggagtggtcaaattctcttctaggttgagtttttttttaagacgtggacatggagccaaggttgtcagtatctcgattcgtatcctagtatcttacgatactacgatcctaccaagccgaaacgataccgatcccacctagtatcctatttttatactatcgcgatcctactattcattactatacgatcctacgaaatcttaggtggtattctgattctacgattcctacgatactacaaaatattatttaaaat

SEQ ID NO: 37073 - DNA, 635 bp, Oryza sativa
ccgattgtcatatagaaccaaactgattgaggataaaccggggaactgccatgagcctgacaatcgatgtgagataaaattggagaactgccatgagccttgacaatcgatgtgagataaattgcttgggtgtttgaaatcttgaatgttacaaacgattgtgagaaatttcatgagtctcgaattgcttgggtgtatgaaggccatgtttagattgtagccaaaataaaccttaccaaaagtttagcaatattatcaacatgccaaagtttggcaataaactaaacgttgacattttttttgataacgttgccaaaaaaaataatatggttgaaaatagcatcaatatgaacagcccggaatttcatgataaaatcttgacaatcttaaattgcttgggtgtatgaaaccggataactgacattgggtctcgacaatagatgtgagatgaaatttctcacaattgtctgaaatcttgaatgatcaatgaatgtggctaatcctatgctatgccactgcttaatttatagcttggttgactggttgtatggcttggcagtttctagaagatgagcagtccaccgaaagatagtgggccaataataatggtatggctaataataaaggtggaatgg

SEQ ID NO: 37074 - DNA, 2188 bp, Oryza sativa
atgtgagatgaaattcctcacacttgtctgaaatcttgaatgatcaatgaatgtggctaatcctatgctatgccactgcttaatttatagcttggttgactggttgtatggcttggcagtttctaaaatagcagtccaccgaaagatagtgggccaataataatggtatggctaataataaaggtggaatggcttggcatgcatgtaaacatgcaggaaccggtagagtgacatggcccaagaaaatttggacttaaaaagacattcttgctgcacgctagaaagtaaacatcttggacatcaattttagatctaatggctagattaatttgaagtgatgtggcaagctgtgaaaagagaaaattagcactagttgcacttagtgagaatgaaccatatagatatataaaattaatgcccttctcgattaattccttcataaaaagttaagaaggatttagagaggattacttaatctccaacattccttccggccttcacataagaattaaccgaacaagctttttttttctaaggcgtggaagaactctttttcaaaagaattttcaagcggatcaagaggatgttttgagaatgaaaagatcgaatgctaattttaaataggacctctcatgttctttttatagagcatgcatgtgtcatacgttcaaaacacgtcaattataaaaaaaaaaaaagaggtggtacactttaactgtatgatttagtgcaagcgcaacaataatgttcagatgatgatgtaatgctgtccgttcttaaactgcaagatttgcagacacttctttgccgactaatctcaaagacaatataagtatttattgatcaccgcttttcatcgaatcaatcactagctagtaacacaccgacacaggtggggcctggcccacgtggggagagccggagagagaccagcaccgcgtctagcttccacgtgcttatttttaaaagacaaaaatacaaatccatgtactcgcacactcgttagtataaatgcacgcgcgtactttatttttataagcaccttcaaaatacttaccggtactccctgttttaggttataacttcaaatttaactaaatttatagaaaaacagaaatattttcaactaaaaataaatttattataaaaatatatttaattattaatttaataaaactaatttggtaatgtaaatattacaatattaaatcttgagttgaaaatatttctattttttctataaacttggttaaactttaaatagtttgactttaaccaaagtcaaaatatcttataatctaaaacggagtatacctttagattgatgaagtcgtcattgatgtcacactatcgacgagtatattatatatcactgaaagatgaattagtcgtaaatgtgaacatatcaagtctagaatttgaattcggatcaactgattccacttcgcaacatccatgtgcttttgaattccacgtgaaggagaaaaagggtttgaaatattggacttttgcaaatttatcttctaaaaagacttcagattccgttgattaattatgtttgaaacgagaagttctggggagttaaaactgctaactggcatggttcagaactgagtcaagcacaccacaacatcgaccagagcaagaattccgaattccacgtttcgaaaatttcttaaaactgatcaaatcaattccactataagtttataattcgctgaatcgtgagcctcttttctcctctttccatccccctccttttcccttcctacttccaggctccagcagaccagcacgcctcttctcctcttctcttcacacaacgtcattgtgttagcagagtcactgtcagcaataggaggcacacgactattatcctccctcttacgtattgttcatggttatggcgtcgcagagtctacaccagatattgtgcatgcaagtacatatatgtgtaatgaggtgacagtcatcgatcaaaattgaaaagcagattattcatggaattattgtcatgagttttctacttgattataaaaataaattgaataatttgagaattaaacttaaataataatttataataggtaggataggaagtaggagtacacatcatcaaaagttacatagcttatcatttagacacgtacatacgagacaaacatactatttataagtgtaaacaact

SEQ ID NO: 37075 - DNA, 647 bp, Oryza sativa
atttcatacaatcactattcatgctctgaactccacaacattcctaattaaaaggttgcatgtgcttgaatactaaaaaatcggcacccgatttttttacaactaagcacatataactaacggtagcgctaatccacgcgctgcacacggaatattagatcgagcgccacacagcgctccctccttccagttttttcgttttttaccacccacctttactccgcatcccacctttcatcagtttatttttttcgtttttttaccaccctatcttccgtggttcttttttctcttttccatcttatccgtgcttcatcaaagggcccggtaaaatattaaacatccagattttttttgtttttggttccttctctccagttattttgtttcgcgttttagtaaaatatttatcatctagtttttcttttccagttttctgtttttctagtgtctccccacgtttcaaaagtaacgaatttactccgtggagttttccatttactcctagccttccacatctgctccttctaaaataacaaatttactcgcatgaatgcccttactttttacttgcatgaatgtccccatatcgtgcgacaccattcctagatggtcgtaaaagaactactacctgcttaaaacactag

SEQ ID NO: 37076 - DNA, 589 bp, Oryza sativa
acgttggtggtgttgctgttgcctgctgctctcacctcttcttgatcgttaggattcaggcctcagtgcagtttagcagctgcagtttcaggcttgcaacagttagcactcgcgcggacgctcggcgacagcgctacgctacacggccgacggaactcggcaaggcactcggatgcgcggatgcggcagcagatggaactgatcggctgcctgaaacgagctagacaggatgaacgactgacgggcgacgtacggcggcggatgctatcctgcgtagtgtttttttttaacgcacacaagaattgcacgttaatatattagaagaatagaggttttatcctgcgcagtgttgatcctgaggacacgttatgcgcggcgagcggttgcaaagccggcaatctcgcgactcgcgttcgtgtatacgttgtcggctcttcggaatcacttacactacaatagttagctgccaaccattggagacatttaactatttaattcctttgattcttcgataaataaatcgtagtgccacaaatcacaacaaagaaacacataaccttattaagaaaatcaaacattgaaaacaagg

SEQ ID NO: 37077 - DNA, 1141 bp, Oryza sativa
caatatatggatatagatttgtaaggttatggataacatatacctaatagtaatcaactaagcttggcggggctcatcatataccaagtcctatatggaatcataccacgtatatagaaggagttccggataaggaagaacaagtagagttctacatggaaactgtaagaactactcggattgtatgcatattggtctcctagttctacttggacaatgggacatctatgggtataaatacaagacccattaggaggagagggagagggagagagacgaagacaacatctgtcagaatagacaccaatacacgccgccggacatcaacatcagaaataagcctagacatacccaatctggcgcctacggaggatgacaagagggatctggcgctatctctaatcttgccgggtacttattcaaggaggaagactaccctgtcgtcgacaacgtgttggtgttccatgctgccaagttgacgacaagtagataggttatctcaaatattgtacttgtgtaattctgatgaataagagcaacatcggctttggccaacaggagtagggttattacctgattctgatgaataaggggtccgaacctgtatatactccgtctcttttacctcaatctcgcatataccctggtaccaatgatcaccttactatataaatacagtagtcgtgatctaaaacattgacaagatccgatcattgtatccataaattgatatacacaggtaatagatagatagatagatagtggatagagaaccaatctctatacacagccaagataggtagatataaatagatagatttagttttgataatggatagagatattgcccctacgttcacaagtggatatacacataaaagatagatagataatggatagagaaccagtctctatacacagccaagataggtagatatagatagatagatttaattttgataatggatagagatattgcctctgcgttcacaagtagatatacacatagatagatagatagatagatagatagatagatagatagtgaacggagtacaatctctatacaccgccaagataggtagatatagatagatagatttaattttgataatgcatagagatattgcctctgcattta

SEQ ID NO: 37078 - DNA, 934 bp, Oryza sativa
caaagcgaactactgaactagtcgttatgattctatcagtttctttaatgagtaaattacctttcacaacaaacgaaacaatacgatgggtagaaatagaatcataaccgggtctcagaacaacaaagtcaattgcttcagtataaggacttcgtttggttcaaaccgggtctcagaatcataaatgactgaccagcttgacgggaacatatcctatgcacacaagcttctcgtgcacaccaactagtaaatttcacagaaaattctagaaaaattaaacacatattttcaataatattattaaattgtgcacgagaaacttgtgtgtataggatatgttcccagcttgacatgtcaactttcacgtggtttgcatttgtttccatcggagattcggagttcatctctactttcaaaaaaccgttcaaaatttttagactaaactagaaaggtagtccctacaaatacgcaggcatacaacataggccatgtacttaagaaacttataaaggtttagatatttttttctcagtctatttgttagctctatgcagtatattatttagtaaatttcaagaaacaattaattatctaaaatctgtgtcatcatataaaaagaagatagactagtaggatatgtacgtcggaaaaaaaaattgtatggcacacctattgagattctgtcacctggcgtgcacaaatcttggagcacttctaccttcaaaaccgcatgaaactaattaactggctatcgctaatctcgcgcgcggaaggattccggcggtcgcgtgcacgtacagtgcacacaaatttgtatgcattccgtatctactgagcacaacaaagtacatcaatcaaaattactcacacactgagggtgtgcttagttcacaccaaaattaaaagtttgattgaaattggaacgatgtgatag

SEQ ID NO: 37079 - DNA, 718 bp, Oryza sativa
cacttttatgactttttttttaaaaaataaatatgtatttttttatttcattatctatcaatattttttgggataaataatgcatcgaacaacaaactcataactataatagtcttatgcaagaagcttttatatttttaataatgtaattcatgaatttctttgttcatccaagggtaaaatggtcatttttatagaaaatagacggtcaactaacggtgaactgacgggaggggtatggaagggatcagaattaaaaggaagtaagtaaaatttaggggtatagaagggattaggtaaaatttgaggggtatacaagggattttctcttaaacatatagtagtattttgatctcctgcttatcatggctttaactagctaaagctaatgtgaaacaagagtcttttagagccaggagtaatggccatcctacttggaaggccaaaacatgaccaaaaaaaaaatcaaaaaatgaagatctttttgttaggaaaaagtaacataacaaaagccacgagataaataagcaaacgtccagcctctctcaaacctgccagctggtgtcaattaatcttttccccttttgtgatcgcccatttatcatttttatttattttccagccactaaaattctcgtaagcatagccagcgcccagcgaccaccgctgaagtcaattaattacaaaatcggacgaccttaattagagtacatcatca

SEQ ID NO: 37080 - DNA, 757 bp, Oryza sativa
caatagacaattcagtaattagtagttgagttttgaactatgatgggttcaatactaacattcttaaaagtagaattgaaaaaaatatgtcatatttcaaaatcttcgcacttccaaccggaatggaaagcaaattgaattgactccaccattgatttttttcttaaaagaaaagattaactcctccatggtcacaacgtatgccttgcaaatcgcaagaaaaaaaaaaggaagaattaaaaaatctgcaagacaaaatggcaatacataggttggtggagaggatgcagaaattggaaatgttgcaagcagaagaaatttgaacatggaaaaagaataaggaacaaaaaatgttgaaaaacttgagaagaaacattaaagccaaagtgaaaaggttgaattaatcctaggggaaaaaggagagggtatatacctggaaattgaaataaagggatgaaaaatgtttggatggacaaaacatggaaataaatagaaaagagactgcctatcgaatgtacattcaagagaatttctctcacaaatctgtcaaatgtaactacataattgtaatgaaattacaacataactagtatataactacacaattcgaatgtaagtcggatgtaattcataaccgacaccgtggcttgaaatggaagggccatgcatttaagtctagggttgtgggatcaactcacatcagctactcgcttgtttctcgcatggaggggtaccgagctcgaattcgccctatagt

SEQ ID NO: 37081 - DNA, 814 bp, Oryza sativa
tttagaaaatttgagtgactaatctcttcctttgcagcacactcatatattaaacctaaatgtataaccgcattaattatttgatacacatgtattgagatttctcaattaatatatacattacaacctaaatttcaaatggtggttgccttcatttctaacatgttcttagaatgcacatccttaccaggatagtaactactccctccgtttcaggttacaagatattttgactttaattaaaatcaaactactctaagtttaactaaatttatagaaaaaaatagtaatatttacaataccagcatagtttcattaaatctataattgaataaattttcatcatatatatgtcttgggttaaaaatattattactattttctacagaattagtcaaacttagagtaatttgactttaaccaagttaaaacgtcttataacctaaaacagagggagtatttaacacgtaaatattccgcagcaatacgtgggggtgtcatctagttaatttatattttgaggtttgcccgtctataagggttggaacccctctcggcatacaaaataaacaacgtttctaccgtctataagtttctagacatctattggaatccatccaaatatttccgacattagaaatttacaaatgctgtctccggcgccgccgctcctgcagccacacttcagaactttctacttgctgtgtttctattgcctgtggaaccatcgacatgatgtggtcttttgaaacttgcaatctcttctcaaccttttgagacgatgtttagaagaaacaaacctctaggaacaccg

SEQ ID NO: 37082 - DNA, 666 bp, Oryza sativa
taactattattaacagataaaattgtgtatagttgtattagtgccggtacgaaagtagtcgcgctgtccctctcattttgcaataatttctcttgcctatcttttcaaaatagggatagccgcactgtacctgactttttttttcacttacatgaatgaatgaacttctctatggaaactagtattttgatatctcgagcggatgtccacttgtctatttataaaccatccaaacaacaaagaaaaattctcaaatcgtctacactaacagcgtaaattttttaaatcattattcacacccaaatttattttttattctaaatgtgtaggtcgaatttaaacttagatttccgtcgctgatatatatccctatactaacattgttaatgtttttcagatttttcactaccatttacattggatttggaagaaaaaaaagtaacgaggggacatcccttaaagaagttagaatccactccattctttctctatatataacatttcttgttggcctccatatataacactcatagatcgccatggccgtggtgcaaatgcaagacgtcaccggctacgtttgcctctccctggctctcgtcctgctcactctcgtgctccacaaggtggtggcgatcgaggaaggcgagcggttgtagtggcgccggc

SEQ ID NO: 37083 - DNA, 666 bp, Oryza sativa
aacactatcattataatagtatttagtatatttttctttcatgtgtttaatcacgtaaacaagattaatccataaaaaagactatagctatcaagtattttacacgttacaggacaaaatcttgcctcatctttcacccaaatatcactatcagcatgctacttattttttctggctcctagtagactaggtgggacaaatacactgaagagaagcacaatagtcatctgtctttgtgaagacaatgtgattttcaatagcctcatattccggctgtatgctttcttttgtgttcataccttccaattatgattttttctagcttgtaatcatgcaatccttgacaagactattggtataagcgaaaaaaattgataactgaagctaagaataagtcagttgtctactcagaccaaatccccattagacacggccttaaaccgcacgcaggtccagtttggatggccatcatgttcaaagaatatctgaaggtagcttttaaaaaacggcaaccattttatactgctaattaataccactagacttttttttttcaagacgacctacacaagacaaaaaagtttctattgatatagcaggaaaaaattacaaggttaccactagaccatgacaacgctagaagtggatgtcagttaaacaacaatc

SEQ ID NO: 37084 - DNA, 631 bp, Oryza sativa
catatgtgaaactttggcctgataaaaaactaaggaaaatagatatgctacatcaagttaaagacaatatgcaagtgtgtgtgtatatattaccatctgaaatttaatttgtgatctgaactgtttttcttcaacaaattcagagtagcagaaaattcttatctgaacaatcataatagtagaaaacttatctatgaacattaagagcagtagcaaagttacttactaggatgacagctttcaagttgccggcagtaagaggcacctcgaggctaccttccttgtgtatcctgatgagctcatccatcaagtcatcctcctcctccttggcgatgtcaggcggcggcgcggccatggcctccttttgctgctgccgctggcggaaggcgctgtccaccagctcgtaggacgcccggttgaccgcctcgccgcgagccgccgatggcgccggcgagccacgacgacgggaacaggtcgtcgaggctgaacccggaggcgagcttgacgatctccgggaggacctcgaggaagtcctcccgcctctcgaacctctcaccgatcatggggcgcatcgtggtgtccgcgatggcaaccttgatccgctcggtgaggttcacggccctgtcccggc

SEQ ID NO: 37085 - DNA, 909 bp, Oryza sativa
ataattgattatctccctatcttaaattccttatattttgagattgagaaagtatctaattaatgcgccagatatctatacaactaataattgattatctctctatcttaaatcccttatattttgatattgagaaagtatctaattaatgtgccagatatctatacaactaataattggttatctccctatctctaacaataaatctccagctagttggtgttgctttacatatgaatcagtttattattgaaggcatgacagaactccactgtccatagctaccaagtgatctgacaacacaaagtgagagtggattctaagttcaagatgtaggaatatattatatatactctacttacttgggttaagtggcatgttcacgagtgtatgagtatgaggtacgtgtctattgtcgtatatacatatgcattttccgtgtaatcaaaactaaataaatataaaatactctagttagttttcaagcgaacactctatgactcactcgacaacacttatccaaccatacacaggtaccatatacagatatgtatcatccgtgtactaaaaaatagtaatatgctctactttttttaagcgaaatcttccactcactcactagatacttgtccaaccatacataggtgccatgcatacatatatatcttctcgtgtaataaaaaatattaaaatattatacttatttttaagcaaactctccttcaatagacacttgtccaaccatacataggtaccataaatacatacatatcttctcgtgtaataaaaattattaatacattatacttatttaagcaaacactcctttaataaacactagtccaaccatgcagtggtgcagtagtatatttgtctttttttctggatgtacaaggtatcatcaaaatc

SEQ ID NO: 37086 - DNA, 691 bp, Oryza sativa
cgatcatctaagaaagttcagttgagcaatctactttgtctttacctgcagcaaccaaagtattgagttgagaaaccttcttagaaggcttctgtttgttactgtcattcttctctttgtcataattagaatcaggagaggcaacattgtcactggaacaatcatcttcaatttcctcaacttgatcaagtgtcggttctaccccacggacagataggtggtcttggttcaataacatgtcctgataatgtggatcttgatacaattggaatcaagagaggcgacattatcattagaactatcatctttaatttcctcaacttgatcaagcatcggctctacttgatgaaaagatagatggttttggttcaatggcataacctgataatgtggaaaagacaccgatcgagaaggatcttggacacaattgaaattaggagagtcaacattgtcattagaaccatcatctttaatttcctcaatttgatcaagcgtcagctctacttgatgaacaaataggtggttttggttcaatgacatatcctgatgatgttgaagagacactgatccagaagaatcttggacataattgaatgagaagagtcagcattgtcattggaaccatcatctttgattttctcaagttgatcatgtgccggctccactcgatgaacagataggtggttttggt

SEQ ID NO: 37087 - DNA, 500 bp, Oryza sativa
gagaggggcatggaagaaataagaataaggtaatttcattaaaaaaatttttgataaacacatcaaaaggataatatagtagtgacatataactagtaggtgtgaaatcatgacgaactggctccaaatagataaagaataataatatatttggtgtaaatgtaggaaacttataatgacacttctccaatgaatgtaggaaattttatgttctccagccttggaacactgtaatagccaaatgtgatcaacccatgtctgaatcacaaccaagcaaacaaaaaccatctcaaatctgacatatataaatcgatggatatagtgatatggttcaacatctatgctgattaatattatagggataaagtaacatttggtagattattatgtaagttacaatctgcacatgaaactctttaaaccaaaactacatcgaatcaagcattaaattaccataattgtgtatgaatttattccatccactcctaaggaatactact

SEQ ID NO: 37088 - DNA, 553 bp, Oryza sativa
gttcacttcacgtacggcgccgaacattcttccagctacatatattcaaagttgcagcgttgctttgcaggccagggcaggatttagaattaattaggcaatgcaaagttcttagaaaaaagtacgcattcagctggagccgatcgatgaaacgatccatcgatgggattccaacaaagcatatgcacgccggacaaatttgtactgaccttcctatacgggacattgtgtacatgtgttattccaagagtattctcgagcactcttgagtctaatacttgccattttgttttctctgaatacctttacgtctgatgactgacggccagctgcatatatgtacctatacagcatgcacatatcttagttcttcgatctgcaccctctgttctgtttacacacaggaaaaacgctagctacgcaacaattgcaaatatcttggttctttttccaaagactcgcacgagacggtgcgaagttttattgatagagcaggaaaaaattacaagattacaaccctagagggtcgtaaccaggcgaaaggaaaaaaata

SEQ ID NO: 37089 - DNA, 680 bp, Oryza sativa
catatgaaaaaattaacttattcaaaatacaagcaatataatcatttaatgcccaacttaaaaaataaaacttattattttttattttttaaaacttatgattaaatccatacattagtttcaccagaaaattaagagcaaaaactaaatgttatttaggtttaaattttaaatttgttttctaatttgtgataaactaattacatcccctttgttttttcgcaacaaatcttttttcactaaatatttgttgaaaagtaattttgaaattttatgcagaactttttttacaataaatcttttttattttaatgaaataattttttatttttaaaaattcataacaaatatttagtaattttccttattggttttcacaactcaaataatttacacataaaacatttctagcttttaacaatataccaaggacaacaaagtaatttctacaataactaacggtcaaactaatggtcaactacggaatgggtatgtaagggatccaaataaaaactcaggggcatataagagatcaaacaaatctcagggacgtagaagggattgggtgaaattacatgggcacgtagggaattggcccatatttcttgcccaaatttctcaatcccccaaccatattctttactactccctccgtttcgaaatgtttgacaccgttgact

SEQ ID NO: 37090 - DNA, 752 bp, Oryza sativa
tagcttttcccctatccaatgttgggaccaaatgataacacatctctaacagaaacagaaaattttcaaccatagtcactttcttcaagatatcccttccagttatttataatagagatgctggcattgcacctgtctatctatttttgctaaactagcctcaaagacatcgttttccttttcccattttcctgtttttaaggttcccatcactagccacctccttgcttgagttgtgaggctatatatttcttgagaaaattcccaatatacccctgaaaatttactcaatcccttcaatacccctgaatttgacatcatcccttatatacccctgagttttcattttgatctcctctatacccatctccgttagttgatcattagttgaccgttaaatattttaaaataactatattacccatcctatacaatggtacctacctaataaattttcatatgaaaaaattaacttatacaaaatacaagcaatataatcatttaatgcccaacttaaaaaataaaacttattattttttattttttaaaacttatgattaaatccatacattagtttcaccagaaaattaagagcaaaaactaaatgttatttaggtttaaattttaaatttgttttctaatttgtgataaactaattacatcccctttgttttttcgcaacaaatcttttttcactaaatatttgttgaaaagtaattttgaaattttatgcagaactttttttacaataa

SEQ ID NO: 37091 - DNA, 944 bp, Oryza sativa
tccttccccttctccatctccttctccttccccttccccttcccagcttggccgccaccgccaccccctcccttgacctccctcttctccaccacggcggccaccgccgccggcttcttggcggcctcctcgactcgctccggctgcggctccatctccagctgcagcttcgtctcgggctccgggggaggcgtgggcgggggcggggcgagcgccggcgcggcgtggagcttggtgcggcggatgagcgagctgaggtagcggctgcgctgctcgagctcctcggacgccggatccatggcgggcgtgggcgtcggagtcgtcttctgctgctcttccttccagggtgcggggacgcgcgcggggcgtcgtgctcacctgaggcggcggcggcggcgagcgttggtcaccatcgctgcctgcgccgctgcgcggtggtggggggaatggaaatggaagtggccaaatgagaggtcgtggtcaaagcacaggagaagtagtagcgccggttcacgagacgaggcggtgtggggtccgtttcccctggccttttcccgatggtgattggtgacccggcgaatgtggtgagcgagaccggtttgaaactttgaactcctaacgaacgtggtgattcgttgaggccttgaggggattgtcgcagaaatagttacattttgtaactgagagtactccctctatttttcaatagataatattgttgacttttaaataaatatttaatcatttatcttatttaaaaattttgtgtaaatatataagatataattcgaacttaaagtattttaagtgataaaacaactcacaacaaaataaattataattacataattttttagataaaatgaatggtctaacatagaaaaaaagtcaatagtatcatctattagtatgtcattgtgacctgtggagttgtttgggtaccg

SEQ ID NO: 37092 - DNA, 1100 bp, Oryza sativa
tgagacaaaatgtggatacccacgatactatcatggtaatgtacaacaccaccagaagagtcaagtgaaatgcagcacaagtagcatgaagtatttcctgcatgcaacaaaggctaacatggtaacaacccataaggccgcatctagcagtattttaccaacggcagttaacacaatcttcatgccaaggccagagtgcacagagttgacactccccccagtcaaaccagcagtgctatacaatgtaactgtggtagaaatgtttattaaaggcgcagtatgctgtgcaaaatatttactccctccgtcccaaaaaaagacaaaccctgagtttccatgtccaacgtttgaccgtccgtcttatttgaaaaaattagaaaaaaaattaaaaagacaagtcacgcataaaatattaatcatgttttattatctaacaacaatgaaaatatgaattataaaaaaaattcatataagatagatagtcaaagttggacacagaaatctaaagtttgcctttttttttttttcgagacggagagagtaatgcagaagcagcagaacgacatgtttactgggacgatgggacgatcgccagaacgacgcgtttcctgggacagaggaagtactacaaacctcagcaaaagtctcacccacaggcccaggaatcttcctttggtcaaacgtagccatcccaccaacagccgagggccccaccccttcaagctgccaggtcatcatcgcccccggtggtggcccccgcacgtcagccactccagtaccccaccccgaccccgacccctcacccgccgcgtgacgttaccgcccacaccccaaacccgaccgttacctcaccgggttcaaaacggcccactcgccgcccgccacgtgtccgacccgcaccccgcccggtcggtccccacgtgggtgagctgaccgcgcccccgagcttgcctttgcgtgcgccgcgcggtgacgagacgacgcgagtagtgcgaggtggagaagacgagccgacaccaccaccaccaccaccaccacgagaggaggaagccgcgggtctcctcgtcttctcctctctctctctcctcaaccagctgtct

SEQ ID NO: 37093 - DNA, 2490 bp, Oryza sativa
atatagtttttacaaaatattttgaccaaatgtagctttgctttccattaattaaaaaaaattggaagcgcttaaggcagcaatgtcacactacattcttggtttatgtggtacccacacacacaatgtactatgaatcaactatagtaggctcctgttggaacatgttgtcttggctgctgatttgctaagaaaggcttcttagttcttatactactgttgtgcaactttgaaacatcatggatattgaagcatgtcaactagggaagaaaaaggaaactggaagaggtcagtgttaggattaagttttcctagctcattgagttgttaaattattttgaaggtaggactgaaagaataaaaccatatcagcaagcaataaatgagagatgtgctctcctgatgcgctaaagaacattatgatctgttaggcagatcccctgcaagaaatttgtcttagttagttgcgagatttcagaagtacgatatcttctgggatgcaggttgatatacaagctgttattgatgttaagacttaatttgcagtcaaattatgtacctaatgaattattccaatatatttcctttctgtgaagatggttaaaggggtttgaagcatgacttggatgccaaggacacctcaaatattcaattttcgaattttggatgccatatcggttagttttccatctcaaaagagtatcaacagatttttgaagaaggtgatacatattccaaagtttgctaatgcataaatctgttataaaacaaaagcaatatgctgatggttatcgcatatccttgtgagttgtgatacaggagaaatgagctatcactttttctatgagttggccagctctccttggatacattatattttcccctcttcctaccaatcaacaaggaagacattttgtacaacgtacaatgctttaaagaactgaagggtatacattagcttaccatgcattttgaactgttgtatgcacaaaacagtcagagcacgggacatacatactaactaggtccagtagatgtattttgttgtcatttaaagttttaaactgctgtagcaattcatcaggtgatcaggttcttcataatatgcaacctgattcttacataatgttattacttacctaataggaggtcaatggacggctgtttgtatgaagtataagcgtatgactgtatggaattgcagttttccaaagatcaagagtctggtatagtgatatgtaacctccaaaaacttcttaaattccatgtcgatccattctataccttttgcactttgagctatctgagatgttctctcctgaagtgctaaagaacgttctgatctgttagggaagatcccctgcaaggaacttgactaatctgtcacaagatttcagaaatacattgtcttctggatgcaggttgatatataagctgttattgatgttaagacttaatttgctgtcaaatcatataacaaactattccaatttatttcctttctgtgaatctggtcaaagggtttcgaagcatgacttgcatacgaaggatacctcaaatattcaatttttaaatttttgggatccttttggtttgccactgtttgccatcttgagagtatcgacctggtaagctgcttatttatatgcatatgctcattgtgtttgtgtgatgatatggaaattgatgtgctgattaaagccttcttgtgcattctttgggcattcatttcttatttgcttgtgatgaatctgtaggagacattcaactggacaatttgaagagcatatccatcaaataaaggtgcttcctggtaattgataaatttaacagtagcaccattgttagttgtgcacttatcaaaaagctcaaacttatttgcaagttggtcttaggacgcttattacttttgacaaaggggtatcacatttgctataagggctctcccaatgcatagtgtctagattattttgtattagaacagagaactaaaacttcaacttaagaggaattttacttcttgatttcactattggtgccacattagtagcagagagaactaaaagtccattgtttgaatagtaatgtaagttatttaggtgcataattttaagaggagcttgacttgttttcttttggtgccacattgtactgttgcatgggggtcgattaagatactgatgcaactcgaggtgttcatcacaacaggaagatgcaatataaaagcctgcttagatataccagctaatattgaacttgccgcacctttggttgggatttgtatttgatgccaaataaggggatcaggtgctgagatttctggttctcattgaccagccacagaaacagaaaaggtaaaaagaactcccccttttggtcatgtacatttgaatttcttgcagtgagttcaaccctagtgcctagttggaagaagctgatccttcttattttgatttacagcacatttccttttcttctgtaagaaattat

SEQ ID NO: 37094 - DNA, 562 bp, Oryza sativa
tgctgttgtttccttttgaaggatcttgacttgaaataggtcactcgtgttcaatcctgccctcgggggctcgggtcggctaaaatcgccaaacggggcccagaaccgagccgtgccccggggcgtggtgaactccgggggggaatcggcaaaaacccacaatcgggtcacccataaccctcggtcaccacgctcccggcctggctagtctcgacatgtggatctccccaggcactagccccgacccgagccatttgaggactaggacctgggcacgagcccttgttcaagccaagacacaaaaggaccgcggcacagacatcctcgtctcatacacacaacaaatagaattgacacaaaaaatttcctctttatttgattgcagattaaatcagtctatacaagaagggggcccgaaggcctcggaagaagaaaagaagaaactatttaaagattggcgggggcctgggggctcactccgatgcacccgggtcgccagcctcgtcgccactgtcgcccactccgccgtcatcgtcctcctcgtcggagttgagggcgaaca

SEQ ID NO: 37095 - DNA, 609 bp, Oryza sativa
aggaagaaggagtcgatcttgtcgatgtcggcggcgagggcggcgacgaaggcggcctcgtcggccggcgagccggagatggaggcgacgatgcgcttcagctccttgtagctcacgaacttgtccctccactccgggaggctctgctcgatctgcctcttgagcagcttcccaaacttcatctctgcaactgatcactgatcaatacctacagataactgattaatcttgtagcaagaacagcattggttagctaaatctgtgtttggtggatttgtgcgtggtgagtgctcgtgatataagagcagagtttcgtggaatatttaccagcatatgccaagcgtggtgactggcgtgattgcccaaaacgtgctatggacaccccgtggatctatttgcgcgtcgggtgtcacgttttaagtttgtggttttattatacatgcgtatgatttgtagcatggatttgagatagagtaatattattacaatatagatcgagttctctctctctttccttttttttttgaaaataccgagggttatttgtcatcacgtaatcttataatttataatttcaggtaacatattgttccatcatgaaatttcata

SEQ ID NO: 37096 - DNA, 1260 bp, Oryza sativa
ccgtctgttaatgttataaataagtcatacccaataatcttgggttagtctctgcgggacccaccatatacccagttctatacggaatcatacattatatacggaagatattttggataaggaaggggaagtaaagttctactcgggcactataaggactactcggatcatattcatactttgtctctctagttctatttggacaagggggcacctgagggtataaatacatgaccccctagaaggagatgagagatggcaagccagaagatagatctagaacaaatctacacaagccaatacagatttagagaatccaagacaagccaacatatatacaccaaaacaagcctagacaaatccaatctgaagctacaaaggcaaacatgagggatctagagctacctccaatctcaccgagttcacattcgaagaaaaagactacactagctgttggctgcatgtaaaggtgcaaagccgctatgctaacaaagattggattaagtcatccaattattgcactaatgaaatattgatatataaaggtaactctggatttggctaatatgagtagggctattacttgtcagttaagggggcccaacctatatataaattcttgcctattgtctcttttaccctaatatcgcgtacaccctgataccgacgaacaccataccctacaaataccgtagtcacgatatagcctatcgacatcgtcaaaattgttacttccttcatcttaaaatataaacttttagttatctaaacaactatatatctaaatttataactaaaagttgcttataatattataggacggcagtaatactaccaacaaaagcacccatgcgctagtctatgactagggatcatcggttggcctaataagccaaagccaaatttaaattttttatcttaattttgaagctaattttaagatatttttaattttttatattggtatttaaattttatatataaattaatttttattttttaataaaccgttttgatttattagaaaatgtggacaaccggccgtagaaccccgtggtatgtcgcttcgtccagaactatccagacctcccatatgcatgatcatggagctagttaaacgcatacacagaatacaaaaagaagcgacacacactacgtacataattaaattggatttacgaatccaccaggggccgcaaaacggaaggttcgaagctaggcagcgcgcctaactatttatgggtaccgagctcgaattcg

SEQ ID NO: 37097 - DNA, 509 bp, Oryza sativa
tataaatttgcaatttgcagtgaataaagatgtactaattattggacgaggcattaccatcaatctatccagtctgcaaggtgctctaccattgttagactctcgtagtctcgttcccgctgtcctgcacacacgcaaataacaaagaaaaaaaatcagagaatggggattagactcaaggaatggagatcagaaaggaaggaggcggcggtcagtggcggatggcgtgggcggagagggctgcgaggacggcggcgcggtggaaagaagggggacggcggtcaatggcggatgaggaggcgtggttgtcgtcgacggagtgtgaggcggagtcgggcgaagacgaacatggcaagggagtcgcgtatgagatcggggcggcggccagtggcggatcggagaccgcgggatccagaggatctcaccgtggatgtttgcggtgcgacgaatggagggcacgacgaggaggcgagatggatggcgacctgacggtgatgaatcgacgtatg

SEQ ID NO: 37098 - DNA, 733 bp, Oryza sativa
gaaaagaccaataatgcccaataatgctactttactcgcttggatccattttagttgagttgtatttactatttatgcaaacccaactttgatggtaaaatacctaaaattattatatgtacgtagtatgtgccccctccagttataaatatttaatgcagttgattttgatcataaagcttgatcatttatcatatttaaaagtttagtgtaaaaatatgcaaaaatatcatgtttaaagtacctttaccaataaaataagtcataaaaaaattagtgtactttttttaataagacaaattatcaaattttgttgtcaaagtcaactgcgttatgaccagagcaagtaccggaatttctcttaacatacagttggcattgtcttaattgtattggacttgtcgagcttggtgtttttttgtgggcatttctgacatgattttccctaatctatttacaggaggaaccattacctttgacaggacctaataatcgagtacttggtgcactagacagaatagagttacatttaaagattagagacgatggtggtgttgaccaagatttctgcgagaagccgagaacacaatgcatcagctataattttttaggttcataatataaatttagtgaaagtggcaacaaaatgtccggaccagtatgtgaacaagtagaatcgaatggcaaattaatcttctgtagctgccataaaattaggaacaaaattatgtag

SEQ ID NO: 37099 - DNA, 1437 bp, Oryza sativa
agcgtgccagttgatttgatcctgcagtcaacaagaaataaagacaaagaaactacggttaaattcataaatgatagccgatcgaccagtcgccgatgacgtatgatttatctttgagccgatatcgtatttgattcgatcggcaatcataaataggcaagaaagaactaaatctattcgatcggctgtaggtatcaacggaatataatccctacgtcgatatatacttaaatcaagcgattgggatagatcggtcatcacgccgagacagtataaatcacttagatcgaaatatatactaaggaaaggactataagcattcataacatagctgatcagatagatctagcatgaatcggctaatactccgataccactatattaagatattaaagcaagtaaaatatatcaaacagaagattaacatactttgttgtagtaagatcttaacataaaaggcagatctatcatatcaattaagcacatgaaaaaatataaagctaaataaggtaagatcggctgaaaccccgacactaccctaatcggcaaccaaaagcaggctagagatcatggttctaatcacgacttataaggtcaaactcaactgatgcagctataagtatgaaaagaacaacaatatctagacaatcaagccgttggatgcttcatagagtggtagataccctatataatcgaagtcaacgttggtatttaacttaatcggctgccttctcacaatagatgttaaccgattgaaggttaaataacaatattgccagagattatataggatatatggtaacttgacgaattatataaacaagattagagtatcataaagatggaagcactaatcccgagaacgcaagccgccataacaagttttacctctagttgaagatcgaaaccgatgcagctcaacccggcagcaggaactcgtcgaaacaaaacgaaagtaaaaggatggcgatgcgccgagattgttattgaacgtgtgttagatcaattacatggggctcagggtctatttatacccgagattacaaaatatgtccatgtcggacacgactcttatctctaacaaactctaagataccataagtctttgcggcagacttttgctcaaacttatctctaaggaaattacataaaatatcctaattgatagatacaattaccttctcaagacttaatccgtgcatggcaatccacatgaagcacattaactcaacctgacaatgtgtatcgagtcatattgttggaatcggcttaatcggctaaccttgtctgactcgaactctgccgactctgattgcagccgattcttgctctgttcccagaacgatctccatcttggattccgctaaagttttatcttcatctccgatacttgaattatcaaatttggttgttacaaatatgtcggtgatttattgc

SEQ ID NO: 37100 - DNA, 1066 bp, Oryza sativa
atgctggtgctcagtccattgcctgcatcgactcttggatcccaattgaggaagctccctgcatttgtgcaagatggcctttttgcgagcagtcaggtaaaggcaaaatgttcacagttgctgcttgtgctattaattctaattttgatcattctgttacactaatgactatgggagcagccgcattctgcatcgcaccattggattggatgctttctgcacgcagcataggagtccatatgcttccagacaacttgctatcacgtaatcccttccagacaactgcattataatttgactttgtgttgtttgacaaatttgtcagatttaggcatgagttatgaacaggatccttgtatggtgctaaaaagttttgggcgtatatatgacgtgcaaagaatagtttagacccaatgaaactgtagagtattattgtttatgcctgcagttgcttcaaagagaacaaattcaatctatctctgttgcttgtgtttcttttgaagccaccttataatttttagcacttaatgaagccaactcttctattgggtatttcaaggaagatatggggtcttgctttcagaatagaaattgtttctggtggttgtgcctgtgcatcctttgttgctgcttaggaaaaataagtctgcatggctcataccatcacctggaatatttttgtttcatatcatctgaatttcaattaataaagtctgtatccggttctatttcactattggtggtttctaaccgtcaataatacttgaaatcaagtttgtagtctgcatctggttctacattctttggtggcctcaaattgttatcacatatgcagattcactattgagtatgtgataattaattatttgtaatgacatttctgttatatcttatatactcccttctttgtaattaacagtaatggaattattgttagttcaatttgaaccaaccaacatgtcatataataaaaacaaatagagcgtgaaaatagcatttttcgaggttatgtgactaaatcccttgaacaaagaactttaaaatagaaagggaggggtaccgagct

SEQ ID NO: 37101 - DNA, 1936 bp, Oryza sativa
  unsure (1)..(1936): unsure at all n locations
gtttctattgcgccataggtgaaacggactattattttccaaaaacttttgtgtggactcatactaaatctcagccattaaaatttagacttatcacgatcctaaggttaaaatttagacttatcacgatctaaaggttaatatttttcttttttcnnnnnnnnnnnnnnnnnnnnnnnnnnnnnnnnnnnaacgtgatgcttttttttagctgtcttaataatataataatagatagatagatattttttgcgagccgaaaaaatcagggcgttaaaatggcggcgctgcccgaacaccagcaagctgccccaacccaacgctgaggtctggtggtgacgcgcgcggcctggcggaggcggcggcagtgacgatggcccgacggagatcaaagagcattttcgttcgttcactatatatgcacaaaccattctgtggcgtacgtgtttgagaattcatgtttgcaaaaaaccattctatgcatatatagcgtgttctctctctctatatatgcatttctgtatatttgagaatggaatttcagtgaaacccacagattaggacaatattttggccaagccgcgttaatttggaggatgtggcacaacctcaattttgtcaagaatacacacatgtaaccaaattctcgcaccgttacgctaaatttttaagttgtcatatactcaaatgcacccagttgataaagttgtcgtacttaattactccctctatctcacaatgtaagtcattctagcatttctcatatttatattgatattagtgaatctagacatatgtatctatctagattcattaacaacaatataaatgtggaaaatgttagaatgacttacattgtgaaacggagaaagtatatgaagtaatttttacataaatgtatgcatgcacccactagttcttgtgcccagccgtggcataaatttcatgtgcacgtggctcaattttcgctattaattttttcccaatgccagtatatatatagaacaaatgggctgcttatatcatactcatatgtttaattgcgccagtgttattatttcgttacattggaaagattttgttttaataatggataatccggcctcgactatttgaaagctgcaactacatgtacctttcaaggtagcatcaaatgcaaagtacataaggatggtgagaaaataaacttaaatcacaccaactcaacacaggagatacaacttaattactacctccgttccaaaatgttctacctagtatgcgatgtgactaagatggaggaagtatttatttaggaagaaatcatattactaaatctccattaaaactagcttggcgaagatttacatggtcgttacattgtctccacattctggcacgcattatgaatcaatttttatcgtcatcgcatatttgtagctaggcccaaaacattagctagttgttacccataaaaacctgcatataagatttagttgaagttttgtcaaaagccatatcatttttagtaatccatagaacccaacataaagcaaattcttctactaaaatatgtttcttggttgagtcaataccaataagccaatttccaaataaatgtaagaagttatttgatggattcatatagaaagaaatatgaacaattctcaaaagaaatttagcaaagtgactatcaaagaacaattgttcaatagttccgccgtacatacaaaagaaacattctctcccatttcaattccttcgtgctaaattattcctagttaaaatcaccctttaaataaatatcacataaatatatttattttaaggggtatcttctgttggaaatatagtcattaatcggcatattttaatccaaaatgttaaagcaataatcatggcataagcagtgtaggacgatcttaacataaccagtagcatactatgcgcatcatga

SEQ ID NO: 37102 - DNA, 2130 bp, Oryza sativa
cttggactactggagatgatcagaacaaaatcatcctgtatgacagtgaagtggaaggcaggaacagagttcttggagctgatggatcagtcgatctgactcgctgtttcgtagccgtcaatttggatgatgaactggtgctcaatgtctgtgtttctgaaggagctggctcaatctttgagctcgttcttggacacaatgatgaagaatgtgtccttgagcaaggtccctatgaactgcaggtgaatgttgtttggacagctgccttgaagcatcgacagcgcagaaaattgtttgagcgtatcggtgacttccgcgtgttaaggtgatatgtagtatgaagatttatatgggggaagctgttacatctcaagcagttctttcttgttatatagattataatttttttgttcagctgagttgaactcgtgcttaactgaaaatctgcctgcaagacttatttagttatatgtactggtagactggtaatctataagattactgatgtctagtagggagtatggatctgtctggtagtctgtataaccttttctgaacctaccaaagtttattttgcgttcttggagaagtgtcttgtctgtcattgttacttactgggttgtgagcatcggattgaggtagtttgtagaggtttgagcgccatgtgtgctctactgttgccatttgctgttgagagatgctgagaacctgacgtttatggctatatatatgttgatgttttgtaagttaatgctactactattgctagaactaagtaagttgattcattttatgacaaagtgagtactcagttaataaccgaacaaaacaaaataacactatgatgcactgaaatagttcggtcagctttggctacatagtaagatgttgaattcggtcgactatcagcaggtgggtttgaactttggatggttgagtactgttggcatgtgttccagccactgtttccgttatacatttattataaatcattttgacttttcctcaagttgaatttttttaaagtctgatcaaatttatataaatactagtaatgtgcccgtgctaacgctacagtaaaatttcatattgcaaatgtaatcgagcgtagacagtttatgcaactattgaaatttgtcaatgttctgcattacatcttggttaaaccgaacattttgcagtgcggacaaacaggacagtccatttccagttttgacagaaatcaagattcattgtattttccactgaagtcgaaaatgaaaacaccacacttcagagcatgcaagcaaccagagtacaataatgcacatgatatctatgttggcaagaaataactaagccccatttgttttttgaggttcagttttttcccacacaacataaaaattaaataaataccagaaattcattgaatagataaacaacaatatctttacattagaggaataatatatatacattgttcttaatgagaatacatcaatatatattgtggtaacacctagtaggtttaaaaaaattaactcaggattttgtaacatgtgtcactaatatttaacataaaatagaacaatgccatgtaatttgcctattctgcacttgaaggttggtgatgctttggtagctggtagctggcaaccgaggggaaatagctatatgtgaaatgatttgccatgttctgaccgacctaaaagtgcatgacaaaatgttattttgcacgatcatatgtatcaagtcaagattgtcatgaaaagaaaaatcctcagtatggcaaattgaaaaggatgcttctcttcttcacaggtccattgtatcctttagagtagatcgtttcaaacaactttttctcaaatggcaataccaagctagcaccaacatggccttgcatgacacacctccagtgttcatggaagtctgggcaaattatcatggggtgtacaatatctcagcaccctaaagaaccataaaccttgcataccggaaacaattgatcccaataaatacaaaaaggacataacatgttgtgacagcccagggcccgaaaacggcattggtcgcaaaaatttcggaatcggagtttacagtcaccggtaatatctcctatttaagctagtgtagatagagctagct

SEQ ID NO: 37103 - DNA, 1057 bp, Oryza sativa
aagacttaatccgtgcatggcaatccacatgaagcacattaactcaacctgacaatgtgtatcgagtcatattgttggaatcggcttaatcggctaaccttgtctgactcgaactctgccgactctgattgcagccgattcttgctctgttcccagaacgatctccatcttggattccgcttcggttttatcttcatctccgatacttgaattatcaaatttggttgttaacaaatatgtcggtgatttattgcaaaagaatgtttcaattcactgcaacattagatctatacatagtgaaacattatgagtacactaggtgaaatattttttgtggaacaaaaaatgaaacgataaaacgaattcccttaatagagagtttccaaaatacgtgggtgatttgttgcaatggagtatgtggtgtacacatagcagggtgggggcagagacacgtgggtggggccagcggacgcgtccatcgtttgggtgggagcgcccgatcccccccccccccccaccgagcgaccgacggggaggattcccggtttgcaatcctaatgctatattaatcaaggtatgcagattggatagtaaaatctataaggcgtgcgaattgagtgctatattctctaaattctcgtcgtcttcctgtctcacgcggaggcagcgatattccccttctcccacgactttcttcgtcttcttcgtctctctccccttctcccacggcttgctgctgctgcccatatcagcaggaccccatctccggcgacatccctccccaggcggcaggcggcggtgtgtgctgatcagctgatgcccccacgtcggcggcatcctggcggtcggctcccatggcggcggcgtcctatcctgtcgggcagcgtgctgacaacagaaacacttataggatttggcgctgaaaattgtttatgccctttgaacaacaaagcatgttcattatattgataaacaaaaatttctgctatcagatgtgctgcaaaaatcgagatgttgaggttatataatttagtgctgaaaagttaatgttctattt

SEQ ID NO: 37104 - DNA, 583 bp, Oryza sativa
atttcgctgcaaccaagaaacaccaacatggaagcatgtccccactgctcctaatctgaaaaatggctgcaacaaaagtaacagtgggctacggtcacggagattactgaacaaatccgggcaaagtatacactggtgtctcaacattattcacttatgctatgattccaaactgcacagcttcatcacagctcaaaggagatattcaaccacacccgggtattataccaacaagcacattgtcaactccagatactacaaaagtacaaatcaccctacttaatcaacacatagagccaggcacagcagatgagcgagacatgcatgttattcacttcccccagcaattactgtacaacatatagactgctaatagaacaacataaacagcagcaggggacatctggataaaagctatctacaatacttgcgcatgttcctctagctagatatcaggaacaaacagaacacagaggcaaatatggcaactaaaaaaaatggttttagatccacacagacaatgcagtgtccttctctacaaagaaacagctgatcgcaaattaagcgctatgcaagctcactg

SEQ ID NO: 37105 - DNA, 644 bp, Oryza sativa
accccctccgcaacagcgcgtccacgttctttctcctgatagataaggaggccgcgagtgcgatccgttttcatcgcttctttcccggggttagtttctccttctccgcctgagttgctctcgcttcctcgcttctgatctcttgcgcgcacgagagattggaaggagcagagcctccgaaaccacaccttcgcctgagatctgcaccgggtaggcgggtgatcaggtttttggggagtgcctcccgcacgactgctcatcgcgatgtctggagtcgccgccgctgctggaggagatggcggaggtggtgcgcccccaacaggagccggagctggtgcgccaggaggaggtgccgtgaacgacaacaacaacggaggcaattttgcctcaccatccagcagagggccattctcggggtataatcttctcctcctgttcccattgttagcgctattcctgttcccattgttagcgctatcgctatactatgtgcgctatgttcttgttcctgttcttcatgatgcctctatacgttactgttatgttcctgttcctgacatttatgatgcgcatagtatgctactggttatgtaaagaacggcctacactgcttatgccatgaatattgctttaacattttggat

SEQ ID NO: 37106 - DNA, 1740 bp, Oryza sativa
atcgtgataagtctaaattttaatggctgagatttagtatgagtccacacaaaagtttttggaaaataatagtccgtttcacctatggcgcaatagaaacagaaacataatcaaattattacaatgacagattacatgttagatatggattgatgtatgacggcatgcaacagctaacaactgacatcagtaaatttgaaacggaatactagcgtaaaacagaatcctatactgattaatacgtagcgtaaaaaagcaatcaacataattaaaacagaatcctacggtgattacctagcatcagaaagcaatcaacagtggttaatcaatagaagttcagcacaattaaaaataaggaatattagaagtagagtatagagtccatataggaatttaaaacacaaaaattcagaataaacataataaaattaaaagtagagtttagagttcgtataaaatacaatttataaataaataaaattcaaaattaaaaaaacatgggaagaagagtctaaagtcaaatacaatttagaattaactgaaattaaaaattaaaaattaaataatattgaaagatgagtttagattccacatagaaatacaactattaataataaaaatttagaaataaaaataaataatattggaagaagagcctatagtctatatagaaatataattagtagataacgaaaatgctaaattaaaaaaaaataaatattgaaacacaagtctagagtccatataggaatataatttacaaataactaaaatttgatattaaaaataattaataactaacacgtatataaaatacaatataaatattacacattagtagtttcgtaaagttagtacaaaatttaaaattatgttgtcattttaatatatttgaataatgcattgataaaacatatatgatattatgagagatattagccgcgcaatctacgcgggccagcggatagtaattcccacattaatcggataaaaagaaaaggagattccaactagaaagacaatttaaaaataattgaaattcgggattaaaaattagcattattgaaagaagagtccatataataacccaatacgagattaattaatatttgaaataaaaaataaaataaaatacgaaattagcaaaaaaaaaaaggaagataagagttcgagtagaaatacaatttaaaaataactaaaattcgaaattaaaattaagcaatattgaaagaagagtgatataaaaacccaatatgagattattaaaattcggagtaaaaaattaaaaaaaatctaaattagaaaaaaataaaaggagagtttaagtagaaatacaatttaaaattaactgaaattcggaattaaatataagcaataatgaaataagagtatatataagaatccaatacgagattaattaaaattcggaataaaataaaataaaatccaaattagaaaaattaaaaggaggttcaaataggaatacaattttgaaacaacttaaattgaaaataaaaaataaaaatattaaaagaacccaatacgatattagttaaaattcgaaacaaaaaaaataaaataaattctgaaattaaaaaataaaaataagattttaactaggaatacaatttataaataactgaaagtggggataaaaaataaatactattaataccatctaaaacacatgacgagattaattaagtaacatgcctataaaggagtagagtggtggcggtt

SEQ ID NO: 37107 - DNA, 520 bp, Oryza sativa
gtatacattagcgtaccattttgtgctattgtagtaggcacgaaacagtcagagcacaacatacatacaaactaggtccagtagatgtattttgttgtcatttgaaaatttaaaactgctgtaggcttgtagcaattcatcaggttcttcaaaatatgcaacctgatccttatatgatgttattatttacctaataggatgtcctgccaatgaagggctgtttgtatgaaatataagcgtttggatgcaggttgatatatactccactttgtttccactttattggtatgcatcctctccgtctcaaaaagattcaaatcctggctatgtcttgattagttgatttattttgggagggaagatgtatgtcattttggagaaagctgttattgatgttaagacttaatttgctgtcaagtcatatggtagtaataaactattccactttatttcctcagacctacctgcaagtttataataaactattccactttatttcctagactttatattttcgtgg

SEQ ID NO: 37108 - DNA, 601 bp, Oryza sativa
aataaagtaaaccaaacttgcaagataatttgaaatagttgaaaacaaggttacaaattttgtactttttaacaacaggtttcaaaagaaataaaagaaagttataaaatcatcatgctaaatttattttattgtagcaagattaaataaaacaatattgtaaaacttttgctgataaatgagccattagtacagtaatggatgtacagtactaataacactggaataaattttgaataagaaccattaaaagagattatgaaatgcatgtgccattagtttggtttaattaaaagagaaagggaggagaacagttctacttttccaatatttttagagggcttctatgggtaaccatttggcataacctagggtcaagggggctctgataccaacttgtcacgtccggaatttctatccaaaatttcaaacgcttacatgtgtgtaaaccctcgtccaggaatcagtcgaggcacacaataacaaattgataatagagtgcaattattactctaattaataagcgaatataaagtcattacagaggtagatagttcctctcaaacaataaagttctaagcagcggaaaataagataaacg

SEQ ID NO: 37109 - DNA, 510 bp, Oryza sativa
tatagggcgaattcgagctcggtaccctatgccgtaccaccatctacaagtaaacgattcatgaagagaagtgtagttgaatgactgtgttttaatgtgtcatcgtactcataacatttctatcattcatgacagacggatgaattgataggcacatatgtggtgacactgctatatgtgaatcttaaaaagctaacattgttatcaacgttgctaacttgctactatttcattgctctccaatgaacaagcgttgttgtgcgggtgtatctattacctatactatatacacgttaggtggtagagagcctatataagattttatatatacctgaggagttttttacaaagtagtctaacacgcgccaatttctagaaggatccaaacaattaaaaaaaccgaaaagagaccgatacgagaaggatgttattagctttagattaatagttttttgtgtgttgcattttattacaaacaatacttaagaatctacatacaggtgttacgtg

SEQ ID NO: 37110 - DNA, 526 bp, Oryza sativa
aggtaaaataaaaattgactactaccactaatagcagcagtctgacaaccgagtaacagctgcagcctatagcttactgtctaaggaaaccaaataactaactagaacaaggattatactaacagttattacatacgcttgagactgagttgtgatacaggagaaatgagctctcacttctcctatgagttggccagctctttttttttttttagccgggccggagttggccagctctccttggatacattcctttttttctcttcatatcaatcaacacggaagaaatttgtacaatgatccttaaagaacttaagggtatacattagcgtaccattttgtgctattgtgggcacgaaacagtcagagcacaacatacataccaactagatccagtagatgtattttgtagtcatttgaagtttaaaactgctgtaggcttgtagcaattcatcaggttcttcaaaatatgcaacctgattcttatacgatgttattatttacctaataggatgccctgccaatg

SEQ ID NO: 37111 - DNA, 644 bp, Oryza sativa
ttcaagagttaatgatatcttatttaatatttgttatttaagatcggagcaaataatattacgtcttcatagccgctcgaagcacgtacagctccatcaagtgcgtactcccccgtcctcgttccaaaatataagtatttttagtatggtataaatcaaacttttaaaattttaactattaataaaaaaaattaaaaagattaatcatgtaaatttgatgttatcatatttatcattaaacgaactatcataatatgaactctctttatttaaaacattttacttttgtagatattgttggtcaaagaagcataagcatcttgaagatcatgccgagatcttaatgcttatattttaggacgtaaggagtatattagtggagtaggagtactccctccgtttcaagttataggatgttttgacttaggttaaagtcaaactgttttaagtttatttgaccaaatttataaaaaaaagtaataatattttcaacccaagacaaatttattatgaaaatatatttaattactgatttgatatatattctggcggtgacatgggaccgggagtatcatgacttagagacttgaggcagacacgatcacccacgtggcctaaccccctcgggggggggggtcggaccc

SEQ ID NO: 37112 - DNA, 764 bp, Oryza sativa
aaaaaaatagaggaatagaaaaaaatacatgattctaacagaaatataagtgcaaaacagataattgtaaaacatatgaaaaaatataaaaactaccgtttgattgaaccacataaaaaacacttaccatagaatggataaaaaagatagattcaaaggaatctcttgctaacttttctccaaaattttcataggattacctatttcataggaaatgataggatataattcaatccgttgtttgaaagatttttatagtaattatttttcatataattgaaatcctccaaaatttctatatttttttctataaattaaaggggctcttagcttttattgattttctttttgtttctccgggagtctgcaggatttttgttttagcttgtgtacgaggtgatgcctatgatgcacaagctaaccatgagacgccaatgtccaattttcgggcccctttaaatcgtaggaatgaaaaaaatagatgaataggaaaaaatcaggattctgacaggaatgcaattgtataacagaggattacaaaacacaggaaaaacataggaatgaccatttgattggaccaaggaaaaacgcaggaatcagatgagagagatagactcagaggaaatgttccaagaggttagacctcttgctaactttcctccaaaatatgcataagattacccattccataggaaattcataggaattttagaggattttattcctataggaatttttcctatatagccctttgaatcaaagga

SEQ ID NO: 37113 - DNA, 1068 bp, Oryza sativa
tctacgtatttatattcattcattaggtctattcgttatttgtgtataggagtaaatggacatggatacacgcatccatacacacaagtattatagctcacatgtaatatcttgatttgctattggctagaaaatagtggggatggtgtatgtatcgagtttgttatatattatgagagagttattagttttcgttggttttagtgtacctatgaaatatttagatcaatttaaaatggagggaggatcatctttggagaagttgaggttagacgtggctcaatcacgacagccggccgtaataatctcatcgaagacaactcgccgacgagggaaacgacgttaaccataacgttgacgacgttgataccgtgaaaatgaaaataatattttaaagatctatttataaaaaaaaatttgaaaaaaactacaatgtgaaaaatactccgcgggcggtgagcggagtctcggacgacatcgcggcgcttccaaagaaaaggagcaacgtatacacgcggtcaaaacacagctgcggaaaaaggccctgggccccactttgtgggccccgctcccccgggccggccacgcgcgtcaagcacgcgccacgtggcctccaaagggacgacgacgcgcgggagatccgatcgtgacggctcgtttcggcttcgacggtcgggatctccgtctcgccgtcggcaacgcggcgtaacggctagttttgtgtcgttttctggggggaccgctccaggagccgtgcgtgtggtgtgaactccgcaagtccgttatacaggagtacgtacgtcgcgccatcaccagctgtgaccgcctggcgcccggtgaacggttttgaaacacgttctcgcttgttttttttaatggtgcgaagttctattgagcaggaaaaaattactccctccgtttcaaaatatttggcaccgttgaccttttagtacgtgtttgaccattcgtcttattaaaaaaacaattatttattcatatcatttgatttaaagcctcatcgtttggcatattttctgaatatgtcaaatgacatattttgcaaacgaa

SEQ ID NO: 37114 - DNA, 696 bp, Oryza sativa
ccgttgatcaaattcaatcgtacgtgagtcggacagttgggtcatatgcatagcaatttccaaagttaaatagcaaaagatagccttttcatcagaagatagaacaaaacggttttacgtgaaactagacattagacctaatttgttttgtctgttacacggaaaacacgtgcacactgctatgttttcaaaaccggtcagttttagctggttttcataccgtgttgaccgaaagttgttggtttttatcgggtttctataaaccgttgataagcgggtataatttccgatacgaaaaggtgaaccctagccacaagatggtccaagatgccactaagttcctaataatggccactgtcataggaagaagattctccaaagcaacaattccatggggacgctcacgtcgccgttgcttgtttgggaaatcggaccaagattctaatatggaaacttgtgtggagaaatgggatgtcgtgacgacgctcaagattgttgccgtcatcaaagcttgcaagaatttgacaaagctttcgtcattccacaatcaaatcctcacacacaaccaccctatgtgccagacataaccaccaattcaagaacaccacaaagctgaacccgcagccccatggcctcaagccttaccaacacaccaaaggcaggctagctagatccatgacacacgtgacaatgctg

SEQ ID NO: 37115 - DNA, 1011 bp, Oryza sativa
atcaatttcaagtgttagcacgtcaaagaaaattcgcatagaaatttcagctgtcagttattgttcattaatcttaatttgaagtgttgtcaattcaaatatactacttagcaatttcagttttcattggcaagtgcacagtttcggttacttgcaattttgaagctgtgcattggcagggtagttatcaatttcatacacaaatgaaaacatagggaaaaggccgaaaggctaacgggcgatcgatcgctgccagcgatcgttttttttttcttttcctctttttagtaagtttatacctaaagtttacacatctaaactttatccacctaaagtttgtagagcgaatgtgtataagtcaaaagtttatatacccgattcaaattcgaattcagattcaaatattttatataaaaatatttctatacacaaagtttatacgtgcaaaatttatggtataaagtctatgcacatgaatgagagtattagattctaattgtcttttacttttttttgaaatttatgatgtaatagaaaagtttttgaactcgtcattttgacggtttgaaggatagatatatgaggaaagatgatacaaacaattaagttctttgattaatataataaagcttttagaatgaccctttttcctaggggctgttagtgggcgggtaatcgtttccctctcctcctagcgatcatacgtccctccctctaatactcctctttcatctctctttttttaacaaacagtgcccctaattgaagtactcagttgacacttgacagtgtacctaccagtgtttaaactaatcaactccttcttaatcacttagacattttctgtcccatatctgctagcacgctcctcctcctcacaggctcacacccgtttgtactcttcgccggctttagcgtacacgccagagtccgtcctcagtatgatcttggcgtcctgcgtgacgtagcacgcccagttgtccacgtaggacagcggcccggccctgatca

SEQ ID NO: 37116 - DNA, 640 bp, Oryza sativa
taacttcgtaaattaagggaacggttcaactttttaaaattgcaatgatagctatgttctagcttttgtgcagttagcaacctcaaacacagtggaatcaaaagaacaagcatacctgtaacttttggtagtactgttcagcaaggtctggtgggcagtgtgcttctcgaagttttgttacaaaatttacaacaaagttctcgccaaatctttcatacataaccttttgagccatcatgatttcaccaaacagggcaatctaagaaagaagcagattagactaagctcttgaatgtaaagaaatacatccatcaccacgcaaaagtcatgtccatttcaactatagtaatgaagtaaaatgacaagacaataagttgtgagacaacaatcatttaaaggaagaaaataactcatgttctatttgcttttagattagtaattaactaaatgataacctagcaagactgtcaccgagaattgcattgctacatgcctactttggccactgagcctctaatcatttatgccctccttgagaagtaatgaaagcaccaagacatagctcattgcatcccattggccaactgaattttcaattgtcatattaacattccatcagcaaagggaacagattagtttg

SEQ ID NO: 37117 - DNA, 1464 bp, Oryza sativa
agttcccagctgcacccgtgcccgtcgcatccggccacgttgccatgtccagcgccccagccgcttacagcgccgaccactcacgacgtcagcgccggccactcgtgacgttggccgctcaccatgggcactcgcccactccaccgctcgtagcaccgactgtaccgcctcgccctggtgccgacaggccaccgcgactctccagccggccccctccccccgcgcagcaaggcggggcagatggagctggagcggcgttgcatgacggcaaggcgtgcgtccgcgccacgtgcgtgagggcaatctggtctttttcgatcatttctctctccatgttgtttgaaaataataaaataataccttcggtgtctagtagctaattaccactcttttgcgatatcctatagcaaattcatgtctttgtggtgtcccatagctaattgcacgttttctgagtgtcttctagcaaattttgcctatatttattaagaccatctaaaaagatgcactttttaagatgtagtagtataaattgccctagcaaatgttgccgctatcttaaaattgcttctggtcttatcatttgctcctttactcaggcttatggatggctaactttatttttttcagggaaaaagaacacatgctacttgagttaaccagctatccttccagccactataaataagtagtacatgactccactaaagcaatgacgtaaaaaaaggcaaacaagagaacacatcactatatatacatcaaaagcaatattttctgtggatatgctctgaataaactatgaactgagaactcattagccctaacagccacccttttatacggggaagaatatagccaaaaagaaaagaaatattgatgtcaaaagaatggtcctgcatgtttgtgtgctctgttctttttgggatgatttgctgatgtgatgcaaggttccatgatatgactttgcaattttgtacctttcttccctggccgctagttgccatttcaatgctgagaggtcatttccaagaaagaaatattaataatatcctatagcttatataattatcgttttgaacgagaacatggtattgaaaaataacttcgaccactattcccagttataatgtatatagaaatatcaataaatatattattttatttaaatagtttttaagattaatttatacatataatcttcatacttctaagatatatattttaaaatttatttttcttggtttttttctttttccagcggcaaaatttctcaaaagtgaaggaatctcgaataggcaaatataacttatggcccaagataataaaattgccaacaaagcataattcacaaaatatcctatacttgttccttttcttggagcaaccatcaacctttgtcacacataatttggaactatctccatatatatagttcttcatcgttattgtaattcttgaaaaaga

SEQ ID NO: 37118 - DNA, 993 bp, Oryza sativa
atagcatgttttgcttgtgtgtttgtttgtcgcgtagatttcggccgtttcgtcgatccgctgtttctcgaagacgttgctgaggtctcatcagtgcgagagcaaggcaagtcatgcattacaattgatcatattgtacccaatttacaaatatcccgcatttctattaaatgtcgcatacttttacaatgtcatgtgagatgggtcctattactcagccatttattgttcatatgccattgataactttggtatcaaaatgattagatgttggtttaggaaatacttagccatgcttagctcaactagtacacaaatggggatcacattattacatagactctgactatgagcatagttttggattggtgccaccgcaatggtgttagttaattaaaatacaccgaatggtgggttgtgggtgcatggttttgctggtcgcacccatggcaattaaggaccggttcacgggaaaccctgggagacttaccgtgcttaccacaagcgggagtgggtaactgcttgatctgaagtatagctcgaccctttcataggcaccggtggcgagggtgggcgtgatggagttgggtcggccggggtgtccggttgtccagctgccggattcaccgcggcgcaagaggggaccgcccactgccttttgaggggtgggggtgaaaccttagcgtggtgtggatggttaggggagggttatgtggagggtcttgtcacgatttccccctttgcagtatcatggtgatacttcggggcatggcgacatgtgtggaatcgtgtcttgtgggtacagttgtacacctctggccagagtaaaactattccaatagccgtgcccgcggttatgggcgatcaaccaggttcaccgtgattagtctcacccctagtttagcttaatgaactggtgtatttcaggtggttggttgggcatgttgcaacgtggtgtagcgttggacagtgattggttaatattgattaatt

SEQ ID NO: 37119 - DNA, 2026 bp, Oryza sativa
attaatttactacagctgttttactactttcaactactgcttttaaatgctagttttatgcaaaagaacccctagcctcctttggttatatcctgcatcatacctcctcttccggtatgatttgctgagtacagtgggtagtactcagtcttgctctctgttcccccacaccagagctgaagatctttctagttggagctgtcttgttgaagttggtttttgtcgctgccgtcaaggtttgcctgtggagtggagtcatcccgctgctgaagtcaagcttcccggtttagctcgcttttatctttccgcttcatttgtaaatcttttatatttttgtaagacgtggatatgtatgtcaacaattgtcgtttgtgtaccctggctggtcctggacagggatttaatgcacattcagcttagaaattctggttcgtgaatttctgggcgtgacaatgaagccccatccgaggtggacgatttggtgaccagtgatattactgagtctatggagtaatggaaatctttccatgtcaaaaaaaatattaaatttatttttcatagggaaggggctcacaatagtggcttgccattagagcccttgagcgtcacttaggcgttgcactaccgccaaagcctggcgcaccccaaccaaaactcaaatttcaaactttgccaaaattcatgtgtttcgggagtttcgttttggtttgatttgctacaagtaaattttttgtttggaagttttgatggatctaattgccaaagagatgatttttgagttttaaaagttaagtttgggcctgcaaaacttaaacttaaatgggcctttaagcaacaacgtcgctacctctcaacatcacgcctgccgatgaagcagctacgatgtttgacaagagcttccacgtacgacgaactagctatcacactccatttcgacgtgcacaaacgccatacatattttttgtgttgctgcgaacgctgcacgacctgcctagctaaccctactcaccatagacgtcctagtctgttgattcgtataaaatctcacattcgatcttagtcgccgtcgtaattaacagaggctcacgtacttacggtactagtaggacagacgacgatcgaaaggaacgcaatgcttacatctgcgcttaatagataggaagtggaaattctaccaaacacaactataatgctcgggcattatcgggttagagttggtgtgaaaacgaatcggataacatcttatctgatccattccaaatccgctcaaaacgagaatatggtacgagtttatagaaatccgatagatatggatgtggatgcggatagtgtgatatggattctgtgtggatgtggtatctttaaaattcggcggatatagattatctggtaggccgtttgctagataatctgaaattgtcaacccatgtaaccgctctatatgttaaatacatcaattaagatagactccttaatctatgggtctgtttggggagcttctagttgctgcagcttctctcagaatctccagctccccaaaacagtccaaattgtcacccagattatgagaatatatagttgtagaatccagaaaatgaactagaacccagaagctggaaaacccagattctcagaagctggctaccaaccaacagattctcagaatcttaagctcccccaaacagggcctaagactctcaccgtctcatcttacacttacaaaggttaaagcctgataataaatcaggatgttcttggcaaggaagttctgatcattgcattggcattccatgtttgtaggtagctcttattgagctggggaaagctactttaccccgaaatgcaagcactaggtaggccctttctagcttttggaagaaaaaaacgatgatgacatagttgtcagatacgcttctatggatgaaatagttgaggtggaatgttttaagggtttgtcttgacgatagcggaaaatgatgaaagcttgattcttgggattgagaaataactttttttcgtttgggat

SEQ ID NO: 37120 - DNA, 921 bp, Oryza sativa
gaggaatatatgaagttgaataaaaaagatagcaaaagagctccgagcagaaatgaaaagtggagcaggacagaccagggggtgatgaaaataaacactgatggagcttttgatcctttcaccagaacaggaggctggggttttgctatcagagatcactcaggcaaggttgttaaatcgggagcgggtaaagttcagattctgatgaatgctttccacgctgaagccctagcatgtgcagctggtataagagccgccagtgaatgcgggatgcaaagggtgacggctgaaactgattcaacgatgttgaagtcggctttggagaagaacacttttgcttcgtcagctcttggcgggatcatttgtgagataaagaactttgtaaattttgctttcctgtctttcaatgtaagctactgcccttgaggttgtaatagggtagcgcatgaaattgcagctctgggttgtaaatcggaagtccaggacattcttgggtgggatgaatgtcacaccctgaagtttcccccccttttcttgctttaaaaattggttaaataaattgcccgaagaaattatcttaattaacctagagctaaatccctaattaataaatgcatttaataatcgaattcggcgtggtggaatttttcttgagttccccatactccaatacattaagatgaattttagtggaattttcagagccttgaaaataattttaaccaattaaaattgagcaagtgcaatatttttaaatcccaggaaaaatcctttcccctttttccccttttcccttttcttttcctctttttccatcttcttgggccgtcggcccagtccaccccccctttttctcccgcccgcgctcggccttcctcttgttgggccggcccatgcgcccctccctcctctctctgggac

SEQ ID NO: 37121 - DNA, 622 bp, Oryza sativa
tttttttctctgaaagtctgatgcgtttgcttgcattgcaacagacggtggtgttgcttttctttctttaatttgggggcagttaatagtttgagttggtgatcactggatttttctttctctctttctgatgaattggtcttaatttggctgcattgcctgaagctgggttgatgcgttcctttgttcgcgttggtcggctcgtatacgtacgtacacacagggacacggtcaccaatttggtactccatccgtttcacaatgtaagtcattttaacatgggactagctaaaaaactgtcgagtgttttttgaggggaaaactttcaaatctaactatagtatataatttcactagaactatattataataataataacttatatatatgtattaaaataatatatgcaactttatatgtaatttatatagagataacaatatagttatagtgtagttacactataattacaatgtaattacaatgtaattacagtgtaactacaatgtaactagaatgtaactggaatgtaacttatatataactttgaacaaatctaccgtaaacatacaatgatgggactagcttgtgaaaaaacggtttagatttaatagcaaaata

SEQ ID NO: 37122 - DNA, 2153 bp, Oryza sativa
tatgagataggcaagggacctagatgcaaaaaaaactagccaaatgcttcttttcagctgggcaaattgcattacgccccttgccgccaccaaagcgcaaaatgtgcacacggcgccgtcgagccgtcgtctgccacgtcagcttgccgccctccgctagggcggcagggtctattttttaaatttttgtaacaatagattatttctgtaaatattttaaaaaaaaattaaaaatgaaaaaaattcagccttccatgaccatgtaaatgtttggctcaacttttttttctcactcttaaaagccgaagcagtttttaaattttgaaatttggattttgatattaggtccttttttttacatatccttttagcaatcacgaaaagcgtgaacgctgttcaacgaaagtgacaagaaaaagggccaaaacgaacacaaaaccaaattcaaaatttcaaaatcagctgcaaacctgcaagctctccctaccaaattcaaaattcaaaggagtatgtccctttctcaaaagctgtttcagtctgtattccgtaaccagttcttgcctgcctccatgaagcgaggagatatttcagtgaggaattgaacgagacaccggcgacgctgcccaactcctcactgacatcggcaaagtctatttatttcttactccatctctttcagagagtgtgtgatcttgcagaagcaacttggcatcaaaagatcaacccacatttgttttctggagaccaggcattttttgaggaatatcccaagtgttaattctttgataaatacgccggcttttcgttggagttatctgcccatgccaagaatattcctgccatcttccttccggttatcctgagaagatgggagaatggctgaatggaagtgtagagacttcatttgtcaatgaagttaggccgagttcgtttgcggttgttcctaacctccacttccttatttcccgcgaacacgcttttcagtttccaaactgttaaacgatgcaattttataaactttttatatgtaatatttaccttaaaaatcatattaaccatttttataaaaaggttatttcctccgtcccgaaagtagctaccttatgtgacactacctagtactgtgaatctggacagccgtactatctagtactacgaatctgaacatgagaggtagtgtcacacccgtactagctacattttggattgtccagattcgtagtactagttagtgttgcataacgtactaggtagctacattttgtaaccgaggaagtagctaatattgtcactccgtttttcgcgtatgggattacttcccaaaccacaccaaaacacacagcttcagtgggaaagttgggggcatattattatatcttccaattgacatccgtctgtttgacggttcaccgtagacaaactaaaactttgccatccctcttatgccactatgtacctactttgcagctactcattttgttcaataaaaattaatttagtattggatatgacattcgttatattataatatatcacatccagtttagattttttttttttgacggagtgagtaactcctgtagtacatgtgaggtatatccgtccgggccaagagaatcatcctgcatagctttcgatttgaattttgacaattggcatgcctgcctattattgtaaccgtttttaacatgaagaatttctacgctgcgttgtgtcaccgagcactaatttgcaggtgaggatcgctgcgaacagttgaggttgactcgttgcatgatctgaagattatgaaataggagtatatatcacggccactcgagcgtatcaaatcacaaatgattttttgttcaacgcttcgccgccgcagcgacatcgtccatgtggttttcttcttttttttttgtatttcttttttttctctctttgacgcctaactctgtcaaactgcccctaacccaataacattcgaaaacaagaggaaaattcgtattacatttgaatatttgaaagccaaaacacgtatgaattcgtctgtatgtatgttaactcgcatttttacattatttagccgctcctatttaagaagcagcaaaaaaaaaaagaaaaagaaaaaagatcaagaagataattaagcaaatttaattacagatttc

SEQ ID NO: 37123 - DNA, 713 bp, Oryza sativa
atcatctactcactccatttcatattataacatattataattcgttttgaattttttttcctagttaaactttcttttaagtttgattacattagtaaaaatataacaaacatattatcgaaatatattcaatgttacatttaataagactaatttgacgtcgtagatgttgataattttttctataaacttggttaaacatagagaaatttgattaggaaaaaaaagtgaaaacaacttatgatatgaaatgttggttaaacatagagaagtttgattaggaaaaaaagtgaaaacaacttatgatatgaaatggagggagtaactaataatgatatgatcagtgacgaaagtatgaaacagtgcaaactaatatggtttgttttgttttgttttgcattttgtgttcatatgcagttgttcaggacgatgcttcacaagaggatgaacgctcgaccgagtaatgctgcggcgtcgtcgtcgaggaaatactatcttgaggataagccgagggagaagatgcaaagggagcatctccatgatgatgaagatgatgatgagaatgcagaagatatctttaaatgggacaaaactgattcagattgtaagtgagagttaatattcttcttgctgcatatatttgtttgcattcatggacatattttcaaacatatatgcatgaaaagattacatatatattgcagtaagtatag

SEQ ID NO: 37124 - DNA, 928 bp, Oryza sativa
taatgttgcagcaaactgataattttgtcactaaagttgcagttttctaaaatttactcttaaaaatatgttttaggatatggtatgaccactatctatctgaatccaatccgtttttaccccagagttagacattattactttaatacttttaaacttttttttttgtttaactgatttgtattacctctctgttgtcaaatatatgtcgtcatgtattatcaaaatctttagatgattaatgaatgcaaaaaataataggatttaacacaataaaagactattagtagtagaatagtcatgaaaacacttttatatatgaattttaatacttttttaaacatataattagaaaaagtagtgatcagttttgtgcattgaaaactgtgttgtccaaaacgacaagtaaaaaggaacaaaggtggtactaattacttcctctagccattctaaaatataaggattgtttctagttgtttagcagtagtttaatcacttcaattgtcaatttttgaattttgaattgtttagattacctttccaagtatccgactgggctttggaattcatgatgatgggaaccatatgagttattagtgtagtactccttccgcctcataatataagggattttagagggatacgatatttttctagtactacgaatctggacaggcctattcagactcgaagtgcttgaaaaatatcacatccctctaaaatctcttatattatgggatggagggagtaatgtttatattgtgttatgaatttgaatcaaagaaaccttatattttgaaacgaatggaatataaagctatgtcatttaactggctagtcaacaagtggattggtaactctagtccacaagcgttttgccttttacagaatccatgagtgacctgaggcttctaaatggtccaaatgg

SEQ ID NO: 37125 - DNA, 3071 bp, Oryza sativa
gcacagtacaaaatcgccctcccccagggcggcaagggggccgcctgcaaatttccatgccccccctcgccgcccatttgcaggcggccccccgcacagtacaaaatcgccctcgcggagggcggcaagggggccgcctgcaaatttcgttgacggccgtcgcccgagagcgaacggccgtctgccacgtcattttcgccgccctctgagagggcgattgggcggtaggcgactacttccgtcaattttcaaaatggaaaattatttttgtaaaacttttaataaaaaaaattataaataaaaaaaattcggtggttttcggtcgctcgttttggtggcactgaccgtccgaaaggcacatttgggcctggtttagttcccaacttttttttaaaatttcaacttttccatcacatcagaactttcctacacacataaattttcaacttttttcttcaaatttttaattttagtcaaactttcaattttggcgtggaactaaacacacccttggctccagttaaacactgatgaactgtagaattactgttatctgaccgtaacctaacgtaaatgcagtctctacgctgatcaaatcctctgaaccaggtactaaaaaatgttgcatcatgtcttagttttgtttttttatgggatgagtagtgatccacaccaattattggaggggcctcttccagacttgtctttggaccaaacaacggacttgtctttggatataaacagccagccagttctcactgattgctggctgctgttgtaaccacaggaaaatttctctgaacttcctccgcaaaagaaaaagaaaaggtctgaactgctgaaagcttggcaggattcagatacggcaaacaggagtagcaggacgagaccaaccctgtcaattctctgttgctttccctgtttccatcttctgcatgggccaagaagacctcgagagtgaccagtagagtagtacagtgtagatgtgtgtgtgtgtgtgagtgacccaataattggaggaggctatctcaatcttgcgtgctctcccgaggcgagggaatcagagccattttgtctctggaagacaaggaaaatggccatcacgatcaatcaccagagtttgtaacgaatggctgcttgcttctcttgctcaagaatactccttttgttaaagggtagtggcatcgtattcctatcatgctatcatatgtactcctttttatcaaaaataaaaataacctagaagtgaatttgatactaactagtacaactaatcatgatatactcgttccgttccaaaaaatatgaatctagaactgatgtgatatattaggacgtggcacatccagtactatgttggttttttatgggacggagagaatactcctattcaaattcattgtatagtgtcaaatttactcataggttgtttgtttttgcgatggagggagtattggtttgactggatgggtcatggaaaactggaaaagcaacagcggtatgcatggcaaaagagggacaaaagaacaagacgaaacataggtaggattgcaggatgctcaagtgagaacttgtagttgtagatgaagtgaagtgacaagccgaagtcccgtgaacgaagcaacaaaaaattgtgggagttttccatttgttgtatgtgtattatttgcgatttgaaatccaggctgtgtttagttccttccaaagttagaagtttgggttgaaattgataccatgtgactgaaaagttgtgtgtgtatgacaggttgatgtgatggaaaaagtttgaagtttgaattcaaagtttggatctaaacacagccccaatgtttaaagagaactttaacgattaaatttggccacgaccggtaagccgataaacaaaagatgagaataaagtactgtatatacaacttccagcctcatcttttcacttatgcttatgtttatcaactaaaatttaaattttcaaccttaaatttagagttgattttagggttttttttatcgaagtttattttttagcctttacttttagatcgtaggaacacgtatatgaaaaaattatttttcatttgcaattataccgtttgtcttattccctatataagcgaaacgagggaccttccctgtcttgcttgtgatcatcagtcatctcatctatccgctggatgtgaagttacgacagaaatgatccatcgttcaacttgaattacacttgtactactagcggtgtacgctcgcatgtcagcgtaacgaaacgatgacatcgccatcacagtaggagtattggtactaatctggcaggaccgaagatagagatttagacggtgaccatagattttgtggcaagttttggctataataacatgtgaggttaagggttaatatgcttcaattttagcaatgaatcaaacatttgttatggatggtcgtaacttgtactcctaacctctttctatatttaatgaaaaggcgcactcttgtaccgttttccgtttaaaaaaacacttgtactcctaactcaagtgccgcaaacttcagcaagcagccaaacaagtgcaatactagtactccatgtcgaccaatttaagttaaaactttgaaagccaacatgatttattggtaatgttggactatctgcaattaccagaccgactcaatcccgaatccatatcaattttggttatgtataattcagaatttcaaatacaattcttcaaatccctcttttatctttttttttaaagacaacagaaatgttttacatccccggcctcttccataagacacataacctccctctttgttttgtaatgagagggattttatcctcattttgtactacgagaaaatagctctatactttcatacaagagtgtctggaacaccgaagaggaattcaagaatatgtaaggagttaattagtattacaagccaaagataatttttccctcgttgttttcagaagatggaagtagcaagtacataccagacgtgcactactggtgaacaacacaaatacacaaatggattagagaagaaaaatatctgacgcagactgtggtctg

SEQ ID NO: 37126 - DNA, 774 bp, Oryza sativa
ttttaaaagaaacatttaaaaatgaaaaaaattcatggaaggctttacctcggccttcccgtggtttgggcctggaagggcattacatgggcccctgtgtcttttttgggcctctggagagttatgattgcaagacaattagcccaagtaacagaccaggtgcagtgctctgtttagtaccacaccgtcagttttcagagaaaggagcatcaggagagctataataccagggttagtatcacgcaacaactcatacctttctcggccttttggctaagatcaagtgtagtatctgttcttatcagtttaatatctgatatgtggaccatgtgcccactttgatattaaatttattttttatgggggagggctcacaatagtggcttgccactaggtccctcaagcgtcgtttaggcgttgcactacagcctaagcctggcgcaccccaaccaaatcaatttcaagtgttagcacgtcaaagaaaattcgcatagaaatttcagctgtcagttattgttcattaatattaatttgaagtgttgcaattcaaatatactacttagcaatttcagttttcattggcaagtgcacagtttcggtactgccaattttaagctgtgcattggcagggtagttatcaatttcatacccaaatgaatacataggataaaggccaaaaggctaacggggcctcgatcgctgccagcgatcgttttattcttcttttctcttgttagtaaggggtaccgagctcgaattcgccctatagtagtc

SEQ ID NO: 37127 - DNA, 1155 bp, Oryza sativa
tataataataataacttatatatatgtattaaaataatatatgcaactttatatgtaatttatatagagataacaatatagttatagtgtagttacactataattacaatgtaattacaatgtaattacagtgtaactacaatgtaactagaatgtaactggaatgtaacttagatataactttgaacaaatctaccgtaaacatacaatgatgggactagcttgtgaaaaaagggtttagatttaatagcaaaatatctcagcacaaatcttaaagcggaatcaacgactaagaaatttgacagttttcactcaagaaaattgtcgacagtcctctagcaattccgttttagcatttcccacattcatattgatgttaacgaatctagacatatatatctatctagattcattaacatcaatatatatgtaggaaatgctagaatgacttacaccgtaaaacggagtaagtacttctttgcatgcagctgaatggatgaattaacgatgaataatttggttctatgataatattcgagaatataaacgaatgaattgaataaaacaaagtcaaaaggttgttctaaaaaaagcattcttataaattttaaatttatacacgcaaagtttcttttataaagatttgcaccatttcgagacatgaaaaatgtaatacttaaacatgttttggtcgaattttctatatgatgagaaaaatctaatacgaagtatgaaacacactggagtgtatggccatgcttgcttccatccatccatttccacgatacaaaaatgaacaagaaaaagatggacacaattaattagcacgctagtctttgcatgtcgcaatacaaggtaggtaaaggccgggggaagcacatcgcaccatcaccacatataaaaatcgtcacatcaacctcatccaaatttcgcatcatcacaaaaacaaatcaaatcccctccaaatttataacccattaatcaaaattaaaaatatcccccaatggtcaacacacacacaaaaacacacacgagatgatcaaaggccattccatcccgccctgaaggtgggccccacctgcagcctctcgccttcgcctatatatccactcgtgacacacacagccccctctcgcttgccacgcacaccaccaa

SEQ ID NO: 37128 - DNA, 594 bp, Oryza sativa
ttccgtgtaatcaagaatgtacactagtgtgaacgtgtctttcatgtaatcaagaatgtacatcagatgtgtatgcgtcatccgtataattagaaaaaaaaggagctgttcagattgtagtcaaaataaaccttaccaattttttttaagttaacaatataactaaaattttggcatgattttttatgtatttaccaaactttggcaagaaactaaatatatatacatctttgataattttacccaaaaaatggtatgatttgaaattgcattaatctaaacatgccctaatgaattagtctgtgtttagttccaccagtaaaaaaattttactaggtcacatcagatatatggacacacatttaaagtattaaacaaaacaaattacataatccagatgtaaactgcgagacaaatttattaagcctaattaatccatcattagcaaatatttactatatcaccatattgtcagatcatggcgcaattaggtttaaaaaattcgtctcgtaatttatacataaactatataattaatttttttcaatatttaatatgttcaaacgttcaatgtgacggagaaaaatttctttt

SEQ ID NO: 37129 - DNA, 1855 bp, Oryza sativa
tcaaattaagcactgaattctggatgccattctgttttcttcagactacatgatggtggcctggtgtcctgatttacgcggaggaaaattcgcagtaattttgatgccacaataatccccatttgttcatgaggttcagttgaatggcgaatcgatcgcacggcacaacatacagaaccgaatgcgatgcgcgacggtgtaattctgaacgaagatcaaacgtcgactggctggctagttcaatcattattggatttgagctgaaaataggagaaattttcaagctctgttatctttttctttttttcagatttcagatacagttggtgtacgtttcaccatatagtactactccccccaatgtatactccatttccattaaatttgtgggatacagcaacaagttttcatttcatttcatctgctagtgaacccctcatgctcttattctacctacccttgatcatctcaagaacattggtgcatgataaatatacaccagaatgtaccgaaacagcagtgcaactagggttcttggggcatgcccatggccgaaatcggtaagccaacctggagcagaggctacaaaattcccaaatctccatcggcatcctgaatttctctgatcaggggcaggccccccggccggcacatttgtgtgtgtttgtgcccaactttgggaaaaaaaggtggccaggagtggctgccaagcaacattctacacctttggcaaatgccgatgtgccattgaatatatatgtgatcactactcacttgtgtgtgtacatttatgtactgtatcttatgttcagatgtactaatatatccatatatgtactctactagtagactactagtatgctaaaatacattggtactcccactatccaataatataagagattttgagtttttacttataacgtttgaccacttgtcttattcaaatttttttaaattattatttattttatttgtgacttactttattatctatagtattttaagcacaactttttgttttttatatttgaaaaaaaaattgaataagatgagtggtcaaatgttataagcaaaacctcaaaatcccttatattatgggacggatggagtacttgatttggatgattgatgaagaggcccttttctctcatgagacatttggtctttgttagatgaggaaggatcctagggatccacaagatgagagataaacttaaataggagctatgcatgatactatgctggtagagtttgttatcaagagctaatagtccagattaatgtgcattcattaatctctgactcttgaagaatgtctggacagaaaagaggcacccatcatcattcaccgttggatcgatgaacaaaataaaagtagtacacatctgggtgtgtgtggagttctagaatgaaggctagagaagcagcgagaagctgccgcgatgtggtcctgaatcccgtgtcgcttttcggctagaaaagaaatgcatatatatctgaacatgcggtttctgaatctacaccgagcttagatatcatcgcattgcatgcagtcctatagattatctactactaatctatggtgttagggcacccacaatggttatctataggctctctataagagattcatgtcagcatattttcctacttggaatgtattaaatgaagagagagagcaaagctatctactaacttagagatagtctatagagaaaaacgagacaatgcatgagagagctatagataccaatgtagacatactattaaggtggtttactattaatcgagtctattgctgagatgtacatgttttatagatagcaccttactttaccattgcgggtgctct

SEQ ID NO: 37130 - DNA, 3617 bp, Oryza sativa
ccagtagctaatgcccatcctgaaccaaatcaagaacccctgacactgaatttttccccctatcttcttgtttctctgatcaaaccaagaaaccatgcaatgcatttatgcatgtatctagagcattagcttgtttagtagatgataatgatagatgctttagggtcaaaatcattatcttaaggctgcggttgtacctgccgaagtgtttatcttcaggtacagagaagaggagaaactagtaacagtcaggaagcaagaagtgcatattgcataggaaagtaagttcagaaagtatgcatatgacgtagaggtcgatgcttagcagtttggtgaggagtctcgtgacatttgatctcttcatggaaagagattgcaaacctacccccgtatctcacgaagttaacctgtccttcacaagtgtttctagaacgtgtcaatttcatcaagctgattaatttcaggtttattgtcattgaggagaaaactaattctaattagatatacggaagatcatgtacggactaatcacattttctttccgaggaaagaaacttacagattgtttttaaaaacgaacttattatgttttttaatagataaataaagctttattgaactcaatgagaactaaggttgttaaaatcatgatcctaaatcagaggtctctgagtaggatcgcaaataaaaaatagtatatgtaggaattgtaaaatcgtggattctatctactagaatcgtagaatcaggttctttaattaggattgtaaagtcgtagaagtgtagagctgaatcaagatttttacaatcttcctgaaaatacttagtaagattgttttgtatcaccttattgtaattggttgaattcaataattatctcattatctaaaaataagtgtctcgattaactgatcacgtggtacatagccaagttgtttctctgaatcattttggctgacagagatcagcatccactgcaaaagtcaaagtggatggaaggattttatattgtatctctgcacacgcattgcaagcattccaaagcatatgcatggaacagttgactgtcatttctgaagcgatggacttctgctacgcttcaccagctaccggagaaaaacaagaaagtaacacaatctatacacaaaaacggcttcttaattagttgcatggctaatctctctttgatcatcgtgtgtacaagagccgccattaattagacgtcaaaactcaaaaccgagttttttttttcaaagatcctgaaattaagaaggtcgtcactgcagagttggtgcagatgattgatttcagaaacaatatagtacatatttgcattcgaagctcttcagttcttttgttttttcttcaccttgcaaagcacgtaggcacttggtttgatggtttccagaatgatgtttcttggaagcaagtagtccttggcaaataatctgttattatcatcaaatgcagattacaggattacccttaacctaaccccagttctgacttaatcagttcctactcctagtgtttgacaacctactgcagcaaagaggattacactaattaaacatttgatccttgcctgaattcatgcagcatgcatgcgtgcttgcacggccgtctcatcaggtcatgtactaatcaattaacagccattgacccattgtgcatatggttttcccactggacatatgtaactaaccagtaattaatttcctgattagttcttgattgggcaccaagaattagctaagtagctaaccaagaaccaggcttcaaaatttcagttttgaccatttctattgggggcaccgatggtaccgaaatttctaaatattttgatccgaaataatttaaaacttgaatagcttcttatcggatgaattcttttttgataagatatatactcgattacatggttagagtgtccctatcttcccatggccattattcagaggagcaactcgtggtacatgcatggcaattcctgcgccacatgatcagtggcacgattagtaaatcataccgacatcagatccatacatgagaagcctctttctctgtcaccgagcacacgtactttacaatatatactttccctctagaaggaaaaggaattgaaaatgaaacgagctttggttatgttctcacttggcttgtttggggccacatggtttgtttttaattactgtaacttcagttaaaaatgttaacagatcaatattgtttgaccctctttgacgaatttaatttcagtgtaccaagtgcgtgttctatttacatatgcttgaaagttactgaggcatacacatacccattgaaacacaactctgattgttgagctatagttggtatgcctaaaaaactgaacaagcaaactaaaaaaaaatacaggtaaaacatttatatttgtatcattaatggttctagaaccaatgctaaaaaaatagaccatggctatggctcggctaataagccaacaatctcctaaacttgctgggcaccaactgtaaggttttgagagtagaagatagagatgaaaaaatatctcgttttttacgtgcacgtttcccgaactactaaacacagtacgtttttctttcaaaagaattctatatgaaagttgaataaaaatcaaattattctaaattttaaatttaaaataattaatactctcaaatactgtactatctaactctgcatttgctacatttggaacttcataaccatgttgatgtcgtgaactcagattcccagcaaggtgttctcatctggatggtgcatgcagatgcagtcgcaggtcgcagctggatgcccggattccagtggtggcaacgatgaccaatcgacaacgacctgcacacacagacaaacgtcgttttggccgccatttgccaccattaagagcatgtccaatagcatactataaaccagctgtaaatatattttaaaaagataaatgaggagaaagaagaacagcgggctacagatttgtagccagctgtagcatggactccaagacttagtgtgtgtatgccatgtgggaccagatattaatagtgtagtatatatgtaactattatatgaataagctattagattgcctatagatgaattgaagctagtagtgggctatgctattaaacttgctctaagtacatcacatcgatgctgggcagcagcttgcacgcactgactgatcgacgaatagtgatcaaaatattcagtcagatcgaccaagaaacctccaaaccgacgagaatattggcatctcttctcgcgattgggactcttgcaaacacctctcgatccatccatcgtcggctcatttcctcttcctcctcctttgcttgttccgagtcaaaaacgcgtatgcatggactggaatcaagcgacctcctttacggcgcatttcttttttttctctgaaagtctgatgcgtttgcttgcattgcaacagacggtggtgttgcttttctttctttaatttgggggcagttaatagtttgagttggtgatcactggatttttctttctctctttctgatgaattggtcttaatttggctgcattgcctgaagctgggttgatgcgttcctttgttcgcgttggtc

SEQ ID NO: 37131 - DNA, 2952 bp, Oryza sativa
ctgttattaaaatatctctccccatggagcattattttgctgtatacatggtgtgcatcttcgttgggcactcccttgttgtcctcaccaccattagggtggtaatatagttgatgtaaagcttctggtttagcctatattctgtaatgatggagcatccgaagctctattcatacacctttcaatatcagtaatcatacctcgcattattgtgaaatctgacctcaatgcatgtttcagtgtagtttatgccagtggcacataactgatgaaaaattacccttgtatgcttgcagatgtatactgcgggaatatttttaccgagcctggctaccgtggcaaagttccttgatcaaggcatgttagtgagatgcaggggatacatccccagagtttctgctgtgagcatacagggtttcattatgtttgttttgatatttctctggaagtgatcattgttctgctccgagcttgaaattttttgtaaggcgattcgggtgaagctaaacagatgggataggcaaaagagtgatgtgtgggccgtgtttttcctgacagaaactgtcacaccgcctgttgtcgtgttaccaaattttggcagtggtttttcacccctttgttagctggggtgctgtacagattctttaatatagttgcgtcgttcgcattaataagtttccgtggtcaccttctcgttaccctgattatccagtgacagaagaggcatgctatgctgactgcaatgtaagagttcaactttgatctcttctccttttgaggtagtggaaattttctttttacccatagaggtcggtatttttgaacggtcgaaatctttcatccttgtttttgcccattctgtgactttcgtgcttgttcggcttcctttcagaatttggataaatttgctttggattagaccacgtaacagagtctagtcactgttacttgttaggcaggatggatatggctgtgaagtgaaggccaggccatcaaagttgggtttgatcatatcttctgttcttgttcttgtgatccaactatccaaggacttggccaggagcacatcagcgtgctagagacggacataacgatattgattgtctagcttatatgactgcacatagaggcccatatttgtaggttgacaagatgtttatggctttatggccatatgacttttgttgaaaatttgcttgcctgctgttggtgcatattatcaaatttgtcatcgaattctttcgcacgtcattggaatcatctgcaaaaaaatgttgttccctatggtggtggctccatgtatcttgcgagacccatccacgtagtcattttttatcatcttctgaaagtcaatgctaatccaatcatgcacattccgcaccgcacgaggaaatatggggttttaatttggaactttggagccaattttcgccctgcccatatttggtagtgtaacagtattggcaaacattgttatcaaactaaatattttttgtgatattattttagttaccaaaaaatttgggtgagcaaaagttgactctaatctaaaccatggtctgcttcctttcatcaagaatccccacattacagaagttctaaaatactcgtatactaatttggaggtgcagcaaagagcatgaaaagtgatttcactgttctcacaattttttgataatttctggagcttctacacattgaagcactaacttggtagtgaaagggagtgaagacctcccaaaaaagggaagggaattgaagcactggaattggattgttcatctgcactgcacagctagaaagggatcctgacaaaggaaaatgccacacaaaagaatgggacagttgcaaagtccaatagagaatgtagcaaaacaaagaacacaaatgccaaaagagttgacaaaaaaaaaaaaccctgcatcatccaaaatacacaagagacaaaagaagcactcaccaagatgagctaaccatgctcatcaactttttcataccactttagctgtttttcttggagggggcacttggaggttggaaccaagtgctctcacccaagagtagtaaaatatggccagctaatcagtttgagaagactagatatttgaagacagattaactttcttgtctatttggacagtagtttaatttgtctatgccttcaaaccctgttttaatcacacctaccatgagagtttgttgatcagcacacatgcctgctgctggtctaatgtccattgaaaatgtgtgaagacaaaccacttacttagaaagttaacaatgctagttaaagtaatgactacatatatgttaattgatggttgatattggagcaaggctggttaaaatgcctatattaaaagaaaagctatctgcttttgacaaagataatcaatttgattgcattatcaagtataagatagttatttacgactagcctggtgacttggtttttctgtagcggcatagacctgttttttcttcatttcaaatgtcaggtaatgtgtccattgaggaaggcagcattcgtattcaaaaggtgtggttagtattcagttcagtgtacagaatgggttgactaaatcaagctaaagatcgtctctaattaagaagtaatcaagctagtagctagatgttctctaattaaaaaatgattaagctagctactgcataacatttgcttgcttgtagccgacaagttgtgataaattaactaaatcctgcaccaatcaacaggcctgtgaagaatgcattactccaactaagattgatgtgcacaccaacagcactgcaaatccatatggatatatacggaagaaacatcagcagaacatcatcttaaagaattctgattgggaatagtgctcacgtaggggagcaagaatgaacaaaaccagtagctaatgcccatcctgaaccaaatcaagaacccctgacactgaatttttcccc

SEQ ID NO: 37132 - DNA, 681 bp, Oryza sativa
taccgcactatttcttgctatgtatacagtaaacactttgttgacaaggtatacaagaataatactcctatttgatttgcaaccatattaattaaatgtatgtgtggccaatttatttatccttgctaaattggttgtgcatgtagccttgcttcggtccaccgaaacgatgggtatgtcgccctcctcggaggtgcttgacgcaccaccggcccccaagactctgagccttcatctgctgcacgcaagcagcctccatggccctcaggttcggccgatcaatgaggagagccaaatttatgattttaccctcccacaccttattttagtgggcaagtatacccctccttaatttactaccactaattaaactggtagtatgaaaaaatacaatcccttggatgaaaaaagatgaagggttgaaataaacttctactaccagtaaagagcaccatagtatgattcttcccatagaatgcaagggcggtcttactgccgttgtgtggccgaatagactaaagggtgaactatggtgtttcggcagtcaaacccagcgtcaagtccaagtccaattaaaagagttctcatgtttccttacttgggctcgaggtttattgaattctaattgatctctaatgcaaataggacatggaaaaggccctctgaaagcaaaaccaaccc

SEQ ID NO: 37133 - DNA, 594 bp, Oryza sativa
aattctaattattttaaattttctaaacttccctaatctccctctaatctcctatttatttccttttcctttttctccctttcctttttttttctttcctttctttttcttttctttttctctttttctctcttttccttttcttttctttctctcctccctcccggcttctttctctcttcctcggcttctccctttctctctctctctcggctccctgctacctggggcggcgacggcgaccgagcaaggggaggaggcggcggcttaccaacggcggtggcggcgacggcggcgcgacgacgtcgcacggcgcacggtgcggcggcaccaaggcggcggtgcggcggcgcgagggcggcgcgacggcgacggcggcgcaagacggcgacgcacggcgcggcggctccggggcgacagcgcggcggcttccaaagtggcggcgcggcggcacgacaacggcggcgcggggcacgaggcggcgacgggacgcgcggcgaccggacgttgacggcggcggcgacagcggcggcgcgcggctcggggcgggacgcgacgggcggcgacgcgacggtagcgcggcgcgacggcgac

SEQ ID NO: 37134 - DNA, 1008 bp, Oryza sativa
tatttcaataatcttttgtcgatttccttatcgggaaacatatcgaacatacaaaggtttgcagtatccgtatattccataagtcgtaggttaaaaggttgtatcttacccgtaaccatgacacttacctcttgggaacccttcccatctacacgcaaaacagagtaatagattaacacatgattaattaagtattaactataaaatacttaaatggattaatatgatgtttaaagcaactttcttgtagacactttttacaaaacacgtatcctttagtagtttgaaaagcatgcgcgcaaaaacacagcctaagtaccttttgatcaagagcatccgaaaacatttgtttttaacttccatttgtttcttcgacaacaagtttccacactttccagtcagttgccaataatttgactatagcatatgcatccctgaaaaatcaaggggtggcccataagctcacttctatcacctctttacttattatagatgaaatattaaaatacgtctagtcaaactttcaaatcttaaatcaccaacagataaaattaatttatgaagatttgttatgtgaaaataattaatttgaagtatatgcttcaatggaaaaatacattcatatgattataattcccatatgaataatgtaaggctatgtacaacgttgtgtaataacaacctctcttcattaccatgtaagtaaaattgatgacgtggaaaagagatagaggaaaaacaaacatgggtgctacgcatcacagcggatcagagtcgacttttaatgtttattaaagagaattttgttgcagggtggagaaaaggaaagaagggtagtaaaaaaatattttggtaccttccttttccaacctccctcccttgatttccacgcgtacgcttttcaaactgctaaacggtgcgttttttttgcaaaaaatttctacacgaaagttgttaaaaaaacatattaatctatttttttaaaaaaatagcaaatcattaattaat

SEQ ID NO: 37135 - DNA, 896 bp, Oryza sativa
taagtaggaaaatatgctgacatggatctcttgtagagagattataaataaccattgtggctacccttatagccaacttatagctgctagctacactattgaccttgctctaaggcaacgggtggggttcggagcagaccaggtcgacagccagcgcgaggacggcctccttcttcaacctatatatacatcatcatggtgaacagtggaaacctgctttgccaccactgtgctgcaggacaatgtcgggtgggggatcagcttcgcgatcgtcatcgtggattcgtggccacggccttcttcctcactttccctgccctccccttgggtgatttatattccccgcccaacgaaagggcgggtggagtattactattgtaaaatttcgaatcagaaatttattttttaaatctttttaaaaaaataaaaaaataaaaaaaatcggtgtacatgtacaggccagtcacgggacgagcccactcacacgtctctgtcgggtttgcattctcagcgtgcatcacaaacctccagccaacaacccattcgaactcggcgtagaaactcaattctaagggactccctccgtcccaagaaaaaacctcaatcctgagtttgaacctggacacacctataggttttttttgacggagggagtagtttattagcaaataattagttagatagaaggtaaaaaattaaacaatagataaacataacttttcaaaacaagattcctatacaattttttataaaaagaacgcatcatttatctgtttggaaaacacgcaaaaagagagagaagaagatgctaacttatactccctcattccctaaatgtttgacgccgttgacttttttaaacatgtttgaccgttcgtcttattcaaaaacttttg

SEQ ID NO: 37136 - DNA, 957 bp, Oryza sativa
atatatctaatatattattaagacaactcgaaaagaaggcaccacgttctgtgaaggctagaaattcctacattaatcaaagagaaagaaaagaagagtccaaatagaaatacgatctaaaaaataattgaaattcgaaattaaaaataagtaatattgaaagtccatataagaacccaatacgtgtttaattaaaatttagaataaaaaataaataaattgctgaaattagaaaaagaaaaaagagtgttcgaataggaatacaaatttgaaattactaaaattaaaaataaaaaaatattgaaattagaaaaataaatatgattgttaatgtaggaatacaagttataaataacataaatttagagaaaataaagagagttaaagtagaaatacgatttaaatatagttgaaattcaaaattaaaaataaataatattcgaagtagattctacatagaacctaatatgagattaattaaaacccaaataaaaattaaaataaaatatgaaattagaaaaaataaaaaagagagttcaagtaggattaggtttttgaaatttctagaattcaaaataaaattgattattaaaggaagcaatacacatatagtatacaatatgatgtaaatttagaataaaaaataaaaataaaatttaagtaggaatacaatttataaataaaaaccatcagtataaaagttaagtaagaatgaaaaatgttgaatgttgaaagaaccgtcaatataaaacatagtggtagtaaatgaaaataaagtgaggaggagcaacgagctcataaatgagtagggtggctgtggttgatgaggtatctataaataaaacctcaaaaatgattatatatgatttttagagtccctatgacgattaagatgaggatagcaggcatgccgttaagcacggtggttggcaggacttttagaagtaaaaaatgaaa

SEQ ID NO: 37137 - DNA, 6623 bp, Oryza sativa
ctagctagcaaatatcaatttgtgattacaattatttttgaaaataggaacgttaacataataagtgtcaacttgcacctggatggtgtcgttggcggcggcgagggtgggcaccaagccgccgttgcttgtgttgcaagcgatctcgaagcccgcgctgcggaagcagccgccgccgatgccgaacgggtatggaatgtcgacgtcgccgcacctcgcctggcagccggcaggccggccggcgatgcccacggcggcggaggacatcagaatgagcagcactccggccaatagccgcaacgatgccatccgatcgagatatcacgtacgtgtgctaattatcgatctcggttgattcctaattgcttcgttcaatatatatatatgtacttgctctcacccgcgcttgttcattgcctgcagctttattatactccgatcgacgacccagtcaggaatggcagaaaattaacgacatgctagctaattactttcttaagttttctttttagtcttgtcttaaatcaaacgtttatactcgctctgtttcggaaaaaaaacttgtcgttcagagcaggtacaatagcaggctacaagttagctgtaagcacatatggaagagaaaagataggatacaaaaggaaagcgggttacatatttataactaactgcagcatagactccaaaatattgtgtgtatgagaggtgagaccatatattaatgttgtagtatatatttatattgtatgaaagagctattagatttgctatagatgacttggagctggtagctggctatactattaaacttgctcttacacaaaccgcaaaaatgtaaaagattgtggggataatctcattaaatatatcctaattatttttttcaaagcatatgagccaataggagttgtgactgtatttatatatgatgacgagggtagacaggaaatatcatttttaaaaatgctttgcaatgtgacaacgacaaccaatgataagtaatataaaatggaaggagtagcctatagataatcaatttttgaaattaatacaatttatgttgtaaattatatattataaaaccattttctagaatctaagaaccgaagtttgaaatgtcagatttaaactaaattaaaaaaaactattgtaatttgaaacggagaaagtagataggatctaggattgaaaaactaaatgtgaaaaggactgcacaaaacaaaagaacaagacaaggtcgagaccacaatgtgccacatggtgcaacatgcgaagaattgtctaagcttgcaagcctggcatctatatgttgaaaacacgcccttttttttaagaattcagaacttaaaaggagaggatttcaaagctgtcttagtcggacagtcagaatgagagcataagtgagaaatattttgacaaactatttgattcagattttgtctagatttatccctggtttttttggcaagaaagtcagccatcttattaacctgtcttaaaatccatttgatgttgagagcctgtgttctggaaataagttctgaaagtaaaggatttaagctctaatgatgatactgagaataatagacttgaacctgcaaaaggctaactaattccctattgtctgataaaagagtaacatcaataatatttaactttcgacaaatcaaaagttaaagcaaaagggatctacttgtccagaatattatctcaagaatactgctttgacttgtacgtaggtatatagagtggcagcagacagattcctacctaaaaatttgtttaaacgtcctagaacttactccaaaggtgtgtttagttcgcgtcaaaattagaagtttggttgaaattgaaacgatataatgaaaaagttggaagtttatgtgtgtagaaaaattttaatgtgatagaaaagttaaaagtttgaagagaaattttgtaactaaactcggcctaatttaggtatgcatgtgaactgtaccgagttcacaaaatcaattgactgctgcgcccacaatcacgtggtaatcacttgggacaccaatggcatctttcatgagacccgatttggtagacagggtaatttgtaacgatttgtgatagagaaacggattgctctagctgctgatgtggacagtatatccggcaactaaatatcttttttatcgttactgttctctaaaaatagatgctacgctgtaacgtataaatggtgggaagttgggatccgccccaggggatatgttgaacatcgatatgttgaaaacttttgttccacacaaaagttttacaccctatcatatcgaacgtttgacaatgtggtgctacagtaaatatttgctaatgacggttaattaggcttaataaactcgtctcgcaatttacaggtggattatgtaatttattttattattagattacgtttaatactttaaatgtgtgtctatatccaatgtgacacagcaaaaaaaatttaccccggatctaaacacatcctaagcttgtacaccatttttatatccaaaaaatctcggtagagaaagacttcagagctaaacagtgtttcaaaccttgcttgggctaggtaaaatagtcaaagtagcttgcttggttctctagctagcaaatatcaatttgtgattacaattatttttgaaaataggaacgttaacataataagtgtcaacttatcttgcagtatttcaagtcctagctagctgagcccttctatatatatatatataaaaagcaaatccagacatgaatatagtactgacactataaatcaaaattgtgtttttttttgtgtgatgtgtagattgaatttagtacttattgtttgtaaacaatgtaattttatgtatgtttgagataatcgaatgttacattaattaatgaaaacaatctgtgcaagtagtaccaaatcgagaaaaagtctaaatactagatgtgacaaaaacatctatgcaagtagtaccaaatcgagacaaagtctaaatactagatgtgacaaaaataacagggtcaatgtcagctagtgagatggcgggaaataagttttatcgtcgagagaaaagcaacccagtttgcccgctgttgacggaaaacacggcggtctgtgatctgcttaactccagtgtagatccaaggctagtctcgagtgtgttaaggatgtgtgttaacagtgaaatttggtaagctccgaagtcatcatcggtctagtgccaatatcggtttcagagtcctggaatcggccgacgggaattatcaagtcgccaatagtcggattattgctatattcggttaaagaaattaatctactaaaggaagtttatccagaagagaccgagttcaaagatgatgcgccatgacaatttatctattagttatgaatagtctgttagtttccttttatctttaggaaagtgtgtttagtgtccaataaggacttctatctttaggagtctttttttccaacaagaactagttatctacccatgggtataaatatgtacactcaggatcattgtaaactatattcacatatcaataaacttcgtcgcatcgctactctttttacttttctacattttcggcgagttcatgctccgacaaggagtaagacttgttatggttgtttttgcatcggcggggctagggcttcgacactccgatcttgtcaatataagcacttactatcatatatcttagttaatctagcttggtagttcgatttacttgtatcggctgagattcgctttaggtttttttgtcaggatcagctaaatcgctttaccagattagattagctaatatatctaccaccctgaaaatcagtcaaggacttgattgtctagatattatgtttcttttcatacttagtgctgcatcagttaagtttgatctactaagtcgagcttagaatcataatcactagtctgcttgttgattgccaataagggtttcattggggttttagccgatgagatatctggatattgcatcggcttataaggattgcatacaagttggatttagccgataagaataaaggttttactatttatctaatcatttagaaaaaaaaaagtgtgtatacgaacaacaggccagtacgtcaatggcataacacctatcagtctggaagaattatactaagtacatctaaggactgaagctagttcttattcctgaaacaatctattgacttattaaaggtataaaaaaaaaccctccacgttcgctctcacggtctagaaattctcatattaatcggagaaaaagaaaaataaagtccatatagaaatataatttagaaataattgaagttcggaattaaaaaaaggaatattagaataggagactagagtccatatagaaatacaatttcgaaataactaaaattcgaaattaaaaaataaagaatattagaagaagagtataaagtctatatagaaatacaattaagaaataataaaaatttagaattaaaaataaggaatattagaagtagagtatagagtccatatagaaatttaaaactaactaaaattcataataaaaataataaaattaaaagtggagtttagagtccgtataaaaatacaatttacaaagaactaaaattcattaaaaaatgggaataagagtttaaagtcaatataagaatacaatttagaagtaattgaaattcgaaattaaaaattaaaaaatattgaaagatgagtttagagtccgcgtagaaatacagttagaaataataaaatttagaactaaaaataaataatatttgaagaatatagaaatacaatttacatataatgaaaattcggaatttaaaaataaaaaatattgaaagacgagtctagagtccgtataggaatataatttaaaaataactaaaatttgatattaaaataattaataactaacacgtatataaaatacaatataaatattacacattagtagtttcataaagttagtacaaaatttaaaattatgttatcattttaatatattttaataataaattgagaaaacatatatgctattatataagagaaaatataatgatgctagcagcgtaatctgcgggggctagaatgctagtttaatataaacgacgaccttcactagaaatggtagtagtggcctcttgcacggaatttttttttgaaaataatacaattttaatggaaaattacaaaaatatatgtcggttagacgaaattataagtttaacaccctgtcaaacaaccgtggtttgacagggtacctatcgaacaaccgtggttcgacagttgataaaataattaaaaaacagaataaacactgtagcccctatcgaacgctgcccattcgatatgtcctccgatcgttctttgctggttcgatatatccctaccgagtactcatgtacttttttttatttttttcctggaccacctactccacagttcgacaggtacatgtcgagttgatctatattttaacaattttctattaaaatcatattatttttttaaaaaaatctcttgcacgaggaggaggatggcggcgacagctatccggtggtggtgtttgtaactgtggtggcagcttcctcagcggttcgacgaacgggctccggacgagagaggcggcagcgggatcatgggatggctcgtgctcgctccctcctcccctctcgtgcgtagcaccgccgatctgccaatctgccatgtttatttgtttgcttggccttttggttcgttgattgtagctgtgtttagatccaaacttcagttcttttccatcacatcaatctatcatacacacacgacttttcagtcacatcatctctaatttcaactaaaatacaaattttgaatccaactaaacacagcctgagaaaattaaccaggctcctagatctcgtaaatctcggattgtcggttgggtggatggattcgatatcccatattccaaactgatgtgcacaaaaaattgccagttgcttgatttttattgaattacaaaattcatttctgcaactagtataatctcttatgttatttttgggacttgggtgctatctttgaagtgaagactagtcaaaaatgtactatttggctcacgagcgaaacgaggtagctcgaggtgccatgcgagctgacctcccgtcatcacccgcacggttgcctgtgctgaccccgaccttctactgttgccagcatcgtccttggcagccgctagccaccacctgcctgccccgatccgagcgagaatatatgccagatctagctagccaagggagcaccgagatctgacaaggaaggaaggaagggatgtcggatctagccacaggagcaccggacacaagctttgcgaccccgtacccgtagcgtgaattcacgacgactagctctcggcgacaccgcggcggcgactcatgggtcgctgcctcctcccttcctcctcggcggcgagcttctgggtgcaagctgttcggcggtatgcctaagcggggtgcccaaccaaactgcaactgacgctcaggtcaccaccgcccaactcacaactgatttcttcttcttctttcttcttcttcttcttcttcttcttcttcttcttctttcttc

SEQ ID NO: 37138 - DNA, 707 bp, Oryza sativa
tctttttttgcacccataaaaaagttcaggtgtagaactaataccacaaaagaagaaagatttgcttgcaacttgcatagagatatatataaatacctaaaaaatgctctgaaacagatagaatcctaccaaaaaagtgcagaagaactaaataaactctgagcccaacggtagagagagaaagagagaaacctgaggagagggggcaatggagggcagggcagaagagggagacggagctggaaatggagatggtgccatgtccatcgcactatcgctgtagcagtaaatgagacgacggagctaccaaagaattgggagagggactaaaatcagtcacattgctcataattattgttggaccactgtgttctgctgggaccttttctattcactgacacgtagctgcgttcgacagcagcacaaaagagagaaaaatccactcgttttccatgccccgcgcttccttaaaaaaaaggttaaacggtgttctaacttcgatattagctagctgagtagcacgcgcaattacgtggctagaacctacaaaattatttatttttcacatgattttactttaaatttataaaatagccatctcgttgccttatgactttaaaagatcaaaccttatatttctaaggtttctaattttatagttttttaaagtcatacgagtcacaatcccttactcctttatttgtttt

SEQ ID NO: 37139 - DNA, 707 bp, Oryza sativa
agctgaataatagtttgaaggagtaaaatggacgaatttccttaatccgtttgttctttggttaattaacgatgagtgtatttgtagttgagtgtaggcatcataggtgatggaaatattatttagtgcacgctcgctacttctgattctaaagcaccacttcttttaattcaggtgactcttaacatatcacacgactcgcacagaggactcccaatgtgcgaatgagcattcaatgagtacttctttaagtaatttgatttttgaagtgattttgaaaagatttaacatttggatagaaattttttagttgcacaaggtccagttgaaaaactatactcaaaatttgaaatctttgacttcaattaacacttcaaaactcaaaatttaacactttcaactataaattttaaaacttcctcccaaattcggaactctcaactcaaaattaaaacttttaccaaaatattttaaacctacccaatccaactcaaaatttcaaatattcacagaaaatttttaaaacactatccaaattttgaactttcaacacaaacttttaacctttcaactcaaattttgaatttttttaacttagtaatttatttataattattatacaatttcatcaaggggaagaaaaaaaagtgtgttagcgcattgtcccctcactactcgcgactcgtgtgtgactctgattcaattcg

SEQ ID NO: 37140 - DNA, 525 bp, Oryza sativa
cttgacatttcgcagaaattcttgattgccataagaaatttattgttctctctctttttcagtccctgtaaagcatgaagaccataaaaaaatttgcccaaaaaaaatcttcttaagctttgcttgacctttaattccgaaattctctattgtcatatttgatatgcttttgtttgttatctaaatcttgttgtaaaaacatttcattcacaaaaatgtctgaataatgaaaattgaataaagggtgacgcagccggcgtagtagaggcttgtgtagaggccttttccctcgctgtccccgtgcttgttccatgccacggtgttgcatcccaggacgacgaacttgttgcgctcgtcggagatgcggtacacgccggtcttgttcagctccacgtcgccgtagaactgctcggtgacgttgccgctggagttgtagcacctgtacgccaccggcagcatcaccttcacctccggccgtgggaacaccgtcagattctgcacctggatggtgtcgttggcggcggc

SEQ ID NO: 37141 - DNA, 2540 bp, Oryza sativa
cttacataaggataaatatgggctatttaatttcatgaattctgtgataatcatcagttccactaaatattttggcaaatccttagcatttcacagatgtaggggatataattttacctaatctaaacgtatttgaacctcaattactgaaatacataatgcaattatcatatttatctgttgtgcacactaaaaaaattcagtacatttttcaaatacatccaagaataattcctattatttctttgtctaagtgaggagggagtgtggttgtaaaatcataaaatttacagaaagatgatattttgaaaatgacactttacccctttgccatgttgcagcaaggagttctatatttcgacgagtaatttctgaaaattcgggtcttgttccccctctccctctagatcgatcacgctaggatatcattccccagaaaaaaaaattaagtatttttaattcagccaatatttttttctttttttgaaattccagaaatttttattgcatcggtctaccaaattaaatttggcatgagttttgttttttagaaaagaaataaattcagtgaaaatatattcaaatttgaaattttccataatttttgtttcacctttcagagatttccattctatcccctgccttgaaatacttttgatatctgcaattttggatgaaaatataaccggctgcgcgtgcaacttggcatagggataaatgcatcatttctaaagtttcctctctcttcaattaagcgaaaaaagataaaacaataatcttttggcaaattaagacaaaaccagagtgtcatatggtatagacatgattttggagtgttcggtagcaaatgacacaaaacatcaacgtcataaggataatttaagctagatacacctgtgctagtccttctctaaataggtactccttatcctagaaatctcagtcctaatagaaatccttatcctacatgatacaaagagctaagtgaggaatttctcgctctcatttccattaggattagagtcacaaattacaacattgagggtcagctcccgcgagctagattcgctcgtgtagtagttgaacccaaaaacttaccctgttttcaccctaaaattggacttccaataatacccacgctagaaaatttacagttctctagcaaaaatctgtgacctatcaagtatcaaccatacctgaagattgcaactctagcccagctcaagccatattaacaaaaaaaaaagcaatataaataaaataaaataaatatagcaaatggggaatgtttgctcttttagattccaaggtcgatcgtgcttttctattcaagtacagatatgtccatgcaacaaggagacgacgacattgattgaccaacactgcaaggaactgatcatggccaagaaaacaaaggaaaaatacaaatacaagtcatgaataatcgatgccctcatgatctgcacgttactgtgacgcctcaatcctctgcatacaaacaagttatttttatctccactggaccctcccatctttctagctccttgcaataacccaataatgtaatgctgatagctcaactatttcttttgcaaataatgtagtaatagtagtctattttcatcagcaacaacattaattctccatgtctcctgatcaggccacttatatacatattttcatctcaggtaggttaccatggaaacagctgatgatcaggagagagcacccctgctttatcctcaacctcatgcacaggtaaatatcattatattagaacaaattaacatccaagaatcactttgtagtttcaggtttttgcagccaacagttttgctgattttttatgcaggagggtgcaggttcagaaggtgatggatcagtggacatacacaaccagcctgctctcgagcgcaacacagcgaattggagagcatgcttcatgatcctaggtagcaattcatatgtagctgatactagtgtgttttctttcttggttgctttgattcaaatcactgaaattaatttgtccgtaattactaattaggtgatgtgctcagtgagtgcttggctttctatgggatctccaagaatctagtgacctgctacctggtatgagagcaggagatatggcagctacctcacaccactcttctcatcttcctcggctgacacttcttagggtagatactggacagcgcttactttcctcccgctttacataaggaaaaagtacgaattaccccctccccggaactattgcggtagtacgatttaccccctaaactataataccggacatttgacacccccaaacacttaaaaccggctaaattaccaccctaactcgattcgaagcggttttcagcctacgtggcacacatgtggcgatacagtcagcaaaaaaaaaatataaacaggtggggcccagctgtcagcaccttttttcctctccttctctcccctctctctgtcggtgaacaactgaacactgcaggcggcgggcgggcgaggagccaacgccgacgggctgccagcgg

SEQ ID NO: 37142 - DNA, 677 bp, Oryza sativa
atccgcccgcttaacattgagcctagatatgattttataatgatagaaagcaagactcgttattttttttcttaatgctttatggttaatttgatgtggaaaacataactgaaagtcttataaacaaaatgttatttcgtgaatgtgtttaaagattaggaataatggagatgatgtttatttacatcagccatctaaattggtatagaatagtgaaatgaatgaacgaatgtaaagtagtactttttggaaaaaaacaaaaactaaggattgaaattaatgagaacacatatcaattaaaggaaatcgttaaaaagtggaccaaaattacgtaataaatttgaaaaagtcaaaccaaatcaggaaatagaaatcaattttaaaaaatatctaaacctaaaattacatcatattagcagcaagcggtaaacgtcacggcaacgactctacaaggagattccgaaacatagtagaacccttaatatgctttgtaccttcacataaacgactccaagggtgattctacaccaatttgactttgataaaaaaaattagaatatttgttagaaagcaatactagaaccaacaatctacaacaaatatgagattatgttaatttagtttagaaatcaactaataatctaacaaataggaaaaaaagtagaactattttgttg

SEQ ID NO: 37143 - DNA, 1199 bp, Oryza sativa
ttttatcctcactcgtgcgcacccgggaagaattgcacactttgtcctcactcgtgcgcgcacccgggaagaatttcccggtcggtcaccaatcccaaattgctccagggttaagtgctccaggctaagcacgcttaaccctggagttctttggagatcggcttccggaaaagaaactgtaacttgttgatatgagtattctattaatcctattaagccctaggccgagatgtcataattcggcagtccctgatgatccccatgccaaatctcctatatgtgttggcattcgctagaccgaactactagttctctgctcggtcctttctcaacttgactcacctgccaacagtgcaagtacaggaactctactaccatccaattaacaccatggctatagccacacacattatgcaccacaatacccccaccattagacaaaccggcttgcatagatttactagccgaaacaatgctgccaattatagcaggtttatccattatcaaaaacatacctctactctgatatattatgaataattaaggcatctagcaatttaattaaatctaaacatcggtccaaataagtatttaacagtctatcaaaatactgaaatagatcaattaatccactaaactattagaataccgaaagcatgtacatccctcacacaacatcgactagactttccaaaccgaataatacagcatctactcggtctaaagtgtaaggatactctaaacggactaatagggatcgatatgtcataagcaatattatttggtgaaatgaaaacagtatcaacaccttccccacttgcacaaaatatgaccgaaataaattctaaagaataatatataggtacaaaaatcacaaatatctctagcacctaattatttcggtcgtagaaaaaataacaacacctacaactaataatggtcaatatgcaaaactatatggtaacagccctccataatataaagactcatatggtatccaagaattataataagaatatgagggataactagacatacctgagaatggattccataacataggcattggtaatataggtgaagaatataaataatgtggttgcgaaagaacctgatgattggatgcaaaccactgacttggtgcatgcctcctaactcccttcttattatttgcctccacttcaactttaacatatgtt

SEQ ID NO: 37144 - DNA, 1019 bp, Oryza sativa
gatttcgctagcgacgggggacgccctccaggagtccaggttgcccttcgttctgatcatcggcaactatttcgactttgttggcgttgacgatcgagagacatgcatgcacgtcagaggtcaggacacactgcactatcatctgatgtttgcatgcatgcgcacaagttctgggtctcagtggggaaggcaaaaggagatccatttagtgatggctgctacctgatcaattaatcatgggcacaatgcttcatctcggattaagattttctacaggattcgggatgatgaatatttcttattagtttttccgataaaaggaaattaatttggaagcaaacacacacacacacacacacatatatatatatatatatatatatatatatatatatatatatattgatctactatgtttcaggtattgcgatgttgatcctctaaccgaaagttcactctttcctgcatgcacagaagatttatacaccgtcatcgcttcaaggaatccaagtaggtaacttacatattgtatgcaacctatttgaagtattcttgatttctaattttcatagaataattaatgatcatgttacaataagtgttaggtaatcaggtccctgaatatataattatgtttatcaataagtgtttaggtaattaggttgatcgatagcaaaactcccatagttcacaaaaaaatttgatctattctataataattttaaaacagagaactcacgttaatctctattttttcagtggcaactaataattacttttccatgtatgtcttatcatgtttcaaaaactgtatgaagccttattgttgacgttcatgcagttaaatgtcgtgactaattccaatttttagaactatatcatgaaaactgtactcatgacctattaataacgaatttcaaaaatattaaatcagaaaaaagttataattcagactgtcaaattggaactattaattataccaggaccgaatctacaagtgagactccaacatttttttt

SEQ ID NO: 37145 - DNA, 687 bp, Oryza sativa
gttaagcaaaaagaagtatacttttgattggaccatgtgagatcatattttcgatgatttgctaaaaaatgattatattaaattacatgatcattatgtcatgccatcacttccagatttaaaagaacaaatttattgtaagtggcacaattcattcgatcattgtactagcgattataatatatttcgtcagaaaatacaatcggctaataatgaaggccgattacattttgcaactccaagaaagtcatatgccaaggataaccgttttgataaaagaaatcggtctaggtggtctagcagacagaagtcttcagcatgggtaggaggtagttcaataaggaagcaaatctgggtgctgaagtctagaggtcaagacatgggtttagctgcacatgatttacaagctgacgcgcttgtgggtgtgcaaatggcttaagttcatggagatgttgtggacgctagggggcacgcgcgtgtacgacaactaaaaaatttacaccatgtgagtatgaagcgagaggcatcttcggcagagttagtaacaagtcagaatccgccgaagagctcggggggcaatggcagacagctaagacactcacacagcttatcaaattggcagaagaagcagctccacaagctaagtgcagaaaagctaagggagagaggtatggcatgggtttctaa

SEQ ID NO: 37146 - DNA, 1651 bp, Oryza sativa
caaaggccagatatgtgctttgtagacatcgaggttggcgccacctaagagatttcttttctcatcactgagccaacctagcaaagactcaccttcgctggctcttctccattccaccttgagaactggcaatccccttgaccaagctcaccatgtccctccgcactagcattgccatctattaattatcgattcttcttggcctctgcgccaacgccctcaactccatcgcctcatggagcaacccccgagctcgaggcggtggggttcggcatccctcgaccttggggagacccgttttggattccccaatcccaggggcacctaatctgattgctttaaaggtcatggtgggtgcgactggtctgccctttccttatggtgcaatggcatgaggtcccggttctaatgcacagtggcgacaatcaaccttcgtgccaatggcaatgggcttctgaggggatgtcaatggtgatggatctggttagtcaatccttttcatcgaaggccccggttataacgcacgatggcaataatagcaacattcgtgtcgatggtgatggaactccgaggggcatgacaacggtgagggacctggttagtcaaccatcttcatcgaggttccggttccaatgcatgtcattgacaatagaaggtgggctttctgagggccatgacaatggtgacagatctgattagtcaaccatcttccctcttctcaagcttccttggtgttgccctgctctccttcgatgcataatctctatttggctcctctatgtggatagcgacagcctgccttgacatattgtctccctggagcagctaatagctacgagtagtcaggcatattgacagcactggcgagctgacctacgggcacaattttagttgtattttcagcacatttttggtggaatttttctttatcttagcacattttttggttgcattttcctttatcttggctgcgcgatcagttatgggtcaccatttaataataataataataattttggtgggtaacccattatagatggggtcaccatggtgaaccattcaagtgtttatcgcgtgcacatgcgagacgagcgaaagcacgtgtttcactagctatcttcaccacatattactaaagtggctaggagagcgcacactcaccctcttttaagaagttatccatcttctagaattagcaagacgatggtactaaatatttacatatatactacatccattttttttttttgaaatgggtcttaatgatttccctaccaattattgtctatatgggccttagcccacatgccaatttccatatgtagatgatccacgtcatctctgaccgttaatatattatgttaggtgggtcggtgcactgacataagtaggggttatgtggtagtggggtttcattggcttaatatcgaggtaaatggtaattatatatttccctcggtttcataaggtaagcctttctaccatggccaccattaatatagaggttaataaatttaaacatatatgggcaaatagattcattaacatctatatgaatgtggacaatgctagaaagtcttacaatatgaaacagagggagtaactttttctctccaatcttaataagatttagttgggctctggcccaacc

SEQ ID NO: 37147 - DNA, 560 bp, Oryza sativa
gggagtaaagatatttttccgctattaccaaagtctttttttaaacccggttaggattaaaaaccgggactaaagttaatagcactgaaattggatttcgttgcatatgtgttactaaaatagtaaatatgcatttaaaattccaattaacatatgtaaatcccacatgcatgtcgtgaccgaaaaattgccttttgccgaacgctagtgtattaatcccagtccgaggaaagccggggttcaccacacaaacctgatacaaaaggcacatctttattatatcgataatatttacattattacgaaggcacttcatgcctgaccaacaaaaatagacagcagcggactagcgggcctacggctccatcttgacaggcgctcaactggggtataagccaggactcgacctagacttcttctctgaagcttcttttactgaagggaggaaagatagagcaagaatgagtacaaccacagtactcagcaagtcacaccgggagatgcatgattaatgccagggagtacatggggtaataatataggggttaagtttggcagta

SEQ ID NO: 37148 - DNA, 548 bp, Oryza sativa
caggtcgactctagaggatccccttctcgccatattgagattctatggaagaaatgaaacgttacccgcctacttatactttttatagcaagcatcctcttagccaagaagtcctaaaagtgaagcccctttcaagctttaatcttcctcaagtgctcccactaactaagcatgccaaacttttcctagcgtgcatttcctgcatcattggcttaacgaccggaccaaaaccagggtcaaaaccaccaaagacattgggtgaccggttttgtataattgagggaccccgtatatctggttttgcggttcgaggacgattttgtatcttacgataagttgagggatctttggtgtactttttccactggatcacacttgtcgcaaaggcccatcccaagtacctaggcacctagcccataagcccataaccgaggagtagaagaggggcgctttcttttcttttcttttttttggtttggcttccctggaagtgagattggggagagagagtatcgccgcccaagctcctggactgatgggtttcgttg

SEQ ID NO: 37149 - DNA, 642 bp, Oryza sativa
agcagtggcatgggctgctgcatcgtcaccttacggagacctgtccgggctttcagagtttccatcactcagagagaagcaacgcagcctttccaagttgctaatgctagtactatcaaggttttcttatcagaagagagtacgacctaccattacaattttacaataggagatctcctctccgatgagataaatgaaaccactgttgcatctacttcggcgtacctatcaacctttatcgcagaccaaccaaactgtacaatagcgcagaaggatcctgagcggtatgcttgtggtgataacaaatgtttggatgcggatgacgaaaatggaggctaccgttgtgcatgcatcaaatatactaatagcaatccctacctcgacggtgactgcgaccaaggtaactctaactgcatgtttacttacaaacatactacctcccactggtggagaaatcgtttgtaattccggttcgtaaccccccttagtcccggttgtccaaccgggactacgaatccgggactaaagatcgatttttagtcccggttggtaacacgaaccgggactaaagatctatgtaccattttttttatttgcatggccctgtttgctgcatgggtgattatatatatatatatatat

SEQ ID NO: 37150 - DNA, 734 bp, Oryza sativa
cccaaaatgatcatcatatatatttatacactaagaccaagaaaatcacattaatcaagacaccatgcacacatcctcccacaatacatgtatcgattaaaacatcatgtcaattacaccgtagcgtgcacacacttctcccatattgtattaattgtattccgatgaaatccatgttaatgcggttatatgatgttcaatttgagaagttttggattccattatatgatgatcaatttggtgagggagtattagctatcagaaactcaaaaaatggattaatatgatttttttaaacaatttccctatatttttttttgcaaaaaaaagacgtttagcaatttgggaaatttgtgcatagaaaacgagaaagtgagttggaaacttaggttgaagtcaacactcaatagcctgatgcagaggcatgttcagattactgccaaaataaaccttattgccaaatttttagcaagttgacagtattgccaaattttagtagaagagaataaatatgttgtgccaaaatttcctatgcattactaatatttgataactaactaaatgcaactatatatttgtttattttattaaataatggtatggtttaaaatgataccaatctaaatagaaccccccttttttttccccttttttttaaaaaggggcccccaccagaacttaaacaggaagggccaagtcttaaacggtactctataaatggcaaactctgttgt

SEQ ID NO: 37151 - DNA, 782 bp, Oryza sativa
cacttagtcctcacaccgaaacgaaagcagcagcagcggaaagaggcaatcctagcggggcttaattcttccccggtgcgcacgagtgaggacaaagtgtgcagaaaagacttgtgttgttccaaacgtaaataaaagcgtaaatacttacagaagaggcacttagtcctcacaccgaaacgaaagcagcagcagcggaaagaggcaatcctagcggggcttaattcttccccggtgcgcacgagtgaccatgaaagctgccagatgtaagtgtaagggcagtctatgacctatgaaagctgccagatgtaagcgggcccggccatccctgtctaggaccagccagggtacataaaatgacaagtaatatacagttccaaacataaataaaagcgtaaatacttacagaagaggcacttagacctcacaccgaaacgaaagcagcagcagcggaaagaggcaatcctagcggggcttcagctccactccacaggcaaaacccaattggggtctgagccttggtcttctaacttggtcttctaacttcgtcttcagctcagaagcactatacttctgaaaagggggaaataacagcaaggctgagtacaaccaccgtactcagcaagccacaccaatgatgcagacgtgcaaggggaacacaaggacggtttgtggctatttgcataaaggcggttgtaaaacattttattgagccaaaaagcaaaattgttgagtaattaaagtaacattaaacctccactgatcaacgctacaccactttg

SEQ ID NO: 37152 - DNA, 590 bp, Oryza sativa
agaaaacaccatgaaaaatttctggtcatgttgttgcagctcttcatcaccattgaagccacgttactctagattctgaacctaatgctctcggtagagatggctttcccttataacattcttgcagtcaaatattaaaagttatctcactagtatgtgcaaaaatgttatgattcatcatgaaaatacttttgcgtagctatattcttaatgattttaatgagaaaaaaaatcaatgatcaaacatgagcattgaagattgcatcaatggcattaatgccaagtaaaaagaactggtgagttgtaaggttaataggcaacatgctgctttggaagttttggaactaacaagccattaagtttgtttgctctgtttcattttcttgcctttaagcgccacttataaataaatttctctacaaacatcattttcagagagttgatatggcatcagcgatactgctcagtattgcaatcatggcacaactatcatctatatcagctcagccggctcctggatgccagtcccattgccgtgatattgaaatcccatacccatttggcattggcacagagtgtgctatcgaacc

SEQ ID NO: 37153 - DNA, 1477 bp, Oryza sativa
actgccattatttttgatacactttgccaaatcaaacagatttcaaataaaacatttattgctaatcaatatgttatccaccaaaataatagctcgagatataattcttaatcatacatgatcctaaatcaaataaaattcaaagaaaatatccctctgatctgtgcaatcccacctccaacaccactaaagtactataagaatcaccccccagagcacaagcctgtaccacaatacctttgttcttcctaaaaattcttctacacacaataattccatcatcagcacaaatggatgaacaaggagaaaaaaggtaatctctcccctatgatatgaatagaagtgttacttcctacatctacatatttgccatacttaagtttcttgtttcacatgcttacagtagtctttccattctctacatatttgtacatattcaaatgttgttattcttctttaggaactgtaacccacaatctagtcacaccacctacctgcaagcaatttccgtcgttactgcatccaaatcgtcaactgtttatgtttctatccaagggaaatcagccgctgacgacctatcctatttcaagtcaactcaaactcacactgtttcctacatgaagaataaaattcctcacatagatgtcttcctcacagaacaagacttcaaaaataatgagatttagtgcttctgacattgcgtgttagttatttctaccatacattactattacctcactacaatttgctgcaatctaatgaagataatttacttatatatatgcatacgttcttctcaacttatgaaatccaatcctcaggttaatggttctaggctaagaattgcttgatctatcctgtaacgctaacaaataatactcactgcaagttttatgatatgcccgcagcaacgcgcggggtatcaactagttcactcaaatcctaccaccacaattaccatcaaactcgatccgacgggcgcaatgccaccaccatcaaagaatttccaatgcaacggcttcaagaagattatgacatcttgaatatcacaattgctattcgagacatatagactacaaggttttcattcggaagattccaccgcttagcacaaatgtaagaagagcgtcgtgtcatcaccttcaggaagttatgttgtgggcacaaacatcatcgagagagttgttattcttgaatatctgatttttctctagagattgggcagctgacaactcaacgtagtgtttcttattgttagctaagaaaaacttctttgttttcaattttctcaaatgtgtgctcgtggtgtgagctttggtcagatctagttaatcaatatttgtagagtaaatttcacatatgatacaagttgcagaaaagcacaaacattttaacaattggcactcaagtacatatattttggtagtgtaatttgacaaaaccacactatcaatgaatggattcacctgtgagatga

SEQ ID NO: 37154 - DNA, 575 bp, Oryza sativa
ttggtaataaaacttagcaaataaggttgtgtagggttctaatatacgacagttacacttagcatatatgactatttgagttttagtataagattatttgagttttaatataagattattagatttgtaattagacttagcatataagattgtgtagggttctaatatacgatagttacacttagcacacatgactatttgagttttagtataagattattacgttttaatataagattattatatttgtaattagacttagtatataactattgactagctagggtcctataatatacgtcacctagacttagcatttatcactatttgagttttagtataagattatttaagttttaatataagattattagatttgtaattagacttactatataatttattgactagctagggtcctgtaatatacgtcacctagacttagcatatgattgttagcatataagattgttaaaacataaatgtctcatgacttagcagctgtttcatgtatgaacagatggctgatcgcgatgaggaacagatattgtatgatacaatcgcggagggaagca

SEQ ID NO: 37155 - DNA, 652 bp, Oryza sativa
tcagaaccccagagtccgcacatcctcaaatacaaagcacttccctagttagatgtaggttagacttcccgttcgagaaactctaccttctacctgccctcaatttatgcacgattaatgaatgccacctgggtggaagcgagaggtggaaatggaaggtcttagttcggaggtgggatctctacctgatagttgcattgccattcatgatgatcccctggcattcgtccattcagccattcaccattcacccattcaactggaattttggttgaatgccggaattgtgtccacaaattgtggatggatagttggttggctggctggatggctggctggatggctggctggatggatggtgaatggctggcggcggttcggttgctttgaagcatttgttgctatctaaattccatttaaggtcgtaccttatcgcccagcatcatcttattctctatttgtattccctccatctttcagatacggatgtagccttggatgtgcccgtgcccaatgaagaggaagagcgcaacatgaaacgtaagtacaaaagtaccggacacccacccagatcccaatagaatccgccaaatcctgcgggaaattgtaatcccattcaccagctcctacatttaattaacaagagaactat

SEQ ID NO: 37156 - DNA, 9670 bp, Oryza sativa
tcatttgaagaatatatggtgaaaggtatcggcattggcgtccctcaagacaatgaaagaaagatgaaaaaaggcattcctaatgtataattcttttcttatttacatttgagtttaggaatgccgtactattaagagggatgcaacgtcgaggtgtttgtgcatgtctcagtgctaaaagtgacctatcatagtgctaccttgagagaaacccaagctttaacctatcctttcagtggttttagaccttgtttttggttgagttgggtagtcctctgagtgagtttttcatagagtccaagttcatcaaaaatggactcccgagcgaaaagttatagtcgttttactctgtgcttttcggaaagtccgaaaaattatcagaaattccgaaaaattttcggagttatccgaaaaattttcggacattccgaaaatggctgcgaatctgagatttgcttctgtagattttcggacttgtctgaaaatgattttccgcttccgtagatttttggacttgtccgaaaatgcttttcggaaaatccgaaaattacagtcttggcctccaacggctagtttttgagaggctctggtatataaactcctccacccctccaccacccctcctttgagtggctgttgctcttagggagtattagacacatccagagccaaatagccatccctatttccctacctttgtggtgcctctttgtgagggcgatttgagaaggggagagagttggattgagagagtgaggagttgagagctagtgagcttcactccatcctttgtggtgcctctttgtgagagggatttgagaagaggaaagagttggattgagtgatggagaagttgagagctagtgagcttcactccatactttgagcactcgagttcatagcaagcaaatcttcgattgtgtttgttactcttggggactaaggtctcctagacggctaggcatcgccggtgagcacccaaggttgtggtgtgccacggaaagtttgtgaaggcttccatttcgcctccgcaagggaagaaattaagagtgaaaccgaggagtgcatttgtgcaacctcgtgaggaaagggttgaaataggcccggcccttgtggctcctcaacggagacgtaggatccatggatccgaacttcgggaaacaaatcacgcgtctcctctcttggtttgcccatttgtgcattctctcatattgtgcttgagcttgtttttacccgatctacttgcatgcttaattgatttagttggtgaccttatatcttgtttagataccttatttgtcaccttttgattcatacacattttctttatttgaactacaagttcatagctagtgttttattccattatccgccgaacctttcggttgagatcggaacttccaatctcatatcggaagttcctatttgaaccgaaagttctcatcattctagtatgctatgaagttgtgataatttttaggaacgcctattcacccccccccctctctaggcgacattaaggtcctttcagtttctataacccatctaaggctcttcaaatgtcaaactccatagaatttatttttgggcatgatttgagcatttgattgaattttgccgcttggaaagagatacaaagcaaatttcaggtcttctcttgatagaaaatcgcttctgcaaaaattctttttgggaaagtttctttgatttacaaagatcatttctgcaagatttcaactcgcttggacttgatttggaagagttttgagtttttataactttgatcaacttgctaaaaaattcagaaatgacatggttataggctgaattgtgaattttgtatctcaaaatgcaatccaaattggaaggagcttccattatgacttttgataccctaaggctgaaccttacttttaaatttttgtttgaattttttcagctcttttgtactttgtttgaatgctttttaaagcccttcttgagttgtgaaaaatctggaatttcagcttactgaaatcttgtgatttttgttttgcctatatggttgagatatgagcaagactaccaaaatgaaacttgtgcatgattacatgatatatctccatgatttattgcatattttttggagctcatttccacaagtttatgttgcttcaagagcttgcttagttgtatcttttttgttaaacttcaaattttaaaagtgtgtttcatttagttgaaaatctgagttggtggcttaaaaaaagttgtgtcaagaagtgagctctatgttatgtgaatgttaaatcaattttgagctcgtttggatttattccttgcatgaactcctcttgctctcaaacacccattatttgagccaacctaaactcaaatggaattttcactgtcaacctacatattccatctattttgcttctaaaattgaagttgatccttgtttctattgctaactaccatttcttgattccaaattcgcacttgcatacacaagcggtgtccatataaaatggtagtatcatttgaccatcttgaactcggtaattgcctatcattgtcattcctttgtcgagattacacacttgaccaagaagctctcaagtatcattgaccgaaatcctctcattgataaaatacttgttgagtgtatttcgagaggaagttcaagtgctcacaaccactccctccgagagcaagggggagcgtttcttaaatggacattttctcaaatttttgctttgaaatttcatctaaaaattttatttggtcttgtgaatgtttgttcttgttttgctcgagcaaaattgtttctctttcggttccatgcaaattgtttctctttccattgagtcaaaaatcataaaaaacggactcccgagcgaaaagttatggtcgttttactctgtgctttccggaaattccaaaaatggctacgaatctgagattggcttctgtaaatttttggacttatccgaaaatgcatttcggaacttccgaaaatcgcagtcttggcctccaacggctagtttttgaggggctcgggtatataaactcctccatccctcctttgagtgtcttctgttcttggggagtattagacacatccaaagccaaatagccatccccatttccctacctttgtggtgcctctttgtgagagggatttgaaaaggggatagagttggattgagagattgagaagttgagagctagtgagcttcactccatactttgagcactcgagttcatagcaagcaaatcttcaattgtgtttgttactcttggggaccatggtctcctagacggctaggcatcgccggtgagcacccaaggttgtggtgtgccacggaaagtttgtgaaggtttcgatttcgcctccgcaagggaagaaatcaagagtaaaaaccaaggagtgcatttgtgcaaccttgtgaggaaatggttgaaataggcccggcccttgtgtctcctcaacggagacatatccgtgaatccgaacttcgggaaacaaataacgcgtctcctctcttggtttgcacattcttgcattatctcatattgtgcttgagattgtttttacccgatctacttcgcatgcttatttaatgtagttggtgagcttatatcttgcatagataccttatttgtcaccttttctttcatatacattttgtttgttcgagctacaagttcatagctagtgttttattccgttatccaccgaacttttcggttgagaccgaaacttcctatcccataccggaagtttcgatttgaactgaaagttctcatcattctaatatgctatgaagttgtgataatttttagaaacgcctattcaccgcccctctaggcgacatcaaggtcctttcacttacaactactgcggttgttagcacgctactatcaaaacaagattcagatagtaaagttagaaggttttagatctgcagtttggtacacatactgtgataatctggatgctagagtgtcagttggtttaattacagttcttctagaatctagagtcttatagcaagtatctgaaggagagaactctgtggctttgatcaactaacaagacaaagcaaaggggaagtatctagtgatgtatccgcagcaccgtatcggttgatatatttcaatattggactaaaaaacattgcggatagactggcactacttgaacaaggtagagtgaaaagcaagctaacttggtgtctgctccactctgttgaaaatcagatacatgaggattcgattgatacttatgaacgataagaaatgtattatttgttttatagtactattgctattgcttggattcattcttcatattgaatggtgagctggttgttagttatgtcttagctattttgccataaaaccttgccttttctttaatgactggaaacattgaatataagataaggccttcaattaattagcatgacaatgtagtagttcacacatcaatattagctataagacatctggaaaatcatgttaattggggcagacattgccatgcatgttgttgtcgaagagacaactgcttcacgtcaaaggacgtggttcactcaatggaatggttgaatagtaaagtaatgtattaatgggctttttatagtcttagtacaagctcatgcactctagggtttaatgtttgcaggggaatttacatggatacccttctgatagggacatttacgagggcaaacaatgtccatttggttaaggggtcttttcatgggcttttgggcccgacccatattggtgaacggccttctcgggccgttctgatccttaggcttcttggcgaaggcctcacatcttctggcgaacccttcctgcttcgcctgaagtgaagacttgccagtgggtcctttggacatgatggcgaaccctttcagatgcgtcctcagggtttcgccataggcaaaccatcttgatcattggtggatcatcacaggtaaaacggtttcggcagttaatccatgacttagtgaatttgatatatgtgaaataactccgctggggattgaagtcactcctaacttatgtttatgctaatgcttgcatattctgtgttaaaatttttggtgacacactagtaggaaatagtcttgagataatcaaggaggcactaaatcccaaaaatttgtttatagtgactttgtcgttttggacttagtgcatttgatatgtgtggaaatcactaccctggggattgtaatcattgctaactttgtgctggagtcatgccacgaaggccttcgaccgaggctaccaaaaccactacgaccagggcgaaggatcagtcgaagaccaagatgcttacctaaggcgaacctgctgggcaaaactagagggattcaccaccaatctggacgccttcgccatggagtcaaaaggcaataaagcctagccgttcgccatgtctggcctaggctaaggcccattaaggggcccagggcaaaatagacactagttaccctcataaatctctctatcataagggtattcatgtaaattaccctgtacttattaaccctagggtgtatgagcttgtactaaggctataaatagccccataagggcatttagtaggggatcccaaaaaattccattattaatacacactgctttacttttctactgtgtgtatacctcgttcttcgacgaacgtagttgtcatttgacaacattatgtttatgctaatgcttgtgtattctttgttggaatttttttgtgacttgtactagtaggaaatagtatgagatagtcaagctccaagatctgtttatattgacttttgacaacctggcttctctctcaaaaatgaccatttctctatattcttgaaagggatatttgttcagtgtcatgtataccaagtaatacacaatagtttagtattttgaatgacgtatttataacagtggatctatgttttctatgagacaatggagtattgtcggctgaaaatggtgctttgccctgataaggtttcttcttacatgttttatcaggtgggatggcatttggtaaaaatattttcgactagttgtagatggttttttttttactttcttgcaaatgttggaacttccgtaccctcgttcctgatctatggaaatgcggggagcatggctctcattgataaactacttagctaaatgttggttttggttggaaggatgatggtttatgaataattgtaaatgtatgttcttttgacatgatatctagattaggagttagtctatttaaaaatttgttttactgcttttttttcaaatttgtcaccaaggtagtacaaaatggtttagagttactctttgcattttaggaggtctttcggccttaggaaatcgtggctttgtcttatttggttacattgtgaatgatagttatctctaacaatgttgaaaaggtacatatacagcgttccctcttttagatctgctgagaagtagtctcataatgtgtatcaacatgcaaaacatttacaatcgttcatacccgatgaagatcaaatacttcatttgtggctttgagagataaaatttagtcgaatcagtaattcaataagaaaggcagaaaggctgcgagagtgctaacacctgcaggcagaaaggctgcgagagtgctaacacctgcattttgtgtggagaactgaaacctccaatgctatattgtttatttttctgacacctgcatttttctgatgtagagatatagggatggacaacaatccctataaggttcgaagatataaactttttttagctttttcaatggtgttgatgtagagatatagggatggataacaaccctaaaagcttcgaagagttgttctctttctcactaagaataataaggtttttctttcgttgagcattgtaactatcttttgtatcttatgtcgaccgggatatgtcgttccttttgctgctagcctctttcgcttcgttccctttgctgctagcctctttcgctttcagtaaaagccatgtctcacgacttttgtaaaaaaaaaaggctcctaccttatgaaaattttcttttgggtacaataatataagagaattcaatccactattcagttacatgaaatagctcgggtttgatatgaattttgtgttctttatgcccaacctgaaaaagctgcacatgtcttttttattgtcttttgcacaattagttggtttcacttgtagggatgctaatgcctggaatgctatttcagtgtgatttaaacattattttacaaaggttgtgggtaaaacaagcgtttgtatgctattagttgctacagttcttaaaaaaaatacattccactcctttgaccttaatcttccgcatgctttcttatttgcttcagtgaacctaacggccctcttgaaatgtgaagtctggttgtgttggcaactctgactaactagcttattaatcagcaactattcttttttaatgttcataaatatatttgttccatctccccaactattcttttctgatgtatctctctacttctgcagtgctgtcatgcttagaaattcaacaacccgaatctctgtccaggaccagccagagtacacaaacgacaaattgatacagatccatgtcttacaaaaatattaaaataaacttacaaatgcagcagaaaataaaagacaatctaaacttaatcttcacggcaaaagtgtagcatcctccaaatcacaggcaatcctcaacatccggaacaagcttaatcctcaacgaactcaccatctgaaatattctctgcttttggggttgggaaaaataatttaagactgagtacaaccaccgtactcaacaagtcataccaacggaaatgtatgatgcaaggatatcacaaaggattggcaataggatatttgcataaaagcagcatttgcaaatcataatttgaatacagtaaaacaatagatattattaagcaatattaaataacatcactgctcaacgctaaaaccacgttgcaacaggcccaaccaaaccacctgaactactccagtcatattatttaagtgagactaatcacggtgagctggttgaccgcccaataaccacgggcacgactattcgaatagttttactctgattagaggtgtacaaatttacccacaagatgcgattcgacacatgttatcatgcctcgaagtaacaccgcgatactgcaaaggtgcaaatcgtgacaaaacccttcatataaccctccctaaccaacatcccacctcaggtttcacccccacccctaaacaggcattgggcagccccctcttgtgcctaggttaatccggaagcagcatagaccggctcccgctccatccatactccatgacggccacccttgccacggtatgttagctagaaaagattatacttcaggtcaagcctggagcccatgctagcttgtggtttgtacgtgtatatcttccaaggattcccgagaaccggtccttaattgttatggacacgacttgcaaaatcatgcacccacaacccaccattaaaatatattttagtttaattacttgtatacatgttgacggtcgttagcgatcagtttcgcccatcaatattactaaaataaaggagaactagttatgtttgcaatgcatattatgttagaataagatatattccactagcactgtgctttctaaccttttgtagagaataaatacaaaatggaggagaatcaacagtgaaataaacgatcaatcaatcagacactgtcgagaatcagacttatgaatggatgggccaagaactcagaaatgacacgaccaaaatgggccaaaattcacaagtctgcgaaaagaagaacataaggaggcaaccagccaaaacctgggctggttgggccggcccctggttcggtcgaacctcgggtgcagccgaacccccctcgtcgccgtttgatccaaggctttgcctggacggtgtagattagccccaatgacggttggagggtatttccaacaattccaaccgtcgcaactgtcattgggaggttataaaaggagctctcatcctccactccaggacatactcaagcaagagctcaatcatctttctcaaagtttagtttagtgtctagagtatagtggaatagaaatagaatagagtcttcagtcctcggagacttcgggaaaagttcgggtattgctctagtagcttttccttcttttgtaagacttgtactatttttagaatattcttctaaatatatatacagtactttgcttcattctgatcatctgagtactagctttccaatatgttatttgatatataattgtctagctagcttactcgggaaatgcaatggtgtgggtataatgttcatgtatatgattgctctgtgtcatgacgatgatattagagtagtatttggtagcataagcgaggtgcttaggccgctggatatcattatttgggattatatgctacgggacagcagaggtgggccgctgatggtgacagctcagtacggttattcctccacattagcatatagtcctaagtacaatttcctgggaagggtactcctccgtatttagccccggttggatggccatgacgggttgtcgtaaggaactcggcaaccagggatggtatctcgaaacacta

SEQ ID NO: 37157 - DNA, 972 bp, Oryza sativa
agtttagggaccgttgatgaactttactcaataccacccattcaaagggtatggctatttgaatttcatccaaaagtatataatgaccataatgacctaaagttgtattttgtgggttaaactaatggagctaaagttctttgtgaatattggctaaaattagtttctgaaagttcaagtgccattaatttggttttgatggttaatgacaaatccaattacatgagactaacattgttataagcatttctttgtctactagtctcatatggatatgaaagtggaatatgtgagaggtgatttctggacttcatatgtgttgagagagaaacgttcattgatggtgtacctaaatcacaaggatgaaatgcatggagatcaagctatatgtatcattctttctatccgtgcacatattgatatattcatttataatattttcatgtgattacataagcatgtcagactaatgttttgtttgagccatatcttgtttagtctctttacattgagaacatggagatgatgaaggtatgtttttattttattgtctatatttgataaatgccttctattcttgtatgggataagctctcaatgtttaatatcttgttatgcatactcttgcttcacacaaatattttgtatgcatacatttagggggagcaaatcctatactttagttatgcatgtaatcgatccaagttattcaccttcatttaattgggatcatttattcaagttatgcatgtatatgacacttgtggtgttgattaatgctcatcatttattcatatccttttatacatgcgatcggttggtcaacatgtggaggttgacaaccggatcattgggactaataattttattgagttgaatgaaagaaataggtcccaaggattacaaaggtgttgatgctcaagtgatatcattacacctaacaataccaagaatgacaaagtgaagatattg

SEQ ID NO: 37158 - DNA, 619 bp, Oryza sativa
ttcctgcagcccggatgcggtcgctcgcagtcgaagttggggcgcttcaccaatcaccagtccctctcacagtagcagatcccgcctccgccctcctgcacatgggtgaggcacatgcgtcaaaactcgccaagaaaactaatgcaagaaacaaagaaagaaagactggcgcctctcctcttctttttcatccgtgtcaaaccgtcctcgcccaccatgatcgcctaccgtgctccctatgctcacgcgtgcagcagtgcggcgtcctcctcgagcagcctctcgatggacggagctcgcgagatgtaggaagcaggcgcgctgctgggaggggatctgcgccctgacctgctgccggagaaggaggaggaggaggactcgtcggagctctccctcgccggtgcttcttccacctcgattcacgtcaccggtggctgccccggatgctgcgctgcacgccccctctgggcccgagaggcgccggcggcagcggatccaccgctcccgcgcctggcagcggtggagaacgggatggccccgggggggcccccaaatttttgggggggcccccccgagcggcgaaaggggaggaagccggcgcggtgagcggcgcccggcg

SEQ ID NO: 37159 - DNA, 633 bp, Oryza sativa
acatcattttttttatctcgtttaataattttattgcctttgaattacatactgtcttaggacatccacaatagcacaatgtacactaaaaagtaaccataagcaataaatgctgctatagtacaacacatttaacattgtggagtcagaccacaagtcatgcaataaaactagactttaagcttaaggtgtggccacaaagctacaaaatataatacttgtaatgtttttctgttcacaccaataaaatatacatgtcagttactacagatagtaactacttctactagccgttggtgctctttcatttgagttgctcatttgctttcctagccattggcttcttacaacattcttgtgctacctacgaaaggaggcacaagtgagatgaacaacatattgatccattcagttccctagatactaagtggagccttttgttaagccaaacaagtaagcaacaaatagtgatgtccaaaactccccattctacccaatttcccacaagttatccctaaaacttgagacctagttttctccaaaatttccatccttttggtcctctaagcaactaccaactatatggacacccttccatcttttaaggtgctcaccaacaagattattatgcgc

SEQ ID NO: 37160 - DNA, 672 bp, Oryza sativa
gccattactcaaaaaagcatactggatgggttgcgaataaggcatagggtataacaaatatatatataagtcttcaagtctattgataaatattatataaagctcacttggtgttaaacaaaatgtatatgtaattcattggaaattgttccttttatcttttggtacagctaaaccagcaaaggcaaggtgataaacttgaaaactatcccctggttcagttgaaaatgttagagcacgcagttacacacttacactagatgggcttgagtcattcaatataaaaaaaaaggaaaatgccaaacgggacaaagaaattcaggacaacacgattctttgaagaagctcccaatttccagaagaatttaattccaagcatcgacttttgacagaggagtgaagcaggaagtgaagtactaaaagattggcgttgcgcgaatagcaatgcagtggtcagtgtcgacctacaccatcctatgatcctatcctagcatcttcttaatgttagcaacaataagaagaaaatgaaacaatcctctatagattttacaatccatatagtatcttctaacaacgcggataaccaccctgcatcattaacgatgttacgatgcgataaaaagaagacacacaggacgcgtgtcgattaataaaagagagttgatatctctt

SEQ ID NO: 37161 - DNA, 1404 bp, Oryza sativa
ttaaaaaaataccaacaataccatggcggcatagtatcataatgattaaggactaaaatcataatgaatcccattgtgagctaattgatctaagcatggctaatcattcctaaaccaatcatctaataaattaatatccgaggctatcaatgacatagggtaaacaataggctgagtacggtaaatatccaccccacatgacattataaaataatgcagtttaatagaaaagcggggattttgcaaagtaggttcaacatgatcaatgatattcgtatgacttggcttgctcttgagctgacaggacctcggcgaacttcaaaagagactggagcgtcggaactgccggattctatacgacaaacaaagcacacaagcaatacataataaggctactgaaacagcaaaaggaaccaattttaatggattctagacattttagcaaattcactgcaacttgaatagattaaaacggagctcgaatgatttagatatgaattttacaatatgaactgtgttgtttactcatttatcatatagtaatgcccatagataaattacatcaaagaaaatatatcatcggtaaacaagcctcacgagttaacaactcaatgagtcaatatatcgtgacgcgggaccatccaaatgatcaaccgaaaccggcgaatagaaccggcggcttaacatggctcaaactaaagaatgactcaaaacgactggacgaatgaagcagtggacagcacttcgtgcaaacgaaccattaacaacctaacaaacgactacggctgaaccggtagactagacacgtttacggcaaagactcggtgcggaaaacgattgatcggtaggagtttagagatgcacctatggctttacaacttaactactgagctttaggtcaagacggtggctaggttttagcgagacacagccacggcacagcgggacttaacagcggctcggcttggcagcaaagcagtggcggcggcggcaaagcgccggcagcaaatcggcatcggcgcggctcggcttggcacagcagcagcgacatcggcactgcagcggcgcagcagtttaagcaactaggcacgcacaacacatacggggacgacatgacaagcggtggcggcgctagagcaacagcacggtagtggcgtggtagcagtggcgcgcggaagctggggttagggtagctgcatggcaacaacgcgacgacgcaagccaacacgagtgaaggaaaaacaaaccctaaaaacaggatggaaacctcaccggagagtgacaagtaccggagaggagatgacgacggcaacggtggttccaatggcaagctcgggatcgatgacgacggtgctagatgagattaagcggaatatattagaatatagatggatgggtataggc

SEQ ID NO: 37162 - DNA, 594 bp, Oryza sativa
ggtggtctttctcctcccatattacttgcactagcaggacttgataagatggaagtgaaaatgtgttaataaacatgtttttatgtatgtaaaaacagcaaacaaagagtgaagatgaatgactcacattgatggttgagtgacaattggttcactgctgccctctcctgtttgcctccttttttgactagctgtgagactaattgtagtagtgaatagttgtgcatgtcaacatgctgagttggcaaggttttgctctggaggtaggtcttttgcccgccatctggcaagctgaaatatgacccactctaataactactttcaattcgctatgaatcggcctacaataagaagaaaccaaatttacaattagctaattcgtccaaaagacaattagctcattcaccctaggaacctaagtgcatccataactaatacagagcataaatcagttggtatggatattaccaaaagacaaagcatcatcaattggtatggatattcccaaacaattagctgattcgcctagggacctaagtgcatccagatctaattcacaaacacaaaaattgaagacaattcatgcaggcttct

SEQ ID NO: 37163 - DNA, 536 bp, Oryza sativa
gctttgtttccgcgactttatgcagaagcaaaaggtcaagatgcacatccttcctagactgcagaaataccttcatgcccacttgtcacacccgaatttttccccttttcgtagtaattcactaataaattgtctaaaaaattactttggttaactaggaaaaaaaccctaattaacaacatgtttaataatcgaaaatgtttgggagatttcttttcaaattctctttgctcttaaagcactaacgggatttaaagcgaaatatccagagcatcggaataaatattgataatttaaaatgtcaagatttacattaatgttaatctttctttccagcctttggtcgtgaatcgtgcccgattcactccgctctccgtccgcgatttcattttgcataacgacccgagtccgaatcttattccggttccggttccgttcttttcctaaaacggcactgcatctttttcctttccctttccctatttgttaccctattcttttcagtttccccctccctctccccactgccgtgcgcc

SEQ ID NO: 37164 - DNA, 536 bp, Oryza sativa
aattcgagctcggtaccccctgaaaaagctgcacatgtcttttttattgtcttttgcacaattagttggtttcacttgtagggatgctaatgcctggaatgctatttcagtgtgatttaaacattattttacaaaggttgtgggtaaaacaagcgtttgtatgctattagttgctacagttcttaaaaaaaatacattccactcctttgaccttaatcttccgcatgctttcttatttgcttcagtgaacctaacggccctcttgaaatgtgaagtctggttgtgttggcaactctgactaactagcttattaatcagcaactattcttttttaatgttcataaatatatttgttccatctccccaactattcttttctgatgtatctctctacttctgcagtgctgtcatgcttagaaattcaacaacccgaatctctgtccaggaccagccagagtacacaaacgacaaattgatacagatccatgtcttacaaaaatattaaaataaacttacaaatgcagcagaaaataaaa

SEQ ID NO: 37165 - DNA, 878 bp, Oryza sativa
agcgcgcccgcgacgtggtggaggtggccgatgacagggagcgcccacggcgacggaggcagccggccgccgccgccgccgccatgccggagcgaccaacgggtcaggcagaggaaggggacggcgaccagcagagcaaggagaagtagatagagaggaagctcggccatggtgatttcccgtcgcaattcgtccgcacgtgctagcgtgttgtgccggtcattactcattaacactcatcgggttagagcaagtttaatagcatcgctaactattgagtattgactaagctaacatgcatactatatagtatagattatttttttcctcactatctttactctttactacttaaaaaattcgtagtggtgatggtgaagccaacgtaaacatacgtatagacaccacacccgcgcctccccctctcacgaccgcactcgcgcctccccttctcatgcccgctcccgcaccagctaaaaacgccctgcaccgccgccacgaccacaccgccgtgccgctccgccgcccctctgacgcctgccgccgccgctccgtcgcaaataatacctcacgaaataaactcataaatataatagtcgcatacaataaatttatacactccatcaatatactttataaatttatattttcttgatactagagggtaaaatagactttatgatgtgaatttaacggtcaactaacggtcaattgacggaaggggtatagaagtgatccaaactgaaatttaggggcatgggagagaatgagcaaatctcagggggtatagaagggattaggtgaactttcaggggtacacagggaattttctctttaagtagagtagggtggttcaaacagatctaaaaaatacaagt

SEQ ID NO: 37166 - DNA, 621 bp, Oryza sativa
cctattagaaggctgatatgtggagcttggtagggataaactgtgacatacctgcatcatatatagtgcaaagccaaaaatattgactcaagaagataatcaatcatactcctagaacaagggtctttatttatggcggaaaatgaaaaagtaaaatattttgtggaatgatggaataaagaaatgattctccctttttcctatactttcgctctaattggttctcttggcatgattatggaaggggcatggctatattttctttgctcaatattttgagagcaagctttatttccatcttctttcttttctttctttttttttctagccatgcctttccttccttttctcattttctttttgccaagaacttttctaggagaagaaagcatagttcaatgtaggagtttatttgaatggatatttttgtggaaagccaacttctagtgtagaagcttagcttaattttatatgtggaaatggaaagtggtaatgataatgaccccttgatcatgagagtatgaaagatatctaacacaagtcacataaatttgacaaagcttaatataatgtcaaacagtcatatgcatgataaggtttgatcattaatgtacttgcaca

SEQ ID NO: 37167 - DNA, 873 bp, Oryza sativa
cggttcggcgctgccacgtcgaggccacgcgtcgaacgcgcccgagggctgtcggctcggtctttctttcagttctggtcggctagagaagttgcacaggggaagggtaagccaagaaggctgccaggtgggtccaggtcggtgtaatctaggtgggggtgtgagggatgggtagataattgggtgtaagtgattttggacaaattttcaggattaattcacttacccttcctttgtaactcgatagtttattttgtggccaggataaattagtgtgaatttttgtgatgatagttgaagatacctagattccattttctttggttgcacttaaaaaattttggatagattactcacagtaattaggagaaaatgggccctttggaaattagtttgaatttttaggagacctaaacagagaagataaattctgataaaattatatttattcatgataaatgacctagtatttgaataaattatttcccctatacactttcatgcagttaaatgcacattttagttaggtatggttttaaccgattaagaactataattagtctattatttgactggtttgactgatttattcgaggtatgaaatttagttattaaattataccaaaattacagtgagttttatatgttaagtagagcctacatgaattttcccacgattttatcttacacgaattattttagataattcgcaagacttatgtcttatatgtgtttccctttcctaaatgcatgtaaatgtttataaaagttatatttggactctcattaacctgaggtgatattgatatgttagaattacagtttaccttacacatgtcataagctccttacctatttatgcataagtttact

SEQ ID NO: 37168 - DNA, 764 bp, Oryza sativa
ctgcagccctgtttgaagttgtcataatttgaaattcaaattcaaattgttgaaatgaagtcatatagcaaaatgaccaaaacaaaagttgtagatcttgataagtcatacaactttgttgttgacatttttttttcatttcaaattatttactaccagaaaaattatttgatttttcttatatttaaaattcaaattttatataggtcaatcaaagtcagatggagaaataaccaaaataaaattgatagatctaattaagttatacaactttgtttttgataactttttcacataagtttatttagtatgataaaatttgactcggattttttatattttgaaattaattgagaagagggagctaaaatggacttctcggcgaggggggagcaaatgggctaggctggcagcccgaagaagaaggaggggaatgggaagccggcccaggagggagagaaaggctgcgggctgagggagggagagagtaacacttgggccaaaaaaggcccaaggacagagagatattttaatttattttccatttattttaataggttaaatgaattttgtggtattaaaactagttattgagctccgaaaattcacggaaaattttagagaataatttagaccgcttagaattttacaaaaatatttccggccatgatttttaaaggaaaaatttagtttcctgattaattcacttgattaaattgctttaacttttaatatatttcttgtagtgaaaagtataatgagtg

SEQ ID NO: 37169 - DNA, 1457 bp, Oryza sativa
tgatataatttatttgttcactttcatgttcatgacatgtctttagatggatgttgaaattagttttgtgaggcttgacattagccatgttgatatattttaaggtgtatggtttctattttaacttcctctagctagcactaggccctaatggtttacttgtttatctagatcttagttaagattcatgagacctattatgaaatgcaaatcaaagattcaaatgcacatgaaggactcaagtcaaaacatgttttatgcaagtatgcatgcttttactcgtgtttgcatttatgtcctaggttataaatgaaaaagttttaatttgttcccaaattttacttaggttcaagttagattgaccacacctaggttaaaaatggaaatttttagctctcaaaaatggaaaagttagcttccaactattttgataggaaatttttaaggtctagaatttgggtacgttacaatattatattgaattcagagtaataaatagaataaaagaaataggagaagattaccgacaactccgaaattcttccgactacttcttctctactctcttcctattctagtatacaatatagtacaatagagcctcttataattcagctcaatcttggaagtctgtgtgagagtgaatgaagcgaggtccttttatagggcagttatgacggttgtgagaagggaaaatgtccgaactgccccgcaaccatcattgggagaacttctggagcgtccacgccaaacccaggatcaacggtgatcagggggggttcggccgaaccagagggttcgaccgaacctgggctgggccctcctggcttggccttcggtcggtggagtccatggaccttcctctatccatttctcggaattttgggttgatttactgatgtttcgatgaagttcacaacccctccttgtatggatacataattctcctcactttagtctgattttcctcccaacttcagggttttcatctgcataaaaatatacaccaacacttgtggaatattgtggaatatgtgagattaagcacctattactatgttggatgttttattatctagactttatgtagatgttggcagtatgggattggcattgaacaaccgccaacaaaacccccccacacttagccctttgctcgtcactgagtaaaggttagtgtaaaatgaatttcttcaagatatgtatcaagcatataaattattttacaaccatacctgcacctgtgaactttatcagtggctaacttaccatcttgagtaattgagaaatagaacgatcttgattccagtccttgcttccctgttacactcatgggatttttataaattttcgcaaatcagctcttctcctcctattgacttcctctcttgtccctcaaggatgtatattttctttttggatccttaccaaggcaaaatgtgccatgggctgcagga

SEQ ID NO: 37170 - DNA, 746 bp, Oryza sativa
agtaacattaaatctccagtcataaacggctacaccacgttgaacaggcccaaccaacccacgtgaactacagtgcattgagtcgatttattaaggtgggactaatcacggtgaatctggtcgaccgcccgtaactgcgggcacggctattcgaatagttttactctggccagaggtgtacaactgtacccacaagactcagccccacgacacgtttccgtgcgccgacatgccaccacgacatactggaaagaggccgtgacaggacccttcgcataaccccctctaaccgatcgcaccacaccttagggttcgcccccgcccccagcagacaatgggcagccctcctctcgtgccgcgatgaatccagaagccgatcaaccggacaccccggccgacccaactccatcatgcccaccctcgcctgggtacgtcggctagaggaaagctacactacaagcccagccgttaccacgctggcttgtggtaagtacgataagttcttctagggcatcccacgaaccggtctttaattgccatgggtgcgactagcataaccatgcacccacagcccaccattcagtcgcattctagttggataattacgacaatgaagcatggccagatgtctcgagcacgcagctcattctgatactaaaaaggtctaatattgtaattatcccatcaactgagctagtggtaattaagcatggctaagcatatagttctagctaggggctgcagga

SEQ ID NO: 37171 - DNA, 664 bp, Oryza sativa
ctgcagcccatttttggccaatggatgcactgccatggctacaggctttagtaacaaattaactgcttgaccttttattagccgacctagccttagcaatcttactatctccgtttttaatagataataccgttaattttttttcacaggtttaaccattcgtcttagtaaaaagatttatgtaattataatttattttgttgtgaattgttttataacttaaagtaatttaagaatgatttatatcttatacatttacataaaatttttgaattgtatgataaacatctgttcaaaaatcaatggcttcatccattacaaaatagagggagtatatcataaagtagagaggagggcgcgcaagcgcaaccaagtcgcgacgtgtatgaagtatgaactagatagcagcctaccacgccaccgcacggttaaaacccatttttttcttgctgccgctgctgcttcagcttccatcataatctttgacccgtcgcttccctttttccctttccttgcgacctttgcccacattcttcacgtttttacctccccgcccgctacaaaacgcctctcctcaccacgccacgccacgacacaacgatctccctctcggcctcctgtggcgccccgtcggtatgaactccgagcagccgccgagcatggc

SEQ ID NO: 37172 - DNA, 663 bp, Oryza sativa
gcaatagcattgcaactaatagttttaggaaccgaaaaataaatggtaacagaaataagcgatctagtgaatatccctccgttggattgtgaggcagaattgcctccgttggtgttgtcgatcgaagcgccgcctcctgctccgggtgcacctccagtagaagccatagcgacgacgacgatgagcagaggaagtagcaagagcagtcgtggggaagcactccccaaaaacctgatcacccgcctacccgtgcagatctcaggcaagggtgtggttccggaggccctgctcgtcccaatcacttgtgcgtgcaagcgattagaaccggggaagaacagaagcaacataggcacagaggatgaaccagcaatggagagaattcgtggagagcctattcgtgtgtcgctgtctcgtcctaatagcgcaaggagagagaggattcgcatccgttgccgcagtaacgatgcgatcaatcagaattgattcccccacccatcacagaggtaatctcgtgaattgaattctcagcacagaggatgaaccagcaatggagagaattcgtggagagcctgttcgtgtgtcgctgtctcgtcctaatagcgcagggagagagaggattcgcatccgttgccgcagtaatgatgcgatcaatgggctgcagga

SEQ ID NO: 37173 - DNA, 1029 bp, Oryza sativa
tgtttaatcatccatatgcaatttggttgcaatctatcttgttcttgcttgtgttcttcgattcgcatgcagggattagccttctcggcgaggtcaaccaggtttcggcatggttgataactagaggagacgtggtgctgcgattgcgtggctcagtagcgtgtttgttcagaagccggatccagttgtgtcgcgactccgctcaaatcgactgtttatcaatatctatctgaagatcgggacctaacaccctgatcaaacatatcaacaagcagttgtaaaaactaattgagtgagtgctctataactaatataaatgctttgtaacttaatgtaactgaaagatggatgtagaggaacacaaatcttgatgtaagatcctacagatgaaacattgaaagacagatggagtgcgaaaatctatcacagatgaaatagcaaaacctaatacttaattaatcgtgtgctaatccatcgctctattttacgtgcgtgaagaaggttcccatcttacactaacgaacaaagctgcagcaatgttaacatagcgagagtgtcgaagcaagataatgtaagcttttcttttcgtcaagagcattcttacacaacttttagttacctatattatatagctaagttcaccattgcctagcacagaaagttaatgggatactaacaatgaaagaatagttctcatcactgttaacattgctaatcctgctatagtatggccatgtacattattgctaatcctgctatagtatggccatgtacattatggtcgattgacataccaattcattatcaaaacaataaaacaagttgaagaatgtaatgtaaccacaaattaggctacattgcctagcaattcatcgtcaaattaaacgatgacatgggcatgcctagcaatgttccttcgaattgatccagactttctaaaaaccttgggataagaaaatcgtgatggatccaaaaacctgagatggttgagttgaagcgtagccttgtgaactttataattatggctta

SEQ ID NO: 37174 - DNA, 2109 bp, Oryza sativa
tgattagggaccaaaccaagaacttctccaagtctacttctacctcaccacgtcacttttggcccatagaagacaagaaatcaagttgtacacgttttgtattcggattcgggcctcctgacagcatcaacttcaaacggacctagccactgatatagaaggagtttcgaggcccatgagtacttgttgaaaaacttatggagtctactttcagatggttttggtcccatgtcaaaattcctaccaaaactgccgggaatctgcaaaacaagccacgtacctcatccagtccgaatctgatttgggtgttgggccttgtaactgtgtcgtgggcttagcccaaggaggtgtgcgccctaggacaaccctagtacgtccctaatcatattaaatcagtagctgtcatcgtttagagtcgggttttgcttagattaatctgttaggaatagtttcgccgctacatcggtttgtggaaccccaaattcgagtgtttaatcatccatatgcaatttggttgcaatctatcttgttcttgcttgtgttcttcgattcgcatgcagggattagccttctcggcgaggtcaaccgggtttcggcatggttgataaccagaggagacgtggtgctgcgattgcgggactcagtagcatgtttgttcagaagccggatcgagttatgttgcgattccgcccaaatcgactgtttatcaatagctatcggaagatcgggacctaacaccctcatcagttggtaccagagcgtggttgcccgttaggtaatttatcttcccgtaaccagaaaattgccacacaaaaatatttattctttacctagacaatttgagccgttgcattgttctattagattttgcgttgttgaattatagattgcatcgtcgtatcgagtgctggtttagttttagatttaatttttagttttgagtattgcatctgttcatcactttcacttaggtgtagggttcgtctatgagttgtacgtcagttttgggtccagttttgtatttcgtcggttgttgccgggaccttgaaaaattgaatcgtctcgtcatcgagattccgtttttatacttttgagaagttttttgtcggtcaagtttggagttgcggctagggtttgcgcttttgccgaatttccctttggccgtacccctccccatctgcaactaccacctccccctcacgactgaccacctttatcacattgtttggtattttggtggttgtagatttgagatatttttacaaaaatggaacctacatgatgtgagcattccatttttgaggtgatctaattttagttttacactttgcatttgagacccctgtaatatttatatttacatttgagtccttcttcgaggtcagtggttcaattcttgttgaaaaaaagtaaaaaaataaaaaaagaaaagacagaaaggtgcaaagaaaaaaaaagaaaaaaaaagccgcacctaaaaaagaaaaaaaaaggcataaatgtgcttaaaaaaagccgcaccaagaaagaaaaaaaaaccattcatccttggagtatgttttcagagtgcagagttgtgcattgattcatatatagtccttagtgttgtcgggtgcttgcttgagctagagttgagtctagactaggccagcacattgactagtactttgaactattattcaactttgcattttctgattagtataattgcgttcctttgctactatatattgtgcctcccaagctccatatatattcttctggtcagcaccgctttgatccttacaatcgccacatcacgttcttcaaggtgtcacaaactagccactggttgtaccatccttagcattgctggtaagacacttgtaagagcttggtaaggtgctctatttggctgagttgttgaggggcatcactacaccacgtagcagattattagggataaccttcattgtttgttgttgtttttgtgtttgcaatgatatgtatgagtggcgctcaaaatcagtgataccaacaaggtgcacgtgatgatagtactttggtgcaacaagtgctaagttctcaactggagaaagcggagcaatggcagtaccacgaattatttga

SEQ ID NO: 37175 - DNA, 529 bp, Oryza sativa
tttaaatgcaatttcatcaggttgtacaaaatgtttaagaagttcattctgtcattaattaatatatttaatggcggcgcctatcatgcacctgatttgatcgccagcaagaagaggattagaactgagaataacttcgcttgaagaaatcggactagtaggttgatttaacaagctttgctggaagaactaatgacgtgtcagaattacttaccgtttagaccaatgcaaaggatacgaaaagcttcatcaaaatggtttccttgtacggaggtattgtttggcaactttgctgacatggattgataaatgagagcgaaatgagtgtgtcactgtcaaatcggattagatgagtagttcagctgcaaaggttaaaagcaagaggataaatacgatttcagaattcagatagcaccaaaaagagtaaccaaagtttgagtgttaatagatcatctgtgcacaaaacttgacgtctcttgcaggtctgcttgtgcttatcccttttcactctgtttaaagcttctttttc

SEQ ID NO: 37176 - DNA, 640 bp, Oryza sativa
ctgcagcccagcctgacatcaagtattatgtacagtaacagagcagaatgtatgtaggatggctgaacgcttcgtcaacaatttttctccagtcatctttgcatgcttccatatctgacctgcaaaagaagaggaaactaatggttataacaggggagtgaagaaaagaaaatctagtaatttgaatgtcaaattcccaaaccatcaacttacaaatcaacagggacaaagagcaggacaaagttgtacagccatatcaatccagccttgagccaaccaacaccctttgcaatagcaaaatccaagtcacctcctacagctttcgggttgccacctgacaggaaacatcactcgatatgattggtatctacaccaagtatttatatgagtagcatataaacaccaagaatttagaaacttcatagtttctacgtactatttttttgagaggatgaataacgattcaactcagagggtttcttggaaggaattatggtgagcagcagcccaactgaacattaataatttgcaaaactttagttggtacaaatgatttagctctgaatgtaaataatgattagacgatgctggtaaaataacagttaggcaattatttctagaatcctagccacaaacaaag

SEQ ID NO: 37177 - DNA, 1030 bp, Oryza sativa
ccttttcttctcccatccattgcagcgaggaggaacaaacagcctcatctccccacctcgactcgacaacaggaattcgacccgtcaccggcatcctcgccgcacggcacggcacttactcgtccatgccggaagtggaaccatctgtctttttttctttgcttttttttcttctcgactcatccatgatggaaccatctaccattctaccttgatttttcctctcatccttcttttcttctcttatttttttcttcaacttagtccatggcggaaccatctgccttttttttctcatccttctttctttcctttttcttttctctactcagtccatggcggaaccatccgcactgatttttcctctcactcctttcaatcacggtatcctctcattatcacaagatttatggcctcctccgtccatactaatcggcatcgcgtagagcaacgagcagttaatcgccggcggcgacggatcgagaaataacaacacagccaccgggcaccagctgaataaaggtcgtggcactagtagtggtaccgcggaagaacacacaggtggcgctggcggcaaggaatggcgtcagagaagatgccgtcgaagaacactcacgcggcggcgtgccagcgaagaatcgaggacgatggcgagtcaacaagcagttcagaagcaggggcgctcggcaaatcgattcttttttcccatcatgccccttttgattcaatggttggattttatttggtacctagcagtaccagtacctggagcgtaaaaactctcatatatattaggacagcaaattaaaccgtttgtttgtttgtttgtttgtttagaaaacatgagaaaaagattatggaattcaaactatgattgtatctacctaacgataataatccaatcaccacaatttcaccaaattttgattgtagaaaaagtataatatgtttagataacttgagacactgcttaattgaagtgcaaaaagtgaaaaatatgttaatagttcaactgtagggctgcaggaat

SEQ ID NO: 37178 - DNA, 582 bp, Oryza sativa
gacgattcccgccgtcgggttcgtccacccacgccgctggatcgccggaatcgcgggcggtctccgtttatgctgtacacagtgcccatgttcagagacgcaacgcgttgcgtagtgaagtgcggggatgtgtagggtagtttggcttgtcattgctcgcttgctcggtggagaaatggatctccgattctccgtttcccggcttgagcgaaagcaggtgggttttaggattagccgattttgcgatgttgttctgtttgttcacgatacaattcactcgggtgtgctgtgctacaaggctgctctgcgggccttctgtcgtgtagattagcttcagctgttcatggattgttttgcaagacatagaaatggggcatttcgttctgtttaatcggttcactctccgagaggatccccttctgaatatacctttgacaaggaactggatcctaaatattgaagtaaacaagtctctgattttttttctacatatttcgtaataacttggatgaacattgctatcgcatttgtcgattccttattggaacacgctcggatacttttgcgcttgtccttggtcag

SEQ ID NO: 37179 - DNA, 536 bp, Oryza sativa
ctgtagatgacgagactgaaatggacggtcttctcaagagggccatgccatgggttggtgaggagatttgcaagaaagatctgaatattcagaacagtgtagtgcctggtctaaatctagctcagtggatgaacatgcagcacagctcctcgcttcctggcacggttgtgcaaccagagttactaaactcattaagtggaaaacctgtacaaaatttggctgcagctgatttatcaaggcaaatcagttttcacccgcagttcttgcaacaaaacaacatccagttcaacactgcgttggtacctcaacaaaaccaacagacagaacaattagcgaaagttatccctacaccaaaccaattgggaagtgttataataccgcagaaggtggttcaggattgcaactctgaacaaaggcagcatgtggttactcaaccagtgcaaggcagccagccaaacataaacattccacagcctcagcttgttgttcaggctcagcttcagcaaccgcaagtcattctccaggcgcaactgcag

SEQ ID NO: 37180 - DNA, 788 bp, Oryza sativa
acagaatcactggcagagaaagataggtacgattctggagactcaatatcccacaattgtaccacagctgaacctccatattcacaatcacttccacatgctagaagattttcactacagaactccattgtatcaattgaaggatagaccatatcctgggacctacatcaacacagaagttgacaaggtttgacagctacattaagatgaattagaaatttgcaagcttaactggaaaaataatatgttgagacatgcaaaccagggacattttaagtttgcaccacgcctatcgataaatagattgcataattgagcaaaaacaaaattaacagtggatgaaaaaaataaatggatcacaaataaagataaccaagaagtttcctttgcccaaggctacctagtagagaatacgtagataatgagtatagcagtaaacatttcaaaatcctcatgcatttagctttaactggtgttaccacttaaacaaaaatgatcataaagacataaactagataatattttatagtatgaatgtatgataggcaagtttttccactgtgcgtggcaattatatgtggggaacagtataattgcaaaatatgacatacaatattttgcacaacaaaagcattctacctagttatgtagccaaggacctgattaagctgaattaaaaaaaaatcagctcaataacaataaggttctgtgcaattgtacattagtgtcattcgctcactaacccttatagacaaaactgccaagagctagtttccaagctcatgtga

SEQ ID NO: 37181 - DNA, 1891 bp, Oryza sativa
  unsure (1)..(1891): unsure at all n locations
atgatatgcatagcgaccatttctcactctatttttatcgtacttaccaaaagtgttcaactatccacctgcagtgttggaatgtgggatgttactttaggtcaaccttgtgtcagacatatcttaacgcataatcgatgtgctaatgcggtaaactttccaatattcttctgggtagtcctttagcttactcttgcagatacttcaattttgtcattgtacggatttcaggttgctgttgctcctaatgacgaatacatttccacagggggaagtgaccaaaaagttgtgagttgcttatttccccctttactagtttgttacgatgctctgtgttgcatggctatttatgaagattatatttaaacattataagaaaatgggaaacacaacaccaaaattttcttgatatggtttaccagggattggcataagtcaaaaactcaagatttacaattcataacttattgcatcaactgagatgaatttttgcctttatatatgctactgaaatcacatcaaatgtttgttgattctgataaaagtgtgactgttcaccttgttctctttttttttgcggctctagttgttcatgttattggtttttgcaggttttatatcatagtaaaagtgggtgtgcccaccttaattggcgtctcacatatcctctcccaggaaatgattaatgtactgccataatttgtagaatgaaatgtaagttattcttttgtgctttctgatgttgttgaacttgcaattagctggtacaaaaacagataagggaaccattaaaaaatagctaaaagtgtaaggataaaaggattactgtatgacaaggcattaaggcaataattacatggttatggtatcaatgcacacattgtctagtgtctactgctattcatttttaagcttcgaacaatggtgctatcttcacacaccagacataacttaccgtagacatctaatggaccaaataagaacttggaaaaaaaatcaaattggtgaaacgccttgttttattgcggagagacttggtgttttatcttcataagagattgagatgcttctgttatttcctagcgcgcgctgcatacttctgttcctaacttttcttatatgcacatctttttcagctgaggaattatctgcactaggttgttgaaccatagtaggaagtctgctgctccaaatagtacttgagccagggctggtattgaagcctctgcttgatggacgactgcagcttgtgttgggtcttaatataaatgaattctcatgcctccttgcaagttgagtctgtacctttttattctcctgtaaagagaatcttgatgaattaaacaacaatttgactgataattttctgtatcaccaatcgattaataactacttacccattgcctgtatttttcctcttccttttccttcagtgttagcatgtagtctttcagcatggccaataggggaagctgcaaaactgaatgttaaaaagtcttgttcaagaaattaagggacttctatcatttgaaaccaaatagttgacatttaatccaacttgtgggatttaggnggctatatttaaatttttttgcatgcggctattcataaaatgttattttattggcaaagtaaaatgtatcaatgcccaaatacataacaaattaattcacaaagatttgctaaccagcattcttatcagaatattatagttgagtatactattataagctatacactgaatacttcaaatacaccgctataaactagtgcataactgcatattgtttaggtcttggtaagacaaggccttcttttttgtcatagagcataagttcagggttataattatttattcttcatgagctgattgatgttggttgatttgctg

SEQ ID NO: 37182 - DNA, 595 bp, Oryza sativa
ctgtttgtgaattgctgagttgaacatccactttgtatgattttggtgccattacaaatgttccttttggaaaagttgggcaaaggtgtcccaagtggttggtgaattggagaagaaagatgcaagaaaatgcttgctagtggaagcatgatctctctagaaagtttgatgctcgtagcagcctagcagaaaggaaagggtactgaatactccatttgctgctatgtttttgtgttgttcaagaaactgaagggagtgtggtgatgtcagatttcactttgtttcagtagcaaggaaacaaaatgtttggctattgtttcttcaattattagcttcattcagaagagtggcatgtgtccaaaacatgcaaatagaatccatctaaaataactgtgaacatgcaaacaactgaataattgacatatcatggcagttttaagtttgatgtaatagcaatttgtctgctttccatgcagacaactttattcaagattttgtgccaactggtccatgcattagagtgactccattgaaagaatagtacaccctccgttttttttatatagacggcgcgttcacttttaaacatatgttt

SEQ ID NO: 37183 - DNA, 761 bp, Oryza sativa
tacttgtatactcgagtactcactcggttttttaatatacaacacagttgacttttaaatatatgtttgaacattcatctaattctaaaattttatgtaaatgtataagatataaatcatgcttaaagtaaattgagtgataaaacagaggtattatttggtagtactgatttgatatagggtcttatcgtttgcactatggtttataagccgttgttgaaatttaaattttaaaatttgtgtttgaagttgatcttgatgttcttttaatatagtttttttgcatttgtttttaagtcgctaagcactcatatatatttaagttatatataaattatgttacaactaattatagtacaattacatttgaaagttttttaataatcatgtgacggttttttggagactaccaaataaataagcataagtagttgtctgtatctctcagcaccaacacctgtgatcaagcaagtcaaaccatgatacttaaactcaatttactttaagacaatgacatgtgttgaatccagcagtacctaaatccaaatctgatccatccagaaaaattgacattgtctaatctaaaaaactgatcagtactacagtaccccccccccccccccccccccccccccgccaccaaattgagcagctgaaacaggatgctcacatcatggttcttggaccgtgtccatgcacatctcacactacagcaaaaggcttctttcaccttgatttcctctgtattctgtcatctcgct

SEQ ID NO: 37184 - DNA, 629 bp, Oryza sativa
ctgataatacgtgggaaagaggcaaaaccttgacttaatgggttgtataggccaattcattctacattagtacattacagttaacaatgtgttacttagctcatcttggcacttcactgatttggtaccttccctatgcctgtatatagtattgtattttctgcataccctcttatactattgttttatgtgtttcgggatatctattataaataaaatgaatgatcactgggataaaaaaatttctattggtgccctaagtattttagctcttttgctttatatttgttactgcgtggaactctgcttatttgctgtattccaaaccttgttctgctccgtcaaattctttatacatatctattttttatttctagtttcagtaatattagttctctaacacatcgcatgttcataggtcttgttgtcactagtggagcaaaaggtgatggtaagcttctactgtggaatgctttgagaggagaactcgcttctgatctaaattcaaacttgaggtaaactggaactttccttattccgtcatttatttgacttttgtttagtgtatgctcttcttatcccagcctactccttttgtctagcgttgtgtcactccaatattcatgcag

SEQ ID NO: 37185 - DNA, 659 bp, Oryza sativa
cagttcagatgcggcagcgacatcggagatttgcaaggcggcagatgtgatggtcaaggaggtggcggcgcgcgcggatctgatacaggaggggtcggcggaggaggaggcttaccgacctcctgttctgattccggtggcaacagctagggactttggcggcagtatgcgtggattgactcaaaggtatcttcaccttgttttccctacaaccaatctgttccccttatgcaatgagagatgctttcaatgacgtgtgtagatcagatgcactgggtgcggttgcatcccaaaatttttttgattgtactgcatagaatatcctaggttaatgttattcggtgttttgtatctttataatcatccagctgttatatgtcggtcagtgttaccaatgttgaagtaatgcgggttagctgggttttacattttgttttgtgcaaaatttggcatggagtgagaagggggttatgatgacatgtttcaaataaaataaattagtgttaacaaaaatccaagcagttttaaacctaaccaaagcattcctttctgttttgttgcccataggtatattctgaaattagaaatttttattgagtataggaaacaattataaactgtaagaaatttgatactgaacatgcgaattttatttctca

SEQ ID NO: 37186 - DNA, 588 bp, Oryza sativa
caagatgtatctactcatccccattcctttctatgttcagatgcctccggtttcttattagctttgacattcttgtctagttcacctagtctagatatccaattgaactctgtttacatttcatcggacacagttacatagaaaaacacatacatacagtatagaggtttgcttaccttcgactggaagatgcaccccttcccttatgttcaaatggatcttcccttcgaggggattatgatggcaaggcaaactgtttgatggagaaaccacctacctctctcgtttattttacttctttatgttggatcatgtatgtccacttttggtcatagccactagtagtatgatatttgagggacatttaacttttttttcacttttaagatgtggcaattaattatctgccactcgctgtgtataacatgtgagccctcatgtgtatatgacatgtggatccagtggcaaatcatttatcacccctcgtaagagtgacaaataattaattattccgatatttgagcgcgtaacgtgggcgatgcctactcatttggggaaaatatgtagtacaaaccacatatgtagtgg

SEQ ID NO: 37187 - DNA, 583 bp, Oryza sativa
actttagtcccggttggtagcaccaaccgggactaaagatcccggtgatctttagccccggttggtgctaccaaccgggactaaagtcccacccctatatatatgtcttcttcctcctccagctgcccgagcaagcttcaaaatttcttcaaaaaagaggggaggtcatgccaaaatttctattgaatttattttggtgattacatacaaatcggaggtgcctaaaaggtttacaacttcatcctccaatgttttttttgtcatactacatttgcacctatgttttgcacactttttttgtctccaaaatttagttgtaagttgatgagagagaaaatgtgtgtggggaagaaagaatatatagaaatttagttcatttgctaaacaaggttttataaaatagttgagaaggaaaactctagtgaaagttaatcttaaataatagaaaacaaactaaaatgaaaattaaaagaagtaaaacacattaaaattagtttaaaactttacaaatagtttttaagaattatttggtgtaatattttatgatttttgtatgaataaagatatctgggctgcaggaatt

SEQ ID NO: 37188 - DNA, 718 bp, Oryza sativa
cttgtatgtaagtttcacgtaattttgaatcgttagatctattacaagatttgttctatggaggaagaaaaaaatcacatcacacacatatatgaaagaatttgttcccacgacctctattttactgaaataacatgttaccgagagattcttgaaagttacatacaagttacattatagttacagtgtaattacatgcaagttacagtgtaattacactacgattgtactgtaattacatctgacaaatattagggggagaaatttgatgacaaatatctagcaaaatcgtaaaatcaaaggggggccagccggcttttgacagttcaaaagattggcaatttctcctttttttttcatgcattggcaatacataaaagcgaatagtttgcaaaagtggacaatatacttacatgttcatttaaacttcacggcacgagtcttcactgtattgaaatcgctgctatgggccagccggattgaattgggccatacggtggcctgttggacctgggtaccatatataggggtaattaaaaaaaaatttattgggaggcgccatggcccctgccaccccccttagttccgccactagctcacgctatcatccagatccagcagtgcccacccaacgcccgactccatggcgtctccttcgtcgtcggcggagagacgttccctgcgcaccgtgccgtgctcgccgctcgctcaccggtgt

SEQ ID NO: 37189 - DNA, 613 bp, Oryza sativa
aaagataacattgatcttggggtcgatctcagtaagcagcaggaagacagcgatgtactcaccattacggccctcacatccacgcgggaataacaaaatcgtcgcattgtgctccccggccgagattcttattccgggcaagcactcgccgatggcaagcttctgggtttcgaggtaatcaagtttgtactcgatgaaactagaggccagcatgcttgctgccgtgtactccatatttgttgtatgggggcactggtggagaaaccctttgtagtcccggttcgtaacccccctttagtcccggtttccaaaccgggagtaccaatccgggactaaagatcgatctgtcttttttttggtgaaagaaccgggagtggagagggatctttagtcccggttggatatacccatatagatataagccctgcctagtatatgtttcaatacatatatatgcagacatatgtatatgtatatatatattatataaaattatatgtatatacacgcataatatatatgtattaatacatatatatgtaatgcgaaggcttaggtttttagatttatatatgaccaaaatattttacctttatagaaaatgtgtacacat

SEQ ID NO: 37190 - DNA, 561 bp, Oryza sativa
ccccgccgccgctgggggcatcgatctcagcgcccccgcccccgcccccgccggcggcgactggcgctcccagctccagtctgagggacgcaccaggatcgtcaacaagatgtatctactcatcccccttcccttctatgttcagatgcctccggtttcttattagctttgacattcttgtctagttcacctagtctagatatccaattgaactctgtttacatttcatcggacacagttacatagaaaaacacatacatacagtatagaggtttgcttaccttcgactggaagatgcaccccttcccttatgttcaaatggatcttcccttcgaggggattatgatggcaaggcaaactgtttgatggagaaaccacctacctctctcgtttattttacttctttatgttggatcatgtatgtccacttttggtcatagccactagtagtatgatatttgagggacatttaacttttttttcacttttaagatgtggcaattaattatctgccactcgctgtgtataacatgtgagccctcatgtgtatatgacatgtgg

SEQ ID NO: 37191 - DNA, 623 bp, Oryza sativa
ctcttgctgcgacgacgacgacgacgaggagacgcatggatggatggcaagtcaatgctcccgcgtaagtgtagatacaagtggactgcacggttggttggtacaacaagtgccttgagttgaatggtctcctcctctcctctccattgaccacctctaccttgcatagtcaaactgtgcattgacccccatttcatttatgtagtttggtttcttgctcactgtcaaattcaagggatttaactttatgcattgtttgaatttggttcctagggcttgtttggatttaggctaatttatgtcttaccaaatttttggtagtttcaaccgtactttatggatgtttggtttgatatcaaatgttcgccatactagtataaattgtattgtactctctccgtttcaggttataaaatattttgactttagtcaaagtcaaactgttttaagtttgactaagtttatagataaatatattaatatttataatactaaattagtttcatcaaattaataattgaatatattttcataataaatttgtcttgggctgaaaatgttaccacttttttctacaacttgattaaacttaaaacaacttgactttgacaaagtcaaaatgt

SEQ ID NO: 37192 - DNA, 550 bp, Oryza sativa
catttaacttaataccccgtctcaaaaaccaagcatttcaagttatgaatttagccaataatgcgtgtaaattcatagctaaaagttgctatatttcacaaggtatggtatatcatataatctacgataatacattagtcaataatctattttaacctaggccatagtctagtatttggaattctgtatgcagatgaaccattaatcatctgaactgcactctttctctacgagcgattcagtcagtctgtcggtgatcgctcctgtctcactccatgaatgtagctgaactctagtgtcagtcctgcatttgtcaaagctcatctgccagattaacgtggatgaaagttctgaatatattggccgatgtacaagactcgtgcatgatcctggcaacatgtccacttttgctaatgttgatgccatatgcaaagattaaaagtagaattctctttcacttttttcactcggtgtagtgtgtagtgacgcctgatgagaggagcaataggtcaccagtcacgtgaaaaacccacgggctaggctcacacat

SEQ ID NO: 37193 - DNA, 614 bp, Oryza sativa
  unsure (1)..(614): unsure at all n locations
cgtacgtccgttcgagagtgatcagtacccttctccgaaaaattcaaatacaaattttaaaaataaattaatttgatatttcaagcaactttatataaattttttttacaaagaatacaccattttaacaatttaaaaaatgctaagaaaaatctatatcttaagtagaattaaatggacaaaggttttgagaagaggagttattaggtagggaaacttgaacggcggaagattattattggttgaaaaaatgatatatatatatatatatatatatatataaactacgtacaaaggagttatattttatgataaattttaaaggtaaaaacttattactacaaatattttagaacggataaatacaaaattgattggatttcacgcgcatgggcgcatgattgcaggggcttggcatgctgactgtggcgtcctcgctgccggcgtgcgccgacaccgacgtcgccgacgncgtcttgcgttctttcatggcacaagtgatcttcgtctacgtttcgctctacctcgtcggcttcgctaaggattcgacaagccatgcgggttggcgttcggcgccgagcaatttgacccgggccaccccaaggagagcgccg

SEQ ID NO: 37194 - DNA, 525 bp, Oryza sativa
cctcctcggcctcgccgcgcgcgagccctcgtcgccggattccccagctcgagcgcgcgctgggttcgagattccgagcacgcgcgcggtgctccggtgagttctcgcacccgcatttcctccccccctctctctgtgatgctttgctgctcgtcgccgacgcggggggtttgatttgatcgcgcgcttttgggtgggggtttattggttcgcgaatccgcggcggggcgcgggtggttgctggtcgtcctcgccggaatggttcgattattggtggagttctctctcggtttctaccgattatttcggtttctagtccctagaatctcctcgcgttgttcttcccttgcttaattaatggcccaaatgctgctcgccccttgctctcctatggtggagttctctcggaatttttttcccgatttctttcggttttttcttggtttggttgctcctcgcgctgttattggttgctcctcgcggtctccttttatggtgaactcatgcggcgtgctttgaggatta

SEQ ID NO: 37195 - DNA, 512 bp, Oryza sativa
actatagggcgaattcgagctcggtacccaaattcaaacaatgcataaagttaaatcccttgaatttgacagtgagcaagaaaccaaactacataaatgaaatgggggtcaatgcacagtttgactatgcaaggtagaggtggtcaatggagaggagaggaggagaccattcaactcaaggcacttgttgtaccaaccaaccgtgcagtccacttgtatctacacttacgcgggagcattgacttgccatccatccatgcgtctcctcgtcgtcgtcgtcgtcgcagcaagaggacggccggtgcaacgaccggttgatcaatcgatcgattgatcgccggtaatctcaccgttgaatcagggaggaaagagtcgccggatgggaccagatgatggttaaattaacttgttaattaattacgaataggttgcagcagtgtacgtatgcatatagaacaggacagaattaatcgtgtggttagttcgagtaaacaaagaaaaaaaatgagaat

SEQ ID NO: 37196 - DNA, 555 bp, Oryza sativa
agaagttatgctatgattgccccatatgacgtagatggtaaccgtattacgtacccttctcttgggggacgaaactacaactctactacccctgttaaatttacaaaactagcaaaaccacttaaagtcggggatacagaggtttttgtagaagatgttagtctatggaacggacaggcaccgcaagactaccaacgtagtattatcatgtggggttataaaaactcgttcggctatacttatcccgatggaacgtatagtcagctaatgcagatgaggacatatgatattggtgcagttgacaccacagctaacaagattacgttaaacaagccatgggcagttgcaaacccaaatagttcagatgggattttcccagtagggcatacacttagcccaacttctgacggctccacatatttgtatttgaatggtcacgtaaatatacaagtacctactacgtacaccaagtacagccatttgattagtggctcttctgagtttgctaatacaacgattatcccagtagaaacaggttttattcaacttggattc

SEQ ID NO: 37197 - DNA, 587 bp, Oryza sativa
aaaacaacctgatattcaatgtttgagtctttatataaaaacaaaaagaattgtgggttttatgatgaactcatgaactcatctgagttcacggagcagatagccggaagaggcgccggggagggtcagagatttaggggcgtttggttcactccctcactttgccaaactttgccacactttttaggatatttgtgtatgccaaagtttttcgattcaaaggcccacatgtcatacactcatcttttagccaaaccttgtctaaggtgtggccatcaatttataagccacacatttggctagttttggcatggaggtttggcaatgttcggaagtgaaccaaacaaggtccacaggaaccgtgttggatcgagaatgtacggtccagatgcaagaggggtaaaaaaagccgctgatgctggttcacgggagccattggatcgcaggaatcgtccgatcgagaatgtgcggtcaaaaatcatgcggataaagtgcggcgatgcctccgaaccccttgagtccatgaaatcccttggattgtgatgatgcggtgagcaatcaggcacacagtgtccgtatatttcttg

SEQ ID NO: 37198 - DNA, 617 bp, Oryza sativa
atctgtaaactcaccatgggcttactaagcctgtttgaaattggtataagtctactttgagtccctcagaagtggacttattcttttggaatttgatctaggatttccaaagttcattaataatacttattcattttatttttttactcacaaaaaaagaaaagttaccccctctgattataaatatttgaagcttagaagaagatttatcaatcgtttaaaattctgccaatctgtatatgtgtataagtttatgatattatgacagtacttttcaaggtaaatctattgttgccacttttttgtgcttttaaattagtcatttaaagaaatttcgatggtctgaattttgaaattttgatcacaatctcattccaggagttaaatatttatgaccggaacgagctttttttttaagaaaaaacaaaacaagttattcagttcagtatagctcagccaagagtgtgcatcgagctgaacaggtgacaacctttgacaacgaaaaagaaaaggaagaacatcatggacaatgcatgcatggcgatcaagatcatcgaacagttcgtgcatatgcacgcgtagctagtcgccttcttccccttgcctttttctgcatt

SEQ ID NO: 37199 - DNA, 641 bp, Oryza sativa
ttttagttttaatcaacaaagcatctgatcatatatttacaaatatcggatgtaagtttattatatttgaaaatgtaggagtatacgcataagatgtaactggaatatgaaatcagaaaagagatgtacaaaaaaatatgaaaaatataggatgagttgaacaacacacataccgagcaaggttatctgcttttatgacaattgtcaggcttctcctcaagtgatgaaacaaatgttcttgtatctattaataaaggataggtgaaagaagtataagctgcaagcaccatttttttaaagaaactaaaacagtactcaatgcataggtctccaacatgtgcaaaaaccacaatgtatgctcgaatataatataacctggcaaaattcatgtgaaattcacacatactgaactgaatcaccaaaccaaccaaaagctttcattttatcacactttttgcgacaaaaatgcatcataacatgaactatggatttgcatagtttgaaaaacagtataagctgcaggttctatttttttaagaaactaaaacagtacccagtgcataggtctcctgcatgtgcaaaatccacaatgtatgctcaaatattgttctgagaaaaatcatggtgaaattacacatact

SEQ ID NO: 37200 - DNA, 526 bp, Oryza sativa
catttgctcttcatcttatgagccacaaccaatatttgaagtttaaaacttaattttagatttgtttggttcttttatcgtagttcattttccagcattaatttttaaatcgctaagatcacatacactaagttttacataattttcctttgttgttgtaataagcattactgcttacaatcttcttccgaagaatggattttggaagatactgtaccaattccatcaacgggaacataattttaaactgaacatagaaaatactcaaaacatggggtcaaatacacctaatttaagaacggtaaatatatcatatgatatttgtttctcactgacctagtggtcccacaacacagtgacagaggaaaccctcagctcacagctccaggcgatttttcgtcgccgccggcgccggcgccgccgcgagccccgtcgactccctcgccggcggcggctggacgggaccgaatctcaggtcaaccctctctccccgccattagaatcttcgcgatactcccccaatcgg

SEQ ID NO: 37201 - DNA, 596 bp, Oryza sativa
cttataacatgtttgcagagccaaagcttcctttcggaatttcttcatttgtattttacctgtgttgaagttttaggtcatttatgacaacaaatcgatagagctaattgtgagagactcttttcttgacacaattgttgtttatgtaggcggtttcttactatgatttgggctcagatgaagagtccaatcaataatccatagatattggctcttctcaacaataatgtggtaaatgcggtcaaggtcttgaggtcgttactactaaacattgctggataattgaatgagagtttctgtatttatgtattatttgctagtctgttgaatgttctaatttcctcggttacaaagtttttccattcatagggttcaacatgtcttcgttatttgaagcacccacctttacatgtctcacctgtactagccacgtagtcgcactttgcacgactttcaatcccgtttaaaaacttatgtataaacttatcttttaagaaggtggttttaataagttttttatttataaaatattgatggcccaacctactacagatttagctaagttatactacatatttataaaatgaatcattgga

SEQ ID NO: 37202 - DNA, 658 bp, Oryza sativa
aaatgtcactactccgacttttcctaacttttactgagaaagtgtcagtcttggcttctgaactaacttctggctcactgaacacatcatcaagaacagcactgacatttttccctacatcacttcctgattctatccatgcattctctttccttagtgaaagccctatatcttctggaacatgggcatgtgtttttgtcaaatccatttcctcaactttgacatcaggtaacatgctttgaggaaggaaatcaacagtctccccttggaccttatccttctgagtctgcaaagggcgacatacaccatccttgctatgaaagatctgttcaactttagtagaatctgcagaatcaagcatataattttttttggcctcatcagtatcttcatgaaatcagcgaccatcattctctacatgggctgaaatacagtctttatcctctatatttgattatttgaaacttcttttcttcaaggatttctgtgtactttaagttaaccaacaaatttgagcaaaattcattatatgaagaccaggagaactcaaaaaacctagagctatcttccagtggcaagaataactactgcactgtaacatacagctatgacatgctataaatgcagaaacattctgcaagttctaaatatttctgta

SEQ ID NO: 37203 - DNA, 580 bp, Oryza sativa
atgctgatgaatggaacgtacgtacacatgggcagatcaatcatcaatcttcaagtcatcaaggagccctattacatgtctgagaaccgtggcaaaatcactgtaccagcctgctatcacctaccagttttaaaatataagcatttttaggatttaaaatttatgtaacgatataagcgattccaggacactgattcctatgtataaaaatccaaacattttcaactcgtcagaagcttaaaaaggaaatctaagcaattcaaaattcaaccaataatacgattgaaagagaaatttcccatcaatcttaatcattgctaaataatctagaaatggtttattttaaaacggagggagtattaatttgggaggttctgttcttggatctatggtccatggaggcatggagcagtactgcaagcaccagcagtgtatagtactgtgacttgttaaaagcccttgatctgtctgcagcctgcacaacccatccgatcttctcgacttgaatactatgggtgtgtttagttggggaacaggaaatttttgggtgtcacatcgaacgtttgaccggatgtcggaa

SEQ ID NO: 37204 - DNA, 599 bp, Oryza sativa
caatgcagaaatgcaagtcgtagtttatgcaaaccaggatactgctcttttccaccttgttctcgcacaggtaatggtcacacctcggggcgcaatcgtaggagtaggacctgagctccgagatgaacttgagcacgccgtcctggaaagggtcgaagtgggggcataccctcccctcggtgttgctggtcgacgccgccgccgccttctgttccgggctgctcacctcatccggcggcgcagtgtcgccgcatccagattcgggcgccaccgcatactgcgggctcatcccctttcctgtctccatcgcgctcttctcctcttccatcacgcctggggcgcaagacctgaaacatgcgaatccataaatccccaaagaatcaaacaagatatacgaagaagaatacgaactgctactactgctgctgctgctgctgctaccagggatgaaccatccaaggagccttaagaagacagcggactatggcggtgaaattgaccgaaaggcgagggttccatgaattgtacggactatggcggtgaaccatgaaagctaaacgaagcggaaaaccaagagatctctactaataggacaaggc

SEQ ID NO: 37205 - DNA, 594 bp, Oryza sativa
gaaaccagtactcatcattctctacatggtttcagaatatgtatccgctacatttgataattaggagcttcttttcttcaaggacctcagcatgtacttaagttaaccaacaatatggagaaaattttattagatgaggacaaggaggactcaacactctgagatatcttccagtggcaatagtaactgctacagagctttgccaagttaaatctgctgaactatcatgtttgtttaatacgtttgtgtagatatcctgaaggttttgttgtttctgcaattaatatatgaatcaaatccttagacattttctctatttagctagtacaagaccctgctctgatagttaccattttccaatgctgagcaaaacaataacagataatagtgctgctatcacagtttgattcattcacgaaaagttccattttctgatacaccatgcaagtttggagccctgcttaaatcactttcatttcctttagttaggcacacaagcacataaacttaccaacttccaaaggatctgatgttttcaccatgactgtatcttccaattctgaagcaggaatctgagaatcaccgccttcagaa

SEQ ID NO: 37206 - DNA, 634 bp, Oryza sativa
ggaaaggggcggagggcgatagccatcgggcggggaggccaatgagcttgcgtggagagggaggaggcggggaggccctcagcccgtcgatctccctatcctggtggccttgactccccacgtcttcgcccacgacgccgccggtagtctccatcctcacagcgacgctgccggtttcagtcatactacttttgccacaccctcggtgagcacccatgcacaaagcctctttgaaattgctaattagcgcgtatgcgccatcagactaactcgcgcgcgtttttagcccatactcatacgcgacccacacactcgcgcttaccccatcgcttcctttttttacgcttcttctggcgattgttattttgggtaaatctttccttttttttctccacatgcgtgattctttttaggatattttataaattaaatctttacctcccatttcacttgagaatagattcgtctcgtgaattagtccaagattatggatgagttttattaatagtctacgtttaatatttataattaatttccaaacatccgatgtgataggaaattaaaagttttagtcccatctaaacagggtctactccctccgtcccaaaaaaagataaacccgggtaccgagctc

SEQ ID NO: 37207 - DNA, 508 bp, Oryza sativa
atatacgacagtgagtttgtgatagcgttcgctggattggtgccgttatattatgtccacccaatgcaagtaacattggaagctcaattcttaagacaacatatatccatcattaagtgaatgcgagacatccctgctaattttcaggaaaaagagaaaatgattgtaagcattcttatcaacactgcacactttatattttgagtttctccaataacattaaaacgataggagagacaggaaaatggatgaactgcaaacagaggaatgtttgtgtccaatttatataaaaaaaatactaggagaggtttttttttaattcagtcatgctaatgttgtcatgttaatgcttaatcgttgctttttatttaatattttttttcgtcaggccctgatgagcaaagacttttggaagcatccatggcttatgtggctggcaaccccattatgacagatgctgaatttgatgaactaaagctgagattaagggttggtctttcttgtccct

SEQ ID NO: 37208 - DNA, 535 bp, Oryza sativa
gagcggcggacaacctcgtcgccggctgaacgcttgcaatctccgccgccaagcagagatgccgatcgttgccccacccccgactctgctagcatggcggcgaggaagagggggcatggatggcgagcagagaggcggaaggggggggggggcttcactagttgggggaaggcggcagcggcgccgagccgtagaccttgaggaggacgtggtggtggtggcggtgacgatggggaggcggcggctcgccggctccggtgggggaggcggcggcggcgggggaatggcttgtactggagatctaaccgttggtgatagatccaatggccaggattccttccctcctgcatttttcaaaaaggaacccttattaccgctaccattgctaacggtccatattttttttacaaatacccctgcattttgttttcaaaaaggccctctttcgcaccttatagaaggcagatatttctcatatttctgttgtttttcgctgaagcttattcatttctacttatgttgtgcctggacgaaa

SEQ ID NO: 37209 - DNA, 506 bp, Oryza sativa
atgggtaccagaaagaagaatctcggccggggagcacaatgcgacgattgtgttccacttctactcgcatgcagggtgcaagtacatctctgtcttcctgctgctggatgagaatgagatcgaccccaaaatcagcattatctttgaggttttcttgatggacaaagacgggaaaccttcctcgcaccatgcaaagaggaccatggggccaaacatggagacagcatcgggtctccggttcactgggtggcgtcacttcgtcaagcagagtgatctacagccggatcatgtcagcgacaaaggcacggtcacattcgtgtgtgggttcatggttgtgcgcaacgacgtccacggcaatcctatccccgtgccgccccccaatctgggtgcccaactcggagctatggggggcagcgccgacggctcggacgcgtcgttcgccgttggcggcgagacgttccacgcgcaccgggccgtgctcgccgcgcgctcgccggtgttcaggg

SEQ ID NO: 37210 - DNA, 578 bp, Oryza sativa
taaacttatttttcatctgcacatacaaaactaacaataatatctttctggaggcgtggatctttttttttaccgaagataaacccatggatggggttagctgatttgagtgaacatgatcttggagcaacttcatatagattctggatttattggttgggagcttagtttcactaacacgcaaagatctgtacatccctgcttggtagtttcacatgccataaaatgttttctaactccagctgaatatttactttaccttgtaaaacatgtagagagactctaaaagcaactctgtggtacgtaaaaccaatcaagcatattttctgcagtgatctcaccacttacctgaatgggaaatataacgaggctccatttttttcaactgatcatacttattcacctatcaaagtatagctatttctaattgtatcacggtgataaactaaaaaccgatggctttgcatgtgcagggactttgtgaaatgtgtacgatgtatcaagattctttctcacacgaagaaatgcacatgagattagtcggcgactttgagacagctttctaccaaccaagcttg

SEQ ID NO: 37211 - DNA, 3932 bp, Oryza sativa
gggaagaacaggacacagaacaagagctggccatcaaaaaccaagaaaacaaggctatcactgctcaatttccaatcttgcaacaccagagaaaaaggcaaagccaagcataaagatcaggtggacatgggcagcacaggagcacatcattctgaagtgtggaggaagcaaaggcagagacagacgagtccatgtagaggaggagaaggaaaggaaggccatgggaaccagggacaaagaggcatacatacatgttcttgaagcactcaaaagggagcacacaaaattcgctaaagatcaaccccagcttcgcaagaagaaaccacacaccctcatctttctcactctctctccactttggccccacaaaacctctcatccaaccacatcaattgcgagcattaaacaacacaaagagaaaggtgaaaacaaaagcaaagcaggaggaatgcaaatgcaaacctataagctcacatattaaaataagatgagaggttcagataagcttatacctgacgagagaagttcaggcctccctcctctactctactctatccctttctcctcctttggtatgcgtgtgtacaagtctacaagaacaagaaatggaagaagtctttgtgcagagagagagagagagagagagagaaagagagagagtgtgagtggtggtggcagagaaagagagagatgcaatgcaacaacggtcaaaagacttgaaagaaggagagaaatcactgggaaggaagagagagaaaagtggagcagcagcagcagcagcagccagcagatagtaactgagttgagctatgaccctacacttgtagttatttcacaataataccccactcatttacttcccttgccattttacacaaattgctctctgaacattttgttcaatgttcagtaaatttcaggcaatttatgacattttatgtctctaccgagatgaatggaatttgtgatttgtgggagaaatttcacattgaaattcagagatattttatattgggagtaggaaaaggatcagaggggctttcttgagaaatactaccagtctaccaccactaggaaggatgactgcaagacattcatgccctttggagttatcagttgaataatttatggcattcaccaatacgacaacacttacgttagagaaaagaaactgaagttatgaccgtgacaacagattttggacgtacagctcagacttcagagaaagctacaataaataatttaaaatttgttttttctacatgctttaatagcagcacgttgaatgaaaaatcattacttagaacgtactattcaataatacactattaataccattttatcaacttgataaatgaatgaattatgcacaacatgaaggtctgcatttttgtcagttcacaaaagaggagaaagacgtctttttttcctctcttttttactctgaaacttttgaacaaacttccggttagtcagttgagttcaggcttcatgcatgccgctcttgacgcatcacacttatctcatttcctggacaaatcggttgcatcaagatacacttttaaacaaaccaaaaccttttctttttttctacacgccaaaagaaaaaaaaatctgatcagagtaatctttagcaaagaaagaacaatgggaattcagatctatctatgatatctactagtatcaatcaatcaatcctgtgtgtgtggattgccactgcatgcggcacctggctaccatgcacaaggtgtgggctaccacacaaggcaagtttgtgcaaaaatgcgagctcatcgatccccagaaaaggcccagagagaatagatgctctcatctttctttcttttaaggtgttgatcaattctgatgaaagttcctcagatgcctgcactagtaggtagtggttggggttttcggtcgagtcactctaccgaatccatgtattctatcaaggactagattatttgttgattttatcttgcttttatgtgttttctaagaccaaaaacagtacgaaattcttaaggagatgccgagtgttcggcttttcaaattttaaattctatataacatatgtaaaagcacaaaaaaaagagagaagccttattcaagagaacacgtcattgcggtggtgcgttcagatgtaatgatatagattttagtatattacaacagctaccactgcacagaaaaaaaataccattatactagtcatcaataaacattattttcaaatactacaaagctagattcatacatgctttccgcttcaaaagtccttacaacagagtcaactcggcacaactattgcataggatggtagtctactaggatatgtcctagcaaaaatcctggattatcacggatacatttcctgaacttctaaaagtttgcaaaaaaaaaaaactttgtacatcagcaattttaagaaaaccttttaaaatcaccatttgaacattctaatatttaattctttcatttgagacctcgaataatcgacataagctcatcatccattagaatgttagaacacacccccatgaaattatccaaatagaaccatatatcaccggtgtgctgcatattaggtgctcagtagatatgttcataggccatagcacttgtacaaaatgaaagattatgttgaccaaatgaccatgaagaggaaggcatgcactgcaaaagcaatttgaaaaaagggtctcttgtattggatggatatgagcatgcatgggaattttcaaaaagataaagcacagtttgttagtctgcctcccccctctatcagagatgaaaaaaagcaaaagagatgaaaagattcttccacatgtccatgccccagaatttttttagaggtccttttctcacacctttatcttggcttagctgcctaggcttggtgctgttttttatcagtacagcccttacactatacttctttactgtgggaaccctttccacttggttgaataacatttattatatttagcttctcgggcattccactgtattatcacataaacgtgagcggaaaagaaacaaaaaaaatggtcatactttaaaaaatagcatgatgagaaaatgtaaaaattcagtttgaataatatttactacaatgtttagcttctcttccattccaccgtatatttgtttacttaaacaccgtgggaatgctagaaagttaggggtgccacgtcagatgttacttttgtaaaaaagcccccacagttctattaattacacattggtccccactgatatccaccgtaaaccgtcggatctcgatctagttatcacaaaggcatgagaagaagaaaaaaatacaaaaagtggtgatactttataaattctgaatctgttttgtactcaaaactgttttgtacgtaattctgaaactgaagattagcagtggttaggaggagtaatgcacataaattcagatgttaaaacaagacaaataaggtctttccataggataagtattagtcaagttggaagtttttataatccttgtgcccatctcctgctaggaagagaacaaagtgaggaagactagttgctcataggatgccactctaatctagatcctatggttgcaggcttgcagccttgcaagttactagtacttagcatttgacattatcaaaacaagacaaatgaaacaagcacaacaaggccctgttttttcaatgtctcaccagccaggggttcagaagaagacatgattggcaaacatggccattttgtcttcgtttactgatgcctcagctcccagatccacagtacaggactaaccttaaccaaatgctctactcttaggacacaccaagaatcttaacttgctcttttcatcaatacaatgtgggccaccacaatgaaaaaaaagtagaaaaaaggacagaaattatatagagagcaactacactgaacac

SEQ ID NO: 37212 - DNA, 578 bp, Oryza sativa
ctatagggcgaattcgagctcggtacccatatctcatcgtcgtcacgtcgtgtgagttgtgtttggacttaatttctatggtgtggtatataaatattgtcaaattcttttgagaattttttagaaccatttagataatttttaaacaagccagggacatctcctcaaggatcaaaatagttttccgagtaataactgaaataactgtcgctgtgacgtcaggtgaggtacaggagagcggcgaaggcgatgatgcggctgaacccggagtacctcaagtcgtacacgccggaggacgtcgacgccatggagtgggaggcgctcgagtcggccatggcgctgtggggcccgcacttccacgtggccatctccggcgtgctggcggcggagcgctggctctgcgcgcgcgtgctcgcgccccttccgccggcggtctggccggagtgcttcgccaagatcgccgcccgcatcgccgccgcgttcttccgcttcgccgacggcgtcgacgccgccgcggcgcgcgagccgcagcggctgttcaggctgctcgacatgctcgacgcggtggcccgggagag

SEQ ID NO: 37213 - DNA, 612 bp, Oryza sativa
  unsure (1)..(612): unsure at all n locations
cgatgcgtcctactactagtagttaatttctccaagctattttcaattcaaagaaatagtttcagcctctgaataatggaagcaagcggatcaacctgatcaagacgattaattgcatcataatcaacagagagttatttaagagctagctatttttaggccttatccgtaggctgccttcacatatatctctacacatcgagataacaatttttacagacaactaaaatacattaatatttgtgtagagatggtagaaccaatcgtctcttaaaataacacatgaaaattatacgtctccagtttttttttcacgtgaaagtaaccagatatatagcttgtttatttctagctatttaagttcatattaaatcattactctagtttactaatatattgacgtacaattcttttgcacgttcgggaaaagaatcttactctagtttagtttacttagtaattaaataattagataattaatatgtcgagacttctggtaatttttattctagtttcttcactgaccagcgccatatgaaaaacaatttccaactacgatcggcttaatgccatctcgagcgaaaaccatctncacatgtgggcccttatgcc

SEQ ID NO: 37214 - DNA, 597 bp, Oryza sativa
gtcagctgggtgaagcactacctcgccgacgtgccgcaggaggtcgtgcaggcgcacttcaacaagaggctggtaaaatcgcacatggccttcaaactaatttttgacaaactctttgatgcaaagattgcaatctgttttcttcctagttagtgagacatattagaggaaaagattcatgttgttctcttgcttgaaatgctcttcgggagtgtggactctactactctagtggcgaaatgttgcttggttagtgctcatgtttaagtttttctgtgtttctgcccttgcaagaaaatagtatcatgatcttaatatgtcttatttatgtatgattagtcacttttatttttctttaagttcacaattttccctcttgcaatcttttctctcagtttgatgtcatatgcagttggcactatatttagggattccttttttgtgtatgaagtgaaactatttgttccccgtttaccaggtttattccgagtgctcagatcatgaggtttcagttgagactattaagagccagaagcatcatctcaagaaggtatacaatagagatttcgttcctaaaatctgtttgtattctattgg

SEQ ID NO: 37215 - DNA, 714 bp, Oryza sativa
ttggcggggagagctttggggggaggggctacccgtggggggcaccggccgccctgagaagatactgctctatttcgaccgcggctccggcccatagctggcccgggggctacaacatttcaagtgcgagcacctgggcgttcgatcagaatcagtttggagcaactcggtggttcaggagatgtcgtcactcgccggcaggcacgcaccggtgggcgtatctccatgctgcacgcggtttaatggcatcatgaaccgcgctttgcagggccgtatttaagcggcgctggcatggctgatattctcacagcgaaatgctgaattaaatcttggcagacaccagaagcatcctgttgatattgtagttgtcatctcaaattcattgccttttccatacaagcattcttttgacttttttctttaaggatcctaatttaacctggaaacatcctagacacctatatctactattaactggctcggacaactagagcaccattcgaacaatagtctgttattcgacttttactctagagctgacattcattttaatctgaacaccttgttgcatatgggtatgacactcacccatgtgtatcctgatttcttgttactaataaaggatttcgcccatttctatcctatacttttaaataatgagatttctttatatcgtaatttgacctcttatgtttatgaaatagtaccccttac

SEQ ID NO: 37216 - DNA, 686 bp, Oryza sativa
tacagtacctcatcagagcagtaatcttcgatccgaagaagaggcctggaaatgagtgtgatattctttctgcgtatgttgagggttacctttgggacatcattacagtgtctccataattattggattgatttattcataaatcatagtgctattccattaattcaggcaccgaatgaattgttgcttttcaatcttctttctggaagagctactcaacttagaggccacaataccaaggtatgctgaatgagtaatttgtatatttactaaatattttctgggatactaaatccataaatacctttcctcctttttgcatttttgcttaaaaaatatatagcagatgatcgagtacatacgtactgctgcatatgcgtagctagctaggctgccttgcctccattagcatggccgcgaggagctcgcctgaggcatgatggtgacaaggaggagaagaacagcaaggagaggaggagaggaacatttgagttttattgtcttttactttttcttctttgtcactccccctttagtttttatttttcttactgccttggactattggttggttcctaaactggacaggaccaacaaagctattctgttgttgaaagaaagagatgagagtagtgtttcttgtttgcatattcataaatcccttgattgttaaaatgattaaacat

SEQ ID NO: 37217 - DNA, 612 bp, Oryza sativa
taagtgcctccaaatgaatttgttgaaatatattggtttggctttttctgattttagtacttttgttattataagggttataatcatataaagcttttagatactgaataaatatcccagcctttgcactggcaaatgcatataatcgtatagataatccttacatctttcagtggtatgttgaaattcattgaagggccttcattcgttaaatgttttatccttgcactattatgcagttttgattaatcgtatttgtttatatctgagagtattgtttgattgcttttgttttctgtaaccttcagttctgaggacaaagacaattccagctatcaccttgtaggtgtcattgaacacattggccccagcaccagatcagggcacatggttgcttacgtgagaccgaatcaagagcaacctcacggtggcccttctccatggtattgtgcaagtgatacaaacatcagacaagtatctctagaagaagttctcaagtgcgaggcctcccttttcttctacgagaggattggaggctaacgtccaaggaagtaaattggttagattagcaaacattctttggatggacaaagatccattcagtagacgtca

SEQ ID NO: 37218 - DNA, 2552 bp, Oryza sativa
acatatgctaaaaaatcaacggtgtcaaacattttgaaacggagggagtataatagtttgtttaatgataaatctagaaacatcaattttacatgattgatcttttttattttttattatcaataggcaaaatttaaaatgtttgatttgatactattctaaaaatatttatattttaggatatagtgtctgtatgtttccaagttgcctcctgtaaatattttcttcatccattccatattataagtaattttaattcttttatcaatcaaatattttagtttaatcaaatttatagaaaaatattttaatattttaaatacaaaacaaatatattattaagatatatttaatcttacatctaacaaaattaatttagtattatatgttgttatttttttaaagttaattaaaactaaaaagttttaagtagcaaatagtaaaagcgatttataatatgaaacaaaaacagaggcagcataccatactgtctatacagctaacttttgtaccaacctatattcctttaacttttgtaccgtttataaacgctacttctccaaatatgctagtactaattgatagtacatctcgtctcgatcacactctcttataagctcgtgtagatattactccctgtggagattatgggtaccccatacccacacagcatggttatccgactagtaataggggataacatatatgtatggaatatgtaacagatcatgacttgggtattacgtttccttttatattatggagcggcctaaagtcctgatttgataatattgtaaagtagatttaggaagccgataccgtgttggttaaggtttctatcttgtaatcctgccccccaccctatataaggtgggcaggaggccctctagggggcatgagacaacctgatcgtcagatctatactacacccggcggattcaaatccccaaacaggagtagggtattacctctcatcgagagggcctgaacatgtctaaatcctttgtctccacatccatccacttttaggtctcgtgcgctaccccgttttattattgccgaattcatgtttcgacactccctttcactctcttttttcattaaatctcttaccacaatttcataagcctagcttactccctgtctttaaaaaggacaattataccatttacattttagctttttttttgaaaaccacattttagcttaaaaatacaattctatggtattatcttccccctctaaccaccctcatatagtcacatatttaaatttcttcccatcttattattaacaaccctcctacgactctctcctgttcctcacttacggataccgtccaagtcatttttgtatcccagttattttgtttttttaagtaattgacaacccattttatttgctgaacacatcatcctacgtggagtattaattatgatctgcaacacccttcctttaatttagatgtgttacactgccgcatgcattgatcgttctttgtagcaggtgggtactcggttaaggctgtctttagttcacaacaaaatcgaaagtttggttgaaattgaaacgatgtgacggaaaagttagaagtttgtgtgtgtaggaaagttttgatgtgatggtaaagttggaagtttgaagaattattttgcaactaaacacgacgtaattacactagctagctctctaaattattagtccctccgttctactccatccgtcccacaagagtattcctagtatcccaaggtaaaactagtggagagtaaaaaagactaaaatatccctcattattgaaaaaaaagttgtaatggtgatagataggtaaagtgtatttaagggataaaactttcttattttatgtgctaagcctgagttcagatgagggggttcccaacccctctccctcgtattccacgcgcacgcttttttaaacggctaaacggtgtattttttataaaaagtttctatatgaaagttacttaaaaaaatcatattgatctatttttttaaaaaaatagctaatacttaattaatcacgtgctaatggaccgctctgttttccgtgtggaggagttgggttcccaactcatggtatcgaacacagcctaagggtagatagagtggtagaagttggtttttttggcacaaaatttaaactccataagttgagtttttttagacggaggaagtatgatataagatttacccttctaacttgtctcacaataataatatatataagggattttattatcaagaatactttatttcccatttatcgagtctttatagtttattttcccagctatctcttgtgctactacctaattatcaccttgtgtactacggcaaattggcacgttctttttctactctcttcatttcaaattaaaatattctctcatattcatattcgtaatactgggatatgtcatatctctatactaaatttatttattttgaaacgaaaaggatacttccttaaattttattatataaaagtaatatactccttccgtctcataatataagagattttggatgga

SEQ ID NO: 37219 - DNA, 613 bp, Oryza sativa
atccgcatccgcatccgcgaccgcggcgcacaggtgcgcgggcgcctctcttgcgaaacgggcaaaaatcacgggctcacagcacggtaggagtactagggcagacgaccgttcacggcacggcacgggacagcgcgcgcgcgtcgtccacggaacatctcgggatacggtttttctttcgtaggagaagcccgtaggacagtaggacaacatgagtagcgtttctttttttgtcgtggtcaaaccatgtgtcgtcaattggcattggtccgagtgcgagccgatttcatcgatctccgatttttttttttagaactttcctctccgaatcttcgcaacagcaacgcgacaaacccgccccagcgacccccgcggcggccgtgacgattttaccatcagttgattgccgttatcacaggctaggctagcctctttgacactgctcgttccatcagttgagtagaaatgatttggttttgacaaatcactatctattacatatatacaggtaatttttagggcaatgcactggctccggtttttggcacagctacaaaggtgtgaggatgatggggaattcctaaaggctgcatgccgcagggggctgcaggaa

SEQ ID NO: 37220 - DNA, 654 bp, Oryza sativa
ataaaattctaaagagggtaactaatcatgaagaatttaataaaattaaatttacccatgttatttaatttctcacatttgcttaacttgtaaatttattttaattatacacatacctacttaaaaataccaaatatgtcaataaatttgtatttaattaattgcatatttttctgatatgtacgcttccaaattcaatatttttgtgcacatgtgttataagtacaaagcaatcttaagcatccatgtttgtttgatattcacccggtgcaacacacgggcatatttgctagttataacaaaaataacaaaattaattgttacaatttatagaagttgaattttaacttgcatgtttatgaagtggtatattacatattgatctatcttattaattattttaattttttttcataaccatttagatgacatgcaataaacgggtggacatccacctaggtgattaaaacagtttcccgatacacacaactattagttgctaataattttataagctaatgtatgagtgattttgtactacttgggaattaccgggagatatcatattttttatataaaatttggtatatgagcatctttgatacactataaaaaaggattttttttcataccgctaaaaaatattttcacatg

SEQ ID NO: 37221 - DNA, 691 bp, Oryza sativa
cggtgcgcacgccattgattcgcgctggggtgcgcgttcgggtactggtacccgcacaggtggcacaccatgtggttccctcctcctcctcatccgctcgccccctcccctcctcctcctcctcgtgcagcgcgcacaaaccaaacacacaaccaccacgccattagagacaaacagacacatccccagagagagagagagagagagagagagagagagagagagagagagagattgaaccaaaacttcacaatgcggacagcacgggatgctcaccggcggcggcggcgcctctgctcttgtgggcgccgctctccatgggcggcgagagctcgaagcttttctcagtggtcggcaatggcgagagcgaggagagagtgaggagttcgctttggtgaagacgacacgagaggagccccggcactgcgttaactccatccacccccgtgccggagaaagtgacacgtggggcccacggggcccaccataagtgggccccattcgtcagcgggaaagttaccgaggagggggggataaggcccccacggccccaccaccacctcgcttttggtcattttcgtgatgctgcggtctgcgtggagtgagatctgggccgtcggttggttggttgatcgatcgatggacggagatgcgggcgtcaaaaaggcggtaacaaaccaaccaaccaagt

SEQ ID NO: 37222 - DNA, 674 bp, Oryza sativa
tgcaagtagttcatcaaagttgccaagctatgtagatgtagacagtatgtggttttcaccttttccaatggaagcatactagaagaaaaattagaaaatagtgtgttgaattaaaacttaaaagcataatggagaatgcaatgtaaatgtacaccaaaagaataaatgaaattgcataaccaaaaagaagaccagagcaaactgccagctgacaactctttggacttcatagtgcctgcaaattaatttgagatccataccctgtcatgaggctgagcagaaggagcgcttgacgtataagcacatgaagtcggacaccaagataggtaactttgtttcacgacatgtacagcaggaccttcaaactggaccgcaggtgaattccatcctaataaaaataatcaacaaaaatcaattatgatattaaaaataaggaaactacaactacagattcaaagtaacagagaactgctgagtgctgaataatacaatctctctgtttcagattacttctcattctagcaaatctcacactaactaaggagctgtgtcaaattacattgttccctaactaagatgtgagaatgacaattattttggtaaaaaaaaatgaatcctagaacaagtaattgaaacggagggaatattatttagagaacaaacaaagcatacct

SEQ ID NO: 37223 - DNA, 1022 bp, Oryza sativa
ttggcttctgccatctcacaagatgcaagtacaactttctgattgaattgctctatcagaaactttctacttggattatgaggttttgcaacaacaacaattttggtcccctcttgagcaaaaaaaaaaaaaaagaaagaaagaaaaagaaaataaacacacacacacacacacacagagaagattccaatagctttcagtaggtccaaactgaccaaaactgttacgccctgtttagtttccaaattttttttcccaaaaatatcacatcgatctttggacatatgcatgaagcatttaaaaaaaataaaaataaaaactaattgcacagttaggggggaattgcgagacgaatcttttgagcctaattagtccatgattagccataagtgctatagtaacccacatatgctaatgatggattaattaggcttaaaatattcatctcgcggtttccaggtgagttatgaaattagttttttcatttgtgtccgaaaacctcttccgacatccagtcaaacgttcgatgtgacacctaaaaattttcatttcgcgaactaaacagggcctagcatcagacatcaaagagcaggcccagtgtgacccccacattgctcctgagtagtacagtacaagttagccaagcgctgtatgtttttccccttcacttttctactagctgatcaaaattttttaattagatcttggccaacctccctttgcaatgtccatgtcaagaacacaatccaaacttatcaaacacagactctgaattttcatagcataaactggggatatattcagataagtagggtattgcaacagcaatgtactatcttccaaggagaacacattaggtgccaatgtcacctcacaatcctaatcatatgcacgcacttggaccaggagcattgcaccatagagccattgccatcaaaagcctggcatccattgagattcttgcacacacctcttcaatgctaattcgtttctatgcatcttggatgttcttggggtgcagg

SEQ ID NO: 37224 - DNA, 1112 bp, Oryza sativa
agttgattttggtcttattcatctggtactttgtgggaatacactgcacactctgtattgcggtggttaactggttgctgtgatgctccgaggaacactaagtctgtgatagcttcagctaagcagtcagttagttgatttgtgcaaattcaatcctgtattatcctgcattgtaccgtcgcactgtagttgagggtaagctctagtgcatttcatcgaaaatatacatgacaccacagggcagtgagccagtgacatactggcatggtgacaaattataactggtacaaccatgatattcaggaatgttatcatctgacagaaacttatgtgctgttatcatctgacagaaagttatgtgctaatagttcagtagagttccttaacgattcaatttttagggacattttgacaaaagaaagtcctatactgtcatggttgatgagacctagacactaaatttctagggacatctgttaaactccttgcaagtacatgagttcatacatttcctacactgttgtcttccaccgatgaagaatgttgaacaaaataccttgtcagatgaccttctattagctagctaataagcaccatttagatgtatttgctttaaagctaggaatatgctatgctaaattgctaatatgacacatttactgctggatgtatttttctttctaaagaaagaagatggtttctgttgcaggaggttccatgaggaacaacaaaatgttctagaggttattgatctctgtgctttcaaggagtttccaagctctggactgcggttggtattccaggaggagctatgcccgttttccttcttatgtgcacgtgaggttggctcattaatgattcttatgtgaataaagtatcatagcatgttaactaattttctggaacatcatttatgtggtaatgcagggcggcagacgtggcacacctgtatatctgctatatgtgcttactgtttctggagttgctctcttatgccacttgcgaagcccattttcctatatctctggttcaatatttcctcaagacgatatagttgaatttaatctccaaacccaagtacagagtgctaaggttacagctgtaacagcgat

SEQ ID NO: 37225 - DNA, 2329 bp, Oryza sativa
ttcatctccatcttcagaagattcaaataccatcttaggtggtgtttgagccagtttggataatggattaagagaaaaaaaatcacctatcaacatgattctcttttggatattagaggttagtcgatttcttctgccttccattatcatctccctctcactcattttaatattttatcgtaaccctgcactcattttgctaatcacaatcccaaccctcttaacatactataaaaaaaatcatagaacaagtttaataatataataactactagcttaaaaaattaaggcattatatatgaccaacctaatagtttactcatggaatactaagtaatatatagatatagacatattgtatcattaatatctaacacacttatctctctcacacagtatattgaagtttgtgctgtacggttgactataaatttagagctcgtttttcttctctctcctccacataaatacaagtatgatgtgataacttgtacgcctcatttatacttatagtatcagcttattgtacccgctctttttttaaaggttaagcaactgatttctcctttgaaacaacagaattttagaatgtttcttataggactaaatggctaaaactctcgcaaaaatcgtttaaattctgtgcattggtatgatcatgccatgaggctattgagggtgcatgcaaacagggtgactcattagcacacgatcaactaagtattagctataaaaaccttgaaaaatggccggtttaatatgtttttctaaaaataatttctatataaccttttttaatatacaatgcttagatgttcggaaaacgtacgtgcgaaagacgagggagtagaaattaaggagcgtgtactacaaaacacaccatgagcagaccatataaatatgttagtgccaagacggtaagtttggcatgtttgtatggatatactctaagagcaagtttaatagtatagccaactactagctttaatttatctataaccaatctaatagcttatccaagccaactactagctttaatttatctataaccaatctaatagcttatccatacaatagttacatactacactattaatacctggtcccacctgtcatacacacactgcgtcttgaaatctgtgctacagctggctataaatatatagcccgctgctcttttctcttcttatttatcttcttaaattatatttacagctggtttatagcctactattgtacctgctctgaaacgtttatttttatgaaaatactaggatgaacggacgagcacgctacatgctagtatactactagtagtgagcattgtgtttccacgatgcagagctgacaaaatgattagcaaattatcaccaatgtgtcaagtggacgcaacacacacgtactagtagtacaaaacacacaaatggcgtttgatgatgaggacgtcgatcgaacaagctagcttacagaagacatgctccaggatcgatttataattagctggacaaatcgcgggatttccttgaacatcccaactaatcgtaccatatatcctagctactcgatcgtgactaacatcgtccactcgtcttgttgagtctttgcctagggtctttcggaaaaaaaaagtctttgccgagtggtacatcctcattcaaagaatcaactttaggtatgattctagatccaaatttatccttagaaattgattctttttcaaatggagatagtaacatagtaattcctccgttctaaaatataaacatttttagaaaagtaacaagtcaaacattttttattttaaccattaatagggaaaaaaaatcaatcatgtaaaattgatgttactagatttattattgaacaaactattctaatatgcaacttttttatttaaaatatcttacttttatagatattgttgatcaaagtagcatctcggagaccatatgtcaggataaaaaatacttatattttggaacggagggagtagttgtagtatgatggacttccctagatacttaatactattatcagtttcggatatctgtttagtatacagtcgcccgaattaaataatactagattcttaatttttaagagcaatttagaaggatccactattggaaaaacataagaagggtgagattgctttttgtcagctccacaactaagctatttcagacattaaaactctgccaaacacagagatttgaaactctaccaaatatatatgctaactcaagactgtcatactatttccacctatatattcatggttttatgataagagggagagcacggaggaccaacgtatatcttcccgaca

SEQ ID NO: 37226 - DNA, 4411 bp, Oryza sativa
cgggttcgcattagtataagagtatgctaacattcaaaatttatcctaaacaaacttgcccacttattttctcatctcaatcaaattacaaccatcactcacttaattccacatctctccttaatttcataaaaaaagaacttttaaaacacataggagtagtagaccttttataaacatctacgctaataaaactaagatgaagtaagatcacttcataagcaattccgtttactattttgtgaattactccctccatcccaaaataaacataaccatgagttttcgtaccaaactttgatcatccgtcttatttaaattttttaatgattagtatttttagtgttattagattataaaacataaatagtactttatgcgtgatttatgttttttagctttttcaaaaaaaaattaaataagacgaacgattaaagttgggtacgaaagcttatagctgtgtttattttgggacggagggtgtatatcctataataacctcatagttacagttaatacataattacagcatcgtgaatctttgctgatggtggtggttgctgatggtggtgcggcccgtgacgagagagagatggaatttagagctgaccaggtgatgttaggtcgtacaaagctgtcttgggcgtgatccatgtaagaggagaccagagaataagctttgcctcactgccaggagacaaggcaaatccatcgatgtgtgctccccattcaggacagctttcctttttcctttttctactcctataataaattatcttgtgtcaatatgtctgccgtatgaatgttttcagtacggacggtaactccacctggaggtgaattagcctttgtttacttccaaactttttcttcaaacttctaacttttctatcactgtccaaatttattttcaaattttgtatttttaagatgaaaggagtaaattacttgtccttttagttcattatacttcataagacaagggagaggtttaaaaggtgaatcgagtaccggtctcattgtttggtttattcgtggaataagccaaacgtatattcacaaacgagaagtaattggtaaataaaacttttatatacgtgttactagaaatctaaaagtaaaatgctaaaaaataaaaaaaaattaaaatcagctttaaattaagattgaaaatttaaattttaacggataagtataaagcgaaaagattgagtccctacgatttttgtcccgtgtctgaaaaatcgaacgatatgctggccaccatttgctactaccatgcacattaatccatggaaggcatctctcggttgctttccattggctggttgaccacatgacctgacctgacctgcctatacatgttgtaccactacaagtaccgggtatcttggcttcttgctgttgagtttttttttaaaaaaaagaaaaataatttgtagtagtactatctttttggtgatgagttgctacgtggccatttgaccttgccatgtcttttcttcggttctctagctagtgcttggcacttgtcgctgtcgaggtttcaagtagaagtatgggtgcttacatatacaagtacggagcaccatcatgtactcatgtgacgtgtatggtagtacaattactgctaatctaccactctaataattaatcatgtttactaaagtgaaaccgatttttctaaattagttggagccagtttaattcgggctttgagtctatggcctcttttcttagaaacatgtataaacgcaggcgctcacaacacacgtacactcatccctataaacgtacatacgcacactctacgagcacctccggaaaactggaccggcatatctagagattgacgaagtcaccactagcgtctcgctgttagccctacccctataagcacttccggaagactgaaccggcatatctagagattgacaaagtcaccactagcttcgctgttgaccctacccctatgagcacctccgaactggacgggtatatcttgagattgacgaagtcactactggcgccttgctattcacgggtacatcgtctaccactgaaataataattagccgtaaatgcgagcactcgtatcaaatttaggatttaaaaccgggtggttccaccacaaggaacctaaccagttgagttacgctcacttcacgagtctatggcctcctttgaaatgcgggaacaagaaaaatacatgaataaatgttgtaagctatagaaccttataggaacccaaaacataagaatttagaaaattatgcctttggataacttgtatagaaagaaacacatgaaactagggagaccacatagaatgaaataaagagtatgaggtatgaggtcgtattaatcttactatggaacaagacatagttatagctagttaaaaacaaattaggtaggtgattaaaatatcactgtacccctcattgatatggagagaataaaatgaaggaagtaccattgttttgagaaaattcaagaaatatcattgaggtcttacctcacattttcttctttccgtgtcttgaattcctacgtttttcctgtatggctatcaaacggtagttttgaaactttcttgtgttttcaaatctcttagaaatccaacggacataacatcatatttctatgttttttctattctcgtgtttttgacaatcttacattttaaagggggcccttcattatgtttttcatatgctccatctaatgcatactccttcagtccaaaattaaacaacctacgatatgataaaacggtgtgttctttgagtttgtttcgtattccacacgcacgctttccgaagtattaaacggtgtgtttttttaaaaaaaaattctataggaaagttgctttaaaaaatcatattaatccatttttgaagtttaaaaatagttaatacttaattaatcatacgttaatggctcatctcgttttacgtatctctcaatcaacacaaaagttgatttattttgaaacaacgaccatttttcgatactctattctacacatgactttctacttatattcattcatgtattttttattctacttttacgtttttataatcctgtgtctcaaataaccaaaatggaatttttttctatggttttctctggagctagccaagccgaaactacattcggtggaggggtctcgcatgagagaaggcagggcagggctgtgtgtgtgtgtgtgtgtgtgtgtgttgagctcgggcaccgatgaaagagcggcgcacgcggcggcgcgggcaccgaggccacactgatgaagaagcgtgccaactacacaaccgatgtagtacggtttagttgtctgaccaaaatattttcaagtatatggacaatatataaaaatatagtattaaatatagactaataataaaataaattacaaattccgtctgtaaattgtgagacaaatttattaagtctaattattccatcattaacaaatgtttactgtagcatcatattgttaaatcatagcgtaatttagcttaaaagatttgtctcataattagttattttgggtgtgtttagttccaaagtttttttttctagacttccaactttccattccatcaaacctttcatacacacaacttttcagtcacatcgtctccaatttcaaccaaattttaaactttggatcaatctaaatacaacatttatctatatttaatgttccataaaatttttagaagtttgaaaggacaataacagaacaggagagctcctcggaatccgaccacctctctgcactagtactgcatgcgtcaccgcgccggccaccgttaagaacaggtacaattgcgtaagctataagcctggcttataaacatattttaagtagataataaggagagagaagagtagcgggctacagatttgtagccagctatagcatggactccaagatgcagtgtgtataacagatgggaccatatattaatagtgtagtatataactattatatgaataaactattagattggctatagataaattggaattaataattagctatactattagggcacccacaatggttatctataggctctctacaagagatccatgtcagcatatttttctacttggaaggtattaaatgaagagagagagcaaagctatctactaacttagagatagtctatagagaaaaacgaggcaatgcatgagagaattatagataccaatgtagacatactattaaggtggtttactattaattgagtctattgctgagatgtacatgttttatagatagcaacttactttaccattgcgggtgctcttaaacttgctctaaccgctgtgcagcgacagtacgtgcgtcagtgtcatccaactcctcgccgccggctggcgaaagcctagctacgaa

SEQ ID NO: 37227 - DNA, 774 bp, Oryza sativa
catacccgataaggcgataaggcccaaaaggccggaggtttagcggaaaggcccctcctgactcccagggggtcggagaaaaaaaggccgatcctttggatcttttaagaccgtccgatcgtaaatagacggtctagattgggcaataagacacacagcccaatcttttcgcatatagccaaaatagaaaatttttaactttatatttagagttcattttagagtttttttactaaagtttcagtctttgcttttagatcgctaaaaacacatatatcatatataaaagttttattcataaattatttttcatttacgtatatgtcccgaacgatgggggtcacaatttttttcatacatcagatttgcaaaaaggaccattcttttgagtgtaattgagtcattcccagggtgataggagaagacgacaccgagtctccgaccgcctttggctgtctggattggacgagggataagaacgctgtgacggaaattttcagaaaacatcctatcaaataatttaccgtacaaaataatccctcataactccagacgctgagctccgagaacggcgatatcaaacaaacccaaaagggcacgaggaaactttatgtgtctgctggtagcctggtactcttcaaaggagcgaggcatttttcacataagtgttaaaaggacttacaaatggaaaattgcccttgtctacagaaacaggtgatgaacatggctcacaggcattagccatacaactattacatacacatgacagtacaa

SEQ ID NO: 37228 - DNA, 545 bp, Oryza sativa
gggcgaattcgagctcggtacccaattgtcaacacaacaacttggactctataggttgggcgtagcaccatattatatatttcgtttctttttaagccttttgtattaagcacagtttttgtgtgcaggcactcttgaagatgttacaaaactaagtgcggctgaactaaaaaggaagcgtgctagggagtggtacgcatcattggccaaagatcaaaagaaagatagaaacaagaaggcacgtgatatcaggaagcggaggaactatgaatctcaaaggtttaagggggtgtttagatggggctaaaactttttagcccatgtcacatcggatgtttggacgctaatttggagtattaaacatagactaataaaaaaactaatttcataaatgagagctaatccgcgagacgaattttttaagcctaattaatctataattataaaaagtttactgtagcatcacattgtcaaaatcatgacataattagactcaaaagattcgtctcgtgaattagtccaaggatatggaatgtgttttgtaa

SEQ ID NO: 37229 - DNA, 1895 bp, Oryza sativa
cccataaatgagttatagatggctgtaccttcaaatttcttccaatgttttctgaatgttgcactgttttctgctgtaggtttcttgaatgagctccgagatgatgctgggatcggacgtttatggtctcttgtgtcaaggtacttattttttcctaacagttcacctgagaacatttgtatagcatagctccaccagaaactacatagcctaggagcattcaatgcaattttcatacattgtagattctctttacatgttaatttaggaaaaattaattacatgcccctgcagagtttgctaccctaggatttgccctccccatgttgctaacatgtggtctgaggaccacttgtcagtgatacatggagggagaaatcctagagtgctagcctatgcagggggcatataattgattcccagactgttgcaagtctgggctcagcatattttgttgtgtatggaagcccagtattgtctaaaacttgtctagtttttgtacatatgacaatacatgttgcttaccatttatgtaatatactcctccattgttttttttttgcagaacaaaggctgtgggccctgtacaagatatagtaacagctactgtaaatgaaagggaactgctgtttgttctccatctggatggaagtttgcgcatatgggatatttttaatcacactaaacttatcagttacaatgttcgctcgaatgatatcgaaggtaattcgtggtgactttatgcgcttcagaaaaggtcttatactgaatagctattagcttatttatgttaatgttccttgtaataagtgttgcgttgacattgtcagcacatgttatgtcattgtttatcatgttaagcaccaacttacaatcaaacagttactagcacactctgctgaagactcatatgatctgcaagcagcttgcttggtatgttcatagaataggaacaaggaatggatgcatcatgcagttgcactaaattatatcccagattcctaataattggtcgagtgtggtaatcgttggtgatggtagcctggtataaccagctaatcgagtctatttcggtgatttccatgaaatttcttgcagaacaaaataagtatggcaagtgaaaaaaactagaagattccaaaataacagaacaaaatactccctccattccaaaatataaccaacttctagtgttcaaaatttgtcccagaatgtaacaacttctctacctactctcttatctagaccaatcacaatcatatctcatttaatttctcacctacttcttcatctcaagttctcaacagatcacaaccatccctcatttaatttcacctctctccttaatccccatgaagaactccagaagtgcctgtattttggtactgagggaatagctaacatgtggggtctatttgtcagcaatagttccttttaaaggtttgatgaatcattctgaaaattgttagactgtaacagcatttgatgtacgaacactttgttagtgcatcactgaataacaactgcttctgcaactatccctttcttttggctaccctggaataaactggatatgttttacatacttaaaagaaaggatgtatttaagttgttgcttgcactaattgctgtatcttttcttgttcttgaatagtgcattttccattaaagtatttttctatctttaggtcaaccatctaggatatgggttggtgatgctgatgatgatcaagagttgatttttttggctgttctgcgtcaaggcactgtggtatgtcaagaaaaatgtctcaccactaaatttacttggtcatctggaatgcactgatttttcatgctatgccttttcacttgtcagttgactgacttataaaacacgataacagacctataaa

SEQ ID NO: 37230 - DNA, 1196 bp, Oryza sativa
atacaagatgctactagagacatgaagataagtgttatgatgtacacaggcagaaacgaacctgcaagcagttctccaatctacgatgatatccatcatttcaaacccctgggcatccaacaaatttacttcaatcatccgtgccaagaattgcaggaagttgcccaaaagtcaaacaaaatcatgtcatggcaaacagaaagtataccagtgataaaggattacctcaatcaggtcaccacatctagcacatgtccatgtaaacaattgtgtcaggtcagcagtatagatctgcaggacatcctctatgttaaactccaaaatattagaaaacgtgttgcaaacggttgatccatattgaaggatgatctaacattcaggaataacttagataaagaaaaaggtgaatgaacatacagctgaagcatattccacaagtgtcttggcaagctttgggttatatatggtggtagagggatggcgttgaatgacctgaatttcttttttcaccaaatgtaaaagaaccagcatcagccttttaaaaaggaaaacaatgaacatctagcgaagcaacattcaacatgctggatacatgtagaaaagatataactagtgacagaaaatgattatgtaacatgaaacaaaaaagaaaaaaaacacattattgtaacagctaaacttttggattcaaagtcgaagaggatatgcaacagctttgaataaaaagctgcatgaaagaacccttatagttcttctgtaatagccttttgatatgtcaaaaggaatttgaaattttgcactatatatcatagtaccaatggcaactagatacagctacaaccagccattttaaccagaaagattaaattgaaagaaggtaattttatactagtaaaaaaatggaaaaagaaactatcatactgtttcaatatactagtaggcactacaaagggggaaaacatcgaggcatgcaaatattgtggttcactgctagtttccttgcccaatgtgaacaattctcccgttaatcatttttttcaacaaaaaacggttaagttagttctatgcaaattatttgtttgaagatttcccaatatatttccatctagcagcaagctaaaacgtaatcaagcaaaaaagaccagctctaaatgcaagcaggaaggaatccactacaacattttgaagtaaaaaag

SEQ ID NO: 37231 - DNA, 627 bp, Oryza sativa
  unsure (1)..(627): unsure at all n locations
actactatgaatgtgagatataagccaagtaatctgtgtagctctacgactacagagttgagagtacagtccattttctgagcatccaaggcctgaaaccttgaaccacagtttagtgatcaaataatatgtggctaactagctatgtgctcagtagacagaggtatattacattaagaaaaacaacttagctttatatcatgttaatccaaggaaaattacattcttagcaaagtataacaagcatgatgcaacaaaacaaacataacttcaaacaatcaattctgacctatcaaagcaagaacaaagcccaggaatataataactacttcgaagaaattaaaatgcagcttcacagagagccatacctgcggggcatcgtcggggctgtgctcgtgccgagatcggcgaggcgacggcgagagctttcatcacagcggacatcctgctgccgattggtggctcttggaggaggtggtggtggatgagcgccaaggaggaaggaaggagaggaggggtgaaatgcatagggaggtcggngtttgagtggtgcaaagggggaggggagtgcanagagcgattgggtggtggcgtgtnttaaacagagccatncatncatncatgctt

SEQ ID NO: 37232 - DNA, 560 bp, Oryza sativa
ggcgaattcgagctcggtaccccatctagatatgcaagtgggtcgatttataaacatatttatagatcaagttaatatatataacatgtgagtcaaacctgcggtttatgcactaattttgtctataagcggcttccccacttgcacccttatattagtgtgtagtactgttgatagctcgagcgacataattttgggctgcttgggctacaactctttgggccttagagcagcatatgtttgcttggactaggctgcgtgtgagccgaaggcccagctcgaaagcttgatgggctgtggtggcttcagggcagcggcggcgcagacgatcccgtgagtccagccacggggggcggagcgaagccaccggcggcgaggtggtgaagggggctgaaggcggcgtccgttcgagcggcggcggccggatcgatggatcgagtcgagcaccatgcgcccctgtgtcccgcggctcgggtcggctcggtacaggcgaaagtgcagcggcggcgcctctcctggtgttggtaagctctctctctctttctctatctggttcactg

SEQ ID NO: 37233 - DNA, 537 bp, Oryza sativa
gtgtatgagacaaggatggcctatgcctcggtccttctgtgtcttggcttgaacaagggctcgtgcccaggtcctagtcctcaaatggctcgggtcggggctagtgcctgggaagatccacatgtcgagactggccaggccgggagcgtggtgaccgagggttatgggtgacccgattgtgggtttttgccgattccccctcggagttcaccacgccccggggcacggctcggttctgggccccgtttggcgattttagccgacccgagcccccgaggacaggatcgagcacgagcgtgctaattcaagccaatattcttcaaaaggaaacaatggcacagacacagtccttaggaaatcgaaaatgtttttattgaaatacggaagagaaaaaagataagcccccggccaaccctgcacgccccgggggggggggggcgcggtgttggcccgagcccaaaacctgacacccgacccccactaggggtagaagccacgagggtggtcgatgttccacgggttaggcagctctgtgcc

SEQ ID NO: 37234 - DNA, 597 bp, Oryza sativa
tgtgtcttatgcggaagctttttatgtaaaagttgttttgctttcaaatatattttgaaaaaaatcaattttaaatttataataataattaatactcaattaatcatgtgttgacgattttctcattttgtatgcctacacttaatcttacggccttatcttttcgcttgtgcttatgcttattcttatcagccaaattttgatttttcaatcttaaatttgaagttgattttggggttttttatcgaagtttattttcagcctttgattttatatcgctaagaacacatatatataaaagtttatttataattttttttttcgtttgtaaatacgtcgttttgcgatggggctgttaatcttcgtagtatacatttacgggtcaataaatttgataattcgtgtatgctgtagtgtgtcgtagcccgtaccacatccaacacttctcacaattgggctggaaatggaaaattctttttttttttgaagaggcgcggcccatcgttgcttcaaaacggcagggcaaagcccagcctaactaagtctgagttgtctctgttggatgtcaccttccggcccaaccggaagccctggcag

SEQ ID NO: 37235 - DNA, 537 bp, Oryza sativa
tgagcatcttgccatccttttctattgcaactattttatccctcaagttcttcatgttgcgtgctatggtcattttctggaggagcggattgttccaggaaaagtataacttgagctgaaaaataaaattggagtcaaagtcactgtctatattagtgtcctttgtagatcaattttcatctactcagactagtctctgatagtccgatatggatcgggaaatggcatggtagtggaaaagatgaatttcctttttaattttagaaattaatcgggctggtatgatgcaaaaaagttccacaaagaaaatcacacatgtgcagcagctgatccgtaaagttgaagcatataacatttattcaaacacgacaatatgtggaagtaccttggattgatggttcctgatgagctgagcagcatcgaattcatccagcacgtcctcaacgtcgtaggcgacggacttaactttggagagccaccgccgtgccactgctccatcttttcctacttggcgcaccttatcgtcagcatcttgca

SEQ ID NO: 37236 - DNA, 501 bp, Oryza sativa
ataaaacactgactaatgtaatgctatcaggatttagtgttaacgttgaatgcataaactgaaaggcttctaacgcatctccgtagagtccattttgtacacagcccacaattgctgtattccatgaaataatatctgatatgggagttatgctttccagcagtgaaaaggcggccagagagtcaccacagcatatatacatgtgtatcagagagttagcagctgaaactccagtcagaaacccatacttcaggatgaaagagtgaacagacttgccaaagttaaggtcttgtggacaaaaacatgaaggtataacagctaccacagtgctcaaggtgcagcttaggccttcagatagtagtcctttgaacatagctttagcctcttctccaagtgaatcgtttcttgagtaaccagaaatcattgtgttccatgagatcaagtctctcattggcattggcctgaacaaaatgcgtgctgtagatgggtcattgcatttca

SEQ ID NO: 37237 - DNA, 543 bp, Oryza sativa
tatctccagcacgccatgacatctagttaccatcttgatctaggccagtttagtgtgctcgggtaagttaagctatcagctattacatgtgcattaattgtcactctgttccatcacatgggtgattacagccatggaattgagtatcccaatgtcggtgatcacatttcgagcacgtagtacttcggaagtggtggtgctcatgactctgagcgcagagtgcaagcgaaggttgcttgagtgaccaaaaaacttgccaggtcgtgacagagttctacgcattgaaaacaacgagatctgcattgtttagttgatcccactagcatacaaatcggatcttggtcaatgcgcgctagctggaggcatcaaccatttccatcaagtcaaacgcgtacatgggttcgagaaattccaccccgttcgagatccatccaccggcgcgagcgccagatgccatccaagaaaatccccatgtttcgtgtaggattcgcgttgaaattgtagagatttttaggctctcgattgggcggagccctgtgaatt

SEQ ID NO: 37238 - DNA, 572 bp, Oryza sativa
ggttttgtggtttagggttacggattagatttcgatcacttttaagggtcacaaagtgaacttattcctttaattagctgcgggtgcattgtggtagcccacggaaggggactgagtgccatgttttggaaaaagtccactttgacacccttaaatgtataccgaatctaattcgtacctctcaaccagaaaaccggttaggatgactcccccaattactaaaaccggtacaaatagactccctcggcggtttcaagggcggttttgctgacgtggcgttgttgacttggtcttcgtcccacatggcgttgacgtggcactgatgtaagattagatttaaaaatatatatgtgggaccaatttgtcactcacacacaaaaattataataggatccactgacttgtggggtccacatgtcattctctttccaacctttctgcctccctccctctcccttatttctctctttctcttcccgtccgcgagtagcgcggagagcttgccgaggcacggatggcggaacacaaggcggcgagggagcggagtgtaaggcgccaagggagtgcacgaa

SEQ ID NO: 37239 - DNA, 612 bp, Oryza sativa
taagtaaatatcataaacccataattactttaattaaattatcactaacctatagatagaacctatatatttaccatcatatatatcgtaaaactacaaatttaaaagatattgtatcacaaaactacagattaagcgatgaaattataaaaaaactacatattttaaagtttatatctatagcactattgagattatgaaagttgtagttttatgaaatctgtagtattttataccataccttgaatatgtagtttcataaaaaaatgatattaaatatgttttatgatacatatatttaagtatatactagttttgtaatactctctcattccaaaagtctaagtactatttcattctttgatttttttcaaaagtctaagtcctatttgtagtcattatgtgctatattaaatttttgatcgaaacccaataagtcattttagtagttattggttgcatgtttattagttttgtcacatgatgaacgagttaactacatcttgatcttggtgaaaaagaaataggacttagcttttgaaaggagggagtagcttgatcaaatgaaatttactttcctttctctaaagagattaagttaaataagggatg

SEQ ID NO: 37240 - DNA, 541 bp, Oryza sativa
tcactccccggcacacaaaatgaagcagcgttttagtgcatgattaattaagttttagctatttttttttcaaaaatagattaatatgtttttttaagcaactttcgtatagaaactttttgcaaaaaaaacacacctttagcagtttgaaaagcgtgcgcgcggaaatgaggagttgggaacttatactacaaaacagagcctaagaaatcctgctaaaattatggcaatattaccatcttactaaaattttgacattaccaaaatttggtaaggtttattttagctacaatctgaataggcccttagggcctgtttgggagggcttaagattctgagaagcaactagttggaagccagcttttccagcttctagtttattttctggattctacaactacaatttttcagaatctgaacaaaaaactgtattgtttagggaagcttctgattctaggataaactgcagcagctaaaagcttcaccaaacatgcccctagttgaaagaaggcgaccattaaactgttagtagcacaaatct

SEQ ID NO: 37241 - DNA, 523 bp, Oryza sativa
tgattcatggcgcctttctccgaataattacagtatcagtaggagagccaattccctgtactcccactaaccaccacccccctgcaggtatgagtagctagctagctagctcttgatttatggagcacggagtatagcgagcagctagcgccttgccgtttgcatcggccatcccgatcgatctatcgcaagtttcttctgctactcgttctgaaaaggaaccatgtaggcgtagttttcgggcattgggatcggatacaccatcagattgaatctgataattttgtagagtgctactcatatctcaaccgatagatcaagaattaggagaaataatactcactcactttctcctccacttcaaaatataaccatatctcactacaccagatcctcacatctctgacgggatacctgtgacgggcaaacgaaatggtcactgatgaccgtcacctctgacgggtcatacgggatgccgtcatcggtgaggcatccagctacgacccgtcacaggtaactagtc

SEQ ID NO: 37242 - DNA, 649 bp, Oryza sativa
tgtcgtatccataggttaacttaccatctttacaataagctcatttgttatgaaccgccacatttccaaggaggccaaatttgttagtcatcctcttccgtggcacatgtgggtgctggtgttacttgtgatattatttgaagcatgtctttgtttgaaatgtcaattatgatttcatagcgtgaacatttttatatgagcatatcctgtgctcctgtcagttgaacctacattttagcgtgcccagtgttacctttggtgctaggtgcgggtatgatggcaggccagcacctagcgccaacagccaccaaggcgagttactgactgcctaagcaggaaaaatcagtttgtcagcctaggcgggcactgttccccttgttgactttataatgcatgttgcattgctagctcttgtatcctttaataatgaaagccttcagggcattccaggaatgttgtgtcttaaacttatttttgccttgttttaatctctgcagtactacattgatccagtcagtggatatgaatttcgctctctgaaggatgtgcaccgttttcttaaatcaggggacatctataaatgcattgtaaggccaagaaagagaactatccaagatccttgtactattgaaaaccaatctcatgtgag

SEQ ID NO: 37243 - DNA, 734 bp, Oryza sativa
cctgcatgctcatgttcacgtgaatacgctaaagccatgcacgagttccaaagctgcagcttccctgtccttgtttgcatgcaattgctcgatttggttttgcttcttgcctttgctccttagtctttgcacgccgtacgtataagacagcacctgtgctatctgtccgtgcctatgcacgcaccgcagtcgcagccctcatgttcaccatccacgaccccgtcgccccggccctccacgtcagccacgccgcgccacgctcgccggtttcgcccttccgtcactggcctcctgccgccgcggatccgcgatcaccgcattcgtcgggcgcgccgtccatggcgctacccctccgatctctccggtcgccttcggccacgcccggccccgtcttccggtcacgttccgccatcgccggtctgatcgcgagcgaggtcgcggcctccgcaacgtcctcgttgtcgccatcgatctcatcgccacggctgacgatctcctgtcgatgcgcgatccccacctcgtgtttcctcctccacatgtcttcttgatccaatgctgaaaccttatgctctgataccacttgttataaaagttagtcgatatagcggaaagacgactaaccttcctgatcgcttcagtcatcgatcacccaagacatgccagatgacaacacaggaacacacgatatttgttaacgagggtcagctgaagcctacatccccggggctctgatt

SEQ ID NO: 37244 - DNA, 612 bp, Oryza sativa
tccatccctgctgtgatcctgggcttgttgaggcatggtgctcagtttttgtgtaccattgagggggatctctgcttgaggaccctgggatatgggggggtagcctagctctcttcttgagggcatagataggattagctgttgataataccattcgtcgtactggtacatgcttactgcagcagaccttcaactgtgtatagcttctgtatatttttactgcacgctccattgagacatcgacaactgttagtagctaacaagacaagattttctgtgactctgttattgtattaactacagtatggcacttctgtcgtagaacataacttctctttggtgtgaacattgtgactcgtcgcataacgtcctgatttacttgattatacagtattgagcagtagaaatcatcagaactttgcacgttgttggtgatttcccaatggaaattatactgctttactagaaaatcatagaggcctatctcagttttgcatgcttccaagctggtagcaagattcagtctttaagattgtcttggtgatcaactgtcatttttccctttttttggttgaaaaggtcgacgatctaaataaagatggggattttatt

SEQ ID NO: 37245 - DNA, 625 bp, Oryza sativa
acacctgtgacgggtgacttttttctacccgtcaaaggggaccaaacagctgtgactggttttaggtttccaccgtcaccagacgtccaaaatcacccagaaaaaaaagaaatgcctcagcccaaatgtacgaaatgaagaaaaatccaattcatctcaagatgcacatgattcaacaactttgtattttaaatcaaatacatctcaacaaacaactacacatgaagcaatctgacaatatacatcacacaagtatccatgtccattttaacaaactacacatccacacaagcaacaaacatgagcaaatcaagcacaaacaacatcaagcacaaacaaatccggcggccggcggtcggtggcggaggggaaaggccgcggacgctggatccgcgtcccccgacctcgtggaggccggatatggcggtcatcggtcggcggcggaggaggcggcgtccggcagtcggggaagaggttgtggaggtggcgaaggtgtcggtggctggatccgctgtggcgtcggcggccgggaggcgagggaaggcgccggcggcagaatccggcttcccggaggccaaacttggcggcatcggcggccgggaggcgaggaaaggcgccggtggcc

SEQ ID NO: 37246 - DNA, 579 bp, Oryza sativa
actatagggcgaattcgagctcggtaccccgaatcttttaagcctaattgctccatgatttgacaatgtggtgctacattaaatatttgctaatgacggattaattaagcttaataattcgtctcgcggtaccgacggattctgtaattagtttttctattagtacccaaacaccccatgcgacaccctatataatacccgatgtgacacgtcaaaactttacacccctggctctagacacccccttacttattttcctatgaaattgagccatagaaatataattctatagaaaaattcttaagagtcccattggttgccctaataagccaaagccaaagttaaaatttaaattttgagatttgctctggtccaacaataccagtacctcacggtaccaaatcatttctaatcgttggatctagctgggcaggatgggcattgttagatataacgatcggaaacgatttggtaccataagataccgatacctcgaggtacattttattggactggagaaaatctcttgaattttcaaacttaatttgaaaggcaattttaagatattttcaatatagt

SEQ ID NO: 37247 - DNA, 522 bp, Oryza sativa
gctgatgcacacaagttgtcaccaaaatatttttcggccgtccgatgtcaaagggacggctagctggggccttgatgctgcaaaaaggcatgtcgccactgagcactagtagtttgggggtagctgtccatgctggccacaggggaggccacccggcagggcatggcccacaccatctcagggttaatgcagccattttcccctaactgtcagtgtcttaatctccttttttgcttgcccaattgccgtgctccaaccacatttttttaggtcttctctgaacctaacagtacactctcaagttgcatgcacacagggtcagcattaggggctctgccagtactgcttgattggggtgccaccatggtttgctcatgtggtggttggtttttatcaacactgatcactgatctgtactaatactagctctctgctctgaagtcttgatcatgtgtggttgctgaggttaagctgagttgcgggtttgcaaccatatcagccaaaccaacaacttgcatgtaa

SEQ ID NO: 37248 - DNA, 500 bp, Oryza sativa
ctaatatatatattgtggttctttcatgcatgcagctgcctagaatagaatatcaaacaagctttgacgatacatgcattacaaatgtgcagcgcgatctctgtcacttcatccaccgtgagtgctgtcatatcaaaggatagttcttcgacccagagagcatcctggctacaagataagaatacaagaatcttgggagtggaacaacgcggtgccataatataattagatagtgtattcgaagtgacaatgttataaatattgtaacattttgacgacacttttcacttatgcaatatatgtatatttgttaatatcaaatgttttttagttactaatattttttatgcatcaattaattaattatttggaaaattatttatcacaaattattattgtagcatttttttaaaaaaattttgtacctattttcgcaggcagatcaatcacattctttctggcgcactgaatctattttcctaggcggcacctctagctcc

SEQ ID NO: 37249 - DNA, 707 bp, Oryza sativa
tatgttttccccttatattgttcaaatatattaaaatgacaacataattttaaattttgcaataactttaaaaaactactaatgtgtaatattcatattatactttatatacgtgttagttattaattactttttaatatcaaattttagttatttataaattatatatattcctatatggactctagactcgtcttttaatatttctttttttttacttccgatttttctgtaaattgtatttctatatagactttatactcttcttccaatattatttatttttatttctgaattttcaaattatattttatatacgtgttagttattaattatttttaatatcaaattttagttatttgtaaattatgtatattcctatatggactctagactcgtcttttaatatttctttttttaaaattccgaattttctatagattgtatttttatatagactctatgctcttcttccaatattatttatttttatttctgaatttttattatttctaattgtatttctatgtggactctaaactcatctttctatattctttaatttttaatttcgaatttcaattacttctaaattgtattcctatatttatattcctatattgaccttaaactcttattcccatgtttttcttaattttgaattttagtatttgtaaattgtatttttatacggactctaaacacta

SEQ ID NO: 37250 - DNA, 556 bp, Oryza sativa
aaaaaaaagcaacttatcaagaaattataacaacttttgagaaagaacatttggagtgccacctctcactttatcccttctcttagagtatgttgttggaaaatgaaacaatgcattgttcttgcctggttataaactttgtaattgaaactgtttgtctcttttccttttttgtacaaattgtttacccaatttataaaattaactgctgggtgcgcctaactgtagtttcattccaaaaaaatggaaatgatgcattggtcaccattgcaattcttttggtgtgctctcagatgcatatattccaactagatgtgtagaagtttgaatgctgaattgcatcattttgtaccaacaataatgcagtaacaaaaactacagaagtgtacccatattcttggaaaaagaattaagtccttaacttcaatatcacattgacaagaaaaggcaggtctatctcagtgacaaggaaaagcaattttataaacacataatggtttgtgctagaaaggaaatatccacattttaaaactacactcacactcttggtctgctt

SEQ ID NO: 37251 - DNA, 614 bp, Oryza sativa
ggattacggtagatttgtagatgttttcgtaaactttattttcccatgataaacttaatcagcatatattatatatgcatggggtaattatatgataacaagcgaaacataacttaattttgtttttgaaattatgattttaatatctccagcatacatggtaaggtagataataatttgattagttacaaaaatttgttgtactataaagattcgttgtactttatacatgccgcttttttttttctgacagcccttccttttttttattcgtgacagtctcccacaggccacagcaaaacggatccagatgcctccgttcccctcgtgtttgttcaggtttaggatgctttgtttttttttttttgagtgatctgctttgtttggaagccaggccatgttcagaacttcgttcccctcgtgtttgttcaggataatttgtttggaagccaggccacgttcagaacttttttacttctgtgaccaggatcgattctatatccaacggttggttttttttttttaccgttgctctatctgacggctattatttactcagaagtctcagtgacgtgattcgtcctaagattatctcatgattctctttgcacttg

SEQ ID NO: 37252 - DNA, 534 bp, Oryza sativa
aaaaaatcaactggcgtcaggtttctgaaagcttttttttgacgtggacccgtcaggaaaaaccatcatccaccgtcagaaaaaatgagttccacgcccaaaaaaaaaatacacatggcgatttggataaatatatgaacatcaatcacaatccatacatcaaaattcaagtttgcaaagcttacataaatagtccatctaagttcagtacatacaaattcattcaaaccggatttagtaatatacaaagggtccatagaaaagttaaatggttcagttacaattcatcaaacacatgtaaaagaaaattgtcttccagcagcagtccgtgttccgtggtgcttcaaccttgggcaaaggaagctaaaaggtttaaaaaaagaggttcaatttcataattttcttcattacaaaataaataacaatgattatgaataccccagttatagagaaacaaatagattagtacagggaaaaactgaagtgagcaacataaatttctcaactacaagcatgaaaatgaaatatggcaac

SEQ ID NO: 37253 - DNA, 537 bp, Oryza sativa
agctcggtaccctgtaattacatttgacaaaattttggaggaaaatttatcaacaaatatatagcaaattcgacatataaatacagtacaactcgaatatacagtatatatatatatatatatatatatatatatatatatacatgcttatatttaagtaatggactccaaaaaatcctggagaagtaaaatattggttcaaataaagctacgtacgcacgaaaccgtatgcatatataattcctgccaaattaataacgcatgagagtatgtagttttcatgtatgttccaaagtgccccttaatttaatggtaatccatggatgcacttgacaggaacacacacacgattacgatattaaccacacataaatccaacagcagcatgcatttgcaagagctactaatcaattgcattaacagctagctgagtgtagcattagctaatctcttgcaatgtcgccatccagagtaattaaggagaaaaattgcaattaattaacgcgctaaaaaatcgatcgatcgatcagctaggca

SEQ ID NO: 37254 - DNA, 523 bp, Oryza sativa
gctataataagctgatcatccggtggcatctcgcctgctgtaccacacacaacagcacactccaccacactctgcccccaccgacgaaacgccgtgccaaaatcagacctcaccgtcgccatcgccgtcgcctctccggccgtgtgcccacaaaattattgatcccctgtggccatggcgacgcgagagacgacggacggcgagagcctagctaggccgtcgacggcgagctctctctcactcgctcgcggtcatggctcccgctatagctagctgtgcattgctgacttgctgcacgcaggggtgccctttctgaaaggtgtctcctgggaatttgcgcggtactggtgtctcaagataatgcagctaagctaagctgctatctgcctctcactgccgtgaccaatcgacaataattaatcaatgacctataattatatctccatctgtactcgtaaaggaagtcgttttcgacagtgacacggtttccaaaaacaactctgatttattatttctataaaaa

SEQ ID NO: 37255 - DNA, 602 bp, Oryza sativa
atcaattaatagaatatgtatagactataatgagatacctgatcaacaataaataggtcctggtccagctttccaatgataaaaccaagattaaactgcccaacaacctgaaggtgtactagttatttagtgttcataaacttctttagcaaagtactgcaaatagaaatatagaattcatacagcactttttttaatatttcatcctatttagaacaatgaaatcacaccactcaagtaaaaaacaaatgttcacaataataaaatgctttcagataaaattaacaaaagacaacatatgtcttgcgaggaacttgcaagaatcacacgacctatcgtacttgatagggccatgaacagaagcaagctatcaaagcacccaaattatacaacaaatacagttaaataataagctggctggtcccactaaagaaacaaaatgtattggtacaacttaatttcatgattgacaaaagtcattggggttcctcccaagcactgagctactgagtatataacaataaaaaagttctttttgaaatagcacttaaacgacaaaaaggaaaacactcgcgcagggaaaataagcagggtaccgagct

SEQ ID NO: 37256 - DNA, 504 bp, Oryza sativa
cctaactggtggggccacccttacggtcccacatgtcggctcccgctgcgaccagcccattaacttgtccaggaccagcaacgcggcccatgccggtcggaactgcccgaatcgcaacgctagatcgaacggctgtggtggctcgggagatgcggcacggttggcttgttgactttttccggcccggattgacgccgcaagccgaatccacgagtagtgggctgcggaattttgttttgttttttttttctccccatcccatcccggccctgacgccgccgcacgacggccggccgcggccgccgccggggaggtcgccgccgatgagccccaccgcgccgtcgcgtacgggtcgtgctctcgcccttctccctgtcctggggctgctgctcctcgtctgctcgccagccgggtcagctggtacgggacaatcgccaccccaccgcgactcttcttccgatctcggggctggtcttgcttaagtttatctgtagcttttgttgg

SEQ ID NO: 37257 - DNA, 654 bp, Oryza sativa
acttgatacctgtcctttgtcaaccgtgggtgataattcgactagcttgtgtcacttatgttgatctagctagaactatatgttagccatgcttaattaccactaactcagttgatgggataatggcagtaatagaccttttagtatcattacgagctgcatgctcgagacatccggccatgtttcattggttgtaactatccaactaaaatgcgattgaatgatgggctatgggtgcatggttttgctggtcgcacccatggcaattaaggaccggttcgcgggatgcactggaagacatacagcgcttgccacaagcgggaatgggtaactacctgacttgaagtatagcttttctctggctgacgcatccagacaagggtgagcgtgatggagttcggatggccctgcgacggcctatgcggctttctgattcgcctaggcacgagatgggactgctcgctgcttgctgggggcgggggtgaaacctgaggtgtggtgtgcttggtcagagggggttatatgaagggtcttgtcacaatcactcgacatggtgacgtgtccggccgggtacggtgacatgccggtggattgtgtcttgtgggtatagttgtgcacctctggccagagtaaaactattcgaatagccgtgcc

SEQ ID NO: 37258 - DNA, 893 bp, Oryza sativa
ccccccccccccctcccatggccatagcctatcggcggctagctgaaagagatgagggatgaaaaaatagacttatttctatcatattaaggcagtctgcagtttagatagggcatgcaccatatgtcacacagcttacacctcaacataccttgggcctaggaagcatggggaatactgtagccgggatgcaatatggtcaccaagaacaattgatatggaatatgcccagatcacctcatctcccaacattactcacccttgtgtccaatgtatgaatgaatggcgagcaccaagcacgcagcacaagacattgccgccctcactaatgctgcctacggagacaacaccaagcctaggttgtctttggctctgtaaatcagccccaatccccttgccgctcagcaaggtttattaggttacggtcgatgaaaaaattacgaggctataattatggtcaaggaaaaaaacaacaaaacaacatgatatacaacacggctataagctgaaattaaaccaccgttgtataacattggtatatatatttatactcggtactatttctttcaaagtaaggaagatgttattagatccttaaaggcttgtttagttcgtagccatatattttcacaccaacctgtaggcatgttgcatgtgctacaatttaatatcccggtttttggttggtttgttgaaatttgatgaagctatacatgttgcattgctagtataactaaggacccatatatatatgtgatacactcaattaatttctagctgaatcatgctacatacttgtgaccaacaatctacactttgtgtgcaaacctaacagccagcctccacatccaaaatgcatatagccatggattttgagtttataaaaaaatagt

SEQ ID NO: 37259 - DNA, 517 bp, Oryza sativa
gtacatggcttctatttaggtgtcattgctttatgcacctatctaatctagcccaaaaaaaatggggaacagaacagagaaaattatgagggccagcagtgaaaggtgcacactttcacaggacaaaaatgctacaaggtacaagctatatatggaattggacaatgcatttctgctgatctaagttttgacttgctggatcggatggactagtataattgtaagtgcactatacacaaaaaaacgaagctattgttgcagaccaaagaatctttgaaaaccagtccataataatactgatacactttcaaccttagatatcttagtgacaaaaggtcacgtgaattacttcgtacagctagcgacatataaaaatagtaattacaagccacgttttggcttaaaatatatatgcatagccccctaagtagaatatcagttaaacagataagttactaaatttaaatttcctgcgtttctgcaaatggtcctgattggaaccttaaaggataactaa

SEQ ID NO: 37260 - DNA, 582 bp, Oryza sativa
actctaaatgatcccccttcctatcttgggcaagtcattttttttatggagaaaaggtactttattaatggacatttttttatccttttttttttgcagatcatgtatatatctaccatgggccatgcagactggaagcccatgcagtttttgtgtttcgcctatttctatcgaatacttgacaaactgaaggctaccgagtcagctagcactcctatatacaatgtgaggcggtttactaaataattttatttgctgttcccttttcattttctatggaatccctgcacttacaggaatgacatatcaaataatcaaattgggtcagcttgctttactctatcgcagctcagatatgataagagcaaaaggttcactagggaaatggagctattagatgggatggaattcttacttttcatgagttgggaatgcatatatttgatatatgtggctccttttttagttacaaagttacataaacgcatgcttgtcttgtattaaggatcttagattacttggacactagtttttagctttgcagttcagcccgacagaatcacagaagaagcctagctaatg

SEQ ID NO: 37261 - DNA, 562 bp, Oryza sativa
ttttctttttctatctgctccacattactcctttgcttgtctttaacctctcttaaattgaaacctactccacttgattttgcgaaacaaaaaaggcaagatatttgcctcactagtcctctttctcacctacttcaacttcaaagtcatcagcagctatccatctgcctcttcttcctacacatacacctagttctgcatcttttctaaacggaaaccatttctgcatccttggtacaatcttgagccgaaataatcttcagttctcacagaccacacgagctggattgaggttgggaggcaccgagaatgcacctatcagctaagcacatcatgggagcgcttacttctaatctgtccccataggccatgccaatccaaacacaccaggcataagtccttccttcgcatcaactagtgttccttgagatggggacatgccatgctactaaaccagtagcatcttcctgcttggatcgaccgttgcagtttctggcgatggatgttgttgtgttcgaagcgagacaagctgggggtactgtacgcgttgttgctctttgct

SEQ ID NO: 37262 - DNA, 540 bp, Oryza sativa
aaattggtgcttatggctctatgctcgctgctggagatgtggaaaatattgtttaagagaccatctcaactcgtgtacaattctatagatgtaatatgaatcagccagtagcataaaagtataacttgaaatagagcttatgacatgtactttattaactatcctagacccgtatctttctttgagaatggcagaaccgtgtatgccatcatagcagggttttagttttgaattctgcaggacaacaaggagggtggttttagttgttactatgccagttttccagttctttttttttaaggaaaaccattttcatgttttattgcaacatattttattggattttgattaatttatttatttttatgttgggaagataaggaccttcagtcacaattactacatggaaggccaggagcgatgtacaacatatgtaatgctcatcctgtgcttttttaaaaatcttttttagtgtgcctctcccctaccttatttctaccgacaaggctcattatgtaccttgtaatgttgaatccctgt

SEQ ID NO: 37263 - DNA, 621 bp, Oryza sativa
atatttatgggtaccaagtttgatacccaggtaccatacctgatatatatatgcactagccatgatacatgcggatatcagatgacaaatattaggtctaatacttacggataccatgtttgatacctaggtaccaagcctgatacctatatgtatcagatacatataggtattagatgagtttgatacccaggtaccatgcctgatacctacaggcactagccatgatacatgtggatatcagatgacaaatatcaggtctaatacttacggataccaagtttgatacctaggtactaggtttgatgcctataggtactaggcctgatacctatatgtatcatccatgatatatgtggatattagatgagtttgatacccaggtaccatacttgatacctacaggcactagccatgatacatgtggatatcagatgacaaatatcaggtctaatacttacggataccaagtttgatacctaggtactaggtttgatgcctataggtactaggcctgatacctatatgtatcatccatgatacatgtgggtattagatgagtttgatactcaggcaccatacctgatacctacaggcactagccataatacatgtggatat

SEQ ID NO: 37264 - DNA, 630 bp, Oryza sativa
cattgtcatcatacaatagtatgacatatgtatagtatccatttagtcgccatagtcattacacatccccggatatccaaacaagaaacccgatgccgaaaccgacgcagagttgtccggtctaaccgctcaatacacatcggtctgaccaacaacccatgtccggtatcaccggacccatatttccagcagcacttatttaacacgtgcaaatccgatcatctccaaaaccaattggacaatagtctccaaatctctcaacccataattacagatgccgtttgttcatcacagaataagaatcataatcactttgattttacacaaccaacttgatatgaaattcgttcctataaagatttaaacttataatcttggagcgctactcatgtcactgtaaccactgggctacatgccttttgcgatgattatctatctgatctgattggatatgtagaactgtatatcacgtgtcgtgtgataaccctgctttatatgtatcagcgcgtgccagttgtcacacagtgatgctgatgacctatatggcagcaacagtagcatatgccggagtgatccaatccaagcaagcgatatctcattatctcatcatcagcatgatgagctactgta

SEQ ID NO: 37265 - DNA, 1110 bp, Oryza sativa
ttttcttcctggtagccaatcagtctgtaataatctctattccgtacttgtgcctaaacaattacaagtaaaatcaggaaaaaaaatacatgagctaaacacaaaaataattatgtgaataaaacatcattataattgttcaaaacacctaaatagaacacctcacttgttttttccattgctgctcatatataagcaagaatataaacaagctgcaaagatattgaggagtttagtggcatgaagacttacgtttaaagcatgcagatgctttggaactgtgtacatgcaaactctgtggaactcagctagaagataatccattgcatctggtacctgagcatttgtgttagtaaattattaaacttcattgaaagagcaaagccaggataggagtgtacagaaatattggaactagctatcgtcttagtggtcatgcagcaacgaattttgttttgagttccaaccatgataagaaaatcacaagattgtgcattatgtggttgcaaactaggctgcaaaaaagttgatcagtgtatgacaaaagatacacagtagccctatgttcatcggaatcaactggagtatctatcccagctactggcaaacagcatgtgagtttccatgctccataattattaaccttccactgtctattgccatgaaatttaatgtacacttaatatccacttcctctaaccatgacgaacagtgcaatagttcatcattgcatgccacttcatgtttaaatgaggtgtctaaagcagcttcaacttttaaacttaacatgaaacataacgaaaattagttactgtgggtttccattccacttattaaggatgagctgtcatgtaaggaagaaatagtcttttcctactataaactaattttaagtatcaatatacttccaccaatcaagaattcatgatcacaacatatgccttttgaaatatcagaagagagctataaagaaagaaaactgagtgcggtaaatgtccagaaagtgagcaccattcgatatgcacttattaaccaaaagtaatgcctagtaaaactaaaaaacacaaacatacctggctggtgactagaagcatgacatatccacaagca

SEQ ID NO: 37266 - DNA, 2464 bp, Oryza sativa
cctgcagcccaataataataatctaaattaaaatgtgatacaatcttaatattatagatctgaacagaatgtctagatttatactattacgatgtcacactccgttttaagtttgtttattttggaacggaggggagaaattcgaatgaaatgtatacgttgtttcgtctgaatatatcagagaaatgagttcttagcaagcattttttttaagcacagtcccagtgcaaattctgaacatgaactctgaatctctgataatgccgctgttgtcttgagccagaataattaagctaagaagataagacaaatacggtatttaaggcttaatgtcactgaaatctactcccttcgtccatcggtccatattgtacatgaatctgtctcgctgtcatgagttcttaataaatgctaaaaaaacgcatgttgtttgtctgaaactctgaatatatcagaggaatgagttcttaacaatcatgctattttcagtgcattcgttgtgaaaaatctaaacatctctgatgttttcttgagctagaaagatacagttttggttctggctcttgacctgtactgcgagcttgaaaagtcggaggccatatccagatatatatgccatttgtcgcacagatttgaagagtattttgttccgttgcttctacctcagccgttaatcttatgtagaaagataaagccagagagaaacacaagctacaaagataagttgtgtgcgtacagcttaccaaagcaacaatacaaggagcaacaagaggaaagcacaagagaaatctgtggactctgaactttctgaacttttctgaagagatagtggactctgaacttccttgaaactgcttgatggcctgtaggcttatagttagcctgtggatcggtggatgttcagaaatacagaataatcagagaggtaactagcactagtataattcaactagggcatctcttaggcagtgcttatgtccaggaaattatatatcatggaacattaagagattattgctgcagagttttttttgtgccaaattggaaaaggagtagaatatgtaaacatatgcctgccagcgccaaagatgacttggaagcaagtcaatgaggcttactcatgcatagcttcaacaagttcaacaagagagatactccaaattcttgcattttggcacaatggccgttggctgctgggtatcagaaagcaatcccagtgtcatgtccaaactccaaattctccatcataaacctccaaatttccaaatctagtcaaaattctccggttgtactgccaaaccgacaacagtacaagcctgcattttctgtcatgctgatgtcgtaagactagtcatactgtacctgaagtctgcttctctgtcatcattctgcatcgtacgatccagtgacatgtatacgttgtttgtctgaatagtcatagagaaatcttgagataacggttatgcaactgtttattaattttggatgaagattcacaaacagaattcaataattgtatactccttatctttggttggtagtttttagtttgctttttcttcacggttggtgtcctcttttttatgtgtgaacctttttatttttgagtgttacgctgtaataattggctgtagctcgttgagcaaagccagaatattctattccattatctaaaaaaaagtcatcagagaaatgagttattatagcaagcttttcttttcttttagtatagtccctgtggaaattctgaacaagaactctgaatctctgacaatggtgatcttgaaccagaataattaaggtcagaagataagacaaatatggtattcaaggctttatctgtacattttggacatggctcttgactggctctacgagcttgaaaagtcggagccatatccagatatgccatttgtcgcagagctggagagtactttgttccgttgcttcgaattcacccgttaatcttctgtagatagatgaagccagagagagacagaagctacacaagttctgtaaagctaattaaaagccattgtgaggtatgagtgctgagtacccaatactcatacactgggaggaacaaccggacaagagctctttagtggtgatccagaaaaagtatatcaggatccaataatactaataataatataattatcatgtataagtttgtaattaatatattataggatagatagaaattgatatcttacccagtgtccggtacaataggataagttccggtacaataggataagtacatgaaggtatgcccctctctcagcacggttttattatcttgatgtaattaactgagtttaattaaagtttatatcatcttttaaaaacctagactatggctaaagaggaatctttggactctgaaatttctttgaactgcatgatggcctgtaggctgtaggatgtagtgagcctgtgaatattcagaaattcagaacaa

SEQ ID NO: 37267 - DNA, 1201 bp, Oryza sativa
aagagcaagtctaatagtacagtcctctactagctccaattcatctatagtcaatctaatagccaattatacaatagttcttattacattattaatatatggtcacgcctatcatacacacagtgtgtcttagaatccgtgctgcagctggctacagatctgtagcccctgcttttctctctcatcgtttatctcattaaaatatgtttatagctggctaatagtctgctattataccttctctaatggagacaatctgaattctacccacatgggcatgtaccccgggccacatggagtattatgtgggtattggcaagtgcccaagcacactgcattttgattcggcaagtgacgacttgagtgtttattcctcccaacatcttaaaaaaaatctaaaattaaatgtgatataacgaatatggatagaaacctgtctaaattcgttacgaatccgaacagactcctgtccagatttattatattaggatataccacttttaattataggtttatttttgggacggaagaagtatgatttagatgcaaaaaggtattgagccgttgctggggtcaccgtgatttcgtcgtcattgaatgatgggtacttagacgtagccatgtggataatttaagagcgcattttgcaataggattcaacttatctgtctatttccgtacgtggatgtgacctaagatatggtttacttagtttgatgtcgtaacaatgaaattcggtggtatcaaagccgggacaagtttttgcgattatgaaattcgttttagtcttggtacagttagaaaatgattgttgttttttttttcttaccagccctagcgcactccgataggaattactacatccgtttcacaatgtaaatcattctattattttccacattcatattaatgttaataaatctagatatatatatctatctagatttattaacatcaatatgaatgtgggaaatgctaaaataatttacagtgtgaaacgaaggaagtaccaaaataaaaataaaaaatcatactagtacattcgaaggaaacccggaagaactattaaaaaacaagcttgcgttgctgttcttgacttggaccaggcaagtcgtagccttttgacgtttggtaacgccgctgtctaagacgacttataaaaaaatttaacatctgtcgatgcatcgccattgggacgtgc

SEQ ID NO: 37268 - DNA, 668 bp, Oryza sativa
aggtgatggtatgtccttctggccgtgatgcttcgtagctatcccaccactctgaagccggtccaaccagctgaggagttgcgaagccaacccgctcctggtcggtgcactgaatcaaccctagcttcttctcgattgtgcgcaaccaatcactggcttccataggatcgacggcaatggcaaggttggaggctcagttttgagaaattctgataacttgcactgttgctggactgtaggtacttgaacgttggttgtccctgctgggttgttccaattctgtaatagttgaaaggctgttgccaacatgttggtttggttaaccacaatttggattagctctggtgaggttttgttgatgcttttctcattcccactggcttgggttcttgagtcatcggatccatcattcccatagcctttgttaccagtgttatccatctgtcacaaggtagaggttgagaggggaagcagacaaggaaagaatggaccagaactagggacaagaccttaaaggaactaactcttcttgttgatatgttgtttgtttcacttattctgcaagttgattaagcaaacaacctagcatggttacatcacaacccaccgatgcaaaccacgcgctacacacacaagcaaggaacacacgactaacaacactaccctat

SEQ ID NO: 37269 - DNA, 524 bp, Oryza sativa
gagttcgtagcacctggggacgaaattacctcaagacgttcttactgttccgccacaataaccgtcatccaacttttctctttttatctctctctctctctgtgttcgtggttcacagaggaagaagaacagtactagattcaatactgttccaccatggtccagcctgaccacaccacctgagccaacctaggtagttgtcaaccaaaagaaaaccgattcatatcaattcttccatcagttcacccccagattcaaaccaaatcaattctagtatctgtaacaacaataatcccaaagtgcaaccactactacacatgccatgaatcataaccctaggataaatctttttttcatccaactcaaattaactctcgatttaacattttcttttgttcgggctctgattcacaatatttattttatcgtttatttgtagtatttttgttataggcttatttggtcgtttcttcgtgtgcatacgctagatcgcgttgaagatcccaccggactcgcaggaactg

SEQ ID NO: 37270 - DNA, 1201 bp, Oryza sativa
aaagttttaaaaattttattctaaatgtcagatatttatgatcgaatgcagcacattttcgtagctaaaaacaagtattttcagttataacagcattctgttatgcaaacttcattaacttgaaaagtacctaaaaatgttgtcttttctccatccattgagcaggtatgatatccatcactaggacatgaaggtttcctcttttcttttcttcttttttcttttttacaggaaccaggacaagaaggttaactccaacgactacaagttcgtctctctgcagttgtctgagcagccttttcccgttttctctaatccattctgagtttctgacggctagcatctcttgtgtttctgtgtatgatgtgagcttgctttgcaggggatctcattcccttcctcttgcaactctgaaagggccaacgaaattctaaactaagcctctgacctgcttgggcatattccagataattagaatcgaacagtgtacatttctctcttgtaaaactcatattgttcgagaaaaattggctgcacatttactggaggattatcccaagcatcggtagtatttatttgattccgtggacggcaaagtcaggtcctccattaaaaaagatcaaaaaggcagaaatttccgtggactttctgctgaaggatgaaaaaaaaggcacctttgtaggaaaaaaaagaggagagatctcttgtgaaaaaaatgaagcaagaaaaggagaaagggacagaggagagcctctgaacgaagaagtgaactcgttggtgagccgaggagtgagatggtcgcccacagaatttccacgtgtctcacggtcagccgttgctgccgctgtcaccggaaagctacggattttctggcccccggcgccggcggccgtgctgatgcgatgcgtgcatgtctgtcaggcaaataggcaatcggccatgggcactgggaaaaatgttgagggcccatttgatttgtaaagaaaacatagaaattctagattattttaattctatagaaaaaaaatcctatgaacaccttagaaacaaatgattgaatcccatcacattctttaaaattcatgaacaattctatatagatgttagaaaaaaaaacttaacagtagcagtagcactgctcatgaagaatctacaggctattttcgttttcgttcagcatcatcccacgcgcaccaccccg

SEQ ID NO: 37271 - DNA, 863 bp, Oryza sativa
aaaacgactttctttagtagtacggagggagttttaattagttcttgatccgttcaatggttcagctcaaaaaagttaaagttgtacacaccagaggtcaccagctatattattactcgtatggtttaagagaacacacaccatattaagttttttttgcatgggttcgtgctggtcccacatgttcactgcaggaacgaccattgggagggtgttaattcgattagcgcgttaattaatttgggaacagtagccactagccacgcacgaacatgagatcgttgcacggtaggcattgccgcacacacgatcgacgacctaacaagcggctagacaagtcgaagaaagagctcgagatcacttttccggaaagtgttttcacatttaagggacactattcattttcttaaaaatacgcacaattgagtcatgaaatcctttttaaaaaagattaataatgttggtataatgactggctgtttgctgcatgcggctgcgctgcacagacgaacagaagaaatgctagttgggttcctgtagcagatggctgtggcgcaccgaacaagccctatagtaataaaacattccgactgagtttttacgttaataaaaaagatataggcataggttagtgtggagattatgggtatcccatatctacacggcgacggtattcgaactgggtaccggatacttaatgtagatagaatatcttatctgtatctcgggtttgtttcttaacttgtgtatcaaggaaacaccctgagacttagtcggttacgactgtattttacctctatcttcatattccgttaggaatatagattatcttttgtaatccggactccttcccatatataagg

SEQ ID NO: 37272 - DNA, 1823 bp, Oryza sativa
aatatccaaaaccaaaaggggaagcagccgttgacgactccggtttcagggaaacaaacaaagaaacgaacacaagaactgcaacttgatatgcgccgcaagagggattgataattgattgattgattggcctgataatccagctgccgaccgcctgaaagacctgtttaattctgattttccctgatttttttaaaaaattacgtacaaacacaaatttcactcaccgctatatacgcatgcacgcacatcctacccttataagcgtctccgaaagactgagctgacatatcttaagattgtcgaaatcaccacagacgtattgttgtctatgcgcacacttattcctataatcgatcccccatgcacgtacacattacctattacctcgatgtataccttcgaaagactggatcaacatatcttgagattgatgaagtcatcacatatgggcgtcttgttattaatgggtacgttgtctattattgaaaaaaataactatccataaattcgagcacatgtatcaagtttaggacgttaaacgtggatggacatattctaccacaagtaatctaccagttaagctatgctcacttcgatgtctgttccttgatttattggcatgtttaattatcttaatcttgtaatgggggacatgatctcatgagagcaagtttaatagtatagtcaactacgggctccaaatcatatatagctaatctaatagcctattcatacaatagttagctataaaaatatactacatcattaatacccggtcccacctctcatacacatataatgttttggagtccgtgttacagttggttataaatctgtagctcgctttcttctgtcttcttttttcttcttgatatatggttatagctggtttatagcctgctattgtacctgctctgaggctttgccaatttaactgcatgtatagctatgcatagttcctttggaggatctagcacttttttggcattgctacatgcttagttactttcaagtctataaagtatttatttccttaacaatgaaaagtttgcatggttagtaaacaactaacagcacatggtttgccatgattcagacacaactgtctttatatattatccaaatgagaaaaaaataaacggaggagagaaacccagaaacataaagcgtggagtacatggaccagaatactacctccttccctaaatgtttgacgccgttgacttttttaaacatgtttgaccgttcgtcttattcaaaaacttttgtgaaatatgtaaaactatatgtatacataaaagtatatttaacaatgaattaaatggtaggaaaagaattaataattgcttaaattttttgaataagacgaacggtcaaacatattttaaaaagtcaacggtgtcaaatatttagggatggagggagtatagaattgaaagcgtctcgccgagagatctcattgtcagttacatctcataaatatgctcctcaatcctcatcatcgttcatactcgaatccaacctagctagacagatagacagaaagacaggcaagctcattagtgtatagttttggactgccgatcatacgccttttccttgagaaagcaaaaaaaaagcgtatatttgttttcgataatgtagctaacaagtgctgaaatttcccacgaacatagcacggcaccacctaggacgcgattgaacgaaaatggatcatctacaacaccgtacaatacttcttacggttggcaatttttttttcacacacaatataaacgctcgtatatggattaggatcctctaacataaaggtagaggga

SEQ ID NO: 37273 - DNA, 2030 bp, Oryza sativa
attgtgctcttgaatattgtcgattttgtcgtgggacactgattgaattcggggagatcaactgctctgattatgtgtatttgttcttttaatgttgataaatctaagggcgatggaggccgctcgaagtatcgactcgattcatggaacctcaaaggtatcactttctaaaccaacacatttgattattccccatcaatgttgctagtaggatgctatttgagaaactatcacccatatagtttcccaactcgtatttatagtggtggtaggtgacatactcgtccgttgtaacttcgttaattttaaaatatactggtctaatattttgaaggtatttatagagatagtgtgggcgtgagtttgtagtttgttttttaaggaaataaaattctgtgctttcctacttggagcactcgaggcactatcacgtggttaggtagggggtacttagccgaaacttttgccgcccgcgtattaacacccggggtcacgcatgcaatgcattgtacatacataatccaagctagctaattgattgatgcctctccatgtgggagggggtacaagtccatgtggagggcaacggctcctttcagtttgtaccactattttaattgtattgtacccatcaacgccggccaatcacgtcgaaaacattctgctgctgagaaagattaagttaatccacactgatcccgttattatatttacccatcgaactctaggccccgtttagttccaaagttttttttttcaaacttctaactttccatcatatcaaatctttcatacacacataactcttctatcatatcgtatcaatttcaaccaaactttcaaacttcagccctagtatagctaattgactaaacagtgaccacggtaaattaggtcggttttcaaacatagtagtgctcctcttctgaaattaggcaaattaacctgggtaagggtcataagctgcgaaactagttacacagggaaatggtgactgcaacttaagaagtagcattgtgtgtcattgaaagaaaatcggacagtctagatcacacactgtacggctcatatcatggtagcaaaaatatattgtagtacagattactgtagcataggatctaaaccgttgatcggagaaacgacaaaattgtttgcagttgttaaattgcagtttcaagtataaactgcaccggatctgaatcctaaagtgggagctttgatttttccaatggtggttaagcctagctgagttccaaatttaagttggaggacctacgtactccatcattttctgtgaccatgtttctcaactactaaatgatattttttagaaaccttttatatatggagattcttttagaaagctaaatctattttcaagtttacaataataactaatataaattaataaaagctaataacttctctttttttcatgtaagaagaattcaatcccaacctctctttcaaagactctgttcggagatagagggtgaaaacttcacctttcttaacgtaaaacggaacaatacatcaacacgtgattaattaatcattagttaaaataatcttgagaaatatattgatatgattttttttaaaaaaacacacgatgactctagctagaacttaaggccccgtttagttccccaaaagtttttcccaaaaacattaacatcgaatctttggtcacatgcatgaagcattaaatatagattaaaagaaaaactaattgcacagttaggaaggaaatcgcgagacgaatcttttaaacctaattagtccatgattagccataagtgctacagtaagccatatgtgctaatgacggattaattaggcttaaaagattcgtctcgcggttttcaggtgagttatgaaattagttttttcattcgtttctaaaaacctcttccaacatccggtcatacattcgatgtgacacacaaaaattttcatttcgcgaactaaacaggcccttactactagtagcagttaggacctgtttactttgatgccattttcaacca

SEQ ID NO: 37274 - DNA, 4746 bp, Oryza sativa
cgcgcgtgtcccggtcacggatcgccccggcctccagcttgaaccgtgacggcatgcgccgtcccgggcctcccactcccgcgcggcgcgtgcccgaggaagagacgccgccgccgccgccgtcgtcgtccgccccttgcgccgccgccgacgccaccgcgcgcgggttgcccgactgcgcgtgccacgcctgcgccaccgccttgagcagctccacgtcgtcctcgccgcccgccgccgccgagcccttcatgcccgccgccccgcgcgcgcgcgcgcgtcagcctctcgtttgcgctcgcatggatgtcccacttggcgcgttcttttcggattagtgtacgccgtttggcttattcaagattgagccggaacaagcacaacatatttgcaaataaaaaataatttattaataaaatttttatgcatgtattctaaataattttaaagcaaaatctgaaaaataaactacgatgaaaaaaatcccaaaattaacttaaattttaaggttgaaaattcaaattttagcttataagtataagcgaaaaaataggatgtattaggtttttggctaattagtcgcacgttaaacgagaaatatatttagtactccattcgtcttaaaatataagaagttctataattagacacggttattaagaaaataggtagaaatgagtagtgaagggttgtgattgaataagtagtggatgtatgtgagaaatgtgaatggtaaagggttgtgattggttgaaaatagaatgttggtggagatgctgttatattttaggacaaatcctgagtgctaaaagtttattttgggacggagggagtatatgattagttaaataataattattaatttttttaaaaatcgatttaattaattttgtaagcactttttttacaggacatacagtttaactgtttaaaagacgtgttaacaaaaatgaggagtaactaaccttaattagcactttagaacgcgggttgattttgacaaaaagaaaagtcagtaatccgctacaaaaattgtactacttccgttgatgcctgtgagaaaagcgtttttttgagtaaactctgacgaaacacaagaaaaggttcagagttgaaaacacaatcatgtgtaggtccacggtttttcagccatcggaggtggtgtgtgcacacactccacaaacagtggtaatggccactcactgtctctgctgctgacatgaacaccccagattcaagccacagaaatggaagatgctatggggatattccgaagctccaagtgactgtcaagtgtagactctgatgagcttttgttgcagaacctgcatccatggtccgtctaatgtctgctgctagtggctagataatcaaagttttgagaaatttcactattcgatatccaatttgcagtcatttcagtttccctgttctgtcatgcatggtgcaagtaaattcttgtgcagaaaaaaaaaagcagccaaacatttcctggcgaggaacaaaccagaccaaagaagaagagaaagatcaggcttctgaagaagtgatatttctggatactgtgatcagcactataaaaaacgctttggattgctacagaattggatatctgacacgcggcgaattgccatcctttaagtcatgtcaattgccatcaaatctttcttggtcagtcgagatggatctgcttcaaggtgtcctgggagataggcaaactggtggtagctcagccaaacatacacacatgtggtttggcattggcaaccggtggaggatgagcacatgatggcgaccactgcgtccatcacatttgagatattcagatcctagctagacgaattatccgtgcctttgtctcaagtcaaattgctctgctaatctgcttcttccaagtcgtcgtctcgtctctctcccggtggtctgaacttctgtccgctgcaccacacacacacacacacccggagaaaatcttgatttgcagtggtctcttatgtccatttttcttctcctttttgtcatctgtctgcactagctagctgtgtgtgcgtgctactgtggtgatcgccttttgatcgcaagaaaaagaagtggctgagctgaactgaaagtctgatgaaacgagtaggcaatagccatgcaatcgattggttatgaccagagaggcagagatgaactttgtttcagaacatgagaatttagcaagaatagcttgcaaattatacgattttgcagtaaaagctagtattgaaattccgccgttccaaacttgactgtcaaataaacacgagtcgatgttagtgagtttgacagaaacaacaggacttcctcctaaccatgatctcaacaacaactcattccatccaaatcaaactatagatttttcatattagcattgagtaggcaaaagcatacatgcgtgcgtgccaaatgtctctattactttgcgtcgtaatgacacatgcgtcttctctgaaatctcgatttgatgggcttaaatacattggaactttggaaatgtcaaggttaggcagccaagagagatcatcaatcacaaagatcgacctggaaaagaacacttaaaatttggacaagtgtctgatcacatagctaaattcatagttgttgaggaatcctaggtgacttttttccaagtcatgtgtagggcgagcatattccttaactgcatattctcttctctctctctctctctttttaaaaaattctatataagcatgtactcccccttcaaatgaatatgcttatctgtacttagtactacatctcttaatgccctctgttatgaataagaactacccataattaaggggctgtttggttggttgccacactttgccacgccacactttagccatgccatagttttttaaggcatgtgtttggttcgctgccgcaattatgttatgccacactttcttaactttgggatccacatgtcatgctctcaaaattagagataagcatgccacacttatggccaactatttctaagccacatttatgccaccataccacaactagtctaaacttagttatggcaatgttaggcatcaaccaaacattccctaaatcttctactgatacatataggacctggctgacataagagctgccctagttgaatggttcagcagattcctctgatcttctgtctgctcatatattaaacagagtattacgatgggtacatcttgcaccagttttatttacagaacttttgctgtcccttttttttttttacttctgggatatgtatatctacagaagataaataaatggttggtattgaagcgatggaacttccaagacactgttcaacacgtcagctctgtgtgcaaatgacttgtatggataggataggatcagttcagagatgcttttgttgctttatacttacagattttattttgttgcttttacttctggaccggatatgtatatttctacaaagataatggtgggtattgaaacagtagaacatccaatatactgttcaacactttgattctgtggtagtaactggcaagtgacatctggattggacggtagatgtttcgataaggctctgacctttcaagatcgcctcggactgagctcgatcaatgatctgcccaaaaagtgcaaaatagctagattttgatgactacttcctcaatcccaaaaaagagaattcctagcatcccaagacaaattcagtgaggagtaaaaatgatcaaaatgaccctcacaatggaaaaagtaatagtgatgataggtaggtaaagggtatttaaaaaataaaacttctcgttttatgagctgaaggtaagtaagatggtagaaattggttttctgtgggacaaaaatcaaactctagaaatttagtttttttttggatggagggagtacttctcttgtctcatctctgaattatactgaattaacagttagatgcttgttgctaagcacacattctaataacaaaacgatccattttatgtatgctaaattgctagtgtacataacggtttaatttgtatctccgattttggaagtagtactagctagtgtattacccagccatatatatgtgcccctgtctgatcagaacatgacgctttgtcattaatactgctggtgttgatcgagtccgagcatcactagacaagtggtctgagaaaattgcatttacttttagcgaattaaggtgtaagacttgcgttgtcgaggtcaactacacaggaatgtgatcaaggaatcacacgaccctcattaattctttttttttttgagaaacacagtacaaacgcaggcgctcacaacatgcgcacactcacccctatgaacgcacacacgcacaccctacccttcttgagattgacgaagtcaccacaggcgcctcgctgtcgacgggtacgtcgcctaccactgaaataataattagccgtaaatgcgagtacccgtgtcaaatctaggatttgaacccgggtgggctggttccaccacaaggaacctaaccagttgactatgctcacttcgcgaccctcattaattctttggtttcaaccacggaaatttcacgggaatcagtttatataggagttaacacttcacaagaaaaggagacaaaaatcgagtcttccgtgcttttcttgtttctgtcactcctcttcaaaagtacactgatagaggatttaataattaagttatgccgtgaaataatattttatgagtcactacatattc

SEQ ID NO: 37275 - DNA, 531 bp, Oryza sativa
acttggacggttcgtggtgccctgagtggatccttgatgcgttctgtgcttggtcgttgaaattgggtgtgtgtttcttttctacccagagacagtagcgtaggtccctgtgggctcgtagattgagttaagctgcgtggaatttggtgtatggtaaacgccgcctgtttgcattttaggaattactgcttaggaatttttgtttgtacttctgatggatgttatcagtcattaccagcctttactaggggaaaatatcacagtttcttcaaattgcatcctgctaggagtaggatgagcaatggtacctggacaccaaggtggtacttgagtgaaatctatagttttttatgaacattgtggcttgagatcgaatggagtagtttatgttaatgaatttaggcatgtttaattattgtttgagcctctgcaaatgaaaaccatggtagtcatacttctatgactaaaatcattattgtctggcatcacaggagaacagaaaggtgtatgtgtttcgcctggtggacgatt

SEQ ID NO: 37276 - DNA, 578 bp, Oryza sativa
atcttcatgtcattaagctagcttcaatattagtgttgatgttatggtggaaggagcattatattacgcgcaatagtgttactttcttagagttgatagtcaagtatctttgtatttgtattctactatgagtgacgtaatatgttagaatgtatatggttttttaagtttattatcaattaattttgtttgttatggtagttagggtttggcctttcaactactgtctaattttgtttgttatggtagtaagggtttggcctttcaactactatctttttagctaaaaagcttattgattgtacgtagtataacaaaggccgaggatgcaatatatttccattaccttaaattgagctaatatattagcatcattccaaattatagggcgtcatcttttgaaggataatcaaactcgataacgttaaaatgattggtaataattatttttatgttaagtattatatatgtatatcattagatttatatttttaagtatttttatatgatactgatttatatattcgtttggaatataacgtgaaataaattaatgatatataccttctgatttggga

SEQ ID NO: 37277 - DNA, 721 bp, Oryza sativa
ctgcagccctctgctttagtctaagtttttgacttagtaataaatgtgaatgcaagcgtgccatgtttggtctctgccgagctccacatataaaccttagagtaggaatcaaaaaggcatcatttggtgaggaattcaaattgatacacttagagggactaagtgaatcaattgaggaacttggttttcttttccaaaatcatttgaaaacttccggaataagagttgataaagatcgggtgattggtgctctagttgttgttctgtctttcaaccgcccaaggcaaggagaagcagtgtctcgtgggaatcaggggtaagggtaagccaccgtgccaaagattatttaatctgagagagaatacatataccttgcacctgtatctttgagatatgcagcatagtagtaactcctgatcaacaaccaagtctttgtttcctttcgtccttcactcgggacaagcaaaggttcaagcttggggggttttgttgacggtcgttatcgatcagtttcgaccgtcaatattactaaaacaggagtgaactagtgatgcttgcaatgcatatatttgttagaataataatattccactagtattaggtttactaaccttttgcagagaatgatcataaagtggaggagaatcgacatcaacaccaacgataaatcaataaggcgatgtcgagaaccagacttatgcatgaatgggccacgaactca

SEQ ID NO: 37278 - DNA, 736 bp, Oryza sativa
ctcgggtatcaatagacccgagccctatgtaacttttaacacacacgttcaatacaatctcggtgcatcgccacctttttgctttagttttattttgacgagttcttgctttcgggttgagctgcatcgatttcgatcttcaacaagaggtaaaacttgttatgatgaattatgttctcggaattagtgcttccatctttatggtactctaatcttgctatgtaattcatcaagttatcatatatcttagataatcttcgacaatatcatgatctaacctacaatcggctaacatctgttaccagaaggcagttgatttggttaaatagtgacgttgacctagattatataagatatctaccactctatgaaacttccagtggcttgattgtctagatattgttcttcttttcatacctcatgctgcatcagttgagtttgatgtcttaagtcgtgcttagaatatcaatctctagcctgtactctggttgccgattagggtagtatcggagtttgagccgatcttatctgatttaaccatattcgatctatatgcttcaatgacatgttaaatccaccctttgtgtcaagataatgtcgcaatctaaatatattaagcttctgtttaatacattatacctgtttaatatcttgatatagagtagtatcggagtattagccgatacacgctagatctatctgatcggctatgctataaacatatataatcctgtta

SEQ ID NO: 37279 - DNA, 766 bp, Oryza sativa
attaaaaagtgatatatgtatacttttatgaaggtatttttcaagacaaatctattcatataattttaacattttcaaactcaacaacttgagagttatttatgatttatatttttaaagtttaacttaaacattgtcctaaacgacttcctttaccagtatggagggagtatttaattagttcttgatccgttcaatggttcagctcaagcgcactgttcagtaacagtacatggatacatcgaccacacatgaactgcagcttggcgcgcgccacgtgcgtgacacgaactctctaacttccatccaagatcaatgcaagtcagctagcagctagtatagtgttgtgttcgcggattttaaataagatttcgattctctgatgacgaatgcacggacacgatcgattgatcggtcgattttcacgcagcaattagccctcgcgccacggtggccgccgcggcggcgccggtggccggggacctcgtgctggtgacgagcttgaaccactgggtctctgggtcgcactcgccggcggcggcgtcgtcgaggcacctgcacgggttcgtcaccacgctccggccgtcgtcgccgacgtccaggcacagcagcccgccgccgccgtcccgagatggcgtcgtcgtcgtcgtcgcgttgacggccacgtgcatcgtcgagcccgacacgaggcgccacgtcgacagggcgtcgccgcggcagccgccggcgtcgctggtggcgagccgcgccggccggccgctcccct

SEQ ID NO: 37280 - DNA, 1293 bp, Oryza sativa
cctccatttcacaatgtaagtcattttagtattttccacattcattttgatgttaatgaatctagacatatatatctatctagattcattaacattaatatgaatgtggaaaatgataaaatgactcacattataaaacggaggaagtattaaacaaagtttggcaacaaactaaacatagacatatttttagcaactatgccaaaaaaaatgatatggttgaaaattgcatcaatctgaacagcccatatgtataaaaaacttaacctagcaggggtctacaacgaatctagatatgaccctgctaggttgagttttttgaaatggagtgagtaggtttttaagaatgagctaaagcaggtactactcaacactagatttttctataaagtagtatattctacacagccatacctatataagatggttgcagcaaaacgcacacacgatatcaaaaatataaatgacaggagaaattattccttactctcttcatcctaaaatataaaacttagaatcggatgaaacattttctagtagcctgttcagattcatagtactaaaaaatatcatatccgatttttttaataaatcatatccgattttaagttcttatattttgggactagggaatactcctctctctccaaagaatatttggaatgagcttcagtcggtggtgaaccagtgattggtacatgaaccaaaggagctagccgttgcctccggattaagataatctgcactaaggcagagagctcatatgctaacaatagtctactacagtaactacaaaatggtactgtagcaaaactcctgtagtaacagtgagcccttaggtttaatattgagcctctcctgtacatagcacgctacaatagcgatgtaatatgaaccgttagattactgttccttatctgtgttaggctattcccaactcaagactctagacatagtttttataaactccacatcatcaagaaactagtactagacactactcttccaatacaaacaccactattccatacttaaatttaatgctacttatctcacatgatgttttggatattgtgtagaaatcaagtctcatgcaagacatggtttccttctattttctcatttattcgcttgccacatcattttttattttaggtgacatcttatttaatgctatagacaccatctcagtcattgggttaggaatggcattagtacctttaaaagcaagtctaatagtacagtccactactagctccaattcatctatagtgcgatctgatagccaattat

SEQ ID NO: 37281 - DNA, 629 bp, Oryza sativa
atgtacctgattcacctcaataatttcttgaatgatcctctttagtgcaaaatcataaatggcaatcgtggaatggttagcattagctatatcttgacggatttgaatcgcttctcctgtcctggctgccgacccatctccctgtcaaacgccaacatgctgatacaggttgatctcgccgtctccgtcgccatacgctgccacctccggtggtgcgtccaagtcgtcgtcatcgtcccacaacaccagttgcaacggcgtcttgttgcccaccgcgttgatgcacgtcatgggcaccatcggcgcctcgaagctgtacatcctggtgacagcccgtcgcctgaaaggctcgacgcgctcgccgaagccgagggcggctcagggttggaaatttcggtcatttcggtcacccctgatacaatattatttcggccgaaatttttcattttttcatttttttcatgaatttgggtaatatttgttcaaattcaactaaattttgctcaaattttaggcaatttcggacaatttccgcaatttcgggatttcgcccccccccccccccccccggggggatacaaatggcttaaccggggggtaggaaattcttcattacgtacgcggggtag

SEQ ID NO: 37282 - DNA, 650 bp, Oryza sativa
attatatcgagatatttttctcactcatacatgcatgcaacgaattagtctgaatgcatgcgacattaccaatttgtgaccacctagcactagcagtaggtagatagcgagcgttggtgcgtgcgtggatggtggtggaaacgccgggtgtaaatatgtaaatgtaaccgagcgcggcagtgccaatgatgattgggggaggaacacatggccatgccccgcgcatgcatgcatgcatgcaatgcatgggccagccagccacaatgtaccccggcggaaacgggaaaccggaaatgaatggcagcgagagcgcctgtgactctgtgggcgatcaccaatcggcggcccttgcgctagggtcctcaacgccagtcacatgcaacagcagcagacagcaactttcccaggccgcacatgatagtaccactctcttgtacccgcatctgcacctctaaatcctaagctctctctctctctctctctctctctctctctctctctcgcaacgagctacaggcgtgtacgtgttgtacgtatacttgtacgtaactaggtatagcaggacacaacaactgaagactttgctaacagtactgactcttcagattataagaaagctacctctcgatctgcaggggtatccaatcgaa

SEQ ID NO: 37283 - DNA, 3004 bp, Oryza sativa
attacgattttggaaggaaaaaaagggactactcgtacaatatattttttttaaaaaataaaagaatcttgtaaaggttcatgtggcgtattggtattgggtctatatttttcatctcggattgggatttgggaagccttttcaacaacggattgaagtataatttattaagtattataacatgaacaaaaaaaggattaacatgtttttctttctaaagcaccttttgtttataatttttttctcagaaaaaaacacactatttagctgttcgggatgcgggtgtgttagaaacgagcgagtagaagttagaaatgtgtagtatggaacaccctaactctcaaatcaggcaaatgagaatttagtcagcggaattatgaaataaattatggactgttcagattgtagccagaataaatcttactaaattttggcagtgtcaaaattgtgtcaatttggcaattttctcaagtttttgtaggatttcttatgtatttatcaaagtttataaaaaactaaatagatgcacatctttgataattttaccaaaaaaaatagtatggtttgaaatggcaccaatatgaacaatccgttagtgcatgtagctctgctcttatttaaattaacctgattatgatattaaacgagaaaattagaatttatttgagggtatgtgaattagtacttttttacatgtagagccaatgacaagatcaggaaaacacggacggtataaaaagctgaaaaggacactgcaaagatatggggtgtgtttggatgagctatggcttttgaaaaagtagctgtggcttttcgaaaagcagttgtgaaatatgtgttgtggcttttggaaaagctcgtttagttcaatagctgtagcttttgaaataaatagtcccacttacaagcgagccccacatgttatacacccattggaaaagaggggaaaaagagagagaaaaaacaaagacgcgcgcggcgtcggcctcggcggcggcggcggaggaggaggcctcggcggtggcagaggaggaggcatacgcgtgcggcggcagtggggaggcagacgcgggagttgaccttggcggtgttggagtcggcctcggcgtcgtcggagtcctcggtggcggcggagtcgtcctcgggcgtcggcggagtcagcctcgatggcgaggaggagcggcggcagcggaggcggacgtgcgcggtggcggggcgaggaggagcggtggcggcgacgaagtgagtaggaggaggtgcgacgcccgtggaaagcgatgggagaaaaaaaaacaagcgaaccgtttttttaatggcagaggtgggtaatttttttctcccaaaaataggtgaaagcaggggggtagatgtgcttttgatttgtactacaccaaaagctggctttgggtaaaagcagccgtagcttttgaaccctttggttggcttttggcttttccaagcaggttgaaaagtccaaccaaatacacccatagtataccattttttaaggaaaaaaatataaaatgagatgccggggttaatatcgatttgcgttaagaccataatacacactcaaatgtaaaagagccaaatggatgatccgcctctagatggggagattggcaaaattcatgagcaacactatttgttttcttctagttttgatgactcttttaactttaatttgtgattatagggaagatgaataatggttacgattggttgagaggaggagtatataaaaaatagttttgtttagaataaaattattgcgctagaaaccaaacgtgtttctacccatatctgtgtgtaagtatttcccatatttttattatatgaaagacatgtgcacgcatatcactatatatgcacatcgcacacactctccgtaaatgtgtccttaacacaccctcaaattaaaatgcacatggcaacgacaaattcataaccttcaattaatttcctttttatctctctctcattatatgataggtaaatcgatttttcagtgccaaatgtgtatctttggcacgctgttagtttgaaactaagtcgaaacaaatacacgctttctcaaatatctttggcacgaaggaaaaaaaaccctgtcctggttggattcgaatattttttgcatggatgataatgacgaggatctaggatgtaataacaaatcaggcatctcggcgagatgcttcctatatgctgatccatgtacttagtgccctgcactttttttttctctctctccattcattcttttcatgacatggaagtatggaactatgttagactggggctaaatcatggcagaccatgtgcaaattgccaactagcgtgtggccttttctccatattaataacatatgctaactgcttgaatgaaataaagtaatcccaaacgttaaaagcagctgagcatgttaaggtgtactactaagatatataaagtattgacaatctagtaagttttcttccaaagagaaagagaaggttatgaaccgataagaaaaacatacatttagtacgtcctccctccattcttatttccatacgaagttggttagttcaaattcaagtaaccaatgttacataagaagaaaaaaaaaagggagcatataacaaaaatactgcaacaatgtgaccaattctcatcgaggaaataagcgcgcgcacataataattttattacctgataatgaaaagaaaatcaacttagtactcacataagctaacagaacggccatctcgaagaaataatattagatattttctccggttttcaaaagatattgccgttaacttttaaaaatatgttcgatcatttatcttattcaaaagctatgaaaacatgtaaaaattataagtcatgtgaaagttacctttagtgataaactaaaccacaacaaaaataaatgataattattatgttttaatacgacaagtgtgtacttataatcccataactgattaagaaaaccattccaactgaatcattgagaaa

SEQ ID NO: 37284 - DNA, 1239 bp, Oryza sativa
cgtcagcgcttatcatttcctttggaaaaatatttaataattgctcaataaattggtattaattatagaaattcattaaaatggctcaaaacttctaaaattcatatctaattcattcgaactccgaattgggccattcaacttgcaaaattcatctaaaattgagctctacatgtttgtttactttttatgtactctttgcttggtgtttattagagttttttttctcgttttgtgtgccagcgagtagattctgttgtttcagaagttcgcagtcacaaggatcagagttcagaagattgttgtgaagaagcaaggcaagtcacacattccccttgagcatgttgatcccaatttataaattttttatcgtttgcaaataaacatgcatgttttgctaattacatgggatcatggttttacctatctgcttggttgtgccatgtttacttgatatctgtcctttgtcaacattgggtaataaatcaactagctcatgttacttatgtgacatagctagaactatatgcttagccatgcttaattaccactagctcagttgatgggatgattgcagtattagacctttttagcaatagaacgagctgcgtgctcgagacacctggccatgtttcagtggtcgtaattatacaactaaaatgcgactgaatagtgggctgtgggtgcatggttttgctagtcgcaccctggaagaatttctcgtacttaccacaagccagcgtgggcaacgactgggcctgtagtgtagctttcctctagctgacgcatccaggcaagggtgggcatgatggagcggggcgggccctgcgacggcctctatcgcttccggattcacctaggcatgacaggggactgcccgttgcccgctggggacgggggtcaaacctgaggtgtggtgtgcttggctagagggggttatgcgaagggtcctgtcacggcctctttccggtatgtcgtggtggcatgtcggcgcatggaaacgtgtgatgtggctgtgtcttgtggttacagttgtacacctctgatcagagtaaaactattcgaatagtcgtgcccgcggttatgggcggtcgaccagattcaccgtgattagtctcacacttaataaatcgacgcaatgcactgtagttcaggtgggttggttgggcctgttcaacgtggtgtagcgttgatcagtggagatttaatgttactttaattacttaactgggctgcagg

SEQ ID NO: 37285 - DNA, 589 bp, Oryza sativa
gggtggtcgggcaccatggagcaccaaacaaatttattatatgtgtgtgtgtgtatgtgtgtgtgtatatatgtgtgtgttggaggcataccacgaagggccttcggccggaccagccgaaaccaaggattcaagcgacaagcccagaccggacgtaagcggcgaagaccgagaagggaaccatgtgggcgagagtctcatggcgaaggccatggctcggacacccggacatcaccagacaaggacttcgctagaaggcagtgcgggcgagacgaaatctctggcaggagggcctaggcttcactaggtgccgaacctcaccgaaaagtggcccaactgtcatgtcctgataaattcatcccgaattaaaaatcattctctaaaaggaataatagaattaattaaaattcgaaaagaaattggcaaacactaaaatgcgtacaagaaaaattcgaatgtggcccggagaattttttttaaattctccttggtctaaaaggagccctcaaatttaacttgaattttcagaacaccgggaataattattaagcaacaaaaacaattatcaaaatttattaaaaagaaaaac

SEQ ID NO: 37286 - DNA, 743 bp, Oryza sativa
attttagttaactaatctaaccttagttcataggcttatggtctttattatcatggttcatattttataaactagaggagctctagtccatgctagcaatttattatatcaacctagaaattattatatgagctaagtgccttaagttttggtggatggggatggaactatgcattcactagtctaacaagttttatttgggtttcattatagctagagtgtatttctatatacatttatatatatacatattgctcaatcgatactatgtgattagcacctatcctataaatttaaagtttagagctataacctgtacagaaggttccatattttattttactatgttgaagcccactgtttgctggttctatagatatttggttcacttcatttagactaaagatgaattttctacaaattttacaatttaaggtttctgtatgttggttattacttacataagtatttagaggcttttatcatacagtaagtatataattttattttataacttggaagtatatgttttggtgattctacagaacttgggtttactcaaaaaggatctaagatgaattttatatgaacttctaaaattcagcttatctaaaactagtcattcaaaggtaatagttttagaggcatttgatgtatagtatgtatactatttcattttgctttataggagaacataagttgtggatctgtagaaactgagtttgctccaaaatgagttgaga

SEQ ID NO: 37287 - DNA, 730 bp, Oryza sativa
  unsure (1)..(730): unsure at all n locations
ccgagtggtgatctcncgtaggagancatcactattatttaagcccaaaaggtcatgattcctaggaaaattaacctttggtatccttcatcctttgtcctgttccaaaagatatgtacaagaaataacaaatataatatgatttaaatagaaatataactgtaaaaatagataattacaaaacatataaaaaatacatttgaatagaccataagttaatcacagaaatcgaatgagagagatacactcaagccctctttgaagaaaaaaaattgtggatgaattttgtaggatttaaagtctataggattttttttcctatttggttatttgaaacaaaggatttgagctttcataatcctttgaaattccaaagaaatggttcaatacatgtcaacatctttggaagaaaagtagagctttaactttatattatgttttgaaaagactgaactagagaaaaatggaacacacgaatgtaagaggtgagagacatatgtctttattcctcatctcttctatagcctagatcgttgtattcgaatcagtgggtgtagtcatatctgttgccaagaagcttggagtcaccatcttcgtgggagagacagagatatgaggttggttactagtacacaaggtgtatctctacacaagtacaaggtgggacgcatatgaattatttttttttttacaaaaatacctcacttggatgcaacacttggactgagat

SEQ ID NO: 37288 - DNA, 735 bp, Oryza sativa
cgcgtgattgcttccctgtaagtagttcatcacctttttcttatgtgttaacttggattaatatttttgttataattaaatagataataagttgtttttcgatttttctcatatacaacaagtatggaacattgtatgattttcaaattatattatataagtgtatggaatataatgtgtaagattaaaaaacttagtataagatttgacgttttcttgaaaacgtggcaccataagtataggtagtctcataaatattggctatccatataagaggactaccataaaaataatatagtcaaaccatttctcaactaaacttgtcaacagaacttcgagagaaggtaagaaaatgaggaggttagttaccaatcccacacaagggaaaatattgctcacacgcattgtatgacatatactcccattaatcaataatttactaatattattaaatttcacaacgtttaatgaaaatttgttcttttgtgacaatgtggtgcgagactaaaacttgaacaccatattcttctgttgtttcttattctttattggtgataataatatagctggaaccagccactagcacttcacctgaatactagcagctagttcatgtctatgtgctctatattatttatggttttaaatgaagtagtactaataattgtacttaatgatgatattgtatgcatagaagtagtattttagaacttgagatatattttttctaaacat

SEQ ID NO: 37289 - DNA, 749 bp, Oryza sativa
ccgatgatctgctacagatggtacccatgaattcagaaccccagagtccgcacatcctcaaatacaaagcacttccctagttagatgtaggttagacttcccgttcgagaaactctaccttctacctgccctcaatttatgcacgattaatgaatgccacctgggtggaagcgagaggtggaaatggaaggtcttagttcggaggtgggatctctacctgatagttgcattgccattcatgatgatcccctggcattcgtccattcagccattcaccattcacccattcaactggaattttggttgaatgccggaattgtgtccacaaattgtggatggatagttggttggctggctggatggctggctggatggctggctggatggatggtgaatggctggcggcggttcggttgctttgaagcatttgttgctatctaaattccatttaaggtcgtaccttatcgcccagcatcatcttattctctatttgtattccctccatctttcagatacggatgtagccttggatgtgcccgtgcccaatgaagaggaagagcgcaacatgaaacgtaagtacaaaagtaccggacacccacccagatcccaatagaatccgccaaatcctgcgggaaattgtaatcccattcaccagctcctacatttaattaacaagagaactattgtatttatctaacacctggattatctccacctttcatttgatccctatttatagattacgctgc

SEQ ID NO: 37290 - DNA, 856 bp, Oryza sativa
  unsure (1)..(856): unsure at all n locations
cctcctgttattcattcgttnggtttatttaacgttgcgttagtcgcccactgcattantaatttacttcttttctcatgttttcctaatatatcatcttntncanncnnnnnncnnaagcgttgaatgcatgacgcacgcccnncancaccggcccgtggctcgccggatctagactcgagcggtgacaatgggggaagcagtggctgctcgacagcatcttgatgtggtaggcccgcggcggcctttccccttctcccttctagcgctggcgcgacgtccctctccgccacagctcagggagacggccgacgagctcggcggtgcggagaggaggagaacgacgagttcgccagctagggtttgagcaggggcgtcgacgagactctctctggcacggcggcagctgtctccggcgacgatcgccgccgccttacacagggtgtggggtgtgggcatcgcacagagccacgaagcgcgaaagcacgacccccacagtgcaccgtgccgttcttcccaagccgggcagcaacttttctgacgaagaacgcacgcccagttttgggctcacgaaccctcgtaggtcacgctctaatcccagctggtagagaatcttctacgtggcgtgggttggccaaatgccacgtgtgtgcactgtgaatgccctaacgaaaatagtaagtgtcgacgggtgatacccgtagaccggatatagaaggtattggggtacgtttggtacaaggatctacgtattacgacatcaagcaaacaaaagacaggaattattctgtagggcaccatggatttctttgagtcgcttgctttgggggctatgcgtttgggaggggttgggtat

SEQ ID NO: 37291 - DNA, 744 bp, Oryza sativa
  unsure (1)..(744): unsure at all n locations
ctgggtttggagacgatggtccctagcnncannaccgngcaaatacgttccttgttggcatttcgtcgaacacctggttggcgtcgccttgctactgccgccgtcgctcaacccgtgcgccgtcaccgncacgggtctgcgtccccgccgccagcggtcagcccacgggtcgccatcgcagccgtcgtcacacgtgcgtcgcccggccactgcccgcacgcctaccgacgccgacgtcaacgcagccgacgccgacgtcgacgcaaccgacgcccgtgcgcctgcagccgccgccgttgcccgcgcgcagccgccgtccgcgtgcctgccgtaattgttcgcgcctacaaaattcgctcccctggaaagcgaataatgggtcgcccgcatgcgaaaatactaattttcgcacatatctaggtgcaggcagacgtctaaccacacgttaagattggttttgaccgcctgcaaaaaaattttctgtagtagtgagaaatcactgctcgtacgtatggagacgctgccagatcaaggaactctgtataagatcaactataaatccaaaattccaaaccaacgatgcaaaccatgtttggatcatatacagcatataacctagtgttcagtcttgtggacatttacacaacaaagttcttaggcacccatgtttggatcatattacaggtttaacctagtgttaagtctgggtgacatttacacaacaaagtcctccttacttgcatt

SEQ ID NO: 37292 - DNA, 842 bp, Oryza sativa
  unsure (1)..(842): unsure at all n locations
ttgggcccttatccatgcactgtgtttcgcccgatgatccctcactctgatgacacctaaggttgaaacctgttcttatgtccctttacgccgtctggacaaggcctccgaggaacctaagggatcttcggctggaaatgcccagaaccgataaggccttgtcagatcctgtagagacgaaagaccatataagatctggtcgtgtaagagttctcgccgtgcgtattaaccaagctgtgaaatcggaaatcaactttccaacttcacggctgggggctaggatcagagcttattcaaccaagccaggtcaaaggtccaagagccttatcctccgagaaaattcctctgacgacaaggttgggggatagggagagtgtaccactcaaacggctgactaaagtcgttaactgagaacgcactcttacacatgacatcaagagtaagagacatttgtcaaagatagatttctttattcacaaatactccttacagttttttcacaaatctttcgctacattacatcttttcctaagatatttgtcacagggtacgagtactaccaagagggccaacaccagtccatagactggaagatcttctcggccaacggcgacattgaccttgcaagatggtctatctctgccggagtctccgagaacagagcaaatccctcccgaagatattctaggtctaggtncgggtnntnnggtcgtgcagaaggaatcaccagtnnnnnnnnngngggggaaaaaaaaattaaaataaaataaaacacaantacaaataccagaggaatnaacaaataaaggacgatgaacagaaggacaatagagggaggagga

SEQ ID NO: 37293 - DNA, 838 bp, Oryza sativa
  unsure (1)..(838): unsure at all n locations
ctcttgctcttttacacttttatcttgatgttggtttgagtccccgtctctattttcatgtctatactattgctctatattcgttattgtatttatgttataaatatttaaataataaatggtatagttgttgacnactctgcaanacnncanncaaaangagaaccacanaagcggaaaggggggcncaaaaccagggaccnganagncngaananaacaccgacccggaacaagggacaaacacganaggggcacccaagaacaaacggggcggagggagccnaggcacagaagcaacggcagggagcanagggagaaacacagccaagcaacgctccggaccccccggcacgacgcataacagcgacatagaagcaatctcaaacaggcatttgttcccttttatgtcgaacgttgaattgtgagacgtagggcatgtgtaaatttttcacctaatcgtaaacattcagcgcgggttgtcagtgacattataggaaagtgtatagacatgggaatggtgaagccctgcatactttccttgaacaaggcattctactaatcatgtaccacacatctgacttaatatctttgtatgataggaatttggtacattaccaaaaatggatgtcgatgtaccccttacttcccttcatatacgacgtactttgctggatgtgcccaaaaagatagacattctaattgtgattatggcagatgatagaagttatgatggtatggaagttagttgtgtcaggttcactgttgattttcttttttgacagttgcatatgatatattgcaggggaaattgaagagatgtgtgagagccttataac

SEQ ID NO: 37294 - DNA, 1086 bp, Oryza sativa
atactatgtttagtactccctccatttactttggatagtaatattttatcttggcacacagaccaagaataagcaattctacttatcatccatttaaatataccactagtcattcctcgtaaacaagcgattcgttaatatttacatttctcgatgcccatgtaaccaatcttgtgtggaagaatggagagtcacgcattaaatttgagaaagtcattaagatgataggttgttggattgaaatatgcctatcaaaaataaatttttcagatttagaaatatgactatcaaagatagatggagagagtaatatttgtcactaaagttgctctatgtactgtaagagaagaaaaggaacaaatttgagtgtgatatgctcatatgttagatttgtccttttcaaaatataatatatatatatatatatatatatatccctccatcccaaaatatatttatcttttgattgtttttgtttattccaaaataaccgcatcttttaaacaatcattgcatcgggttttatgaaagtaagagataaatatattataccaatcctaacccaagacactagacatagttttcataaactccacatcatcaagaaactagtattagacactactctttcaatacaaacaccattgtttcatacttaaattctatactacttatctcatatgatatcttaaatgttgtgtgaaaccatgtctcatgcaagtcctggtttcttctctttccttatttattcacttggcacatcatctttcattctaagtggtaaattatttaatgctatcgacacatcctagttattgggttgggactggccttaggactagatagtgggagacaattgtattgatatttgaaaaaagtaaaaggtattttagttttttatttggtatgtgtagaagagatgataagagggagtaagtgtgagtcatgtttatgttttttttatgacacatattgtattaaactattaatgctgtcaagtgctataaacaattttcatagcaattgcatgatatttgacgaaacgagggtcgagggatatacccccctcgagtctcatggactgga

SEQ ID NO: 37295 - DNA, 752 bp, Oryza sativa
  unsure (1)..(752): unsure at all n locations
catgccaaggtgcgtcccgttccgtcccctttagctgaccttgatgaacctgatgtgggtatcgccggaacagagcccggatccccaccgtacctttcatggcatcgctttttggggtaaggacgggacatttccggcgtacacacctgcgcggctggtgggagccgtcggcatcggctgccgtccgtcccctggccggctctcggcaaaccggacgacccgagaagcgcgcagcccgtagctatcggcctatcgcgcgcggcgcactaggcaggcatcctagtttcaccgggttgcgctgtggtatgggcggtgacacccgtcgagctcccgacccatgcgagctcgcggcgcgcgctaaaaaaacgaagcgacgacgccgcgtcgctttcgggtatcggcacggaagcggcacgcgcgcgaccgcatcctcgtgaagattggtggcaacgggtttgaccgatcgggagctaagccggcgctcttccgctcttggacggctgggagaagttttatgggtgggtcagctcctggaacccggaagaagtggacggaatttggaatcggggatctttccgccatgtgcgtgtccagtcgccaccgaagaaaaaatagacgcgccgttttatccattgctttttctaaacgtgactgaaaggaggcaaaaaaaaaacaaattcttgatttatttctgtgtatttattggaggatgatgaggtngtgtnccagtgagtgagtcntaccttggacgg

SEQ ID NO: 37296 - DNA, 731 bp, Oryza sativa
  unsure (1)..(731): unsure at all n locations
gtgagtaaaagcatangagctgctactgcaagtagttcatcattatccatctataatctatcttgctatatcgaacgcctatatgtatacaacatgaatatgtcacgaggctgcatcgatatccgaattagctttagctggtgattatgataaatcgattaataagaaatacgagatcagagcgcatggaggaattaaacctagttaatttaccagggaccaggaggagtgctccgggaggcgacagcaggctgtagggctgcgtgcggcgcgtatccaaccgatgctcctgaagggttttcgacttgtgttgatgtatggaatggaatcgactgcaacggaatatggtaaggagtattagcccacatactctaaaaaaggtaatagcccaaacggcgacaagtttttgggccaaaaagttcatgtttggcccaaactttgattacctcatgggctcaaattcagcttaaaccaagtcaggccgatccacttggaattttgagctggtgttaattaaaccattaattcctctttgcagaacaactgcgcctcacctaagcccaagaaaataagaacggcatctgctgctcggatgactgttggctgcttcgatacaggagtactttttttatctgcacaagttagaagtagaactgtcagatattgcaagacttgaaatttgaagccatgttctgtcacttatcgttttctttccttaagctgaacaaatt

SEQ ID NO: 37297 - DNA, 778 bp, Oryza sativa
  unsure (1)..(778): unsure at all n locations
gtgtgcaaatcgataacagatggcacagnagctcatcatttttgtcattatacagaaatatgagtatataccccggtctggcctaactagcccgacggtggggtagaggtgcgatcacactggactcccaccaatatgtctgagagtaagggatgtttggttggttgtgtttctttgccaagctacaatttagtcatgtcacaacttcctaggcatgtgtttgtttcgccgtcacaactatatcatgccacactttcttaacctttggccgacttttttttaagataatagaagctttattaagactcaatcaattacaccaagatggtacaatccaactgagccaacccccggcctttgtataaaatgcacacatctaaaaaggaaccataaaagaaaaaacctcatctcaagcacaggagtgtgaaggaaacataaaattagtggttatcaatccatagactagaccaccacccatgcacctagataaaaaaattactgcgccacctggtccaaacatcatgataccactgcaatagtatcccggtttgtggagtatattccaggtgtgtagccaccgagtaactaaagtaataacctgcaaaggagaagacaccattttgtatcaaacaacaactcattcctgcttagccaaaatggaccaacaaagagctactgcgcccatcaaaagatgattttttatgtctttaggaacacgtaaaagccaaagcccaaacatataagttacatttcgaggagattttaaatttgaagccct

SEQ ID NO: 37298 - DNA, 1513 bp, Oryza sativa
aggccttcttacaacacattcttgcttgtaatggttagaataagcctggcatatatcgaccggggctaatggtcaatctatggaatgtagcacgataactccagctggtgagaggtgccaaggagctcttgtcttgacggaatgggcaaggtgtgagtcagaccgcctgtcgccactaaaccgcgatctgaccggtctgtgactggtcccagaccggataatcgagtgcattgcactgtatttcgtgcggcgtgacacgtttagccgaaccgcaataaatgcggttaggtgagccatgctgtgctcacctaacccatacacgcggagtagaacccgcgaggggtcggggcgcctcggccctcgggggcgaggcaggagtggtccgacccccccccctcggggagaccaagaggtgggcgcacacatcaccctcgggcccgacgtcccccgagggtgccaggccacgtgggcgattgtgtctgcctcaagcctctaatcatgatactcccggtcccatgtcaccgacagacaggattggctacatgcaggtcgtagaatgccacaaaaggtgctagtaagccacaagggaggtttgctttatatggatgttaaattgttgaatatttaattaaaagccggtatgatgaagagtagttgttttcttaagtataaaatcatgacagtacatagtttgaatatgttctaattgacttctggatttgattctttatctcacgatatgaagatagtaatagtatgaactcgatgcttttgattccaagaggatatatagtatccgaatttcaaatcaactctgaaaatgggggacccctctctgtcggtgacccctctgcaagcgaaaataggcgactccttcattcctctttagccgaccactttgctccatcaattctagtaactcatgctgccggcgacgggggagaggggggggtctaggttgttaggcttttctgtaatagggttttttcctttatatttttgttttcttttagtgcttttgtgtagtgcgagagttcaccggcatcgcatttctcttgtccctgtagctttctatttattcctgccaaaagtccatccatggatggtatttgggtttgccatggacacccccaacgaattttttttatttataattttttttattaaaagttttacaaaaataattttccattttgaaaattaacggaaatagtcgcctaccgccctctgggagggcgatatccatcgtttcattctgatatgtggtcacataattaaaaagtgcgttttctttttttccccgagcaacagggtaaaccgccatcctagcaatatttctctttgtcgccatcaatacagccattcacaggataaggcccctttaatggtgatatctcaattaaaccctgcccagttttattccttatgatatctgcccacgcacaaatgggtggtaaccaccacgcgggaatctaatttttctcccccggtgtcccccagaggaattctctcg

SEQ ID NO: 37299 - DNA, 698 bp, Oryza sativa
attcctgcagccccgagccgctggaggctgccctcgcacgccgcccgcacgtacgccgggtccccgcggatccccaccttaccgtcggcgagaaatttaccgaacttggtggccagtgcaacattgtcgcgcacactgccgacctgtagcgcctgccttttttccaacccatatgcaaacaagcattccgtcatattttaatatatgacgctgttgactttttatcaacatttgatcattcattttattcaaatttttatgtaaatataaaaatatttatgtaatgcttaaagaacatttgatgataaatcaagtcaaaataaaataaataataatcacataaatttttttaaataaaatgaatagttaaattttggttaaaatgtcaacaacgtcataatacataaaaatatggaggggaagtaacatttaatatattctgataatatatttgttttgtgttaagaaatattactacatttatctgtagacttaatttaactttaaaattataagaaaacgaatcaaaatcgatttattgtattaaactgaagcaatacaatattcttagttcttacacaagtactcctccccgttttttttgacaaattgacccttttcaaaaacttatttcgaaactaacccctgtaaaaacttcaaccaaaaataggccgtcgactcagcgccaagcgcattgg

SEQ ID NO: 37300 - DNA, 685 bp, Oryza sativa
gtactgtgtagtgtaatatagtgtgtcatttgtcattgttagagagcttcatagtatgcatccatacagctgtacacttggttgccttggtatgcatataccataactgcatttggttaatcattctaggttgcagaggttgttcacactttacacatgcttgtctgtagctactaattatttgtagggatgcaacttctcaaagctaatatatctaatgccaggaaaaccttgagaacttaataaatccaactgttatgttgaataatctaaaataccatgtttgcgacaaagatatgcggtttgctaaaaactagtctaaattggtaaagctccaagcctccagccaaatcgccaattctgtattaactgaagatacctgccagtctacttcatcctccagaaccagcaaacaagtaatctcaccccatgatggcaagtaatcttgaaaagatgcaatttatgccattcgtttcaacatggtggtagatcttaaggtattcttctggattatagccattgttaatgtgacatcctggcccaattaggatttggcctgtgtgccctataagagctgtgtttgcatgtttagtaccacattgctaatttagcaaggtggaaccaatttataagggtttgtccctccaaccacatcactcttgggttaacccatttacacgaagtg

SEQ ID NO: 37301 - DNA, 522 bp, Oryza sativa
tttttacaacttgtagaagttgaatttaaactttgatatatttcatattagtctatgttgccaatttttttttcatattttttgatgactatttaggtgatatgcacgaaacgagaggatatcgggatgatttcactttcccctgaaaccgaagcattaaaatccacatcttgcagtatatatatatgattcaaaccaaagaaaagtgtactcagcttcagctatgtgtaagactggaggatagtgattattggttgagtagtggagttaagtggaaaaattgaatggtggggggttgtgattggttagggattagtggagaagttgttatattttgggacaaatcttgagagctaaaagttgttatattttgggacggagggagtacttgcgtttttttatttcagaaacaaatacaccatgttttgaaagctatatatatttctcaataaggaccggatttgaaaatggcaagaaaaaggataattaattcaaatgctatcgacatagttaaagctctat

SEQ ID NO: 37302 - DNA, 560 bp, Oryza sativa
aaaaaacttggtcccaggtatttgaacttcgtagtccaggggttaccaaccgggactaaagatcgatctttagtgtcaagtatttaaaccttcgtagtctcgattggaaaaccgggactacagggggttaccaactgggaatacaaagcatttctccaccagtgtatgagaatgatcttttcttccgtggaattgctgtatatctgtcgacagatttcgatttcttcaccgtcaaaatgttctgaacactaaaattaatatatcttcctggcccatgcacatggataggatgtaaaagcacaaaaaaatgagtttgaaaagaaagtataatatatactcgctccacttttttaatgttggaccttaatttgtatatatatttaaccatttatctttttagaaactcacataattattatttattttgatatgatctagtttatttttaaaggtgctttaagcttggctttacaatttttacgtaattgtataaaagttttaaataaaatagcagttaaatgaatgaacaacagtcaaactgaagggagtatatcacagtc

SEQ ID NO: 37303 - DNA, 599 bp, Oryza sativa
attccatatctcaaacgggcctcaagttgtggcccgtcacaaatgaccatcatctgtgacgtgcaccaacttgaggcccgtttgagataacaattaggcccgtcacagatgactcatcagtgacgggctatatacttaatctctatcgggcattaactaaagcccgtcaccgaagactatttttccatttttcatatgaaatgtttatatttataagttgactatagcaaaaataattttacaggtagtaaatgatttcaaatggaaaaaatgtcaacaacaaagttgtataacttatcaatatttacaacttttagtttggtcatttttcaatataacatttttttgagcagtttgaatttgaatttaaaaatatgacaacttcaaacaacattttcaaatactaaatgatttcaattgaaaaagtcatcaacaacaaagttgaataactcatcaagatctaaaacttttattttttttatttcttcatctgacgaaatgttagtaatattattcacaaattttacatatatgtgttatagtttataaaaccagataagagatatgtcaattttgtgaacaatgttactatcactttg

SEQ ID NO: 37304 - DNA, 558 bp, Oryza sativa
atcagctgagtgtttgcgccagtcgggattcaattatcacatctactttggtattctttatgagggataattacgcttgatctacatcatgcatgatattcatcacttggagtcatattaattggtgtgttctatacgtcatattttaagggtatcggtatacataatttaggtctaggcctaatacgtctgcagctcatattttcaggtgtggcctgtcacgttcttttagggacttaggcatttttttttgcttaggcaaaggtgcgggagattaagtgcccaataccttaaaatccttttataccgcagttactcaactttttaggagttggtacaatgcattttaaaaggtgtcgaacagtgaagctttatatagctgccccgttgactttttattagtcaaggcactgtttggttttataaagcaattgattggatacaatatcggtgttttttttgccatgtaagtgtgcatttttattgaccaatattatggcttaagctgattatatattatggtacgtcattttccaggcggttggtaaatcctttatg

SEQ ID NO: 37305 - DNA, 504 bp, Oryza sativa
gctgatggatggtcggatggaaccgagatggcgagatcgcacggtgcatgcatacgctggtactgtgaccctgcagcaaaggatagctgcgctgtggttcactggtagtgggttatgaaaactaaggatttaatatgatatcttgtgcgtacaaaccggatttcagaacgtttacctggtagttgtctggcgatcgcatggtattgtccaatgttagtcgcatagatttcggccgtttcgtcgatctgcggttcttcgaagacgttgctgaggtcctatcagtgcgagagcaaggcaagtcatgcattacaaatgatcatgatgtactcaatttacaaatgttccgttttctattaaatgttatattattttacaatatcatatgggatgggtcctattactcagccatatgttgttcaccttatgccattgataatttgggtattaatcggataagatgttggtttagaaaatgcttagccatgcttagatccactagctcac

SEQ ID NO: 37306 - DNA, 524 bp, Oryza sativa
gatcgaaattcagttgaaatttatcgaaaaccgatcaaaatttatcaaaaatcgtcgatattgatggggctcaaaatttagtggtaaactggtgatgtaaaccgtggtctgaactcgtggttgtttcagtatcactcacgcaactggacgccctgaaactgaaactgaaacttaagaagacttattcagtcgcttcgctttgtggatgatcattttgatagctgccgctagctagcgagtctcttacaaaaagatttactgatggtgttgattggccggccgttgggcgaattcgtcatgtgcctcgcgggggcagcatcattggagctgaattataactagtctccacggcgtgaagctcaaaagagatactaccatgtagctgcatcatcatttttcacggtgcgtgctgatcttcatttgcccaacggttagcttacagatgatcaatactacaattaacttcccagattgaggtacagtgcagaattcacgacacgatcaggcttgaaactcagtgatat

SEQ ID NO: 37307 - DNA, 550 bp, Oryza sativa
aatatcatgtacaaagagatattggcctgattttttccctatataattgtacgatgtgaccatatgcctatggttagtgcaggatgccacaaaacaatgcaccatgaaaggtcaacctataaaaaaatcagtgtgctacttgtccgcttgcacatgttctatttgtgcatgcacaggaataattagttactgctttggtgtacataagatgattgttttttgctacctccttcagtgttcctaattggcttcatggcgatacaaatgagaagaataaagtgttgattcaagctggaagataatttattatttcatagataatattgatgtttagtacaaaaggcacacaattcaacttgatcgcaaccgcttgctgcagtatgatgccatgattgcttacattacgaggcctatgtatggactgtcaggttcatggtcttcaatcagtgatatatttgttgaactgcatgtgtaacacctagcttttataggttccatggctttgcatatgcttttgtagcatttatgggatgatgagggccttcatttg

SEQ ID NO: 37308 - DNA, 1049 bp, Oryza sativa
ctgccgaagataattaaaaagctggccttattggtattttccctcagcagaatattatcatttggactgtaatgttcgtcttagtggctaatgtggagaatatggtaaccgggtacccacatggcctccatctatagtacagatctatggatctgcggccccgtctaatatgcttacaaatagcggccggtcccaaggaagtcttctaattcgggccgacaagtgcgtcaccgattcagggccgatcagatatctcaaacgggcctcaagttgtgggcccgtcacaaatgaccatcatctgtgacgtgcaccaacttgaggcccgtttgagataacaattaggcccgtcacagatgactcatcagtgacgggctatatacttaatctctatcgggcattaactaaagcccgtcaccgaagactatttttccatttttcatatgaaatgtttatatttataagttgactatagcaaaaataattttacaggtagtaaatgatttcaaatggaaaaaatgtcaacaacaaagttgtataacttatcaatatttacaacttttagtttggtcatttttcaatataacatttttttgagcagtttgaatttgaatttaaaaatatgacaacttcaaacaacattttcaaatactaaatgatttcaattgaaaaagtcatcaacaacaaagttgaataactcatcaagatctaaaacttttatttttatggttttagtttgtaattaattaaccaatcacgattagccattgttagctaccagatgaatttctcttgactttccagttattaaacaagtgttatttttaaacttggctctattgttttcaaccgtacttaagacatgatattaaatatctacttgaaccatatattaagtccaagcttgtcaaattgtacaccattggaaaataaaataattttcgccataattctcggttgaggacttgatctctattcaattcgaaacagatggcaattttaattaatatacgtttcaaatttcgtaaaacgctaaagaaattgtttttgcg

SEQ ID NO: 37309 - DNA, 572 bp, Oryza sativa
gaaataccatcagaggagggttatctggagcaagtgcctccgcaacaaattgtggccccaaagatgaaccaccaattcctatagaaagtatttgagtaaatcggccagcaggggaagatggaggtcttatctgcattaagtaaaccatcacaaaagtagcatgataagttgacacaagacataaaacgtacctacaaaagatgcaatgtgctaatgatacaatattgtattgttacgacaagtaatacaccactaagttgtttggatgctctgttatcccacatagaaccagaacttaacaccactaaggccctgctcttttcagccacttcactggattattgtcacggaaattgtttcttctactgcattgtttagttctcttgttgtaaggtaaattcatcaagtttatttattagaatacttaatttatatccataatcgtgtatataatccactacaataatccggccaataatctgttgactacaatgctaacaggtcaaattattaaattaattaatattaaccccgagaagcagcctatccctatgacctattccatgccttat

SEQ ID NO: 37310 - DNA, 637 bp, Oryza sativa
atgtccgttcgcaatcatgtcgggtgatcaagccgacgacgttagcgaggaattatccgttaacaaccttttctcgagtagtccagccatggctggtgctatgagataggtcgtcggtctttgttggtaggttgggtgcgataactccgcatttgtcgagaatattctcgataatggagtgtactcgaccacaacctactcgagtgctcaattgttcctgaaaaatattttttagaaagcaagatatatagcagatgatatcgagtatgtactcaaaaactgcgtggatcttctagtattatcaggagcatccagtttaatttgtctggcgagatcaaactatcaagcaacagatccattcccaagaatcggcgtcttttctcatcaacatcaaaactcctggcgatatccaatttttagcgtgtttgcttgaatcggagtcgacgtggaatcagccgacccaattgattgagcaattatcttgaagtgttgcactgtcccgtatgcatgtatggctcgtgcatgtacatgtatgcatactcgccaagaagtcatcaccgagcaacaggagcgctcaaacaaatatgcatgcattggttgatatgctacaagagttataatataatcctgcaacgat

SEQ ID NO: 37311 - DNA, 972 bp, Oryza sativa
ttttactctggccagaggtgtaccactgtactcacaagacacaacctcaacatcatgtcaaccatgcgtcgcgatacttaacaagtacccgaatagagattgtgacaataccctttgcataacacaattcaaagtagtgcaccgttcttggatcataatcactcccttataaacaaggcatggactccccagtgacccccgtgggcttatctccgccacttcacaatctggtgctccacaatgaaccatactatacaaaaagtaaagccgttgtccacgttggcttgtggttggcaccgttaatgtttaacaactgaaaatcgtgaaccggtccttaattgtcatgagcacgaccatcaaaatcatgcgctcacaacccaccagtatcaagttttagttggcaaattagttaattaaccaatcacgattaaccatcgtgagctatcattaagccatcattaaataatagtgaatcataagttatcccatttatatgagctaatgtctctaagcatggctaagcatcctaaacacttttagctaaaaccatataatgttctagctaatccaattattaatcaaacgacaaagtatagataatcaatatcaaagggctataacaaaggcaataggttattcccacccaatgacattcgaaaataaatgcagtagttgaatagaaacaatagttttaaacgaaatcaacatgctcaaaggattgtttgggatctgtgtgacttgccttgctagccatggaactcttcaaagtcttctcccgcaaaatcggacactccgggaacgtcggaatctaagcataaaagagcaaaatcaccaaaacagcacataaacaatcatgaatagtacatttggatatttttaacatgtagatctcaattttagaaaaaattagagacttaaaccaactaaatccgagttaagatgaattagttatgaatttttaaagattaaatc

SEQ ID NO: 37312 - DNA, 544 bp, Oryza sativa
gaaaaagtgaaaaaaacacaaatatacatattttttcaataatttacgtttatatacctgcacgagatttgcaaaaatatacccgcttcgaggaacggaaacgtgggaccgcgatggtcccgcagttctaaaacacgggaccgatgtcccacggaacggtcgcgcgggaccgcgatggtcccaaaacgcgggagcgaactggccagcgatttatttactgagtcggcactgtttgacaatgtttcgggtactgtttgccactttacatcactgtttagacctgtttatggccagttccgcacattgaacctgcggtaccgccttacaaaactgtgtcaaacagggctacacagtgtccatagtgctaaacaacgttaaaaatcactggctgcctcgctcccgaattttgaacttgcgggaccgtcgaggtcccgcgcaaccgttttgtaggatcgtcggtcatgcgttttggagcggtcacgcgttttagagctgcgggaccatcacaggcccgcgtttccgtcccgatatttttgcaaatcgt

SEQ ID NO: 37313 - DNA, 5065 bp, Oryza sativa
gtcttctgtatgggcgggcatcttaagtgatacacctgggaaaaaccatctctattccaactccttttatattctccactcccatctctctctttctcccactcctacctaccctggccactccccctctctgccccactcctcactccggccacctcctctccctacctaccgcaacagggcatcttaagtgatacacctggaaaaaaccatctctattccaactccttttatattctccactcccatctctctctttctcccactcctacctaccctggccactccccctctctcccccactcctcactccggccacctcctctccctacctcccgcaacaacaggtgtggtcgacggcggtgcccccctccgctctcccttgcgcggagttgatggcgtgctcgagtgggaggtagcgggcgcggcagatggcattgtggtggcaggcacgggctccggcgacaggtgcagatggcggcggcggcgcagatccggcctccacgcgcgcagatccactaccgtcgacgacgacggtggtggccgactagggttaggattagggtcaggttttgatttttagattaatatttgtgattttccattttcacatgagaatggcttaaatgcccgcatgcgggtgagccatatggaaaaattgctatttcacggaccatttcggacagacggctggtcgaaccgcaattgattttgacagtttgaaaaaaatccctttttagtagtgcatgcttaaagtactttaactaataaaataacttacaacaaaataaattattattacgtaaatttttgaataaaacgaataataaacatataaaaagggtcgatggcatcatctatttaaaaaacgaatgtaaaaaacgaatgtagtatatataatctgacacacgaacagcccaagacagatatatacccaatagattcaacgagataattattatcagtgggtgtggttcgagaaatgacactaataaattttctttgtgccgcaatctttaatgcgttaacagtccgagaaaaaaaatgtacgagacgaatagcatatatatacttcctccgtccgtacatagtataagggattttgagtttttttttattgtttcatcactagtcttatttaaaaaatttgtacaaatataaaaaacgaaaagttatgcttaaattactttagataataaagtaagtaaaaaaataaataataattctaaaactttttaaataagacgagtgattaaatagtataaaaaacataaaatattttatattatgagacggagaaagtatatgacaaggtaccacgctatcgctacctactatatatacccagcatgaaaatgtcgtgagtctctctctctctctattggaatctttctactactggtagataaacaagtctttaatacgctggccttctactgatcaagaacaaatgaatcagaatgggacaaggttgccagaaataaaaataagcagattagcagatggtacacatccatatgtaggatggctgctttttcatcacaaacacgactcatgcattctaacatagagaaaccaaaaaattcaaaccacgtgaattccaggccaaaggaacgtacgtatacctgactaacctgcattatattatcctacaagtcattttttgctgaccttaaatattgttttgatcgaagaatagtttcatttatctatatatatttttagtactcctttcgaatgtcgatctaaaaaaaaatgtgcgtgtattgattagtacttgtagtacttatactccctctgtcacaacaatatctaactctgaagaggaacacatgttcagatcattcatctatggaattggattttttttttacacagggaagaagtacatggagtcttaatcctgagtgagcatagggaagtctaatactaattgaacgctactggaatgaacgtcagaacggggcagttgggatagggagatgagggaattcggcagatgaatccacgagtggtatactgttgatcgacgtcagcaagcaccggaatttctgcctgcagggccattctcctccacacaagaccatcatatgtaaatggtctcgaatggaccggcagcagttagcgtgcagctcttggtctctcaaccatcgtactactccctccgttttataatgtaaaaggatcttaagtttgcttatagtgtttgaacattcgtcttattcaaaaaaattttagaattattatttacttttttatgacttactttattatccaaagtactttacgcataacttttcgttttttatatttgcataaactttttgaataaaacgagtggtcaaacactataggcaaaaactcaaaatcccttatattaaggacggagggagctaataactaattagcactgtacttgttttggaagactcagcgtacgtgcttcatgtttatcatctgccagaatctagcggcatctttttccttgcttaccacgagcacgtactgtacgttttattttttaaaaaatcatgtagaagtccttttcaaaatcaaatgaactaatttttaaaatttctaacagttaatatttaattaatcatgcactactagcttccctcttgtttaatttcatttggcaccgacttatcaaatcctacggctctatcaaactaagggtatcaacaatgtattatttaccaactactccctccgtccaaaaaaaacgaatctataattagatgtgacacatctcagtacaacaccctcattttacataccttcagtacaaatctggacagaacaatacatcccttataccaaataataaatattgtagtacataccttctaaaataagttcattttacacattccacctaccaatgtataaccaacacaactagaatacccttactttcttaaaacccaatgccattattccttactaagagtaacaatgcttttttattccttcctatgaggttgtagtgctattactacctgatattagttgcttagtaccttcacaatgtttactaattggtactataagagatgtatttatcgcttactatacccttgtcccaaatatgtatttatcccacggtaccaatacaagaccaaaacgaccataataccgttacttgctgagatgatcaatgtttttttattccttgctagcaggttgtaatgcaattgtcacatatttgtagcttactacctccaaaatgtttactattcggtataagtgttgtatttggtgcttactacaccctcatcccaaaataagttcatgtttcacacatctcacaccaatacaaaacaaaaagaccacaatacaatagttttctcaaatgacaatgaaattcttgctaaaagaattaatgtttttttattccctactagcaggttgtagtcctattgctctatatgtgttgcttagtacctccgtatgtttactatttggtataagggatatatttattgcttattacaccccgctcgtaaaataagtttatttctcacacatcccacacatagcaaccactatctatttaatttatttatctattttttcttctcaaccaatcacaaacttcatccaattatttttgttacttctttaatatccatgcccacctaatatttgaacggagaaagtatctattttgtgacaaagacagtatccttttcaagagttcattctggaagccctatgccttatcctatataaagcagctagctagctagctaaagcaaccatcagactaccacactacaatagtatcagtgaactgctagctgttgccctcccaagggaaatatactagtatgtctacttccatccctctccctttcttcttctctcatggtgttgtgcatgctaggacaggccatcctccaatctggccgccggttgggctcctttctgctggtgccccggcaaaagtctccttccgacgacaaagcaatgcgcatcgacatgctgcacaagttgtgtccacacaatcaatcactcctgcgaaggaggtgtctagctttgagccctctgtgtggggggacttctttatcaactatgacacaaagccactacaggtatacattttttttttcattttcatattgtgtacattttgctctacagcaaaactgtacaactgttctgtagaagaatatcatctggttttctagtcaacataaacatataacctgatctaacaagcatatcaaaagattgctgacaggcctgaaacaaatttcaccaccatgttatcacgtacaaaacccttaggaattaatatatctgttcttgtttacttgtcaccttaaccaccttttgaagtttggaaatatttatcgatcactacacggttacgaaggtgataattctcattttgcatatgttacccatatgcatgtagaagagattacatatcccaccaacatatgggtattttggttgtttcattaaaaaaagttgattacatgggtatgtgtgcatggtcaatagtgagcaataaacaaaaatggtgggactaataccggcacatgtttaacgtcaaacacgctccggctgcctaggccacgcaggcaacttgtttacgaagatccgaattttcccagataggcatcaaaaccacacacaaaaaactggttttcactggctgacacgttaagatgctcgagtgcataagatttttgctcaaaaaacaaaaaaaaatccaaaataataaaattctagaaaccctatcttgatatccaatacaagcatcatcgcaatcaatatgagatgacataattaaggaataaggacggaatgatgcgacataaagagtgactagaggtcgggcagattgatgggcgtatttattttggcttcgccttttcacacgtggtcctattatgaggccaactaggattgtttttatagacaattttgggtattttctatgaaaaatacgattttatcgaccgggtctttaagacgggcacctaaaagaataatcctatttttagacgcgcctcctaggaagcttgcctatgaaaattgactctcacagtag

SEQ ID NO: 37314 - DNA, 650 bp, Oryza sativa
aaagttctatgagatccttacaatatttcctcaaatatggcctagtcaatttttttttatatttcctttattatgaacattcacaaatgtcaagttgcataacacatcaaaacatacagtgggaacttgacataagtgaacaatgatattaccaaaatatggaccttacaaatttaatgaaaaaattgttgggatcatatataactttagttcacctcaatcgcacttcaaatgaacactacataaatctttaaggttttaatatgtgttacaagtttaagagagtttaaattagaagatcaacgtctatttcatagtaattaacaaagtgcttcatatgtaagatggtaataagtaagatacacgtgaagggagagatcccggatttgaatcctacatactagatgcatattttgtgtgaaaaaattgcgaacttgtgacaattaaaatatgaaatactttttgcgcctacaataattaaagacttgaaagtcgaacttaaaatacaaaaaaatagatttgttaacatgcagttgtgcaatccactaacacaaaactgtcgatttctataggccctatgtaacatttgggttggctaaacacttcccaaaatgggggtacccaatatattggaactgcctataaaagta

SEQ ID NO: 37315 - DNA, 647 bp, Oryza sativa
aaagaatggaggaagagcaaaatattttgcgcaaatacacaaaattgttaaattcacatcaagtaattttaagctcgatttttttaggccagattaaacctccagttatctaatctagttcagctaatttatttttgtgcggatcaataagaactagttataaaacttcataaatgcactagtaaaaattattttctactaatacaaaccgcgtcgttgccgactcggtcctgagagaccggataaaatccaaaagtaacatattgttttcttaaaatagtagttagttaatttatcttagcacgaccgaaaaatcacgtgttttttcattgtagacccggtctagaaagactggatgaaatccagacgtaacatattgctgtcttaataaaaaagtagttagttaatttatcctagtacgaaaaaaaaccactttattttacattgttgactcggcccagaacatatttttgtcttaaaatagtagttattcaatttatcttagcacgaccgaaaaaacgtttttttttgtcaatctggtccggacagaccggatgaaatcaagacgtaacaattttttgtcctaaaataatcattatttaatttatcttagcacgacaaaaaaagcatgcgttttttcgtcatcg

SEQ ID NO: 37316 - DNA, 613 bp, Oryza sativa
ctgctagctagattgatatggcagataattccatttaagctattgggctaaagaatatatgaatttcataaatagtatagaacattaaagcatgataatagcagccatatgattaatcagttatttatatccttggaattgttagactgacagttacttacatgtattcaatattatgctgtttgtagtatcctcatgaaccacaactttttaagcatatagcaggatcttattgatcagcttacaatattgtgtgtctcctataccttgatatatttttaccataatctgtagtattctcaaggcaagtaaagaggagaaaatagatagagataaaaatgcattgaaaagggataagatatctgcattcattgtctcatctagcttggaatattgctgccggaggacatgtagtaccataactttgaacttatagtggtgaataaaagattcttggtgatgtgaattggcatgtacgtgtattgggtatataacttacaggattgaagtttgcttaaaatttgatgctgaattgttgtgcatgcctatctgtagccttatcacttatgttcaggtaaaaaaaaaaagtcatttgcaaattttgttgaaaaag

SEQ ID NO: 37317 - DNA, 777 bp, Oryza sativa
acgatgctgatggcggctgcgatgaagatgacgagtgaccgcctccatcgacggcgccaccaacttctacgcccacaaacctaggatccgcccacgtcgtcttccaacgcccacccaacagccgctgctggatccggcctccacggggttatggtatgtggatccggctaccgccgcctccatcccccaaccgccggtgtccacgccctctccccccgaccaccggcgtcctccaccgtctccttcacccacgagcgccaccgtcatttctgactcttgtaggttgtgcttgatttttcttatcttgcaaatgttcattgccaaattttagattgggccatattctgtgttgtttgtgtggatatctagtttgttaagatgcagatcattactagtgtgatgtatattgtaactcaagttgtgtgatgtatattgtttctctgatgttatcagatctgccaatgaaatgcaaagttattgtcttgcatcttgagatgaatcttgcatcttttgcttcatgtcgtgagctgagggctgagggcttttgaattttttttggatgaattttcacacctgtgacgggtgataaattagacctgtcagaggtgtatgtcacctttgatgggctagaaagagtcacccattacaagtgattctctcctgtgacgggctatttctatgcggcccgtcaaaggagttaatcaccactgacggcttttcacccatcacaggtgaggtgcacacatcagtgaccactaatctctgacaagggctaaa

SEQ ID NO: 37318 - DNA, 548 bp, Oryza sativa
tgttggcgcgtccgttcccggtgattgggacgccgttcaagggggaaaatgggggaaatcaaagaggaatcaatggagattaattccccctatttaatttggaaaaagccggcttgaatggggtggatttggaggaggaacaacgctagggttcacgggagagagagagaggaaggaggccggcggctggaggtcggggacgcgcctggcaggcgggacccatgcgagaggcgcgcagtcaacgcgcggcaacggcgcgcacgcgcgcgcacatgcgcggcacgggtgggaggcgcggctcggcttgggccgggcaaagccgaggcggcccaggaggagaagaggagggagctgggccgaagggaggggaggagggaggggcggcccgggagaaacagggaaaacagagggaggattgaaggactttgggctggactcggcccaaaggagggaggaggattatttttagtttttctttttagttaattgttgttgttgcttaatatataattccggtgctctgaaaattcaagtaaaatttgagagct

SEQ ID NO: 37319 - DNA, 735 bp, Oryza sativa
  unsure (1)..(735): unsure at all n locations
ctgcgccaaagtaagacantcgntcgnacccnncaatactngatttaaatttgaattcaaatttaaatatattttatataaaatatttatatacacatagtttatatgaacaaagttagcaatgtatatatgtgtgtgtgtgtgtatatatatatatatatatatatatatatatatatatatatatatatatatatatatatatatatatatataaagtctatgtacatgaatagtttttagtgtaatatattttttatttttttcacacttatttttaaattgattttaaatttacgaagaacccacgactaattgcgtaacgcagcgttgcttttttttacacgaagaaacagcgtgcgggcgtgatttctgatcgctggcctccggcgccagcgatcggtcgcgcagcagccacccctgtagcggagcccactggatgtgtttaaaattttcacgggggaagggagggaggtacccccccccctcatctgttctacaatcacactcccccatcctcatcgataaagagcccttccaagcattccctccgctctcaaacctattagaacgccctctatagggcacgtataccctcacctaactcctgaatccattctgacctatacgtattcttacttataaacatcctactgcccaggataacagctattacgctttatgagctatctgttttccccactccacccgaatcacattcaaattcctcacaac

SEQ ID NO: 37320 - DNA, 2158 bp, Oryza sativa
  unsure (1)..(2158): unsure at all n locations
aaagggaaaaatacttgggccgccaagtgcaacaagngaaaaagggggaatcgcacttgtcaagaaagaaggggacgaattgttggggaggggagcctggcgcaaggggaaaaagaggagagggatttggaagtagaaataggattgaaggaattttcaaaaatagaaaagaaaaacgggtgtcgttttagcaaaagaacatgaacggtaccggaaacaaaaaagattcggtttgtcatgcaaaacaaaactgagaacggacaaaggggaatgaaccgggcatggttcatgaccaaacccggcggagagggaaaactattaattcaactcttgccacttttaaacttactgattattatttcctttgctctgatcgttctgctttaaatcctgttaatgatttaaacgcaaagagtattcgggaaaaattctctctgactttttcggttattagatgcattgataattaaggtttcctcatgattaacgaagtaatttccattaataatttattggtgattttgaaacctaagtaaaggaaaactccggacgtgacataggtgttcctcataacttgtcagcatgagctgaatcagaggaacgtaaaatatcccttatcctaaagttgcatcaatatagaacattatgctatacctcacctatatacatggcaaggtcttcctaaaaaaatactccctccttccctaaatgtttgacaccgttgacttttttaaatatgttagaccgttcgtcttatttaaaaacttttatgaaatgtgtaaaactatatgtatacatgaaagtatatttaacaatacatcaaatgatacgaaaagaattaataattacttaaattttttgaataagacgaacagtcaaatattttttaaaaagtcaacggcgtcaaacattttgggatggagagagtatatggcaaggtctcctaccatggcctcttgatttctctgcaacgcacattcttctaggtttgaaataaagcaaattctaacattattggttccattcttaaaacattggaactcatgaaaaatcatgctccaattgagaaattaaggcagaaacttgatctttaatcatctcatcacagcacaccaaggaaagtacttcacggaaaaaaaaaagaagaaattttggcctctgcttgtgcctcagcccctcagtcttgcggcgatcaatctcgcagacccgatgccatgccccatatccttcaaatccaactcaaaaaaagtcatgccttgattgaagaagaccagttaaacatagaatctttaattcattcctctcacgcacaaagggaaggactatagcaaaaggaaaaagaatgggctgtttagttggtgaaataaaaatttttggtgtcacatcggatgtttgatcggatgtcggaaggggttttcggacacgaatggaaaaaactaatttcataacttgactggaaaccgtgagataaatcttttgagcctaattaatccatcattagtacatatgggttactgtagcacttatggctaatcatggactaattacgcttgaaagattcgtctcacgatttacatgcaaactgtgtaattagttttttttatctatatttaatgctccatacatatgttcaaagattcgatatgatgtttttggaaaaagttttgaggaactgaacagccctgaagaaattctcacggttgctcgtgcttgcgttggcgattggtggagtgcgagttgagggtgcccgcgttagtgccaggcagcttccgagttgggcgtcagtcatggcccaatagcagatcgaagcgtagcctccttctgctgtacacctcgcgcaactactccctccgtcacaaaaaaaagacaaaccctgggttttaaaatntttaatggggacttaaaaactgttctaaggtgtttctatatctttttaccgtgcttttagaggcttataaggcgtctcataccgttttaatgtcgctttaaatttgtttaaccgctgtatatagctctggtatattacaacataacacggcgcatataaacatttacaatactgtttcaatttgacggtgttcacatcaagttctaataagcttacttcacttacggtgtaaaataaggcggatttatatccgtttttatatagacactt

SEQ ID NO: 37321 - DNA, 654 bp, Oryza sativa
tacatatatatatttatatatgtacgtacatttactttagtgttaatatatgttttggtaacatatatgcacataaaatgttaagtgctttaaattataaatatgtgtgtaatatatgtatttatacatatacacatacgcacatacatatatatatatatatatatatatatatatatctatatatatgtatatatatatatatatatatatatatatgtatatatatatatatatatatatatatatatatatatatatatatatatatatatatatatatatatataatcaaccatgcagcaaacagggccatgcaaataaaaaaaatggtacacagatctttagtcccggttggtaacaccaaccggaactaaagatggatcagccggccacgtggctgaccgatctttagtcccggttctgttactaaccgggactaaatatcgatctttagtcccggttatttcacccgagactaaagatcgctatctttaatcccgaattcgtagtcccggttggacaactaggactaaaggggggttacgaaccgggactacaaacggtttctccaccagtgtcagtattctaaattcacgaaaaagagacatgttaagacacaaggacaccaatcagtttgataaaacggcttgt

SEQ ID NO: 37322 - DNA, 1447 bp, Oryza sativa
aaaaaaactaatgttaattaatcacgtgctaatgtactgctccgttcccgttttacgtgcgcaaaaaatatgttcccaccaaggtggaacgaacacatcctaaatcatagggaaaatggaatgaagtctagtggaatatcgaggattttagatatgggtaaccaacttacataatttttttaaataccccaaatataacaagccgatattccatagaaatataaaactgatcaaacgcgcatcatgatatattaataatgtttttcccccgtttcccaagagtttttttccttttttacatacatgggcttttggggtatgtatttctttccgtttcatgttataagacgctttgatttttttctagtcaaacattttaagtttataaaagattcagcaacattttcgacacaaaagagtgttataagatgctttgacttttttctagtcaaacattttaagtttataaaaagatgtatcaacatttcaacacaaaagagacatactatcaaaatatattcaatgaaactaatttggtgctgtggatatttctaaattttctataaacttggttaaactaaaagatttgttactatggaaaaatgtcttatcgaagggagtactttgcaaaattatgagaagactggtcatctcccggagctaattcttttatattttagccctttaaaaaatttattttacaaataaatctctggaaaaacttaacaaacgacactagcatcgaggacccatatgtaactagaattctaaaaagggttaaaatgtaaatgttttataaaaataagcccccaacactagaggggagccctaatgggcgattgatcgcccgctaatgggggtcttgatacgagccgatccgagccacgaatttccagctttttgtccacccttaggcggctcctcacggggtcggcgcatgttacggcggcaggaggcggcgacaccctacgcggtttctgaggcaggaggctgtgtttcttgcggggccggtggctcagagcttctgcatgaggaccaagaggtggctgttcatctgtagaagggcagctagagagggcccaatgaaggagagaaatcgatctgattcctttgaccgctcggcttgactggttttttcaaccaaaaataaaaccgaaccggtttttttggagaaaaaaggggttggttattgtccggctggtgactgtgcaagtttagtcagggggtcaattaaatcagggtagatcaatttaatcagggcgacagctgatcaagttgattatcgttgatggcagcgacggcggtttccaaatttgaggtggtgaagtttccatggcactaggaattttcatctctcgcacatgatgctaaaggatctgttggctcacacagggatatccaatgctcttgatgaacaatgccggaaaagaaggatcatgacaagtgg

SEQ ID NO: 37323 - DNA, 829 bp, Oryza sativa
  unsure (1)..(829): unsure at all n locations
tgataaaaacaatagttatggacagggcactatgaccaaccctagagggagatttgtcttttaagatggtttttcttattagtttctttgtaagaattggctttaacttctctgaaataaaatccagaatgaattccatcatcttaaaatagaaaaaaaatagttatgggcactatgaccaaccatagagggagatttgtctttaagatggtttttcttattagtttctttgtaagaattggctttaacttctctgaaataaaatccataatgaattccatcgtcttaaataaaaaaataccgtcttaatttgagagataccaagaggtgccaaattttacagtagaaaatgcagtacctccttgtacctccccaaggaccgtaaaatccctctcttaaaaatatctagttgttacaaaaattggaattaatagatatggagttgtttcatcgctttattaatttaatatgaatttgaaattgtcgacgtttgatgtcgcgattccggtatttgcatagtatggggatcgttagtactaggatatatgcgagattgtagtaaaagagatgagggcgaggatttttatacaggttcgggctcctgaattgtcaagtaatagccctacatcctgttggccgaagccggtcgttgctcttattcaccataatcacaccagtacaatatttatggtagcctatctaacggttgtcgacatggcggtctgaaggtctgactcgtagtcgacgacagggtagtcttccttctcgaatccgtgcccgattagatcagagacaacgctttgtctcttctgacagtttncgtagaccc

SEQ ID NO: 37324 - DNA, 873 bp, Oryza sativa
gagtatttttagagtattttttatataaaatttattacctcaataataggatataccaaatttgcaataaaaaaaattggtacctattcgtacctcttaagtactactacctccgtctacctccgtttcaggttataagacgttttgactttggttaaagttaaactgttttaagtttaaccaagtttgtaaaaaaaagtaatatttttaaccaaagacaaatttattatgaaaatatatttaattattgatttgatgaaactaatttagtattataaatattattatatttgtctgtaaacttagttaaatttaaaacagtttgactttgatccaagttaaaatattttataacctgaaatggagtacaaaatttctattgcctgatggcttccccttcctgctagcctcttcgttgtgtttccgtgaaagttgaaactccaaacaatcgacaaggtccgcaatcagcactaaatttaaatttttaaaacttaattttgatatattttcatcgaatttaaatttagaacttgacgttgatgtatttttaatctaagtgttttcagcattaccattaatcattaagaacatatatatatgaaagttactcacaaattattatttttcctaataagccatacagtttataatcagcctacgctgcttagataagtaagtaatcttcgtttctatattaacaaactatatttaggctgcgtttgagcgcagcagaaagagagaaagatagttttgtttttcacgcgtacgcttcccgaactactaaatggtgtgttttttgcaaaaaaaatttctatagaaaagttgctttacaaaatcatattaatccatttttgaagtaaaaaataattaata

SEQ ID NO: 37325 - DNA, 645 bp, Oryza sativa
aaataagtttttttaggtaagtttttaaaaaggattaaaatgtaaaaaaaatccagcctcacgcaggataccgtggtgcagcccattggatcaacatcactgaacttacaagccactagcctttccggccgccatctagcatttttaatggaaaagacaggaaccaatacttgtatataataaaatagtagtatagtagcggagcgagaatcctaatgagcgattgctcgcgtgagggagtggatagcgatcggttggtgggcctctctttccagttcccacgttgctttctttttttttcaccgcattgcttttctattttagtaagtttatacattttaagtttacacatctaaagtttttactgttaaagtttatatatgtttatatatataaagtttatactatgaaaatttatatactcgatttaaatttgaattcaaattttaatatattttaagcgatcagttggtgggcctctcttcccagttcccacgttgctttcttttttttttgccaccgtattaatttcctattttagtaagtttatacattttaagtttacacatctaaaatttttgtgcggttaaagtttatactatgaaagtttatatactcgatttaaatttgaaatcaaaatttaaa

SEQ ID NO: 37326 - DNA, 652 bp, Oryza sativa
  unsure (1)..(652): unsure at all n locations
ccgctttccttttgtaatgcagttgtgagctcgggatttgtccgcagcccagcatgactgtacatctactctataataaagagacctctgttgctgtgatattctgtctcactgtgatactagcactgtttcctgggactggtatcgattaacaggttaatttggagcgtcacggactagttccggtcgggactagttcggggcgtgacaccctcctccccatcccttgctcctatgtcctcccccgcgcggttttgctgccctggcatggaggttgaggtccacgtcgatgggcttcagaaatttgcggaccaaccgcccccgcgccatgctcaatgcctcaataccagcaactctttggaacctcagcaagtaatctcacgttcctcaactcgtgcgcatgctcgccttttctttttcttatggcacattctgctagttgtttcgttgcaacagacgtaaatcaaggaggaggattggaggaaacgaacagtagcagctcaatcgatcggagtaatgcaactctgctgattatttactcatatctcatcttctcttccgttcccacgctagcttgcacacatgttagtatgttacgcgttcaagggagacgacgagcgacagcgagtggnccgtggccatggccgactag

SEQ ID NO: 37327 - DNA, 655 bp, Oryza sativa
agtgtcaattgttggcactatccaatttcccttcactcccaaatgaatgccaattagacaataatgtaaattgagtaccgcttctaaaaactgccatagactatgcaattcacagatagtttcaatttacatgtagtaagtatgcataatcctcaagacattactagacgaagcaagttttgctctgtactctataagaagacaatgaatggaatagtacctcacacagcgtcacaagcatcgggtagcaggaaagttctcttgccttggtctggatgctgctaataagatacacctgtcgattctcatcaaggcccttacttttcacggcataaacatgaagaggtgcttttggatactgcaattcgaagaataaaaaatctaatgcattaacactgagctagaacataaccagctataaagtgctctaataaagtgtgtaaccaaagtgaatgacagaagcatacaaaatggggaaggataggtaagttacaaaccagcaccagttctaatacaaatattgaaaatggaaaaggtttgtaggtacaacataaaagtgggtgggaaaattacggttggcatgaattaaaaaaaaaatgatttacaagttgccttgctggtttgctgcaaaaagaggtgcctcttgtccttcaaa

SEQ ID NO: 37328 - DNA, 760 bp, Oryza sativa
  unsure (1)..(760): unsure at all n locations
agggtacggaacgactctgcntgggcaannnnccanctnggnaccctncatccctgtacgtgtggataccggtagaggcgccactggtttgcggtgctgatcggcgggggagtacggcgaggagaacgcacgaggaggggaaggtcgagccggtgcgatcgactactttctctacatcgacgcgctctacttcgcgagaattccttcgacttcttagcaccttgtttcgctgcgcagcgcgtcgagtggtaacgatctatgatctaatacttgcatggttcctggtttacgcgatagaaaattttgatttatgctatcgtagcctacgtgtatcccaacagtggtatcagagcccccttgtatagtttatgatctagatcattgcatatagttgatatgcgggtgtagtagatgagatctattatgttgtatataagtttttaggtgatcggagcatgagatgaaccgatagctgcatgggttgatgagatcaatcggtaagtgtgttggtgacttcactggaatgtctagtactcaccaaggccgagcgtgattgtgttcatcggatagtccaatgtccactggaaccgcacgccaatgacaaaaaggagccaatgagattgacttggtttcggcataatttgattacgcccgtaaaggtttcacatggcgaatcatagatgaaatctatgtaccctgtgaaactttcagggcgctgccctgaaacccgcgggaccgccgtgtgcattgcccctgagat

SEQ ID NO: 37329 - DNA, 754 bp, Oryza sativa
  unsure (1)..(754): unsure at all n locations
atgcgttatagatgcaancctagnaggtcactggagcnncncccctnngctcttgtttttgtgaagagattagagatatcccttgctctggttcgcaaggcagctttctttttatccccctttatctccttgtatcactggcccttttttggtgtgtgctatcagggaatgatccactttagcagcgatgggttcaagcaacattcccgatgacttttggcaacctattggtaaactatttaaacgagaacgcaccatagtttaagcttgatcaacacgttctgacgtccactgtctcaatttcctggatctctaccgtgtgctatcgttttttaatagattaaaagtttacttcagccgacgcgacctttcgtagtttcctctagaaatatccgaatgatcattatgcacaatgtggagtaacaaaaattatatgatacttcctctgataatccgacaagatccgtttccgtttcactggattcctaaacctccaccgcccctagggccgccgcctctgctggagtcctctaccatcgctgacggtatcggcctcccccctcaccgagaaccttgcaccagcgctcaagccaccgccgatcctaggggcacagtccccgccgtcgaggaagtcttcttcccgaactaccaggctaccgccggcaggggccgctgcgtacgggacccacctccgtcggatctgccatctcgtagctgaggattgtttgtgacccttagctgtcgttgccaacgt

SEQ ID NO: 37330 - DNA, 761 bp, Oryza sativa
  unsure (1)..(761): unsure at all n locations
agagcgtgatttgannttcgtaaaaacgnctngcaanangccgaattcnagctcggtaccccaaaagtttgccgcaaagacttatggtatcttagagtttgttagagataagagtcgtatccggtatggacatagtttgtaattttcgggtataaatagaccccgaaccccatgtaatcaattaacgcacacgttcaatacaatttcggcgcatcgccacccttttgctttagttttatttcgacgagttcttgctttcgggttgagctgcatcggtttcgatcttcgacagaggtaaaacttgttatgacggcttgtgttctcgggattagtgcttccatctttatgatactctaatcttgtttatgtaatccatcgagttatcatataacttacataatctttggcaatatcgctatctaacctacaatcggctaacatctgttggaagagggtagccggttaggttagacaatgacgttgatttagattatataggatatctaccactctatgaaacttccagtggcttgattgtctagatattgttcttcttttcatacttaatgctgcatcagttgagttttatctattaagtcgtgcttagaatatcaatctctatcctgcttcctggttgccaattagggtggtgtcggagtttcagccaatcttatctgatttaactatatttgctctatatacttcgttgacatgttaaatctgcccttatgtaaagatattatcgcatctaagcatattag

SEQ ID NO: 37331 - DNA, 758 bp, Oryza sativa
  unsure (1)..(758): unsure at all n locations
ctgggatgagatgcaatncncatggccgaanccgagctcggtacccttcatatatataacccactaaactttaaatggaagttcatccaacacctctaaattaaaaccagataaccaacccttaaacttaataacaccgttcatattacccctatcttctcctctaactaatgagattttggacagttaaccgtgtcatatattaaaaacaaaggtagtatatttttatttgaaaaatagatgtagttcgtactaaataatttaccttttttatgtataagtgcactttgtgaatcaaaccgcctgtctacaaattactccctaacatattatttggatatttagttttccataatatgcattacttgattttttttctcaacttccaagtttaagttatactcagcatgtaactaccgaataaatatacacttggacttttcaacttgcctttgtctattcagcaataatttaattacatggaaatactatatataccaagttgttggtaaactaaaagtcactagtcgtgtgtacaaaatattctctttttctagcaagtacaattggcatagaccctaatcacatcactctgatcacactagcagtccagcacaagcattcacacgtgtgcatccttaatatgtacacgcttgaaatattgtcaagggcttagtgtgtactcctaaaaacaccccatagcttagtcatgcacatatccactgaatgcgcangcgtgtgtactcctaaaatacatg

SEQ ID NO: 37332 - DNA, 759 bp, Oryza sativa
  unsure (1)..(759): unsure at all n locations
agatgcgatgcgatcntcatngacnnnncnaannnagntcggaccactttctagcattatccacattactatagatgctaatgaatctagacacatatatagaactaacgtcttacgttgtgaaatggaggaagtatatgattttattaaaatattttttaagactaatctatacacgtagtcactatatttgaatgaaaaatattttagaaatgattcataattaaagattctaaaatttaacctcactcttgtatagaacgacaagtattatcggcccagagaaaatatactatggattctattccaataataaatatataccaatctataaatatattctataccacatacaatccagagttctagactcgccataattagtatttaaaagtggtgctcataggggtagggtttgctgtgtgccttcatagggttgagtctacgtgtgttgtgagtgattgcgttgtactgcgtaaattttttaaaaaaaattaaagaagagttgtgctgcgtttcagacctctacttatagcgcagtagtgccatcatcccattccgaaggaaaaggaagaccgaaaaaaaaaaaaacattagtgccctcactgcattacagcaatggcgcatgctaagagcaatggatatcaagccagtgatgccaccagctcgctcgacgctctgagagagctctacggcaacaccttcgccgtcgtcaagtccatggctctcaaggccgccatggacctcggcatcgccgac

SEQ ID NO: 37333 - DNA, 762 bp, Oryza sativa
  unsure (1)..(762): unsure at all n locations
cccgagttttgagtnaccgaccctcgatagggcgcctgtcgagctcggtacccccagaagaacggatctggatatattatgctaagatcgacaaccaattatcaagttggtgtgctagaagactaactgatgcagcagggtaggaaaatatggtttcgatcaacgcaggttcaatagcgtttgagaataattttctagcatgcatgttgctaaagcaacaagcatagcctggttagaaatgttgatctgcaggcatttacagactgaaaaccacatttgttttcctttgtttctagttgatcaaattaccttaaactgtgcctatatggggaggacgagtagaggacggctaggggagagttctcaccacaatcacgatgcggtgagggattaacagtggcaatcgttgatgagcttgctgtggcggcgatgaacggagaagattgatgaggagacggctctgacgatcttcgggcctggtgaagaggtagacaacgatgcgcatggaggtgctgacttgatggagagtacgatgaccacgggtggcgcttcgacgaggtaggaatgacagacggaggaagatgacgacaacagggtggcgttcctaaggtctttggtctgcgaggaggttaccgtgatggagtaggaaagatagccggcttgggttgatggcgaagatgaagctccggtgctgtgcgagcttggttgaagcatatactatggagaacttaacagagaaagaccggcgacagcgatggtgct

SEQ ID NO: 37334 - DNA, 758 bp, Oryza sativa
  unsure (1)..(758): unsure at all n locations
cgcgctatgaatatccttcccgtgaatccntnccanangcccaatnnnagctcggnacccagatggcggcaaatctgatcacatgctgttcaattataccataatttcaattctaccattttttaatccactgttctgttttcttaatggggtaacttaaagaggtttggtggtgtgccatggactcatgggaaccttttttgattagtggaggtttggtggcctcttggccaagcataagaccaactcacacctgctcatttattccagatttctgaccagccttgacacggtaaatttttcggagggggggtagatctgatctgctgggtttgtgggaaggggcatataaggagctgaggcctccctctgagtgcatatcgtaggcagcttccctctgcatacaagaggctgcctcccatttctcttctctgtcggtgttctcctcaagatctgtcttaagttcttgagatctggtaagattcttcatgatctcgtgcatacttctgcggttgatctgtagttcgagtatggaccatgcaagctgtgtggtttcctgttttagttgttcatctcaagatacttaatgctgtgaatctctgaatttgcttgagattcatgccttgcacatatatgatcccttgctagattcagtaacttgatttactctgtgtttgtgccattaaatttgtttcctttcacccctgtttggaactatttccttttattttactgcttgctcaatgctggtcttgtcg

SEQ ID NO: 37335 - DNA, 685 bp, Oryza sativa
tttcacacttatttttaaattgattttaaatttacgaagaacccacgactaattgcgtaacgcagcgttgcttttttttacacgaggaaaccgcgtgcgggcgtgatttctgatcgctggcctccggcgccagcgatcggtcgcgcagcagccacccctgtagcggagcccactggatgtgtttaaaattttcaggggggaagggagggagggaccaccccctttcccctgaaaacccatcatcatcttcccttgatgggaactctagaaggcttccttccttgcttaatgctacaataccccgcttgaagtgccccatagaggttattcactctttccaaatcaccaaaggcattctattcggtagcgtagttgcacgcattggaaatctacttgtctgatgattactgcaactttgtctacagttcggaattttggtatttactttctcaaggttcgtcttattgtctttattactccccttaattttgttactttttcttgtattaaaaataaaaaattatgggttaacattgccttaatgaatattgtttgggggttttccaaaccttgcatgattaaccgtgtgtttacctttttttttagaaaagccgttataagaaagaggtaacgtggaagagaaacatattttaactcattcgttcgagtgttatctacggtattt

SEQ ID NO: 37336 - DNA, 705 bp, Oryza sativa
ttaggtcatgatacatctatcactgtacggagttaatagtttgggtatgggatagattggtccccatgccatctactcattctattcttttcttacagtggtgtgatgtgtctatgtgttatgcctgacacaccaacgtagtgatgtcttcacatgaaaagcaaagaaaataagtaagaaaaaactaaagtttgataagaaactaaatggatgcatatatttggcaactctaccaagaaatggtatggtttgaaatgacatcaatcttaacacgcccttatttttaacgggtgataagttacgacttataagagatgacttatacacccgtcacaaatgactcatcgacaggtgttcatccatcacagatgagattttgtcatcacaaaccacttaacatctctgacgaggacagtttaagcccgtcagtgatgacttggtccgtcgtattatttacttggtgcaaattgaggacatcttaaatgggcgcacaaaacatttaggctatagcaatacaaaaagcacgagttttgaatttgcgtaatatctacatgcatggttgataccctaattctgacactggtgatatttgatcatactgcatgctgagatttagtccttccctaagtccactatagtaatttaatttttacattgactctctttcttattaaattccgaccattccatgtttagatggtgctt

SEQ ID NO: 37337 - DNA, 765 bp, Oryza sativa
  unsure (1)..(765): unsure at all n locations
agggttttgaaatgagtaatgatngacacangccgaattcgagctcggtaccccttatgatcatgcttggggcatggtgtttcaataaataattgaaatcaaacttcagccacccaccattacccggatcaatgcacgagcattttgctaatagactttaaacaaacaaaagtagggtatctctcgttaattggacacctatattaattggacactctaagaaagctctcataaccaccgttgggtatctctcgttatcccagcctaaacaaaagtagggtatctctcattgacagaatttgaacctgtctcaaacacttgtctatgtacatccatccacttttagacttcgtgcgtagccctataaattattgccgatgtaaagcatcaatagggtcttagggttggaaggcaccaggaatatgacaagcccatttgtgttgtggttatatatatatatatatatatatatatatatatatatatatatatatatattcggattttttcggtcgtcacatatgtccttcatcgcgctttcctcatcgcgttttacggactaatttttcctcatccgattcatggcacacctcctctccaaatcccacatcccacatccaatccaacccaaaaacaaaatctcaatctcaatctcaatcccaatcccaatccaaatacaaatcggaatcatcacaaaatcctagagaaaacacttctaaaagatcacaagaacatatttcatcaacaacaacgataacacaagaa

SEQ ID NO: 37338 - DNA, 757 bp, Oryza sativa
acggtttgatgtcaatccctaacaccacaggccgaattccagctcggtacccagtagctaatgaatatataaactaagggcacctttgttatcatgcattttcctgaaaactgctatatctttactgttagagaaaaagagctagtggtggtggtggtgatggtaagtctgccataccaccaccatcaccatgggttctgtgcatacatgcacgtgtgtttcttttatctgaataattatatcatttgcacatgtggttcgtaataataggatcatttgtgaactgatgatcaatccgaagtctatatattgttcttgagttcagattttatatttatcctagatcgttgcaatgcatgagttggctagttcatttaataacctatttctcctctttctacttaaaatatgttaatttgattcaattaagcaactttcacatcttttccagtgactgaatggtgccctcaaccatttctcatataggtttggcatggatggagtaactttcattttgttgtgctgtttaatttgctactattccctgaacctttattccaactaatactccctccattccaaaatataaagcacagctacccttagcccaaagaccaagaaataattattatcaccttatagtttggattaatctaataaatgtaattcatgcacccaataaaattagagatcttgatggtggagaatttaaataataatattttagtagagaagatgggttagttaatggcatgct

SEQ ID NO: 37339 - DNA, 757 bp, Oryza sativa
  unsure (1)..(757): unsure at all n locations
aggctttgaatcagtnactganagtcnntggcgaannncagctcggnaccccagattctcagaagctgtggactgttttggcagcttctagcggaagcagcttttagaaaaagctgcagctgggacaagctcctccaaacagggccttagaggcataaatccttattttcatgtatgtaaggatatattcaaaaagatttttccttggttatccatagggcaaaagatagtctcaaaccccttaattatgttagaatagctagacaatctttgatttttttttacgtacatatgtaatttgtaatcttttttaaattttaatatatttgctcactgtaggagcctcttctaatttcttttttcaaaaaaacacaaagttgtgcatggactataggtgtactttgaacctgaaagcattcaacagagtctcgtatggtcggcagggatcagaaggcacatttgtagccaaagataattcagaagttacagaatttagtatatatgacttgtatcgttaaattttgtttgtacttaatttttaatttttttagagtgctcttctctgattatggtatctgaacataggaacatgattagcgcattgacaaaaagagcatgctaatatatgagtttggaatttggcttcgcgcctgttgataaaggccggagatgtaaaccattttcactatttatggctttccttagaaatttgaggcccatgtacgaaatgtaaaatgggatcctaaaattttcttag

SEQ ID NO: 37340 - DNA, 652 bp, Oryza sativa
ttctacgccaccgacctgctcttcatcaagcatcagcggcgtcggcgcacgcaggaggaggaggatggcgctactgttgatgatcatcatcttgttggtggcggggcgggggtgtcgttagggatgcaagtgggttgtcccgctacccgtataaaaacctgcttgctagtttatttctcgtatgatagtataaaatttagaagaaaaaatgaagtagaagtgggataagcgggaaaaaaaaagcccgctagcctaccccgcttgcatccctaggtgccgtcagtcacgtgaaaagaaggcggcggcagcggtggtgaggagcttaggatggtggtgaggcgccgtagccttgcggaggtcacggcttggttggaggagtacttcctcaaggccagcgtcaccggcgacgctgtgttgaaccacctcgaggccagcaacgacgggttcaagcgtaagacactagcaactctactacttaattcgcacattcacagagagcatgagttgcagaacagaaagttttcttgccactagtgaatgaattgaatttgctgcaagtggaccgcacagcatcttgggcgcactttgctgccttgtcgcgccatcggtgcgcacgaacgcgtcgacagcattcaatggcgagcagaagcat

SEQ ID NO: 37341 - DNA, 574 bp, Oryza sativa
gcgaatattttttttacctttgttggtcagaaaattgtaattgaacacaagattttatagatttcactgaccaaattgtcatcttaggataacctataaaattttgttctccattcgtaattgtttgttagttatatattgccaacatgtgccttgcacgtgcacgataactagtttcacactacaattgttgagtatagatagattttatttgcatcaatgggcctacattgatagttcaagatgaaataatgagtaattaaaaaaattactcaggacatttgtcataaacacctataaaaaaatgtattgtttaaaaatatatcacatttttttctcgcaaaaaaaagtcaggattttagccgttaatgactcaatctatgcttttgattgtgacatattttttaagtgtataagtaataaatgtaaggttgatttctaaagtacttattggattggtctcccaaccattaaactgttggtggtttacaaatactttctatacatatatatatatatatatatatatatatatatatatatatatatatatatatatatatatatatatatg

SEQ ID NO: 37342 - DNA, 623 bp, Oryza sativa
catcgagacagaaggcttggttaaagcgtgcaaaaagggtgcgtgtaaatcggttaagtcgggccagcagggtgatcagatcgacggaccagttagactgcagagtttggacggttagaccgggttcaacggacgtgtggttcgttacaggaacttgttaacagatccaaaagaaggacaagaaggttctacagatggatagtttgcaagtgtgaaggacgagtagactggtggcgacaggctggtcaggtcgcatataaaaatatctggcggaaacaagatatatctaggattcgacgaggagttgagatatatggagttaagccagaactgaagaaaagtcccgggcaacagcgggtcaaatatcgttgatggggtcgacaatactgtttggcagtacaggatatatccaggatatgcaggtcggcatgatggggatatatggaaatctgcgtcactgaagaggaagagcgaaggctatcgtggtaattcttcaagtgattcaaggaaacggtaaattttctcaatttatcatggagctcagtctacggatgcggaaaagcgtggatgttggatttattagctcggttcataagtcgacaaggaagaaagggttctcttca

SEQ ID NO: 37343 - DNA, 558 bp, Oryza sativa
tttgataggtcttttgaaagtttttacttggacttttatcacctgtgttgatttataaacctttggagtgcttctcactcgggtttttctttatatttctttggcacattaaagcagtcggcgggaggtttatcagatgctgcatatgcttggccttgggatatttggttaaaaaccactcgaatggacgttttgatgtactttgacaatatgtttagcttttagctactcacatagtcggaggctacacctaattaggtgcatctagtcgatgcacctaattatttactttcagcccttcacagtctttgattttggtactcgggagatcagtacgaaagaaattgaagcactcggattatcactttacgttccgagagaaggctgtttcgtcgactataaaagtctcaggggctactgtggagattatggataccctatacctacacggcatgtatagtccgactgggtatggggtgccatgtatggatagaatatctttaagaggactcgggttaagtaccaaacttgtatgtcaaggaaacacccgggatccta

SEQ ID NO: 37344 - DNA, 711 bp, Oryza sativa
  unsure (1)..(711): unsure at all n locations
gtggcccnttaattgcaattcgactcgtacccttcttctttttaacttctagttcattaattccattcaactcctggttgactgccaatgagttttgttgtctaaaaagacattgcccataataggtctcattgccaacttctattggttatatgagactctatgcgagtatccatggatatacaaggagatgcatttttcatatgcttcttctttctgcttaatgctttttgatgtgggcatgtactagcgttagtgtgcactccaactactggttttcttccttgatgggaagatgtggcacgcctgttctgaggtttcgtagcatttgccaggtgtcaacttgcctccacgatctacactccactactgcactaccacagcgagagcaatgaacgagtggaaggccactaggacctatagcaaaccgagcagttgcaccaacgaatgggattcaatgtcacgcccagaaattcccgaatagaattccaagcagaatgtgcatcaaaacccccgtccaggaccggccggggtacacaaacgacaaagttgacatacagatccacgtcttacaaacattataaaaggtcttacataaatgcagcggaaaattaaaagataaatggagctaagccttgacttgaactgcagcgggaacaacactccacaggcatcctcgacggcttggacgaagcctacttcttggagaag

SEQ ID NO: 37345 - DNA, 6564 bp, Oryza sativa
acggactggatgagctagtctgagtccggcagcggggtcatcggcgggagggagaagtggagctgccgctgcggacctcctgcatggtgagcagggcggcaacggtgttgcagaagatggtctgctcggcggcgtcacggagaggaggtcggcggcgtaaaagggctggcgcaggcgctaggacgccgacaatgacggggaggcggagcacgccgccggtgcgcttctccgtctccgcatcccgcgccgccgcccgcacccacctccatccatccctgcgccgaggggtggctgctcgtcgtggccacggctgccgctgcctcctcgtcccccgcccccgccgcagcttcgcgtcccccgcctgccgtcgactggcgagaaagagagaggaagagtgagagagaggaaaagagagagaaagagtgagagaggagtatggcaggtggatcccacatttctttataaataaaatgctgatcggactgccacgcgtacgctacgtaggataaaaccgctctggattgagtccaggggggtaatttgtccgatattgaaagttcggagtgaacgatgtctggttttcgagtttaggggggtaattcgatcgaccgcgatagttcgggggtgggtaatttatactttttccttaaaagttaccctcgaatcgatgaagatcgatctgaccagaattgatgtgccgatttgacatcccaaagacctttggtctaaccggtgttagtaatccggtttgaccgcccggaatcgccatcgttgcttgttcccaccgccagtgtgaccaatgaggtcccgccagttgaaccaccgaacctgagaaaaacacaaattgcaaatctcccaaagtagaatgaaactttcttacttctatttgtgtttacaaaatacaacatcatcactcatctcagaaatcttgactaaactcgaagtcctaactttctctaaactcaacttactaaaaatcaatactgggaggcctcactttatatttatactcgaggtaggcagcataagcctataatctaacttatacaagaagccctaatatcctaggaaaccttcctgtataaaaaaacaaacttttacaaactctaatggtaccaaatttggactcactccaaatttaactcctcatcccacacgaacacaatatctccatcacatgccatatggaatctccatctaccacgtgcattgatcttcagcctaagcaccccgcaagatatcctgatcgttcagacgtaatcttcccccaagttgactactgatccatctccgacaatgctctccaaaggcatcaagactcacctacacatgaatcaaataagaaaccatatttgagcacaagttcactctaactttactcaacatgagcacacaacaacattacatatgcataggaatcatctaaaagtcataaacacgaattaatcacgagtatccaattaaacgacccgaaaccaaaaccgacgcagagccggtctgtcataccgtcaggttggtcggtctaactatgcaacacacgccagtctgaccgacagcacctgcccggtctgatcgatcccgttagacaaaaatatctgttcacaatatgaaaaccacatatcttcaaaaccacttcgccaaatatctctaaatatcaaaaccaactatcgcacatgccaaatgttcatcacgaagtaataatccaaacacactttgatttcacaggaagaaatgccatagaagatccaaaactgataacccacgttggccccataatttcttaatccaatccgcacagtaattatcttcttaatcctccctaaattctcacggacatgtgggccccaccgtttttaatttctatttaaacatcctattaatccttgagtcgcttacatgtgggacccacctttgtttatccgttctgcgcgcccggtccatgtgcatcgggacactgacctccgggtcccacgagcaccgacccgtggatcgtgagccgatccaccacctcaccgcgccatgtgctcggtggactcggtagatcgtgcaccgaacccccagtgccactgacagtgggccctacgaggaatattcttccagaatattcctttccattaaaaagaaactctttttcctttcgttctgaaattaacttgaacttcataaatagatatcttgcaaacggtaactccgtttgactccgttcaactctcaaaatctctataaaaatgagatctatctattggcaatattatcgcctactattttaggtactttagtggcttttgtgttgatttactcctttttgcgtgtagttgccaagcctgaggacgatccgtaagccattcttgatgaggaagaaccacgcaggaccaaggcaaaccacctttggccatattgcttcctatatgtacaaaattatgttgtttggaaatatgcatgcttagattacacgttaaactgtttggtctcggtttgcgaatgcaaccgacggactcacctattagtcgcacttgaatctagtaggatattgaagtaacatgtcctggacagctccacagataatgcgtcggtaacttaccatacaagtatgatcactgaggtagttttgcttagctatgctgcgattgcattgtcgtatggggaaacatgggtttccaaccaaatattcaaaacccgagattttattttggtgtgtttgataaatgaaactggattatgaacctggatgatatgtaggctgaacctgtgtgattggctatgtattgttgttaaggaccgattcatttgggaattccatccaagcatcttgtagtacttagtttgtttgtgcctaccttgtgtgtcagtggttggggacaacggggatgaggagacggagttttgtgttgtgagattttgaccattcatggcaatcgtctctattgtgctgcttacggtacaaataggtgtaggagcatccttgactccttgttgtaccccgagtagacgatggctagccagcctgatgcttgtcgtgcgattcaactaactatgtggcatggggttttcatgaactagatttagaaaggccttgccacaaacttctggtgtcgacgggtgaccgttggtagtttcgtgccatgtgggtaaagcgtacaacctatgtggagtgtaaactgttcgaacagctgtgcttacggtcaagggcgaatgtgaggtgattttcttagcgtagcactgattttgaaagctttttgaaattggtttgtgggatgggccggaatcgttccagagccggtctgtgtggcagacggagaacctgagtggtttcaaacaggtggggtgtcttgtggcaccatagtggagctggaatagttggttaagatgtgttgcgagatgagatggctccgcggttcctagctataagcagtactccgtccgtcccattttaagtgcaacaatagttttccgtacctaattttgaccttccgtcttatttaaaaattttttgaaaaaagttaaaaacataagttatgagtaaagtactattcatattttatcatcttataacaacaaaaatactaattataaaaattttttaaaataagacggacgatcaaagttagacgcggaaacttatggttgcacttaaaatgggacggagagagtaagaacttggcagctgatcgagctacgcgtggtggcagagtgagccggactgacaaatccatatattaattgtttataaacacactagctagatgccagagtttgctgtggaaaaaataaactactagaaacaaaatgtatagatatctgaattgactcgcccgttcactgccagaaaattgcctaccgtgaaaggtgggcacagacacatgccctgtttaaatcccacctaaaatttttcactctgtcaaatcgaacgtttaaatagctgcatgaagtattaaatataggcttaaaaaattacacagattgtgactaattatttgcgagatgaaccttttaaaccaaaatgctccttgatttgataatgtggtgctacacaaaacatttgctaataacggattaattaggcttattttcacgtgcggtccacttaagaggcccgcacgtgaaaatcgatttttccgtacggtcctcttaaggagccgcagatgaaaatggagaatgatttccgcagaccgcaatctaaagagctccttgtacagaaaaaaatcgtttttatagtagtgcaaccggcccaacccaagcttcaaactcaagactcaacttctaaagcaagccaacatagagatacaaaaggagatggtttgagaaataacagaacatcggaaatgtggcatcctggtggccaggcttggcacctcggcgatctatctccgacttcccttcttcttctactaggtgtccttggctttcaaaacattctagtaatttatatccccttgcttctattaaagtttatgccgaatatgtgtataaagttggttattatttaggacttagagttttaataggtgtatggtagagatagagttggactttgtcttaggctctttcttaaatagagatgcgtatatgttgtaaccacatggtgacttagcttaggcgagagagaacggatgcaagcggtgtcttgccaagggttgttgtaactctgatacgatatataaatatgctggatcagggaggaacgtccgtaatcagtgtcccagagatataggctatggttggactccattatcaaatatcgttcctcagtgttgtcaccagtgtggatcttctatggagtttcattcacgtttagttattgatggtgatttcaagctggttttataacaagtggtatcagaatttgccggagattcatggtagagatatgagggaagtggtttacaccgcaacaactacttaggatgtcaaatgatggacatggacacaaggtggagcacaacagcgatcaacggaatttgatcggttgaatcgaacacttcaatggttgctttcagcgacagcagtggtctgaactattcaatggttgctttcaacagggagacgaccagacgtggtgctcgggttgatgttggcaaaagtgattgatgatccaattggtgcaattggatactttggacgggtgactcgaaatttctggtgagctacttctaagttgtcatacggttagaacagggtcatccctctgttgaagagagagcctaggatagagtataactctaccctacacctattactactcccaagtcgtaaacaataacctacttcatacatatattcggcacaaactctagcatcttcctctttctcccttacaccaaacacttgtttgtatttgaatgttcctgtgattcactgaagtaggtttctaacaaggagtgaactcataaccaccagaacagaatacaagtgaacatgctctgagcatactgatcctcgattgcggcgtatacttatgtgacctcttccttgtagcttaggaatctgtgatgtaatgaaggattgacactacaaattgatctgaaaagaacagcaggtttatcacgactgactatcaaattaacaacctacgatgatacagattaacaacgtacaacactgtcagtgatggaaacatagtgcgtttctaggactccacatgaattgatgggcgcagaccgaaagacctcatgtcgctagtctatgcgatctctaaaaaggaaggaaagtccccaaggaaaggacaacgacgcttgggtacaagatttgacccttgaagcaaacccacctatcatagtcaacctcattgaccacctagtagccttgtgggaagtggttcggggtgtacacctggatgacaaagaatcaaaccagattgattggaagttcacaagcaacggacgttacacggcctcctcggcctactgcgcgcagtgttgcgggcgcctagcacaagcttcaactcttgatttggaaagcttgggtgccagggaaatgcaaattccatgctgggcttatcattcagaacagggtctggacatctaaccggctcgcgatcaggggttggaaaacaacggccaatgccccctctaccggtgcgaagctgagatagccttgcatcttgtcgccacgtgtagatacaccagcaggatctggcatcttgtagctagatgggtgggctaccagcaaatgcaaccgggtcaatgggaggaggcccagtcagtcgaacagtggtgagagaacctagcaaatacgtacagtatcccaaaaaaaaggacttcgatccctgattctgctagttgtatgggagatctagaaggagaggaatccgcggattttcaaccacaaacagatggcgacgagtttccttttgacaaaaatcaaagaagaggctagcctctggacccttgcaggtgctaagcgcttgtgcgagttcattccgcactttgtatagtgtatagcttacggtgacctcacttttttctttacccctaaggttgtattttctcctgctctattcaataaaaaggcacactcgtgctgttctccgttcaaaaaaagaaaaaacagcgtacaacacagaaa

SEQ ID NO: 37346 - DNA, 582 bp, Oryza sativa
  unsure (1)..(582): unsure at all n locations
caaattagtttcattgaatatattttgatagtatgtctcttntgtgttgaaatgttgatacatctttttataaacttaaaatgtttgactagaaaaaagtcaaagcatcttataacactcttttgtgtcgaaaatgttgctgaatcttttataaacttaaaatgtttgactagaaaaaaatcaaagcgtcttataacatgaaacggaaagaaatacataccccaaaagcccatgtatgtaaaaaaggaaaaaaactcttgggaaacgggggaaaaacattattaatatatcatgatgcgcgtttgatcagttttatatttctatggaatatcgtcttgttatatttgtggtatttaaaaaaattatgtaagttggttacccatatctaaaatcctcgatattccactagacttcattccattttccctatgatttaggatgtgttcgttccacctcgttgggaacatatctcttgcgcacgtaaaacggaaacggagcagtacattagcacgtgattaatttagcattagtttttttttgaaaactagatcagtatgatttgttaaagcaactttcgtatag

SEQ ID NO: 37347 - DNA, 766 bp, Oryza sativa
  unsure (1)..(766): unsure at all n locations
tggagttattttcgcggggtcggctgaaagattggccaatcaaatttcattgagattgtaagggggtgttatatgttatagcgattgatcatgacattagctaaaacggactattcataacaatattgaaatatgccagcagttctccaaatggctatttcctctttaatatctccagagcttctctgcaattgttttaacctctgctcgaaaactatcccgttgcgttccttccaaatgagccagcacaccatcatgaaaagcatatcgagcatgttcatgtagctcgctcgaaaacaagattgcgtttgctgtcaccattatgccacatagaagaccttgctgactaggtgggtcaaaggccacattgatccaatctcgtagcattgtccatactctgttggtgtacgacacttgatgaacatatggtcacaatcttccatctcagattggcacaacgaacagccatcctctcttgagaagattgttagccatcaagcatcatccttttacagccaaccacataaagaatctgaccctcgctagcactctaatcttccaaaatagttcaccataaggacatttcatcgtcgccataaagaataggttgtaagcagcgtagacaatgaactagccattacttgtcagcttccaaattattgaatcctccatcccctattggatgtgaacattctagagttcatcccaaaggggtaccgagctcgnattcggcntgtgntcatcaggaagctattatcaatgcgct

SEQ ID NO: 37348 - DNA, 686 bp, Oryza sativa
  unsure (1)..(686): unsure at all n locations
ctgcctgacatggcggcgatgaccctgtcaggaagttcagcgggaccatccttgactggtggctgctacattacttgagaaaaaatttccatgggtacatatactgctatgacagcatgggacccactaacctgcgatactcatatgcgacgttcaggggtacctgatggcacatatatcagatgtctacgatgagcctgatctgcagtcgcctgctcagttgaagaatctaaaagctgtcagacttagaagcctcgtgggaagtatgccatggaacatgatataactcatctgcatgatactgcaagatgaccaatgttacaatacataccggtgatgctgcatagacacagtgccttgagagatctatgctagtgccggacagatgtactctggaggcctaacgggacagctgctgatacactgacgtgacttaagagcaggcgtgctaagtttggcattctgaaacggaggtggtagttctccggccatcaatcatangctggtacgacatttacaagtgtacaactggcgacatgtataagattgcacgacagtgtgtatgtttaatgcacggataccgacatgttatggcatattgcctgacacgtaggtcatgggtgacactctatcttcagaagtcttctcagaaagtagtgtcatctcggcaagtaacttcgtgtgaa

SEQ ID NO: 37349 - DNA, 670 bp, Oryza sativa
atgtttaatattgctttattaaatatataatgaattactgatttcatcttatgatttataaatgctggttttactacaaatatcctatgagccactcctttgaatatctctgcctcagtatgacttgttgagtacggtggttggtacttaatcttgctttatttctcacccctcctcccaagaggcagaaaatgttttgaatggtgagttctatgaagattaggcttgtgccggacatcgaggttttgcctgtggatttggaggaagctacgctttgctaaaaagattaagtttagatggtctttaagttttccgctgattttctgagattattttatatttttgtaagttgtggaactatatcaaattatcatctgtgtactctggctggtcctggacagagattcaatatacattctgcttggaattcggttagcgaatttctgagcgtgacaaccaaacaccctccaaaagaaaatgctattggtgagaaaatgcgtgtatttttgggggatttaaaacaaaaatgtggtttttcagttcccatgataaagaagtgttcaaaagatttatgggtcacgattagagggttggctttcagcctataaatcattttttcttgtttactgatccatggggacaaagtgaacatttggtaattttgtgcata

SEQ ID NO: 37350 - DNA, 680 bp, Oryza sativa
agccacgtcggagggcctagggggagaacggttccatccttctctctcataatcccaaagaggtggctagagtggggcctggtgtcggttattagggttaagttttgaacgttctcggatgtagtttctttgttggcttagcggtgaccggtcacgcatagcggcggtcggttcggtgctagctttctcctaggtatgttgagttggagctatcggtgcgtgggtgggggttatttttcattttttttcctggttacgacttcccagggttataatcttggattttttttcctgctcaatcaaaaaaacttcgcactgtctggtgcgagtcattaaaaaaaaaaactctggattcaccagtgcggcagtgctacaaactgatcaataacattcgtcagacatatctctgttttacataaattaagcaacattaatctctgcacaacattgagaaacagccatctttaatttatttcacataaatagaacaacattaacttctctctttttttttcatacattaagcatgctcatctttatcaagaactaagctgtatcgatttattcaaagcgacagtagtactagtagtagtagcagcagcgacgtggtacaatatattccaccaaaagaacgcttgttactacgcaatagccctaacgtgttgcctgacttcttgaag

SEQ ID NO: 37351 - DNA, 709 bp, Oryza sativa
  unsure (1)..(709): unsure at all n locations
tctcccccccccccnannnnntncggtgagttagtcaaaaaatttatatgggttctgtgatgtgcaatcctagttgcttactgtaagattttatcacgtcttgtgttgtgaggacttcaccttcttgtggtggcttgatgctcttgtgcatgtttctgtaaaagattgttaagtgcttgatgatgatatatgtatatgctccaggccgggtgcttcatcaggcatacttcttggtgccactactctgcctagtgtcatgctttcacggttaattcaactttatagggtcttactagcagatcctaatgcacgtgaaggtatccatttttctattttgtcaaatttatcagatccactgctaaatggaaatttccctaaatcttcatcaacatttcaaatcttgtttgacactaagatttcggggcgcatctggttactaactacattggggtcattgcagaatatgctaccttgaaatgcattacgggcagtatctggtaacttgcctgggaaggtataatttttggttgggatttaacggggcttccaacaagggaaatctattgcttcaaaaaccggttggtggtcatcattttttatcccctgaataattggtcccactttttatggaaacggttggagggcaagccttttttatttggtggaaacatatatttaccctttttttcaaaaatcggtggaagtcata

SEQ ID NO: 37352 - DNA, 676 bp, Oryza sativa
ttccagtaaaaatgtacagccagagcccatattttcttcatttttcctcttctttatctgctcatcttgattcattccacagaaattcctctgccaagggaggcttgagttagtgtgacatgaactacactacttgagttacacgaaacgatccaaaatgattatttgaggttgcacgatctactgctggtaaatgctttagttagagagagtcagtcacttgctaaaattgccaacaagttactagttcacttcacaagttcacatgggttccagccaaaatgtacagccagcccatgcatattttcttcctttttcctcttctttatcttctcatcttgattcattcgacagaaacatatcgaggaagacgaatgagcacaagcatttctattgctaaccccgtgcacgttgcagctgcacatctctgccaccagcaccactttgtttggaccggcccagatcaagaacgaatgaggagcaagtgcatatgctcctgcatcgaagctgtggcttgagatggccaaaaccaccaattataccacacattgacttgtgcattacatccagagataaaagtagaaaacagttgcttaccttatccggggttactgaaacagttctcatcaatgcaaaagacacaaaagttccctctccaatcttttctcccatcatg

SEQ ID NO: 37353 - DNA, 1529 bp, Oryza sativa
taattcgtcgagttatcatataccatacataatctctggcgatatcgatatctaacctacaatcggctaacatctgtcaatagaaggcagtcgattaggttaaataccgatgttgacttagattatataagatatccaccactctatgacacatccaacggcttgattgtctagatattgtccttcttttcatacttatagctgcattagttgagtttgatcttatgagtcgtgattagaatctcaatctctagcctgcttcttggttgccgattagggtagcatcggggtttcagccgatcttacctgatttcactatatttcccttatatacttcattgatatgttgaatctgccatttatattaagattttgttgcatttaagtatattaggcttttgtttagtatattctacttgctctaatatcttaatatagagtagtatcggagtattagccgatacatgctagatctatctgatcggctatgctatgaacatatatagtcttattattaatatatatttcgatctaagtgatttatactgtctcggcatggcgaccgatctatcccaatcacttgattttagtatatatcgatgtaaggactatatatcgttaatatctacagccgatcgaataagatttagttccttcaatcaacgtcaaccacctcgatctagcaaaaactagaccaagatgggttttgataactaaaccggctagcggagccgatttctagataactacctgtctcgtgggaaaacggaaggttttcatgacaaacctacaaagagatgtcgcactctcgcagcggcggcggacgatttacagcgcaaatcgacaaagatggacaaactaagagaaaactaaaagcaatatgaaaaacgattcgattgattgattgtagattgattagttataattgaactggccatgtcccttatataggggttggtcttgccctctacaggccctcctccacgtccaactcggggtagaaaccaaaggaaacccaaaacatgccttcccgagcaaggaaacctcgagacacgacgaaacacattcggactcggacctgccggtcagaccggccacatgccgccggtctgactggccctcgaccggcggtctaaccgcccaacacaaggcggtcagaccggcccactcggaggaaaccggcagacttccaaactttggcaatttttcctattttatccttaggtgccaaatttgggtgtaaacacatgccccctgcctttttgatgaacaacgtgaatctaaaagcatagaacatgtttttggtcttatagcgataatccaattaccggccatagcacctcctaagcattttgccaaacgctcgggaagcatttcttcaagtatttcccgttgattgctcgctgaaaacgctccccttgaagtgtctccaaaaaatatgcgttccctcgaacaatgccgcatactcgataaggaccttcccaattaggagaccacttactggattccctagatcgagtacccaaagg

SEQ ID NO: 37354 - DNA, 1368 bp, Oryza sativa
aatagccggctcgcggttattgagcaccgggacatgtattacacttggctagactctaaattctttaacttgtgtgggatgggatattgcatgatgatttttatgctgatggagccacttcctgagaggcgggaatatggacgtcctcagaaaaccataacgactcaatggcgggaagctatccttgggatcacaatggatggtggacagaaccgtcattgtttaatatgaacactggtattaaaacttgatcagtccatgctaggtcttaggcttgtgaaaagaattacaaaatttactttgcgcaaaagaaccatagccatcctttgaattcctctgtcatgtgcatcattgctgtggtggcttgctgagtacggttggtactcacccttgcaaatataaaattaatcagaagcgggagatgaagcctcggaggatccctatgcctactaccaggagggagatgaagacgatggtgctcagtaggtcttagtacggtcgttgcctgtggcaatggcatgccgctgcctgaattccgctgccttatctatttctgcttttggatgtattccggaccgcccggtccgatgatttaagactacgcctgcgggcttatgatgtaataattcgtattagacactcgtgtatgtgcacttggtatttcagctatgaattcgtgtgtaccagactacttgatccagggaaatggtattgtttacacgattgattcctgttataaaaacgggggtctacatgtttcgtgttagaacaattcaaaaaatagtaatgtaaaacaaaagataacttgcaaaattatgaaatagtaataaaatcatgagattaattatgtacaacaagagtacaggctatttaaatatagcaaacgttactaatggtacataacgatgacgtgcaatttaacatatatgtagagttcaataatataacataacattacgtgtcgaagtccgacatacatcagcatacctaaagacgttaggcgccttagtccgacgttacatcacgagacctaaagacatgacatgccgaagtctgacattacacgacgaaacataaacacatcgataagttcgaaacgaattacaagcaaatccacatgccgacatagaacataagaactacaccacgtagccagacgtggcacgacgacgcctaggacgtggtcgagtggaggtagtgccttcacccgtagggcgagctccatctgctgctgatcctgatagtcctgcctccgccgcacttggtttctccttgtctttaggacaatgcttgtaggtgtgcccatgttcatcgcatttgctgcaacgcttcaccctgccagcctccgactcgtccatatcgttgcgg

SEQ ID NO: 37355 - DNA, 733 bp, Oryza sativa
ccacgttcacccggcgtcgcatcacgctgtacggcgtggatgagacggcggcgagggggagggcgctccacgtgttcgcgtgcggcgcgcgcaacggcgggttattgcaggtggcgttcagggagaacacggtggcgcacgccttcttcaagatgcatccgtcgccagccgtgcgcacgtttgggtttctctgatctcgagaggcggctgcgatgatcgtcgacggtgcacgagtggaattggtgtgtaatttattgcacatggaaaattgctggactcatttatattttttagactagatgtatgcatgcagttttaattttgtatgttttttaacatgcacaagtactatttattttcgttggaaatagtgcatacttagccattaatttagcatatacagcaagcataacctacttgcgacatgataggacaagaaaaactcataaattctatcatgctagatatcaaacaagacataaataaccaagccaagtaagttattaggctaatcacaatggtaatctagccgcaatattttaatctagatgaacagtaccatgcatatacaaaactcaggtacgaacaaaactagattagaaatgcaccggttcctttcctttgtaaacgaaagaattcactcactgaatggatcgacggagatcagcgagtcgaagcactgcagtcaatcgatgatgtcgagcggccgtgtagaaatacgctgcccagaaac

SEQ ID NO: 37356 - DNA, 714 bp, Oryza sativa
  unsure (1)..(714): unsure at all n locations
atggacttctaaacttagacgactccataaataaaacataataatgctaatttatccttttacatcttggcttttgacactacaaggaaagacaatgcaaatatatagatctaatattatgaatgatagcaatatcattgtgccaacaacacccacgggtggacctcatccagatgctgttacgagaaggaananagttatctatgtcctgagtgtgtaaaaccagcaagcttgatgaccatagtaatcaacagaggtatatatatatatatatanaaagaaacataagataatatgccacttggagttgtccatttcaatccatatattcaactcccagtcagtttcaatgccgagtcaaccttttcaatataatagggatgatagccgggggagatggggatttgtttgaaagcaagttattaccaaattaactggaatggaattaaagtaaggtgttttttatttttaactcggtgttcaatggaaatctttttttaagaaatttcgataaacttttattggccataaatggttttttaccaccccgtccattctctttttaattgattcatatatgtatatggaatatccaccggccatattaaaatattaggtattaaaattttgaatttgggattattaaattaccctttaaaaattaggtccaaatccaccccgatacgaaattaagtataaattaaaatccttaaa

SEQ ID NO: 37357 - DNA, 505 bp, Oryza sativa
aatagtgcatgctgccctagcaatgacatattttggttcagtaccaaatagggacacatgctcattgttaattactgcacatgttaaaattatcttcattttgtcccatatataatgaaaatttaatttaaatggatgaaacatagcaaaccatacaaaataatattctatttcatacaaagaagacagtggtgtttggtaaatactgtttagctaaacaaaactaggtcgttttgacgtgatgctagctaacttctcatgaatttcacctatatctatgaacgtgtgtacaaaactcggccgtcttgacgtgatgctagcttagtcctcatgaattcaacctatatctaggaatatgtgtacagactacgatcaaaatgatgcttcataatatttacaacttgatcaggaagactttactcacaaattgacattttagcacacatgttaatgagagcatcaccgcaatttatttgcttttctccaacatctcaaggaatacatg

SEQ ID NO: 37358 - DNA, 2284 bp, Oryza sativa
ttttaagactttgtgatgtatttggagatgatttgtttgaggatttgaggatttggagatgttctgtgatacgtgatgatttggatatgggaggggatggtgtgaaatcaatattcaatattaaaagcagaaaaaaagaaaaaatatcaaccgggactaaagatggagcaccaaccgggactaaagattgatatttagtcccggttatttgaaccgggactaaagatagcgatatttagtcccggattcgtagtcccggttggaaaaccgggactacaggggggttacgaaccgggacttaaaaagcatttctccaccagtgccaccggcatcattctatactgctttactagcgacacaaagttcccatcttgtgccgcacgacggcgagcctgctgctcaccaatcttgacatcactattacataaacctagatagatgccggttggaaacctgacatcccatccggcacctagaagacggcactgatgagagaaatcaaaggcacatttgaggtcctaagaataaaaaaaaactggctcgatgcattggctcggttcgagatgcatagagctctccaatcacccatgcatgagatcccagtcacccaagaatacaataacacaatcacgaataaaacaaacatccacacaaatcatgagcaaaatcaacgaggaagccgctgtcgccgcctgatggtggagtcgctgctgctgccggggagagtggagccgacgccaccggggcttctcctcagtgtctaccctcgccggatcaacattagccaacttctcctagtttgtgcagacgtgcaagttacctaagtggcacgcatatgcaagaaagtatacggaaactctttttcaccatccatttttaggcacgttttttttacgcgcatcgattgtcattctcaatctccatcatgtttttttctcctagggtttggtcggctcattgttagtgttttaaatgaattgaaaatttaaaaattcaattcaagacccataaaaaactgaaaccttcaagtaaatttttttaactttcaactcaaatttgaactttgaactcaaaatttgaacttttaagtcaagatttgaaaatattcaactcaggttttaaaatttttgaactcaaacattgaaaattttcaagccaaaatatgtcagtttttgaactcaaaatttgaaaactttcatgtcaaaacatgaaacttccaaccaaaatttgaaaactttcaactcaagatataaaaactttcaaatcaaatttaaaacattgaattcaaaatttaaaaatcttaactcaatttttgaaacttcctattcgaaatttaaaactttgaactcaaaattcgaaaactttcaactcatatattaaaactttcaactcaacatttttattattattattatacattatagaaaactacaaagcatgtgattgtcactgggcgtgtcgtactcggggcggttgtacggcttcccaccatggcgtatacgtgtgcgtggtagaaatcccctcggaccacacgccatatcaggaatttcgcgctccgcacaagcaaatatgtaattaatggctaggaaatgagctgcaattcagcaatttctgggccaagcaagacatgcataggagtgggaacacattgagaattgactggtgtgcaataccgtgtggttacgctttggttatcgcaaaaagcttgcacgataccatgtcagtttttgaaacttcctaatttttgggtgtaacttctcttttttttcacatgtggttgccacggtaaccgttacacgaagtagcagtaaccccactccaaatgtttagggaaaccctcaattgagaccacactaaaggaaacttcagacagatgtaacactgcgtgaacagaatggacaaagaacaagaaacaagcaacaagtcaaaacaataaaatatcatacaaactcctcaaatatgaaagacatggaattacataataaattgtaggaaccaaattggcgcaaccagatgttgtccgttatgaaagcatgaatgatggaaatatgtgaagagaaaacaaaatgaggtctcaatgagaaattttataggtaaatctctggtgtagctgttcaaagtaaaaaaaaaatgtcatcttttgataacttgttaaggaccaaaacaaagctcatcattccagttttttgtgcagttctccaagacggtgcatctttagtaatgccgcagattgatgggaagagagattattcagataaatgaggagataattaacctcccaatc

SEQ ID NO: 37359 - DNA, 522 bp, Oryza sativa
tgtcgtagaaaatattccacaccatgttcgcatctaccatttccatgccaagaacatggagctaaaatgggatactcattctccaagcgaaatgagggcgtgcgctgtgaggagagaggtgtgcggcgacattgtggaggatgtatcctctttgtgtctttcccaggtacttaacgctacacattaccgtgaaacttgtgtcctttcagattcctagatcgatctagctggtaagtgaggtcagcaaatatgtgtcctgtactgctagttgtcttttacgaatagatgaagtaatacgattttagccccttagaaaataaaattgttcacctcaaaacccgaatttcttatttataataaataataatccttgaattaaataaatagtaatttaattttcattttaaaaaataggttggatactgggacgaacaacgtctagtcttggatgctattacatatttcgtcccgctgtggacgttgttgtcgacggcgtccaccatatggcgggggtcagacttg

SEQ ID NO: 37360 - DNA, 575 bp, Oryza sativa
tctggtgcaatcgtgttgattctccgggcacattctatgtcccacttttctgccctcacgctcactggccgagtgctaagaagcttcaatgagtttgaaatctctctcagtcggtcactcaactttggggaggatagggtactgctggcaggagtcttctcaacaaggttatctgggagtgccagtcaggtgattatgtgatcatactttccattctcgtaatgaacttggcaaccaaataataaaagtgatgctataccagtgatagaagagcaggtcaatcccatgtcagtacatgaattctccggttccatatttgacaaggcatagtcctgaacaaagtgacaggggcacctaccgtatttttaattaacccccaaaggaactccaaacagataatgaggtattccttgaaaagagatacctcttcttgtatagtacttgctagcagttcttgtgtgctgcaatgtaccacttcttgcatttcagatgatttaacatctccggtgtttcctatttcagaacatccctgcattttgctccaaaattatatcaataggcattcactttggaac

SEQ ID NO: 37361 - DNA, 616 bp, Oryza sativa
ttccaaccagttcgatatccatcctcgtttgccctgaattccaacttgatcactcatgttgcgatcgagggcctgaactgcagaaaatggtgaaccctgtttttttatatcctagattgtgaaatgcccagcatatatacatgcaccattgtttccagtttgtaataaattgcatgtgataaatggttcaatgctgaacttattatgcactggattggaaaggtgaacctatatcactgtatcaaattgcaacctagctatctattggcttgtatccactacagcaaaatattctcctgtaacatagccatataaggtattgcaacaatgtttcacaacttagataactgtgcatcagcgttacaatcataattacaatataatgggtattagaccctatcgctagagttttgttactaattaatggtacagttcaacattacatagtttggctcaattttgaatctcacagacaaaagagaacaattacagattcagatcgtgcaaaaagctgattggatttgagagatgcactgaaaatatttcttatatatggtcaggtaaataatatgtctagtccttcatgttggacacatgtcaagcattagattttaga

SEQ ID NO: 37362 - DNA, 591 bp, Oryza sativa
attgcaatcaccatgtaatcgactcccttaccagttttgtacttttgtttagtttagattccactttatatatcagctaagagacagaaccagagatgggcatagggtagaaagcatacgctcgatcatttcaaaccaaatttccgtacttgtaggattgatcatgagaacacatctagtcaaatgtcttacgagaggatcgagcaataccatacaaatgccaatctctaacggtcaattaattaagtacagtaatctcgaacagttaaaccatcgttggagacataaggttaatgactagatagactaatcatttcttgcaacctaaaatatagctacctttagctatgaatatgaataagtcatattttggaattaatggctggagtataaccgtttaataaatcttttagtgatgatcgggagtgattttttaacctgtaatgattcataataacgaacagttatatatttgtaagccaaaaaatatatattcgaaaaaatatgcactctcactaggaactgtgccgcgaccaaataggttttctgcaaaccaatgcaacctaccttgtgactcaaatatattacata

SEQ ID NO: 37363 - DNA, 565 bp, Oryza sativa
gtgtacggtacggaggaaaagccacctcgccagcaacatgcccatcgcatcgcgtgaaacacggtgcatattgttcggtagcccctgcgagattttgtctgcaactgcaaagctccaaaagcgcactgggctgggcgagtgagtgtgccaaatgccagtgtgtgcttcgtccggtggctaatttagctgacctctgagactggccccagttatgcaactagccccgcaacttttttttttctttttcggtacaccgatgacaatcatgccaaggtgcgtcccgttccgtcccctttagctgaccttgatgaacctgatgtgggtatcgccggaacagagcccggatccccaccgtacctttcatggcatcgctttttggggtaaggacgggacatttccggcgtacacacctgcgcggctggtgggagccgtcggcatcggctgccgtccgtcccctggccggctctcggcaaaccggacgacccgagaagcgcgcagcccgtagctatcggcctatcgcgcgcggcgcactaggcaggcatcctagtttcaccgggttgcgctg

SEQ ID NO: 37364 - DNA, 602 bp, Oryza sativa
tgattacctcatgggctcaaattcagcttaaaccaagtcaggccgatccacttggaattttgagctggtgttaattaaaccattaattcctctttgcagaacaactgcgcctcacctaagcccaagaaaataagaacggcatctgctgctcggatgactgttggctgcttcgatacaggagtactttttttatctgcacaagttagaagtagaactgtcagatattgcaagacttgaaatttgaagccatgttctgtcacttatcgttttctttccttaagctgaacaaatcgacgggttcaccgagcagcgacctagatttttcttgaaactattgctgagacaacagaaattttccagctgcaaatgaattttcattcgcacatttccttttaccaacagttcttgaaggaagattttcttgggaatacagtttttttttcacctgtaaaatattttcacttttattcttgggaacaccgaggattcatacagtcaaaaattttcaggccgtttgggtatttggtaagggtaagacatctatctggctagtcattgcaacaaaaacgaactctgaaacagaacgaacatggcgaagggga

SEQ ID NO: 37365 - DNA, 1311 bp, Oryza sativa
gctgctcgacagcatcttgatgtggtaggcccgcggcggcctttccccttctcccctctagcgctggcgcgacgtccctctccgccacagctcagggagacggccgacgagctcggcggtgcggagaggaggagaacgacgagttcgccagctagggtttgagcaggggcgtcgacgagactctctctggcacggcggcagctgtctccggcgacgatcgccgccgcctcacacagggtgtggggtgtgggcatcgcacagagccacgaagcgcgaagccacgacccccacagtgcaccgcgccgttctccccacgccgcgcagcaacttttctgacgaagaacgcacgcccagttttggctacacgaacctcgttaggtcacgctctaatcccagctggtagagaatctcctacgtggcgtgggttggccaaatgccacgtgtgtgcactgtgaatgccctaacgaagatagtaagtgtcgacgggtgatacccgtagaccggatatagagggtattggggtacgttggtacaaggatctacgtagtacgacatcaagcaaacaaaagacaagaattatactggttcaggccccttgataggtaatagccctaatccagttgatgtgggattatatggtagaaaacacaggttataaagagaataagggaacttgtcggatccggcgagattgtagtcgagttgattcaactagctctcgatgacttggctcctcgtaagctccggcttcgtaggctgtggaggttatgttggctctgagattcgatgtctaaaccccccggggggggcccttttatatcgcagatgaggaggtctcctcatagaactcggaggtatcagaccttatacgatatgccaacgacccagttctgcccgagtaggattcttcccatctatagattccgtgaaaggtttccttagaatatacaggaaatatccgcctgtgcgtgggtatgccatatcgatatgtaacgtatatcgaagggcaaatggtatgcctaacccgtaaccctgacagtagcccccgacttctgcttaaattgaactcgtgcaaccatttgcgacttcgggtgtcgagactgttgtcattcccggtgcgagaaccgcggagatagaccgtagtcgagcacgccatttgaagcccaacggtcacaagcgaattttaaactgaagtccaaaaaaccggcgcgcgtaacgggaccagaaatttccggcgggcatctctctctgttccctggaatttgcaccgtcggtagtgcgcctatttaaaggaattttgggagtccatct

SEQ ID NO: 37366 - DNA, 2122 bp, Oryza sativa
atgccacgtggcaacttaggaccgatttaagtgaacgttgatggacaaatatttttttaaaaaaataatgcaaaataatgggtacataatattatataatataatggtggaaactttattttcaaatattgtagagctaatttatttatgtctacttgtagagatttatatgctgtatattctatatttgtaaagtaatttttattcaagatttattatcacttattattattattattatattattattattattattattattattattattattattattattattattattattattattattattattattattattattattatcatctcaattatatacctgaaataaagaaagaatagtaacgtacctagaaaaataaaagaaagtttatgtacgtacacaccttgaacgcatgcaagcagtaccgtacctatatggatcggatcaacacaagctccttgaacgaaagccagcaatacatacctatatatggaacggaacagaggagtacttttgagataaatctaatctaacggtttataatattggatccaccgatttaagtgaaaatcgagagatagatattttgcttttttttctcagattttctagaattttctaatttattagagcgccatgtggcggcttgagagcgttttgagaaaacttaatggacttttagtatataatagaagacagatagatagatagatagatagatagatagatagatagatgtaagagtgtcatgacccaaatttgttatgagatggtttaggaaatttgtgtgccgaattctcagctttggttgttttcccttgacaaaccacagcatgactaggtagctcattgagcttgtctcggatcacagttagaattgtgttatcccaatttggttctgtcgcattcaaaaaataaaagatatatagttcagtctattgaatgcaccatggagttgatagtgaactgcactagattaggagttttctatgactttgtttggttgataatgaggatttttattactgattcttccctttttgaataaatacaaatcaacctagtatctttctgtacatgggtttaactttgtgacaggaaaatattaaccttcgtgaatcatccaaagttactgcatgtaacaatttctactactccgaaattagagcaatactggcaaatttatctagcaatatctgaaacaatttctagcaatgtttaacaaatttatctattattctagttaaattattttgtaattgtttggtttgcattaacaaatattgtcatagcgttagcacgggtaaattactagtattgttgtcattcataatattagatctgtttgtctttccttgtagtgtcaaaagccaagacgtaaaaggataaattagcattattatgttttatttatggagtcgtctaagtttagaagtccatgttgcaggtcgacaatgaactgctcaaaaggaagggttgatgaccaaagcaatcaatagaggtatagcaaaaaaagaaagatgagataatatgccacatagagttgtctatttaaatccatatatacaactcactagtcagcttcaatgccgagtcaaaccttttcaatataagagtgtcatgacccaagagggaaatacccgacaatccttgatgacgaagaattatagtgttgaagttcctgcgcatgctccacttgaatgcttagcacatgctgcacaagtatagtcttgtagtttgtggtatcgatgactcctaaaatctccccatcatcattttccatctcaggatcattggtttcacctagaagcttagcaacaagagaatattcttcctcaacatcactagaacttacatatccaccatcatccgtagcgatgcacgcatactgacttgtacaatccttcatgacatgtcacatgcccttgcagtggtggcatatgatcctaattcttcgccccgtagaagccactgacgaggagcttttcatgggtacctgcactttaatagacttactcacctcggtagctcatggattcatgatggaacggggacgggtgtcgatggagcctggttggtggaaggcacaccagagcgtgcaagaggagataccgt

SEQ ID NO: 37367 - DNA, 689 bp, Oryza sativa
tttttagactatcatcctttgacccactcttttctgatttagaagagtcaaacagcatttatcaccttgaggtgttggatgtccaccagtgtcctaacattgattggcaaggtttggtggctttaccctcttctcttagaagggttacccttggcaactttggccattcgacagatcactttgtgagttgctttcgtggcctctccctcctgacacatctggaaatacattgctggttcttaacatctattcccctgcaagtttggatgagtaatcttccatccttggagaatttgcgtattgataattgtggctccctcacatccatctgtgtctctgaggcaagcaacatacacactgttggagtattttcatccctttcaacagtcaccatttcgttttgcaatgcactgttgagtcttgatgagttctttatgcccgcttatatgcctttcgtgaagaccattgatgtgttattttgcaaggaattagcattactgccagttcatgagctccaccttttttctcgcttggagaagctatgtattagaaactgtcccaagttgaatatgcagaggagaatgacattaccatcctctcttcggatgctcagcttattactttgtccaagcatagagtacatcgacaacagccatctggcgagtgcaatgaaactcagggacttagcc

SEQ ID NO: 37368 - DNA, 709 bp, Oryza sativa
agctagtaatggatcaagcattgtatttattgtttcacccttgccagcaattaagtttctatatggagtaaattgtaagctatagctactacactgggcgatattttcatccactatattgattattgatgattttctagctattcaattatttgtaccactccgtaagaaaaaaaaaaagaaaccatggcattgttctacttcatgttttagagacaagcatcttttaattacaaaaccacatggtagttattttttcttttatgaacatgctggttatgtattcaaatatgcgaccatagttaaaaacatatacattccaccgtattctccgtcccaaaataatggtaggctgttttcaaaataatggtaggctgttttagtgcacatttcttcagaatccagtttacttctaaattatcaattcaagtgcacaccctgaagttattttcccccatcaattacaccatgccccgtccacgttcttatgtatgcgccaagaaaatttaagaattatcctggggaagttcagcctacatgctggcaggttctgtagatatagatagttacacacaggcatgaggactgttcaatgttgcaagtaggggcggagctggtgtatattagggggtgcccaggaacccggttaagaaaattttttagctatcactcatctattttcaccatgtatgcacctctctcaatataa

SEQ ID NO: 37369 - DNA, 2590 bp, Oryza sativa
aagctgagattttttaccgtccatcatagtttttggtacctcccgatactataatcggagccatccatccagtgagatcaaacggttgacaatcactggtactgcgaggtacgggagtcccgtgtgggatacctcccacttcattcgcatgcgtggaactagaggtggccaaacgggcggcccggcccggcacggcacgggcacgggtccggcacggcccgtttcggcacggcccgttaggcacggctcatgaaacgggccgtgccgtcccgacccacgtgccgagccgccggcccaagcacggcccgtggatggccgggccgtgcccgtgccggcacggcatgcgtgtggcccgccgtgtcagtacgggcccgtgaatgaaaaatgggccgtggacggggcacggttggcccaggaaccgaaatggcgcggagggatgcgatgcggacttgcggaggtggctggcgggctgggccatcagctaggaggggtgctcaacggacttgcggaggcggctagcgggctgggccgtcagttgggagggatgagatacggacttgcggaaggatgagatgcggacttactacagtagccgtgccgtgccgtgccggcccgcgggctcggccggcggcccaagcacggcacggctactcgtgccgtgccggcacggcccgttactgtagtaggccgtgccgggccgtgccggctacaggttccgccgtgcctcgggccgcccgttttggcccggcccgtttggccacctctacgtggaacaagttgaagggcagaattggactttcgcataatagacagttttcgcagagacggtttgaatccccgacaccggcaatctcactcctcccgatccccttccttcctcgacggcggcggcgcagccaagctcgctggcctccgcctccctcgctacaaccagcaatcaccaccctgcccaatcccaacttgcccctcctgctcccggtccaaatccggccgcgccgactgcagggagccgatatagctcagggcgtcgacgacctcaatgcaccaacgaagagatgtccacagcgacgagctcagtgcccgcctgaacacaagcaaagacgagctcggtaccaatctgaagcaacatgaatcgtggactggaggacgaacaggatgctgctgtccatggcatgaccagtacatcatatcgatccttcactagtaggcaagcatcttcatctttccttcaccatcatctctcgcgtcagcctcgcagcttatgcttctccccgctggcgtcgtttgacctcctggccgctcaatccacggagcggtggaacatggaggtgtcaccacgccgatgcaccacgtcgcgaggcaggcgccgaggcgtcgggagcccagacccagctggccctggttgattgccacccgtccccttcgccctgttcgtgtcggtggccagcctatgcgcgtcgctgagtttctcttcgttcactacccatcgtacccctctagagatcaacggttggattgtaatcggtacctcacgttacatgtacctcgaggtacagaacgctggaccggagaagcctctaagaagttttagggttggacacggttattaaaaaagtaggtagaagtaactggtggaggattgtgattggatgagtagtggagataggcggaaaacatgaatggtggaaagttataattggttgggaagagaatgttggtggagaagttgctatattttagcaaatcctgatggctaaaagttgttatattttaggatggagggagtaccaattatgagatttggtcgagtctacaagtactccctccgtttcaaaatgtttgacactgttgactttttaagtacgtgtttgaccattcgtcttattcaaaaaatttaagtaattatttattcttttcatatcatttgattcattgttaaatatactttcatgtacacatatagttttacatattttataaatttttttaataagacaaacagtcaaatatgtgctaaaaagtcaacggcgtcaaatattttgaaacggagggagtacaacacaatttatgataaggaaggagagcacttctagcacggcaatttgctgtgagcttaataataagtcgtacaaaaaaatatcaaaaagttaatgagattactctatgatagatggagataaccagttttaacagaaaaaaaagagctatcaagtgtggttccgtagcacgtaccagtcgtgatatcttttgaaaggctgtattatctccatcagcttggggcaatcatttatataacctgactttatttcagagacagatatagcaccaacaatagagatgaggtctggacagctattaagtcgaaggatgagtcccttgagtgtcatagaactccccagatggctgttgtctatgcactctatgcttggacagtcgactaagcagagcttccgaagagaggatggtaatgtcattctcctctgcatattcaacttgggacagccctcaatacatagctcctccaagtgggaaaagctatggaggtcatcaaccggcagtaatgccatttttttgcaatattttacctaaa

SEQ ID NO: 37370 - DNA, 607 bp, Oryza sativa
ttattaccttaatacataaggaatcacgtaacttgggcctttatccgtataatatctatacatgaactacccctacttgtaatcagacaatccatgccatgtaggtatgtggtatccataatctcctgtttccattttcagagggcctctgaaaatcaaatattttaagtgttttcttaagaaaaccactctttagaatcacccaaatttataggcggtgtttgacagcagtcttagccatcttcataggcggttaaaaatttaaaccgcctataaaatgaaaggactgcacaaattattttttaatgttttgcacgggattttcttcgtgtgattgtgcactaatttcatgctgccttaattggttattttgggttcgtcgagatgaacaaatatatctgaaactctgaattggtctgtccggacctagaaaagtgagatggtacaatcattggttaacgatgcaaaacttatttcaaaaaataaaaaggatccgatgggggcgatcgatccaaaacttgttatctaaaagaaaaacagatccaaggagatgtaagcttttgaggtgtattaaagagactaactaaaaggtttgtgagatgctttg

SEQ ID NO: 37371 - DNA, 500 bp, Oryza sativa
accttataatgcgccgagcagctgatagaatgtgaatctccccttatatttcctccgacaaacgttggggctctttcctttggtagtaattggtcatttgatcagtcatttcaactttatatgggaagtggatttttatccccgatgagattaaaaaatttcccccccccttttcgccctttttcccccaaattttttcctaaattaaattaatgggcgtttcaaaatgttatcaaaattttttttaaaaaaatgttaaaatagatcaatatataatatatcttttcgcaaatatgcgagttaaaattcaacgtatacaattcaaaaaaataacaaatttgactgtgaattacgcgttctattcattgtcaaatttgttatttttgtttctacttgtataagttggatttgaatttgcatgtttgtgaagtgatatatcacatattgatatatcctactaattttttttcaaattttttatgacattttaagtaacatgc

SEQ ID NO: 37372 - DNA, 516 bp, Oryza sativa
atgcgaggagataaaagttaattcagaaatcaaaactaattgtaagattgcacttgttcacaaaaagagagagagagagagagagagagagagagagagagaagcttttcctatcagtacaggtccaagcatggatagatggctcagtgcacgcacaatgcaatctcgagtggaagttcagattattcagaaatgtaatgcacaaaggcgagcagaaacatcatctgtccaaaaactatttgcccaccttgagattaatctgtatacagagcttaatggtaaaacagttggctgaaagtttgaagtatttagcccttggcatcgatttcctataaatcgatatttaagctaactaacattttaaaagacctctctgcggtattgcagaggatccgaatccatctgcagggaattcggacactgttccctcacatatccccttgaaaagcattggcgcacgtgtagttgctctacccgaactgagctatagcccttgtcagagatatcttaatatat

SEQ ID NO: 37373 - DNA, 1750 bp, Oryza sativa
ttcaacctatatgtttgggtttcgagggttaggaggtgatgaaggtagtaggaagtaacaagggtggctttagaggatggcctaggacgtggtggacacaagtagacaacaaagtgaagccatgagtttggagaagggtagtagcaggggcatcatatctacaaaaggttaggaggcagagacgtctccacggcatgaactttatgttgctaagacaacgaagaacaacaggggctagggcaccttgccacttattagcttcaagagaaaggcgcctgggggggaggggtaagtcgagatcggtttggtaggcctcgctggtgccatttgcaggctcttgcactagctaggcagaaggaggcgatgcatgtggggaagagacaatggattacaagggaaaatgtgattacgtcgatcgacaacaatataggaaaataaggagatacagttagagaaacatgtgttacatgaatcttaaaatatcttcctatctaaaattggatgaatttaaaataggtatataaacattggacattctctagatttaatcattctcaaatgttggactgccgttttctttttactaatggaaatggcctactgtggtgtttgaatcttctgaagatgaagataaagattaagtatttcacgcaaaacgaggtggtaataatatgtgattaattgagttttaattattacaaacttgaaaaatgggttaatatgatattttaaaacaattttcatatagaaagttttcgcacgaaacacaccgtttagtcgtttgaaaagcgtgccacgagtatacaaaatttaatcctttacttgcagaagaaatgaacatggcctttggccaagatacataatagtggtattgttgcgctccttatgccctatttaattcagcttaggattattataatctggattattaggagtaagctgaaacaaacaagtaaattattatgctagattattataatctataagtcagattattataatctaataatctcctctagagaagctttttctagattattgagtggctaaagacccagtacccttagatgcctctaataatccagagaaacaaacaactcgtagtttattttatatcagcttattataatccagcttagagtaatctgatttaataatctagattacaataattttaagctgaaacaaacatggctttaatcacttctgtattaagagatgaaagctgtattaacaattttccactcgtacgtggcgtgcgcctgcctgtttgcccattgccatgagcccttgaggccttgacaggtgaaaattggttagcatgttcggactctgggtcgtggtggtgagctagcggccgacccgtttgcagcaattggatgcatcgatattaccaattcagtcaagggtcacgcgggtgctagtcgagtcaaaagaaagccggcctaataccgtgcagggcccaagctaacagcacagcactggaccatgcgtcaatcctaaccacgcagtcagatcagctcatcagcaccgtacaagtacgacctcaccaaaaccatctcgaaattcacgcacctctctctcgagcctgaattggctggcacaaaccatggcacttgagtcactctgccatactgataccgttttaagcgtaggagtagttagaatgcccaagctgtttcaagcctgaattcgcagtcacagtgttgtctcacacatgcccatagtcatggcaacagcatggcggatg

SEQ ID NO: 37374 - DNA, 657 bp, Oryza sativa
agataataaaaggctctattaagggagacagaaaaaatatatatatggttcgtaaaagggtactccttttgtaaaagaaaaaactcaacctagttaaaaatgagacacaatagtttaacgaatctggacatgattatttaaataataaaaagaaaaaatattggtaaaaaggtattccctctttttaaaaaaacagcatagttggggatgttatataatatggagtttagtccaaacgaatttgaacaggtacctttccatattcattgtaaacatagattgtgttcgaatcttataaagattcagattaaatatgggcatgcaaaaaaaaagctattagcatatgattaattaagttttaattattacaaacttgaaaaatggatacatttaatattttgaagcaactttaatataaaaagttttcactcaaaacaagtcgtttaatagtttaaaaagcgtgataataaaaactaaggtaaaatctttatctttacaagaaatgaactaggtcatagtgtctatctatttgtagctcgcattcaccatgcaaaatggatgagtcgtgtacctattttctcggttgtcttattgttgcaattgcttattaggcaaggcaaaataaacactgggtaccgagctcgaattcgccctata

SEQ ID NO: 37375 - DNA, 786 bp, Oryza sativa
aataacttccatataaataaagtaggtacgattttgatacaataaattaagaagttatgtgacaacttaattatttggagcattttttatataaatttaattttttaagtatttattttgacaatatagtagcgtggatttgtataagcatatttatatttttatcctaataactaataactaaaagttaataaaactggatgtaggaattattacattttggttgatatttgagaaggtgaagaaaacaaaaaattcttaaaggtaattggatgcaaattttatgtgcactataattcttaaagattaagttcaatattataaggtaatatctgattgatatttgagaaggtgaagaaaacaaaaaattcttaaaggtaattggatgcaaattttatgtgcagtataattcttaaagattaagttcaatattataaggtaatatccgtaggaatactgtgtaatggcatattaacatcgtgaaaaaaactcacctagcatatgcttcgccaagttgatgcaccaaaatactaaattgttaagttcttgtactagaatgcacccacttgtcaagttgttgtactcggacgtccaattctcaagttcttgcactatatcgttgttataccgtgggtgcaatttactaaaaaaacaaaagcgcccgggaggcgcgcagtgaacacatcggaataaaaaaaagacgaaaataaccaaaagccttagcgtgtgggcaaaaaaaaaagtctttcgcgtgcaaaacaaagtcgggaaaaaaccggtgaaaaa

SEQ ID NO: 37376 - DNA, 855 bp, Oryza sativa
aaagagagtccttataataacccaatacgatattaattaaaatttagaataaaaataaaataaaatacaaaatcagaaaaaaaaagaacagttcatgtaggaatataatttgaaaataactaaaattcgaaattaaagttaagcaatattgaaacaagagtccatataagaaacaaatatgatattaattaaaattcaaaataaacaataaaataaaataaaaaaacagaaaaaaataaaaaacagagttcatgttggaataaaatttttaaacaatttaaattggaaataaaattaagaaatatcaaaagaatagtctatatagaacacaatacgatattaattaaaattcgaaataaaaaataaaataaattcagaaaatagaaaaataaacataagagctcaagtagaataaaatttataaataactaaaatttgtaataaaaaaataaatactattgaaataagagaatctagaacacatgacaagattaattgaagttcaaaaataacaaataaaataaattttaaaaatagaaaaataattataagagttcaagtaggaatataatttatgaattaaaaatatcggaatgaaagatatgcaattttcaaaaaaaaaagtcaatctagaacacaacgatgacaaatgacaataaagagggaagaagcaataagcctataaaggagtagagtactagtggttgatgggatatctaaaaactataatcaaaaccccaaatagaatcccaatgatgattaagaggagtgacaatgggtatgtcgttaagcagcttggtcacgacggttggcgggacttatcgagcgtaaaaataaaccccaatgataatcatg

SEQ ID NO: 37377 - DNA, 726 bp, Oryza sativa
  unsure (1)..(726): unsure at all n locations
tctgcggtgcgtcnccgatccgatgtcctgctaccgccaagcccttcctttgcagctatagccaagcccttcctttggagccgagcccttcctttggagctacagccaagcccttcggagccgagccgatgtgttttttaaagtatgacagtacaaagccattggtattatgaggaagaagagggcatatgattattttttaaaagttttagttttgacttatattttaatcgacgcggtgcaaacagacaagatgaataggagattgaaacaaaataggtaatcggtttgatgactgtctcgagattttttaagccacaactcaacgatacaaacttattaaagaaaacaattgagttttctaatccacatattaataaaaaaaaatatttgttttcatacataattaattgtatatataagcaattcagcttcttagtctaattatttcaattatttatatagtaatcaaaataaagatgttgttgagcataatagatcacatcattccagatgggtgcataaactgttaaaaatatctttttttaatcttatttaattagattgtgatgaattatatttaaaattaaacctaaaactaaaggttgctacaactagttcagtcgtatagaaaaaaatgaaacatatttagctgtcaaaattagatctaaagagtattatctaagacaaaagattgaatcgtataatataagtattcagactttt

SEQ ID NO: 37378 - DNA, 588 bp, Oryza sativa
cggcctaaagtcctgatttaggaaaccgataccgtattggttaaggtttctatcttgtaatcctgccccccatcctatataaggtgggcaggaggccctctatggggcatatatgagacaacctgatcgtcagatcaatacacactcggcggattcaaatccccaaacaggagtagggtattacctctcattgagagggcctgaacctgtctaaatcctttgtctacacatacatccacttttaggtctcgtgcgctaccccgtgttattattgccgaattcatgtttcgacagttggcgcgccaggtaggggttgcgtcgagtttcctatcaacgagcgcgatggaatcaatttcatgagtcgccgacttcgctttcgctttgggagttttcacttactttccgtcgaccacttcttcaagctcctcttctctgacttgatccaaatcagtcagggggaaactcaatctgatttttatcattatttatcatattgatttttaatctcagattaatttcttgctattttttgttggtggtcgcatataactacgcggcactattgaggcgattgatgctggtcatgga

SEQ ID NO: 37379 - DNA, 801 bp, Oryza sativa
ttgccaatcatgcacaccaaggggtgatcgatcaaaccatgcaggtggatcagttgtattcagctgaaatgacaagctagagcaagtaaaaatgatcataacagtagcagcccactcagcaagtatgttgcttgacattcatcatggccaacccatcatgccaacaagcaatagaggtgttcatgcatcctatctccattatgattgcattgacataaaaaaaaggaataaaaaagtttatggctggttaatggtaatggataactacagctcataagttggcaggtgatggagggtggtgaccagttgttgcaaggatttcctttaaccatgtattagtacctctttccgtcttctcattgttaaccttatcctccaattgtgcttctagcacaatctagaagcgaaatgggagagtgaacagatcaagcataccctattcaagtttcagttcatcttaagcccaaatctcgcttctagaatgatctagagacctttggattagactagcctctcttatcgcaattcaagccacaactggattcaggtacggactaaccagtagcagagaagggcggaaacggaacaattgaccatccagtgtgtcagtacttcctagtccaaagtaagaaagcgagctttattgaactagaaactcgtgatctggaagtttctagatccacgcaccgagatttgctcaagcgacacaccccggatcccgattcctctcgatctacctcggaaccagggagcctattgcctagacgcttggactacaaaattctcgtcccagaacccgaa

SEQ ID NO: 37380 - DNA, 761 bp, Oryza sativa
ctatatcgagagaaacaagtgtgttgcgaagctcaagttgccacttaagattaaaattttcatgtggtacctgcttaaagggtgtgtgttaactaaggataatttggtaggcgtaactggaatggtagctagaggtgttctttatggttgaagaaagagtctattcacacatctctttatggatagacattttgcgaagttgttatggacagcaaatctattgtcttttgggattaatgttgcatctagtatatctcatattattaatgagaggcttttgagagttgataacaaaatgagtaaactgatacttgttggagcttctgccatttgatgggcaatatggctgagtatgaacgatatggtttttgacaaatcaccatcattttcctatatgcaggtcatatttcagggcaactcattggctccggttttgggcacaactacaaaggtgtgatgaagatgaacagtttctgaaagttgcgtgctgaaagttggagaccacggttatgcaactatttgccaattatggttggagatttacaaatagacttcaataattgtgatctccttacgctaggctggattatttgtattctcattcggtgcgttctattcatttagatctacactatgttcatgaaaactactatataataaacggctgtagctctttggaataagggccggatattatattccattatctaaaaaacttgatcaatcataggcataaaaatggtgagatcgatagagataca

SEQ ID NO: 37381 - DNA, 751 bp, Oryza sativa
actactttgtgatagaaaatggagaaaactgatgaagaaatcctatagtgatatatccgatggactttgcggatttatgcgctggacccatcttctcctttaactctcgtgattccttcaacaacgaaacatgacaataagattttacaggtaaagctagtgtaggacgtgggggtggatagagggaggtcagtgcaatgacggcccaatggcgggcaataggggaatcaagaaaacctcagttaatggccgctcggcggtgatagaagaagaacaatgtaggggcacctatgagaaggggaaataacagataaggagaagaagttaaatcaggctaaagtgacggaggaaggaggggcatagtttgagaggggtgctacagttgggcaataagactaaccatgaattgacggaggggttagtagtgcgctagataggggccaccgggccaggttgtggcctaccttactgtctagatatatagcaccttattgaaccatgatttggcggaacaacgatattgtggagattagagaggattgttggtcggtatgacgttgccaaaatgatattgtttgataatgggtagttttctaattcattacagattatctatgtgtgttcccattggtttcttttctggtatatgatgctacgactgaagggaaaagatttatgtgtaatggaatgtgttaattaggatttttttttgtttcactttctctctagatgacatagttctcttagattt

SEQ ID NO: 37382 - DNA, 656 bp, Oryza sativa
tagggcgaattcgagctcggtacccaacttgaaagatatattaatatgatttttaggagaactttcctatagaagttttttttttgccaaaaaaaggttaacatttagcaattttaaaaatgtgcgtgcgaaaaacgagggaggagatgttggtaacctacacaacctataaatgatttgggatgtgagaacgataaatattttttcaaaaaaataatgctgaaataacagttaatatgaaacaaagggagtacatactaatgtaggaaacatgcatgctgtagtgatatgacgtgcggggctcttttggattgaaggaattttaatggactttatggaggattcaaatccttgggaatttttttgttgaaccctttattgcaaaggaataggatgttggaattcctataaattgccctcctttgccccccccccaaccccaacccaacccaattccatagaaaaatacacatgagtcaaacttcatgttttattttccttcgtgaactctcttcctttacctctttagtttccgtctctatcacaagcaagttcctttgaaattcatatatttatttcttgacaactatctataggaacaaactttagtattcacatgttttagaataccataggatttcacagtgtcacattct

SEQ ID NO: 37383 - DNA, 797 bp, Oryza sativa
  unsure (1)..(797): unsure at all n locations
cacgcctgatgattgacatccactcttacaccgncaaancatatggtttatacattatttattattggattaaattgaatggtaatttactgaaagatatttccaacattataaaccccaagaagatcttccctggcgcgtgtggaagtttgatcagatattaagcattttagataaagaaattaaataatctggccctcttcaccaaccgaatgtatcagagattagcatttttggataaataataaggcggccgagaagagggtagatttttttcttcagttctttgcgctccaatccgaaccgcacgcctctcatctgacggtcgcagttgagtcggtaacaaattaacaaggtgataagcgatccagatttatgaagaaacacccattcttctcttcgaatttacacaaggaaacgaattcatcttaacgtacatttggattccgtttcgatttaacaagcaaagcaatcgtttcggaatagcagttgagatattagactcggattcgattcgattcaattcatgcaaataaatagataagcacagatcacctactgatcattggcaattaatccaggtctgagatcgatccgatcgatcangctttctttccacattaaaccaaaattttttccggggggggggaaaccggggggggcccttttttttaataaaaaatttggcgacgatccctcgagaattagactatttaccatcaaattcgcgtgcctcaatttttttaccacccaatccggatgccccttataatatgtcaataggactgcttaatagt

SEQ ID NO: 37384 - DNA, 781 bp, Oryza sativa
  unsure (1)..(781): unsure at all n locations
ccggcttgatgtctctctgaccccaaggaaangaggccaggtatccaaaggcccatgtctctatttaccaggaaatgctatgggtccccatccatgcccccctaaaacaatcactgcttttctcctggaacaaaacatactattataactttataagggatgtaaacatgttgtatggtaaatttagctagccagacatgattaataaggatatgcgctttacaatacaaaggggtgttgtgtagtatgaaagatgactatattgtattataatttgatgatatctttaatgcaataggtttatatttaatcattaacaagcacaagtgattatagctatgttaaaatgactagttttatgatcttctataatcgatacgagaagacagggcagatgtcccttttgccaaccattcaaactcatctcgtttgataactacaagattgaccaactctactcttgaacttatgcatatgatccataaaaacccaagcatatgtggtggtcactattctagaagataccaaccttgtgaactatttcgtctcatgtgctgctaatatgctatatacgagctacgtgttgagtaccctgggtattaatttttttnaacaaaaccaaacacncccaaaaattaatttccccctttttcccttttttaaaaggggggttttacctcactgcataaatcgcaaaccaccaagaacaccctaatacggctggaactaccaacataaacatttggccatatgttaaaacaaacgtcaccaaatcacaagg

SEQ ID NO: 37385 - DNA, 504 bp, Oryza sativa
ccagtacaatatttgtggtagcctatctatctgttgtcgacttggcagtctgaagtgctaactcgtagtcgacaacagggtagtcttcctcctcgaactcgtgcccggcgagatcagagataacgctagatccctacagccggcctccataggtaccagatagggtcctcctaggcatatctctgatgttaatatccggcggcttgtcctggcgtatgttggcttctgttgttccttctattgttgcgtgtcccctctcctcctagggggtcttgtatttatacccataggtgtccccttgtccaagtagaactagggagtccaatatggatacaatccgactagtccttgccgtttccatatagaactctagttgtctttccttatccagaacttcctccaactcaaagtcagtttccgtataagacatggtatgtggtgggtcctgccgagatttagtcaactactattgggtatgtggtatccataaccctgacaatatgg

SEQ ID NO: 37386 - DNA, 731 bp, Oryza sativa
  unsure (1)..(731): unsure at all n locations
aggcctgaatgcaatcccatgagaacccattctgacagccgcagnngactctagaggatcccctgttgaataatataaccaaactgaacatatatatatgtccacaggctaatttaccacaatgatatatatatatataatatgagatgataaataatacggtgacactgccaatgttgcaagatcgatcgatcgatattacgtacattacatatggctggcccataaaacaaacttgctatacattcgatcagcgtgggactgaaacgggaacattaacgaactacgtaccgatccatcgatcgatcaacattgcatagtactctctcgttcgtttctaaatatttgacgcctttgatttttttaaatatgtttaactgatcgtcttatttaaaaaaattaaataattattaattattttttatacaattgatttattgttaaatataattttatggatatatatattattttataaaagtttttaaataagacaaacggttaaatatgtttaaaaaaattgaacgcgtcggatttttagaaccagaggaactattaattattcatggtgcagtgcatgtagatgtaacttacctatatatatattcccttcgttccaaaatatttggaggcggtgattttttttaaaaatttttgaccattttgtttattaaaaagaaattaagtaaatagttaaattttttgtattatttggaatatggtaaaaatag

SEQ ID NO: 37387 - DNA, 598 bp, Oryza sativa
  unsure (1)..(598): unsure at all n locations
ccggcaggatgacaactccttatgcccgcacgncgactctagaggatcccctgtccgtgcatcttcttcctgcagctgacgacaccattgcaagctcggtgggagtagcagtagctctgttgttcgggtgttctgctcaatggccgctcgagcactgtctgctgctgccgccgccgccggtcgccggatggcggacagactggcttccctcttcttgcctcctgcaggtaactggctataactgaaagaatgggagctctgattcatgtatttctcctgatttttttttttttttgcttcttcattggattgtttctgctatggtttatcagcgtccagtacgttagtttagtgtaggccgtgaatcgtgatgagctgatggcgaccccagtatcttgccttcgaacttctctttggactatttttttttcctctttggtttgcaaccctcaatcgatgataaacatgccacctttttatgtggaactctgaatgaacgttcatttgggctgatgaactctgataaactctgatggagaaagaaatgagccaagcaaggtcaagttcctttggagatgtttctctcttgtggtttttt

SEQ ID NO: 37388 - DNA, 801 bp, Oryza sativa
  unsure (1)..(801): unsure at all n locations
ttcgcataaccctcccctacccatccacncngngttaaggtttcaccccccacccctcaaaagacagtgggcggtcccctcttgcgcccggtaaatacgacagctgaacaccggaccaaaaacccaccccccccccccgcggggggtcccccggaaaccccccaaaattttccccattcaaacggcccccaccccttcgcccaccggtgcctaggaaagggtcgagctatacttcagatcaagcagttacccactcccgcttgtggtaagcactgtaagtcttccagggtttctcgtgaaccggtccttaattgccatgggtgcgactcgcaaaaccatgcacccacagcccaccattcagtcgtattttagttggataattacgaccatgaaacatggccagacgtctcgagcacgcagctcaacaagatactagaatgtctaatactgcaattatcccatcgactgagctagtggtaattaagcatggctaagcatatagttctagctaggtcacataagtaacacgagctagtcaatttatcacccaaggttgacaaaggatagatatcaagtaaccatggcacaagcgagcagataggtaaaccctgaccccgtgtaattagcaaaacatgcatatttatttgtaaacggtaaaacatttataaattaggatcaacatgctcaaggggaatgtgtgacttgccttgcttcttcacttggatcttctaaactcttttcctcgcgaccgcggacttccgaaacgacggattctacacgctggcacgcaaaacgaggaaa

SEQ ID NO: 37389 - DNA, 541 bp, Oryza sativa
  unsure (1)..(541): unsure at all n locations
tattattttcagtagtacgcagccgcataatattgaatcatgcattaataatgcttggagtaactaaaatggtgttcaaacttcaaaccttttcagggattatactgaaggccttccttacaatttcaacctcaacctacaggaagggcgatacgatctgttgttaattgaccaaaaaggttctacaatatgccaccatgaaaataatctccaccaaagaaaataagatgaacccataaataatcactttcgatgtgtcgcaaaaatgatagcttcattcacccaccttctgctaatcattctcgagattctatgatgaagtcaactttagatgccagcctcaaaagagtatagacaccagcaacagcaatagctttctccactgcatcctctagcaaagaaaaaaaanaaagggccccaaaaaaaaaaaaccccccactactgaatacagtggatacaaaagaaagtagtgcaactaagacaataatgcaagttcataaaagtgccagaagtatatgaactgacactgctaaatgctgac

SEQ ID NO: 37390 - DNA, 533 bp, Oryza sativa
gaattggaatcgggatcgaaaactcggatacggaaatgaaatcgttattatcgaatacagatacggagcgaatatgagacggaacgaatacggtagcgaatatttaccggtatataaaaaacccctcaaattgagtttcttgatcaaggaagagatatcgcttattattttagttcaaaatctccaacatttatatcgtcaattttatagacggtcccacaaccatatgtgaaaattgattttcatggctgttcctctaagagatccatatgcaaatatgatttatcatttcctattcccaagaccttttactagatgtataacttacttaccattgtataaattggagattttatttattttacttcacatcttcgaaacttgtaatgtctgtattatactttaaatgctttcaaatacaaatgttataagctacaaagtggtagatcccgttgagctctttaactttgatatggaacacatctccatcagatgtccttgaattgtaggggctgtatggcacagatccagct

SEQ ID NO: 37391 - DNA, 624 bp, Oryza sativa
tgtcgtcacggatgggcgcgctgctggcggcctgccgggagctggccagcctggatgagccgcgggagcacctgagtcactgccggcggatagcctgtctgctcgcgttgaggtcaccgagtcatgggagcgccttactcgtgacgtcgtcgagtgggatgggtgagagcgcactggggagacagccagactggagaggagttagggttttctttgtttctgtgtgctaggctttctttcgcggccctaaagaagaagacctgtggttctctgtgccacactctatgtgagcatataattatgctatggaagattcgcataacacaggtgcgaatgatcgcgcaaaggcactcactcgtgtggaacttgtgatcggatcgctgacatatgggtactactgacacattcgcgctaccatagcatgccatattatctcacggtgtgagttggagcccatttagacctatatgacacccaggacatggttaggctgccacaagtgcattatgagagttcatggacctaagtgacacacctctacacgtttaggggccgctcgtgcactggactctattctgaaaatgcaggacattatatccatatcaagtgtaaactatgagtggt

SEQ ID NO: 37392 - DNA, 708 bp, Oryza sativa
tcctgcaccccgcttgaaaagtaaataatgaaagcaaaaggaggaaaaaccagtaaactatgaaagcaaagaaagaaattgtctcattgcatgaacagtgaacaataaaagtagagaaagaaaccgtttgattgcacgactggtaacggtttcttctctcttttgtttccagggtagtaactgtttcaaggcagggattttacatcatttcagcaaaacaagttcagattccggaagaaatgttccgacattatctgttctaagatctacacaacagaaacaaagaaaaaaaaatgttcagtcacctgcaagtgcatttctttaccaagttatcgttggaagaggggttacccttgctagtctggttacgacggttactatgcaaaaccgaaaaaaaaaatcagacaaatttcatcctaagtttaaatttttatttaattttttagtaacttattaaataaacctggtatttttcattaccacgccatggcaaacaagtaaccacccatatcttaaacccaagtcacaagcgctgcccactgacacctcggccccacaggtagataataatattattagtcaacgaggctgtcctgtgtagcaggagcaataggtgccagtgggcagcgcttgtgtctagggtataagatttgggtggttacttgtttgccatggcgtggttatgaaatataccaggtatatttaata

SEQ ID NO: 37393 - DNA, 530 bp, Oryza sativa
aatgccataagcccccttacatgactaccacattctagttgaaagtagaggggctattattggaacaaacatgctttgatcagaccagagaaaaagtataaagtgcaaaggataacgagtactaatgtactatggatgaaacagtaaaatggtaccatattaagttccttatcatgtccacagccggttgcatttttacctgcaagaagatagatacctcaatctgagattgtgagacatgaacagtgacaacattctgtgaggtgatagtgaccaggagaataatagcatattgtttttcgaaagttcagcatcaaagccatactgaacttgttggaacaaaatccaacagaactaataactagtcatggcataacttcgagactgctttgcctacttccatccccaacttgcatggctagatatgcgtagacatgtgtgtcactcttctaatgcatttactattttacttgcattcgttgtaacacccaatagcatgttgctagttaatagtaggaaaaaactgaaat

SEQ ID NO: 37394 - DNA, 503 bp, Oryza sativa
aaaaggtagtcctcaaacatgttcaattgtgcattgatatccttcaatatgcactacactgtgtttttataatatttcctcacaaaaaaagatttaaagaaatccaatatgtacagcgtaccacaggatcagtgaaacctatatcatatgtatagtttggtagtatatgtgtgtacacggatcaaacatacttttatgattcgatcaaatatatacttttatggcatgcagtttttgctgatgattgtagttgcaatttacagttatctgctgcctggtgaatggtctggtgattgcattgaactcacatggctctgtcgtttggaaggtgcaacagctttatacagtacagttttgcaattgaatgacacatcatggatgtagttgttgatcatctgtaaaatactagtggaaattcattattcgtatttggtcaaacttataagcaggtgtcattagagcacatataaactgagtacctcttatgatagctatggcagtat

SEQ ID NO: 37395 - DNA, 508 bp, Oryza sativa
gcatttccatactggcaggaaggcaaattctttataagctcacactactttcccaaatatgatgattacttgttcatgtcctttgctcagttaatagtatatgtataactagaatgatggccgtgtagattgcgtggctaacattattgtatttttctcacataataacacatatattcacattttattagggacgcgctaaagcgcccctggggtgtgtgctagctaaaacgcactctcacaggtacaccccctccctcccccttaactcctctgcccctccctcccacacctttcccaccactcttgtttgcacattttctcactcctgatttttcttctcacatccttctatcagtaattgatttactcttgatttttcttcccacttccttctctcggtaattgatttactatcaattggtattcttccctcggtaaatgaattactcccaattggttcttagcccttctctcattataaatatacttcctctgttttataatg

SEQ ID NO: 37396 - DNA, 508 bp, Oryza sativa
  unsure (1)..(508): unsure at all n locations
atgggccttgaaatgantatcgattgcacttgtacccgatgaattatttgctaaaccagtggttgtagagatgaacccgataaattcttttgtaactgaaaccggattgctactcatttgacaacagctttttgcaactgtaaagggcagccagaaacaataaacagagtgtgtgcagacttaaaaccatattccctccatttcacattataaaacgttttggtctctccatccctcgtctagattcactagcatccatatgaatttggacacatatatgaaacacatacatggattcatgcagaatctgtttaaaacccaaaaaacgtcttataatgtgaaacaaagcaagtggcttagatcaggtttgttgtcttgtgttcaattttttcaactgaataatagtacttggtagaaaatcttttaaaaaaacaatagtaccaggaaagatattatgaatgtaggcacggttttgctttgccttgtgcaaatgatagtctactaataa

SEQ ID NO: 37397 - DNA, 635 bp, Oryza sativa
  unsure (1)..(635): unsure at all n locations
agagttgganacatgagaattgacattccactcggtaccctgcgatggaaaagntagaaaatcgaagaaaaagcttggagctaaacaaggccaagttgatgggcttttatgtttctgtatccatgatgcaatgaacctccactgctctttgcattgtctatacatctactacaacggtactttgggtttttgtctgaagtgaaccaaactaagtgcatactacttgtcttaagatgaattcagtcattttgctacgtctcatttacctgccagccatatggatgatagtagatgcttgtgttttcattcgccatatgggtgtgaaattctggtctttttactataccactgaatttgaaactgagtcgtcgagggcgtgttgcgacttgtgacgaaacagatcgatctaaaaacgtgccaaatcgcaagtaatcacaaactggatcaaattcgaagaattttatattctgcaaaaaaatacaaaatgggtgataatagattttttttatttttaattttttaaaaaatatttacagtaatattatactagagaaaatattacagaaatagacttcttgtcaagcctcccctttcccccccccaaaaagagggggggccccgggggggggaccccc

SEQ ID NO: 37398 - DNA, 629 bp, Oryza sativa
atattaaattttttaataaaatgaatggccaaacattattataaaattaatggtgttatccattaaaacatgaaggtagtatatatataagtcattgattaattgttgtgttttgtttagaaattgttgtgtaattgaaatcacagagctatacgtacgtactgtatatcacgaaaattgaagcagcaacagcaagtagtagcataatatagagaaaccggctatgtacttcgtatatacttatgtatgggatgggttgtgttggaattagtctcaagactaaattaagtgcagtactagcgaaaggtggtgatgattaattcaatgggtggacacgatacgtgtacgtacgtactttaggctagtaataaataagattagcttatgttccggctattcgcgcccgacgatataaaaacgatgaacgcggtggagaccaagtctaaatatggttgaccacgtaaaaatcatagaaatgaaatgggcatacatattttttttttgaaactagaacacgaagggcccctctttccattactggaacggaataaaccaagtcattacaaggcggaactggagaagagaaaacaaaagatgttaagagaggggaaaaatgtccagccaaagct

SEQ ID NO: 37399 - DNA, 1696 bp, Oryza sativa
aacccttactacgttttaatcagaaaagaaatgatcttactgacatcgctttagtcgctttactagctagctaatcactttggagtttcagtgctaagtgtcaaaaagcgcttgtactggcagctacagtacattacatgatttacatcttatagcacactagtatatacgcctagtaaaaatttccgtaattttgataaattgaccctttgaaaaaacttattttgatattgagccgtgtcaaaaactaattttaaaaatagaccattttctcgcgccatcgtacttggcgctgagctacaacgtattagcgccactttctttggcgttgagatgcgatccaacgtgtcacgtaaatcacacgtcatgcgatgcgatgtcagcgctaaagaatttggtgctaacctccatggtatagttgtataaatagtatgcatgtacattctagccttatggaaggtctatcctggtggtgaagggctgcctctcataacaagaggtcaagggttcgaaccccgtaacttcttatttttcttttttttccttttaggatcaatactgcatacataattatgtagcaaaatagagggtgaaaaaaaatgaaagatgtaattttataccaactattaagctataaataccacatacataattttgctccttccatatttaaaaataaaataaattaaaaaacatccatatttaaaaataaaatgaatttgaaaagcatgtgagatttttaaatagaacagcaaaagatgcttatacttgcttggctgaggatcgaacccattacctcgcagtatttagcacctagagttcaccaagctttcttgtctttgtgtgtgcaatggaagcttgtagataactaatatttgtaaattgaacaaagagtatttggcgatgacctcggatgacgtgtaaaatccgtgacacttcggatgacatctcggcgctaatctatatggcgctgagaaaacggcctaattttgaaattagtttttgggatgattcaatttcaaaataagttttttaaaagggtcaaattgtcaaaattacggtaaaaattatccacattcacgaacaatggatcaaaatgccgtctctcacatcaatctcatgcaccttgcagtgtttcccgccggctccgccgcccgtgcgcgtgtgcctccaacacattacctgcatacttgcatagtgccctactgtacatatgactgtatcactggtcactgcatgtggcgactcgacatggagatggggggcctctcccagcctcccctctcttgggctttttggccgcgagccaacacaggcacacagcgccgcccgctgtagcgcgacgtgcggccgatgaatgtggcacggaacgtcgcgccgggcacgacaaaagcggaagggcctcggactcgagagatggctcgccgtcggttgtcgcctctacgacggggaggataagctgcggctatagggcaactaggcacaaccaaggcgatgtgtacgtacgcggcacgcacgacgccgacccggttcatggcatggccccatcttatcgcgtacagggatcgggattccttcgataccccaacggagagggggcccgctctagagagcaggctagagagcagagaaccttactcccactctccccatatatgatggcatagtattatgaatttgatgtatcttggaatta

SEQ ID NO: 37400 - DNA, 862 bp, Oryza sativa
ctactggtgcccgacgctgttggaattttatagtgggcagtaacatgcccagtcactggcttgactggtcagcagcattttgtattggcactggtgaagtggtgcagtagtgatggaagcacaagctgcctgttgattgtgtgtgtcaattgcatgcgatgtgtgaagagagaaaagcctgggatgccaaaaggaaggtaactgacagcctgccaggcccatgcaaccagtacatattatctgctgatgctggcatttggattgcaactgagattcgtggtcaaagttaaatgtgacgttatatcttggatcttggaaggtagcggaggcatttcacaaatcctactacagctaaccatgctgaaaattgcctgactgtaatacggagtatgtcgaatgaatgagaacatggcagatcatgacacaaccaaagatagcatctgcagacatgcagtccagtaaagcacgttttagtgacaaccagagtgtagtttccagtacaatgagtaaagaacaaagattgtagtttccagtacaatgaaatcgattgattttattgcaagtaactttgctacagtcccagattggccacaaaaaaacagtaggatggcaacaagggaagaaacttacacgagtcaattcatacaccctgtcaaggactcaagggtgtagaatcaaacaaatgtcaaacttatcaagcgatccatatacaattgcaagttccaacattccaaggaaagaacatgaggaaaatgacatgaaggaaagatctacacgagtccattaaacaccatacaatcttggatcatactctgcaagaaaaaaagggggggggggggggggggcagaggttcacatctaa

SEQ ID NO: 37401 - DNA, 1166 bp, Oryza sativa
atatctagtgcgccgtccccatccccaacctccgcctcaccgtgtggccctgcccttgcccccaacctctgtcgtgtcgcccttgcccccaatctccaccgtgccatccctgcccccaatctccagtgcgccattcctgtcccccaacctgtgccccacccatgtgcccaatcttcaccacgctatccccccccccaatctccactacgccatccccacctctgatctccagtgtgccatcctcgtccccaacctttgccttgttgttgccatcccaaccaccgtgaccgcgacacgtgagggtgtagcggatggtggccgtttcgagctcaacctccgcatagctctagcttcgctttggcccaccacctccgagagccagcttcgcgtgcccaggcgagcttgcgttgatccgcctcctttcgagcaaggtccctctctgtcctacttctctagccaaaggtgcacagagagagagagcccattgatttgcacctgaaatggggagtggggaggattggcttgaggaaagatatacaagtgggcccattgattttttttaaaaataattttattgctgacttgattgccacgttaccggctatttatgcaaactcaagtcaaaactactcaatacagtgctcagggggttatttgtccggtatcaatagttaagggtgtaaaatgtctggtattcaagtttaggaagggtaatttgatcgaccgctatagtttaggaggataattcatattttttttcttttttttccattacacaaaagacgtgtatgcaccagcacaattataactatacatggtagtaaatgtttccactaacaaacgtttaaaaaaaaaggtgaaggccaaactacatgtccttgttctaactaaactttattaataatacaccgcatgtattccaatgactctacacactaccggtgctttccccttgacaagctaatttctgaaacaatgagataagggtttcgggatctcgtgaaatttggtcatatgattcaggaaaaaaaaagttgtttcccacaagaaactttaacatgaattttgatttttgagttctacagtccaaaagctattcgcatgtaaattttctataggaacttgttggagaatatgtgacacaacccagccttagcaaaagttgg

SEQ ID NO: 37402 - DNA, 894 bp, Oryza sativa
ctaaacggtgtgtttttttgcaaaaaatttctatacgaaagttactttaaaaaaatcaaattaaccctttctaaaaatagctaatacttaattaatcacgtgctaatggaccgtgccgttttctatgattactgttccggatgggagcaagaatgcccgaacacagcctaattgctctagtctagtgagatacagtatatatataactagataagcttggaacagatcttgtttgcaatttggagcaagtgagatatgcaactattcactaactgaattgtggtcctagcgagctcgggggtaaaccacaaagaaatcagaaaccacgcgaagttctatccaggcagcaaatggcgtgcatgtaatggcgatctggccagtggacagtggtcctctccaagatttctctattatatactgcacatcgatacaaatatttccttactcattgaattatttctgtaacaccggactgcgcacgatcacatgagtgacaattttgtaggctccctcgtagtgggatggcaagatcggatcagtaagacagtaatgattccaaacatagcaagtaaggcatggcattttcttgtagagaagtggtagtagggattttattagattttttttggaaattattatttattttatttgtgacttactttattatatatataactttaagcacaacttttcgttttttatatttgcaaaaaaaaattgaataagacgagtggtcaaacattgcaatcaaaaacttaaaatcccttatattatgggacggaaggagtagtttttttaaaaggtacgaattaccctcttgaactatagtagacaaccgaattaccctaaactcgtaaactcgaataccagccatttacacctcgactattaatc

SEQ ID NO: 37403 - DNA, 1331 bp, Oryza sativa
taaacaatcgatttacctattaactattaaggtttaaatcgatggacaagattcacgcatttattcttagtctttgtctctttgtcatataaacgtgtattaaagagtgtgtatttgtggacatgtggccaccatgatatgcacatatatgtgttttgtccgattgaccaaataggtaaaaaacttttatgtatgtagtttgcatgaccttggtcatgtatatatcacacgttggtagtatggctatatctacgaattagaggcccggccggtgccttaaatattgtaaaaatagaattaaaagtacagttcaccgctgtacgttgctctttatactcgatgcctattatgggtggtgtgccatgtatccgcatcagaaaagtagctagcgattaatctaatgttcttctctttagctataccttgttattagacgaacatatttcaggcttttagcataatcgccgaaggagaaaggacagcttaaaagaaattgagtgaggaagttctaaaacttgaacaaattggtttggtgtggacttaacaaaaattttagaagccctcactcattctgcacaccatactgtacaggcttgtttggtagcaacagacgcgcgtcgtggattacttgactagcgaagctagcagcatcagggacaaggttacaatacaagcgtcaaggttaagcaaacccgagaattttttttaataaaccttatgactaagctactcgacataatagaagatacatcataattcaaagtatatgtatcaattttaaacttctaaacttctcacatatgacggttgatctcagagtagagtggaactatggaccgaaacacagaagacacgtgcatacgtacaaagtaagacgagaggagagaagagcgagacctagcttgtcacacagcacgagcactaccaccagtagtatgctattacgcacgggagcatgcaactaggccagcggagcagcgcaaagacgctactcgtgtgttactaaaataccttagagtatatttattaattttggacatctaaacttgtcacacgggggttgatcttatagtagtgtggagcatggagtaaaacacatataaaatgtgtacaaacgtatgaagtatgtgcggtaagacgagacgagaggagagcagatcctgcaagtcacacgacacgagcgttaccaccagtagtacattgtacacacgcgagcagacggctaggccaacgcagaggagaggcgccactcgcgtgtcgttccctataggaaaaccctctttatcaattttggacctctaaactttcacatatatcagtttatcttacag

SEQ ID NO: 37404 - DNA, 761 bp, Oryza sativa
acaagaatcatctattttgcactttgaattatcagaattcaaactgtattgcgtcataactttatcgctatcgttcttaggccactcgggagttctgattgaatgtaacattgaattgtggtgctgaacttctgagccctcaggtgattttgcagcactagtactgccggtcatattacatggagggagaggatccaacaaataagctctcttcatatcggcatgcccatcactattctcgggttgagtctgattctcgttttctcgtccatcaactacaagtgatccatgcactatatcattctcttcacaatttatttccttcccaattttatcagctgtcttacctgcagctccagctggcttaggaacatcatcataagattgcaaaggtttgtcttcaaaagatgcctgtaaatctcaaggggtcacattttcatgttcttgcttcttaaaatcctctaaacttctccttatagcttcctgaacaagggcatcttcttctagatctcctttcggtactttagattgatcgttttcattactggaaggacctccaggaacatcacaaccaccttcttcccattttatctcatcatcagtacagaaattgtccatcagtgatgcttggtgatcctttcatcaacttgcataggaggtgtttcactttcaagtacgccttcttttgtaatgcaatcagagccatcagtctgttctgtagtgaataagttggatgaagctccagaagctaaatgcaagaa

SEQ ID NO: 37405 - DNA, 650 bp, Oryza sativa
gtctgaaagagtggtggctaagtggatcaactgatgtctgatgggtcatataggccggttgggctgtgtttggatcgaagaattgaggatttaggtgcactaatatatgtacatgtgtatagggctatgtttggatcgaataattgaggatttaggtgcactaatatgtgtacatatgtatatattagaaatatacttgtttttcgataaaaaagttgggtattcccgggaatacccgggaatcatggtagctccgcccatggggtatacagtaccgaaaagaaaattatctccaccatgctcggttgcacttgcacacgagtgcagaaccgccagatcgaaagctagcgaacgtatgctgctgcgatggcaaacggccgtagtacactaggctagcaggctagcactactactctactaggcgtgccacggcctttgctacatttttctaccctggggcacacgaacatatagtagtaccctggtggtggttagattccaactttttttttcaaattttcaatttttttatcacatcaaactttgctacacacacaaactttcaacttttccgtcacatcggttcaatttctttaaacttccaattttaacatggaactaaacacaacccgaatagaatttgggatatg

SEQ ID NO: 37406 - DNA, 1089 bp, Oryza sativa
atttaagtatttttgttgttatgggatgataaaatatgaataatatttacttgtgacttatgtttttaaatttttttaaaaaattttcaaataaaacacacggtcaaagttggatgcggaaaaccgtggctgcacttaaaatgtaacggagggagtaataaaggatcgagttatccgcatccgtattcctaagctttaacagatttacgtatccctgagaaaaattacttataaccatcctggtttttgaacaaaatcgactatccttaaaggtcacactaacacttgcactatcacagagatgggtgtagtgcgcaagcaccattgcagagcagctactccaagtctccgaacactactacttgcccctccagaattgtaacagctggagtacgtagataagggagaagtgaattgtaaatggtccactcaagtattcaaatcccattagtatgtagataattgagaactgaaaaataaatgatcggaggttccagcagttccacaaaacatccgtgattaaaatgtgattagatattgatgctccacaaaactacctgtcggcaaaaaatattctttaaaatattatgggtgtttgtttgtttgttgcccgagtaaataaccccaatactgtccttacgtatatttatatttgaagtatatactttcagtaatactcgcactaggggtggaaacgacggctcggcttgcagtggttcgcaacaaaactaggcttggcttggcttggctcggctcggttagggaaacaagctaaaacttgagctcggcttggcttgttttctggctcgagccagctcgagctggcatgcaagtcttcctgttgaaacacctcttcatatatattttgtaactattaaaaaaacaagaacaaatcatcaacttgtaaaatttaaataagtttatatattcaattcttcaaaatcttaaagaaaaatttcaagttggcaaataataactccataaaaaaataaataatcgatataaacacatgatggcctaagctcgcgagccaaatcaaacggctcgcgagccagctcgggctcggctcgtttcaccaacgagctgaaa

SEQ ID NO: 37407 - DNA, 965 bp, Oryza sativa
  unsure (1)..(965): unsure at all n locations
ataggggagcccctgatacgcgccatgagtcacagtatagctgctctagtttagtagcaagagaaactctacggtcttgacatagcacgagttgagttcaacgaagcgagtttctgaattcggcatatccagctcaaatggtgatgaatcccggagttcacaataatagagaggtagatgctgcacctgatcacagctgattattagttgatcaagatcttgttcagaaanccctgccgtacacaggaggagtttcgtgaggcaacatgacagactacgagatatattaaaaaattccattaaggctctttgcatgcagcagcatatcactagacgtgcaatctacactccgcttctcagttgtgatcgcaagctccacgctctttcttttaccactgtcaatagcattgcaaactagctcaccgatgttaaacaaataatctaatgatgtctccaaatcagtgagcaagcagaacctgaggtttagctttttaatgatagattcgctccgaggagaaccaaataaactgctcatcaatttaactagaacagccatcgcttcatcggccgacattgaggaattttggtggatgaattcatctgcatctaagtcgacatcagagagcaaaagaggcaggtgcttccaccgtgtcgacaggacactggtccttagaactgtgcgcatatcaactctttctaggatagagagtaagatatgatccggcaattggttgaatctaccttggtcctacaccaataaagtgctcaatcatttaaactgaagtttaaaatgttctcttaattttacaagaaatactaaacatataaaggatggtattaggtttatttacactggaaaaactactaacaaaaattactaacagagagagggaaagagacttacatagctttggatgctattggactgcatgactactgacaatggggcttttccactcggatgg

SEQ ID NO: 37408 - DNA, 602 bp, Oryza sativa
ggattgctgacattccggttaaatcactcttagttaaatgaaatccaagcagaaaagcatgcctattctattttcaaaaggcagcgatttcctaaatgaaaataacttaaagacaatgaaacgaattgtcaaaaacttgctttttacagatgcctaaaatgcaaatgttgcagaacatggcaaaccagcaccagccgatccaaaaaaaatgtaaaatagaggtgaaatgctgacatcttaacaattgatgttctcaaaccgtaaaactaacttactagtaactcatttttttagggaacagaattcaatggtatccataaacatattatcacatcaaaccattctataataggataaataatagttacagtcttccagagactaacctcgtgcttattatactctctcaaaacaggaattagcagttcatcagccttttccttgctccacccaaacctttcccaacataacctgaaggaactcaacattagatcttctgttgttgcgccaaagaaaagaaatagagcatgtgtgttttttcataatcataatccttagttttgaaacagaactaacttgtgaagaaaaagatcagaacaaat

SEQ ID NO: 37409 - DNA, 570 bp, Oryza sativa
  unsure (1)..(570): unsure at all n locations
agaacacttggatttggtaagaactgtcattgagcgtgctcccaaattaaagtcagtttttttggaagatagagaaccctgtgaaggctgtgaagcaatggacaacccaatttatctttcaatatccatgtttccncagaataatgatgaaaagatcacaattgtaaagcatctcaaagccgggatgaatcgccctgttgaaataattttctgctaacaaagaatgtatttctatgctattgtgttcctgtaaaaatgataatttttttttcgttatgcgtaatgggctagtcagatacctagcttgattggtagagttatcattggcatagaccactgagcatgttctactgttcttcagtgctgaactggtcgtgatagtagttcattagccgatgaacttctcacgtagtagtagttcattagccgatctccctgatgtacaatgatacaagttgcagatccctttcaataaattatataattgtgagcatcgttcagaatctgtatataccatcctggttttgccaaatcacaagcagatactatgcaaatactttacaacatcac

SEQ ID NO: 37410 - DNA, 712 bp, Oryza sativa
gggcttccatgctaaaggagattctagcctgtgctgattcctggggtatcagccaatctaacaagagccacggttcagaatttcagaatgacaaattaaccgaaggaacaaggatcaaataacaatctcttcaggcttcactagttggaaacaagtgggtttaattccctaatgtattcttcatcactaggattctattcaacatttcaggtgctaattccagtaaaatagtgtttaaaaggcttatgataattcatctgataagaaagtgttttctagtttctgactaaagatggaagctcttgaaggaatattttgatatcatagataagaatgggcattaacttcgtaagttttgtattggattaggtatctaagtagatatcagtaaagtgaagtatgccaccactgaacctgcaagtcccagtttaagttttggtttagcagacttcacaactcttcagaagcatgcaggagtacgaattcaatgcattgatgcttgctaatatcaagaaaaggaggaactcatcactcactagagatcagtttccataaaattaatgtgatttaattttcacgtaatctgagaaatgtgaagattaccaaacaaaagaatctgatgcaaaacaacaaaagaatatgtgatagtgtgaagtcttacatgctcacatattcataatgcacatttatgcagtgtgaagatttttccatg

SEQ ID NO: 37411 - DNA, 648 bp, Oryza sativa
atagaatcaatgcatcccattgtatgtctgaacagctctgaaacgcacctaactttttcccaattcttcccattgcatgtctgaatagctctggacaatatggcagcctccattgatcagctaaaagctaaaacaaatggtatggtttccactctccatttgtttctacgacacgacctacattttagctgaaatggagaccagctgcagaccacgttcaatgacttcaatcagctaatcaatgaagacaatcaattatataattgtgagcattgttcaatctatccatgtcatcctgattttgccaaataacaagcacaatcagatatccagacaaaagatcaaaacttttgccaaatcagaagcacaatcagagtccaaagatcaaacttttgccagatcacaagcataatcagagaccaaagatcaaacttttcccaaatcacaagcacaatcatatatccagtagataggaaatgcatcacgaaggttcatcgcaaatacttcgcaacattcatccattggtagcctgagacagttagtagtacgatctaagcctcggtaccttctaattaagcaacactagacgatagatagcataatagcatccctaagcaaacattgactataggcatcagtgatcagtgg

SEQ ID NO: 37412 - DNA, 1963 bp, Oryza sativa
gtgacgctgcagtactgggtgccccggccggagtgatctgtcgtccagtgcaggtacacgacgagttccaactaagacgcaggtggctcgagatgtacacagtaacacactggtacgtcgtaccacctatccatcggtagcgagcacgtctccgcgccgcgcggtgctgcatgcatgtgtctccatctgcagccttgcaggtttttcgttcagatcaatcagggggggctgctctcccgttttccttcagggtgattgatcacactggccgtcgatttccaaaggttttcacaaagcgcgtattactattaccacgtgccgattggatcgagtgaacactagaagtaaaaactgctgtccaagtagggagttaagtaacacatcgcgagatccaatgacccaacaaaaccttgcagaggtttttgcagttgcatgcatgagtggcaattggctcttcggtttggtttgcatttactactatattcgcatcatcaaggattgacttcagactttctgatgagttgcaggtgcgtgcgtgttcatatacgtttattactgtcagttgattttctttgagatgtactggtctggttggttggaggaatatcgagtgcacttgatcgatagataagatagattggaggaatatcaagtgcactagacggatagataagatagatactggttacatcttcacagcttgtgcaagcctctgaacagagaagacgatatatggagttagaaatatggaaacacagtctacgggaaccatatgcgctttatgcagtgcacttaagttttaggatggaaaaatgggggagggaactggccgtagtaatgcatggtccctagttactgacaggatggtcataggatgcatatactactgtaaccgtttggtgcttggattgatccatgatacatcagtgagggcaggtagcagatcgatcagtgcatgccggactgaacaatgactgcaagtctctgcaactagcaagcagtacagtcgtacttcagtttcttttgtaattgaattaaccatcacataatatagcaagccccatttgcaattaaacactgaaatagtaaaacacgtgattttaatagaaatgtatatgcaaaacagaaaattataaaacacaacaagataacataggaataagaaatacccgtttaaatagaatatagaaaaaaaatataggaaccggaagagaataacagactagaatgaaagtttctaataggttgaacctctactgagatatttctgaggaatttcataggatttaggaagcttcaaccctatgtttcaaatgactaggtagaaaatttttctataggattaaaactctacaaagttagtacacattgtttccaaaatagaccgatagtgtattctgtagggtaggatctgattgacagattagataatgcatgcggtacagcacttacattgcaaatttgcaattagggccctatttagattccaatttttttcttcaaacttctaacttttccgtcgcattgaactttcctacacacataaactttcaacttttctattacatcgttccaatttcttcaaacctctaattttggtgtggaactaaacacagcctagctctaactctctgtgcgctcttcttaatcttaattaagtagccatagcagcgtggttgctagaatcgccaacaacatttatagaaaacatagaaacatgaaaaatacggaattttaatatgaatatataagtggaaaacataggaaaatctatgagcgactttttgaatagtccgcataaaaaacaaaaagaaaaaaaatcagataacatagatagactaaatttttttttcaaaaaatgaagctcttgctaactttcttcaaaatttataggcattaagtcatttcttaggaattttgtaggatatacatgaaaaatacggaattttaatatgaatatata

SEQ ID NO: 37413 - DNA, 721 bp, Oryza sativa
ttttttttttttaccgcgtcggattttactgcatttttaccctcctcttctcaggcctagaaaatatttcggcgcgacctgccaagaccgaagagtgtactgtagcattagtgctcgatttttacctaccttactctattggaaaaaaaattacattactggagtgcttcgtgcatacaattatttttctttgtattttttcactcgccgattggtgatggtctgattgatggacgacgccgtgggccttctcacggcgagtgttcgcgacggcgcacacgggttcgtttgtttgtttcttcttcctccttgtcccggcttgacgtcttgtcgtttcatttgtcaatatctagccgcagtaattttttcttcgtagtactaatatgttcaattaatttaaatcgtatcattatttgttattaacaaatatataacgatattacctttgttatatagagaatttagcaacatcatatttaatttatcctatcaaaacttaataatgttgtcaatttatcaaatttttgataatataaatttttgaaaatgtttatttaggcagtaatttctactgctgctgtagaaattacccttcattttttgtacggttaaaacgtctcaaggaatcgtcggttgtgggatcggtaacagctaagcgatggcaaatcattgtcaacgacatgcatggcccatcttatcgccatttatatcgccgataagg

SEQ ID NO: 37414 - DNA, 539 bp, Oryza sativa
atacccaacaaaccccgatagaaacatacatccttatatggtttattaggcatctccatgcaagtgaatatattatttagttgcaacagaaccgaacaatagagtagtttgctaaaaatgtactagtgatcatcatacccagctcaacggaagctatcttaatccttgtttgcttaacaacacatcttagttaagtttgagatgtaaagcttaagaaaatgaacgaggcaaaccgaaaacaaataatctgaagatgcccctagctttgttctcaaacaaaagttgggattaagctagagaacaatgtaaaaatatctgaatgtaattatttgggtcgatggtactgtcaagtgtcaactgtcaagtactccagtataccaacttgtgagttggataccatctggtgtactactagtaaaaccggaagatgcttttgcagaattcaaattcaaattctccgtatttttgacttgaaacttgcagcgttgacttaccgatctactaaataaataaatggatcagatcgagaaaacagagag

SEQ ID NO: 37415 - DNA, 613 bp, Oryza sativa
tttcaccctgtcacatcgaacgtttaggcacatgcatgaagtattaaatatagaaaaaaaaactaattacacagtatgcgtgtaaattgcgagacgaatcttttaagcctaattactccatgatttgacaatgtggtgctacattaaatatttgctaatgatggataaattgggcttaataaattcgtttcacagtttataggcttattatgtaattagtttttttattagtctatatttaatattttaaattagtgtccgtatatatgttgtgacccgctaaaactttacaccactggatctaaacaccctgatatttatcttttagtaaagatgcatctaacataccaagtttttatttggatagatagaatcggagttatttgttgcaaaaatgaccaaaacaaacatccctataaactgacagtggtatattacttggttgctgatttgcatctagcatatccactgatgtgatcacttatttatcactaatcacttagaatttattttggggtaaaataaaaaagatgctctaacttcaaaattaaaatatactaactacaccttgatgtgatctcctcctggcctggtcctctcgctctctctctct

SEQ ID NO: 37416 - DNA, 662 bp, Oryza sativa
ccgccgccggtgcatgctatttcgctcaagatgcggaggtggtgcggtggttgttcgctctttggtcaatccggcaaaatatataggatcatggtggatgggtttcctctttgatttgttacgttacatatctatataaatatttaatttataatagggacgcctaatttattggcaagagcggaaatgtttgaattggcatattttggtagtgatcaatttatgtttagttaaacttgaagttgacactttatgcatagttgtagtacgtgtacacgtatttgtaagtatgtctagattttttttttatttattagctggtgtgtgtggtaactgagagtgcactcaaaacttgtgggtacaatacatgtttttttttttttacaaaaagactagcggcccggcttatattgaaagcgcccacgcaggggggggggggtgggggacgaactccttacatggatggagggagacagaaaagagcttcaagctcgatgtggggaaatgatggggtattgccggctatttataggcggcgaagggcggtggtcaatggcggtttgcagacgggaagagggagttggccttggtggcggcgacgtgagaaggaaaacgaccgcgccggctgtggcctgtgattgatcggcgacggcggcgcatac

SEQ ID NO: 37417 - DNA, 554 bp, Oryza sativa
caatttgaaataggaaatccaattggtacactagttaattcttctcgctttaaaagtataggcagatctgtgcaatcaaaaaatgtacagtcaccagaaacctgaatcacaagcgcaacattttattagctaaagaagaaatatcaccactgccatttcagctccttgcatgaggagaacaggaccaatatagcataaatgaaacatgctagtttcaagatcacagttcgatggccttcatataccaagtaatgataagtacgctatattgctacacgagttacctaacaccgtaacacgtgtttcagaatggaacactaactgtaccttttcaattttcatatcataattcaagaccaatttaaattatcatgaagcaaatatcaagtttgattcatgctgaataaaaaggtgtaagagaatttaactactcaacccttatggcacatgtgctcttcatcataactcccttaaagttttagtataacaggaatcagtaaaatgatggttaggaaatgatgtgcaaccaaaccatgaattaccactcatggtca

SEQ ID NO: 37418 - DNA, 3918 bp, Oryza sativa
  unsure (1)..(3918): unsure at all n locations
taaataatttaaaattagaaactcagcgactacaatgtgttttctaaggacatatagtctgaataactatatgaagtatacaatatctgacagcttagtttctgaagaaaatgaaaatatccccatatattttgttttcctttattcttgtgttttaaaaagaatcggcacgaggttatgctatttcattaaatatagaaggagaaaaatacacccctacgcgtaagaatgaaaaaaatctatacaaatctatccgaggttggaaggagctcctggagctttttttgctcctgctagggtccatgttcttgcttcctcctttattttcgccacgaggccaggtgtcgctatcttcttgtgctcgaagacttgccggttcctctctgtcgagatttctcagacaaccaacaagattaagctacgcatgcctttcttgggtacctcctttttgttagcaagtatctcccaacaggcttggacatcgaggcaaggctcccattggtttggatccaactgttgataggccacccaagaggctaggagtctccagactcttcctttattcttgttaagccctctatgaatgccttttgaagagaaaaaaaattgaagcttttggtccattaagagtctatttggttgaagggatgaaaatagatgaaagataatcatcccatttttacatgtttttgtttcatgggcgagagtggatgggatgggatggacactgaagagaatatatattctcttaagatgttggatgagcccccatctaaattgattgatgagaccatccacttttgtcaacgcaaatgattagacatagttagttttttcgttaattaataattttcatttcaagatctattatattattaaaacaactttgaaaggaggcaccacgttcgctgtggtgactaaaaattcccacattaatcggagaaaaagaaaaggagagtccaagcagaaatacaatttaaaaatagctgaaattcggaattaaaaataagcaatattgaaataagagtccatataagaacccaataggagattaatcaaaattcagaataaaaataaaataaaatatgaaattagaaaagaaaaaggagagtccaagtagaaatacaattttaaaataattaaaattcggaattaaaaataaggaatactgagagaagagtccatataagaatctaatacgagattaattaatattcaaaaataaaagtaaaatccaaaattagcaaaaagaaaagaagaattcaattaggaatacaatttaaaattaactgaaattcggaattaaaaaataagaaatattgaaagaagaattcacataagaaccctatacgagattaattaaaatttagaataaaaaataaaataatatccaaaattagacaaaattaaaagagagttncagttgaaatacaattttaaaacaattgattntttnttaaaaaaaataaaatatttaaagaacactatgcgatataattaaaatttgaaaaaataaattctgaataagaaaatgaaaaaaagattttattttgaatacattttataaagaaaagaccatctaaaacacatgacaagatatattaagtgccaggcctataaaagagtagagtgttgacggctgatacgatatataaaaactgttaataaaacaccaaatagaatcctaataacgattaaaaggagggacgacatgcaggccgtgaagcaaatgggcagggcggttgttgggacttctagaaagttaaaaagtgaacctcattgataatcatattcgatttttaaaatctcaatgacaataaaaaggtgaagcagcgggcggggtgtataggagtatagctgcaaagccgccgacggttggcgggacttctagaaaataaaaaataaattccaacgatagttatgctcgatttttagaatcccaatgacaataaagagtaggcggcatatgggccgtagaggagtatagtggcatcgtttaacgggacttctaaaaattaaaaaaaaaatgaaacccaacgagacaataaactctaaaaactacgaggtccaatttttaaaggtttggaacttctaaaaagtaaaaaaaaaaccaataataactatgttcgattttaaaatctcaatgataataaagaatggaggcagcgggcgagccataaaggagtacaatggcaaagccgctaacggtttggcggaacccgaacgataattatgttcgatttttaaaatcccaatgacaataaagagaaaagacagtgccgggttgtagaggagtataatgacagtgtttgactggacttctagaaattataaaaacgaaacccaacgagacaataaactttaaaaattataagatccaatttttaaaggtttcaaagagaatgaataaaaatagtgataaatcgagtaagcaaataaagaaggatatgacagaagtaaggggtagcagctggtgtgacttttaaaagctatataattagaaatacgtggatgataaggttttgtctttcaaagtcttaagacaacgagatagctatttaataaattttaagtaaaatcagactggaaaatatatgattttgtttgggtgctagccgcgcaattgcgcgggccacccagctagttagtgtttattaggacaattaatctgttttattactaattattatgaaatccaataagattaatgataattactatattttgtaattagagtttcaacagagcaaattataagagtttctaaaaaaaacaatgcatgtactatttggagtttggaatgtaaggaatcaccaccaatatctattggcaacatgtaaatatacttctgcacgattttgtacactcttctctgttgtacttttatgaaagtgtagtgatatctccatgacaaacaatgtcattttgttttgtcatgacaaatcctaatacatttaatacattattttgttttgtcatatatattctctcgacgtttttttaacaactggaacaatacagtttcgctagcttcaaagatatcacttctcgccggcaggagaactgataatgcatcgacgtgatctaggcgactaacaagcgaatgcgcacggatcataagttaatccaaatatttttcaccaatcactagcaaaccagcttccctgtccctccgactttagcccacaaacaaaaaacacacaaaattattccttgttagttagcattatctgaagttcctatatagggaggcaaaagatcagaatccatgatttgaaacaaacacatttattttcactctgaaattataatgacatgacatgaaactcttccccacgatcttgccaactccttcacgaccatttttttttctcttatttcttttcttccaactacagtcctaccatccaacacaaatcactgacataataagaccagctctgctcattactctagtatgtaagtcacctaatcattagcttagtctctcactcattgcaccccaaattcaatcgccctcattgcacggacgaaatggtgttttttatgtgcgattcccggccttgtgttttttctattcgtctttgcacgaatttcagcggtttttgttagctgtctggcatcgccaactgtgcagtagttttcccaaaatgtttcgaattaaattatgaatggtcagaattgtacgctcgaacattctgttcctgaactgatgaaaaaaaaaatagtgcccctgctatataaatactaggacaggtatggccatctacgagatcatattttgttacagatttcttcgccattggagatgatggagtcctcggaggcgagctggcactcgttcgatccgtcagtcgcaatggaggactccgaggcgatggcgcagctgctcggcggtgcagtgcttcggcaatgacc

SEQ ID NO: 37419 - DNA, 639 bp, Oryza sativa
tatggttgcacttataatgggacggagggagttctttctattacatgtacatagcattgccttctggccattgtcgtatccgtttaatgtaatgggcagctcgtgtggctcaagtaagcgcgtacgcgcactgcatattctctcctcttgtgaactctcgccatcctcatgcacctcatcttcaaactgtactgaaaccttcattcaactcacgcacatgtactggctggctggtaaaacgtggtacaaaaaccagagaaaaacttgacattgtccgtgagaaaacaccgatctgtcgaacacgtacacgatccggccggcccgtctcgcggcggcgcgcgcacgacacgagatacgtatccgtcgttaacttccacacgcgcacgcagccgctccacgtacaggcgtacagtacgcacaaaaccaacaggtagatacccttgactatactaccttgggggtgcatgcaccggtgtagcgaccgtacgtacgtacatgcaggcgatcggagaagcaaccgcatgtgttgacgcctgcacggcacactcttcctcggctataattactcgtgttgtaccttggttgcctggccttaatcgggctttggccttaattggggttgctagtttcatcggatcc

SEQ ID NO: 37420 - DNA, 1864 bp, Oryza sativa
catttggattgaagtgatttcaacacaagtttggtggatctcaattgtttgggaaaaaaatcctatcattttatttgaaatgaaggaatatgattaagccattccctaatatccacgtcttttttttctttgaaacgaaggaatatgattgacaaaaaaaactaacaatttgcttctcataccaaactaaacgaattcatacttcatgcttttatttttatatgagaagccccatgcattctctctcgcgcacacactcataaaaaaacaatttcttctaaatttctatatttcatttcctacatatcttccaaacacaaactctttaattcatgtgttttataaaccacacttcaagggagatctaattaattaatgtctttatagtccattggttctcaacccttccaaattccagtatattggcagtaaaattttgcactaccaaatcgttgataggggtaaagttttgttgtcaatgtttggtttgttaacaatattgagccaaatcttataatagagtgaataaagttctaagaccctgtttagatgggactaaaacttttaagaccctatcacatcagatgtttggacactaattaaaaatattaaacgtagattattaataaaacccatccataatcttggactaatttgcgagacgaatctattgagcctaattaatccatgattagcctatgtgatgctacagtaaacattatctaattatgaattaattaggcttaaaaaatttgtctcgcgaattagctttcatttatgtaataagttttgtaagtagtctatatttaatactctaaattagtatctaaatatagagactaaagttaagtccctagattcaaacaccacctaaaaattgtgtcaaataaagcataggcattaccaaataggagtagttgacatcaaaccaaactatcacatttatgatctgagctaccgataaatttatagggtatgttttggcatcaatctaaaacggtcatctgactgactgaacccattttgaaatgtgattttctttccaagtctttcttttttacaaaattcgtgtgattcaaaagaatcctagttttgttggttcatccgatgtactccggagtactaaagaggtggttaggagcaatatgcattatttctgcctacacgaaataccagctagtagatgccaattccacaattcccatttgcattagtcccagaaagggacagtgcagaaatgtcggtggccaggagtactactacttgtactatcaacagtgcagcatgactgacgataccgtggcactgtggcagcctatgcctgcagctcgatcctgtggatcggccgtgctactagtatgactactgtatatacgtcgcaatctcgctaattccacgcgtttattatgccatccaagaaccgacctgacgctctgacacatttatgcgtatgtggacagtagatcggtgagcctcaacggagtaatcgctgcttgatgccatgtcgtattgtctttctggtccttgcatttaagccacgtgtttcgatgcgttgcttggtgttcatgcagtagtatgagtatgtgggatggatgatgcctcaggttatcttcaggtacgatgctttgaggcaatcttttcatttctgaactttctatcagtatgcctttgcttcgaaattctgctcctattaaccagtttatgcgcccaaacatactccaaagcgtgccccccaatgagaatgacgtcctgaagctccagctccttgtcctcgttgtcgtttagtactattttttagatcagtccagcaaattcaacagacgagaagtttgggccatctgattgtgtagaataactttgtctt

SEQ ID NO: 37421 - DNA, 2140 bp, Oryza sativa
agggcgaattcgagctcggtacccagcacagaaaactgggaaatcaactcaggaaaacaaagagcttgaaccgtaggatgtaaactgtgaatattgatacgatactcatcttgatgcaattaacgagttgagctgaagaatcagatggttactatctccacgacatcctatatccccacaccttggaatttccaagtgatggatttacagtagataatgtgttctaactatagatgttaagtgtgctccagaggccagagcaatgcaaaacgaacaattgaacccttgaatcgaattgttatgtgaggagccaacagctggctagaatcagaagtgtatttttcatctgagatttctatattttcatagtattagttttgctgtagtgctagttgttcccgatgttttgctatctgagttataaattacgcggacttgtattcttatgaagtctgactttttgtataaaaaaatgcttaacataccaaagcactgtaatatcgtccttgtactttttcgcttttcttcgagcatttatgggagatatatagcattcgattgttacacatcgcaggctgtgctcagttgacaaacggaaaaaatctgagatagaaagttcttatattatatctgaataccgaatgattagtgaagttattatactgagaatgatgagttagtgttcgagaatgtataatgagttagtgttcgagaatggataatggatgagttagtgttcgagaatggatgagttagtgttcttatacctaataatgaatgagttagggagtgtttgaggagaaggggattgaggagattgggaagatacgcaaaacgaggtgagccattagctcatgattaattgagtattaactattttaaaatttaaaaatggattaatatgattttttaaagcaacttcctataaaattttttgaaaaaacacaccgtttagtagtttaaaagtgtgcgccggaaacgagagccaatctcccctatcacccctaaacgaacgatgccttagtgttcttagccgaatgattagttatagagcattgtttaaattagaaacgtttaacatcctaaacaacaccatcagagtggcgcagcggaagcgtggtgggcccataacccacaggtcccaggatcgaaacctggctctgataattaatttttgacttcttaatcgtctaattttattttatttattcatcttttttgaatcgtctaaatttattttatttattcatcttttttgaattattgcttcttaatcttctacgctagctctatgcaaccacaatctcaccaaatggcgaagtaatattagtgtctttttttgataattaatttttgctgatttatcattcatttatcgaatttgttcttaatgcatacgtacttaacctatctcatgagcacctctaaaaaaattggtccgtatatcttgagctcgatgaaaacatcacagacatataagctcactcttatataatacacacgtgtacatttggttctaatgaatacttttgaagattgagttagtaatatgttaagattgacgaggttaccggtcaccactggtgtctgtatatacctacaaattttgagttcgacgaagtcaccacaagtaatatggtacgttgtccaccactaaaaataattagctataaatacaagcacatcatagactcgctgtcaacatgtatatcgctaccagtgaaaataattactccttccggacatgtctcatgtccagattcatagtcttagatgggtctcatcccatcatagtttgctatattttgaaacggaggtagtagctgtaaatacaagtattcgtgctaaaattagaacttaaacttagattagcaggttccatcataagaaaccttactagtagctaaggtatcctcaattcgccataaatatcaggcaaaaaaggatcctcaaagtttatggtatttgttgtatgacatccaaagaatgtgtatttattacatgacaccactaaaaacatggtaattagctggtggatgctgaacgtattattttattatatcggatctaaatggagagagaaactttcaaaaaagacaactttttacctatggtgcatgtttctttttaacccaaccag

SEQ ID NO: 37422 - DNA, 1322 bp, Oryza sativa
cccataacaccgcagctaaacataataggaataagttcacttgaggattcttatcttgttatcgagttttaaaatcgtccctgaaccagaataccagatataacacatccataatcttataaaatcaggttatattgggtcccaagacaatattaaggtgactttggatgacgtggcgctataagaaaaataaaaacccatgtgagatttgtatgtcagtgaaacaatatagtattcttcttatttctctccccatccttcgggtctcgagtctcggcggcgacagatgtggcggcggcgtgcggggtgaggagatggcggccggtgtgcggcgtgcctaacgacggcggcgaaggaggctcaacagtcggcggaggcacgccgcatgcaaaccgagcatcgacgtcgctcgctcttcccgcggcggagtggaaaggaccgcgaccaacagggagaggagcggcttccacggcggattggaaggcctcctagtctcctcctatggcgtgctcggtggcggccgaactaaggagatggcaaagcccatgccacgcacagcggcgaggaggacgtacgtgcccatggcggagacgctgaaccgcatcgtggattggttgccggactatgacgcgaaggggaagaagtggaggcggaggacgagtgtaagttattttagaagacagagatccctataaggattgtgaagcaatggacaatccaatttatcttttactacctccgtttcaggttataagacgttttgactttggttaaaatcaaactgcttcaagtttgactaagtttgtacaaaaataatagcattttcaacccaagacaaatttattaagaaaatgggagcgaattttccaggatttaatagctttgtgctttcagtggtaagtgacgtacctgtctacagcgaggcgtctgtggtgacttcattaatctccaggatagatttgccagcccagtcttcgaagatggcaagatgctcataggggtatggtttgcgtgtgtgttgtgagtatctgcgttgtaccatgtaattaaaaaaatattaatttaataaaactaatttaatattataaatattactatatttgtctataaacttgtatttgaagcacaatgatgtgaaaatctatgtctcgggaataatgatgagaaaagcacaatggtgaagcaacgcaaagctgggatcaatcgccctgttgaaataattttccgctaacaaagaatggattctttgctattgggtacactgtaaaacagattctcgcaccctgtaaaaatgatgatttttatttttcattcgatgtgta

SEQ ID NO: 37423 - DNA, 536 bp, Oryza sativa
aatatgtatctgttggggccatattttctaactttgcatgtcattcgagcaattataaaaattacgaaaaaaatacctatatagattttgtcatcgtacttgacatcacaataattaattagatctccaatgataaaaatattcatgtttcttattgtaggaaaagataagtattaatcaatcaataatttttttattctatttgtagttaataagtgtaatagttattacaaccccttaaacatgtaaaactcttacaattatatgcacacatactatctcccgttcgacaattcccttccctcctctccttgttaatttcttcctctcctaactttgaattaacagtctaataaaaaacaatatatcaataactataaagctaaatgattataattcttaagttatctccaagttttgtttgtttgaactgttgttttatgtataattaaataaataatttgagacctatattaccatgtttcactatataaaaataaaaatacatcatttcaaaacccctatcctttgcatgg

SEQ ID NO: 37424 - DNA, 919 bp, Oryza sativa
agcgtgagcggtccaagaaagcagctggtttaggtaaaccgttctctttccattttatgtggctttgacaagcatagcgcaccaggtgatatttttttaaataaaaccctataggaaaatcaccttatttactagtgaatttggttacatactaagccagataaaaaccataagaatcggtagcatctttttaaaaatgatgctcgattggtcgagaaatgatcatattatcaatttttatatgtagctaaagatagttcgattggaaatggtaccagcttcatctctcaaaaaccactcatcatgcttggaagaatagtcttggatcgtagtgtaccaactcagattcagattccagagaacatgaaaaacttggtaaagaatcctgtatgattgtaccagacggtacggtatgaggtgagtacatgctaaacagctacgcgtagtaggagtactagtcatttgtgtgcctaaattatgctattccctccatttcatatcataaattattttatgggtatattctctccgtcccattttaaacgcaaccataagtttctttgtgcaactttaatccgctgtattatttaattttttaaaaaaaataaaaaacataagtcacgtataaagtactattcatattttagcatctaataacaataaaaatattaatttaaaaaatttaaataaaatggacgatcaaagttgaacccagaaacttatgggtacgcttaaaatggaatgaagggagtacctaatcaatccttcttaagtttaaaaaagcaacatttttaaactgggataaacttgtaaatatactataaaaacatatcgacatgaatttaatgaaactactaaatgttttcatctgtttttgattaagaaatagatttacctcaattttcgttagcacgctttt

SEQ ID NO: 37425 - DNA, 1319 bp, Oryza sativa
gaaaaaaaggcagggaaacgatggcattttccgcccacggcgttgcgttttttcttcgtgttgtgttgacggggggtgaggcgtgtataatgctggtaatgttgacgggttaggggcgtacgtgtgcagcgctgcagccagtcgtgagggcctgaggggcgctacccgagcattgtctggtgtgttacttactgattgggcaggtctgggccccggtgtttagtagggcttgggctcggatggtaagctttagtttgggtagaaaaatagggtcactcactctgacttattactatcttctagaagtgcagattatcatcggagtataaatgcaatttctatactaacgtaaaaagtagtagtggtggtggtggcgctaccaccatcctactaccatatggaacccataaaatatgatataaaactttactggtttcttagccttcatatgttagacctggtcgaaaataaaatatgacaataaaaatttatagaatttttcatctttatgaaatgatggcaaaattatcacaatgataatatattagagaaaaaaaccattgcaatgcatgggcattatactagtgatttaaagagttaaaaagtggcgatttcaagagttcgataatttcatattagaaaagtttcgtctatggctacataggagagggttaaccagatctactacctccattcgactttaaatataagcatttctgattatacaagctttttgtaccattttttacattgaacttagtctgggtacttattcaaacattttttgtgaatgaaatcaacatgagattgtgctatttttaatatagtagaagagaaatacaacccctgagagtaagttatgcagaatttagtataagctcccgaagccgatttgctccaaccgaagccatcttcttgctttctcctttattttcaccagtaggctaggtgctcgaaaactcgctggtttctctttttccagatcccaaacaaccaagagaatcagggcacgcaggtctttcttgggcacttcttttttgttggccagcatcttacaccaggctcgaacgttacaactgttgatatgccacccaggatgctattaggcttcgaatccttctattatatctatattggacgagtatgtggcatgctgactttattaaaacagattcacccatataaatatataattaagctagtgaggaaaggtgaacaatattattcttatctgctcccacttgtttagcctacaaactcttcctttggagcatgtttcgaactcaagacatctttttcgaaatgagaaaaatatggat

SEQ ID NO: 37426 - DNA, 1045 bp, Oryza sativa
atttataaaagcctggataagatggtttgtccctcacacacacacacacacacacacacacacacaacaaaaaataatttcacaccaacagaaactgggtcttctcgtggacaggccaccagcaactacagctagcagtacatcttggactgtgttgaacacaatgtatgccctgcgacggtttacaatattgccataacgtaatcaccccgctctaaaaaaataataatcacgtaatcacttggtacttcgaatattaactaaaacacatgcgcttgaaatatgtatacttattatcatgaaaaaggatttaagtctcccattccagtaatttctgttcatacgttgtatcagctggtaatctgaaatctcacattccagcgttacaggaatttcagttcatacgttatattcaaacgtttccaaattccaacacagaccggtagtcgtccttgactcctctcgccatttttcgagtatgcctttgagtcataactgcagcatactgatacgagaggatacattgacaaaatgaatttgtcagatgcctgatacacagagaatataattgtgatggagatgcaaaagaaaaatactacatgattgctaatttgatatatatgttccgggaaagccatccttaaccatatagtactagtatatgtcctctgggtttacatcctcctctgatgatgtagacacaagatcaatctcaatgtgtccaatgtgcatgcatgcatgtaagcaccactaatccttgaagttgcgtttaattccctacaacagatcctagagatagtagatccaatcactctttacacaaatataactcatcgatctctacccaaatagtaaattaaatataggtcttaatttatacaatagctagctagttacagaatgccgtaagagaattcattaacaaactgccaacttctgaattaactgacctgaagaatctgagtaacagaaagtcaatgtttagctggctagctgcccctgaaagtggatttcggcaatgatctcagtaaaaccttctaggcct

SEQ ID NO: 37427 - DNA, 620 bp, Oryza sativa
aaatgttgtgtgaaaataattgccatgtcccccacaaatcatatgattacaaaagatccctgaaatgtcaaacagtcagtgcactgcataaagttaatctaattaatccaaatcacagtctgtcatagtgtccttcaactaaattaaggttaattataactctagatatgttttcatttacttgtcattcttaacccatgttaatatttttagaagaaattttcatattttgttgaacacacatactttgttaatatgctgtattttcaaatattttatgaatcgcattgctcaaataaaattgtccaaaaagttgaatgcgaatagtgtctgctgacaagtatttaaaaaggagcatttcaacaacgatcttgctaaagccttgaaattaagtgtgacacaagtactataacatcaaccaaccatgtaagaagcacggtttacaaattaaactgtacggttgttgtcgtggttatcacgtgcggtgatcttctcagtttttgaaatatacctcgcgattaccgcggtaactgtcaaaccatggggtgacggtacccacgtcctacatggtttggtaaatcctgaccaaatttaagagtaatgttctttaaaaaaaaagg

SEQ ID NO: 37428 - DNA, 1790 bp, Oryza sativa
  unsure (1)..(1790): unsure at all n locations
ggcgaattcgagctcggtacccgataaatcaaatcacaataaaataaatgataattacataaattttttaaataagacgaaatgttaaatgtttgttaaaaagtcaacggcgtcatacattaaaatacggagggagtagtttgcatcatcaacatcacaatcagatataaggagtattgtaagcccagtagtgttaactttgcgatatttttgtctcgttttttgtcactaataacctgacttattacccaagtttacagtgtttatggaccattgtgttaggccttgatcgaggagtaatttagcgagggcgacagccactagcaaactatccggcccagcccattagaccgcaattccagggatggatttcgaactcggggacaagttgagggatcgaaagttaacttattccaaaccgtaatactcgcacgggctttaacgctgtttgggccacggcccaaacatatcccctggtgggtgcgactaccacccatttcagcagcaactccggcgatcgatgccggttgccctagccgccgccgccgtcgcccgctgtaatttccctctccatcctggctctacgttcgccggatcgatgctctagcggcttagcggacaggtattagttcgttttttttttgtcctttcctgggcgtgttttaaattcatcttttgctgctggttttcattttttagaatatatgcatcgatgctctctgcgagttctgcaagaaaacacaagagagaagaagcaacgatcttcttctgtattcaaagcgatagaagtcaatggaatctcccttcttttcttggtttccgaggataaatttcataggttttcataagcgactgcatgcaaagagcttagcggatttctttaatatatctccgagtctgtcatgttgcctcacaaaactctttctatctacgacaatgttttttgaagcagatctgtgtcaactactaatcagctgtgaccagttgcagcaactaattctgcatctttgtaaacttccggattcgtcaaagctgaagttggatatgccaaattcaaaactccgcctcgttgactctattcgtgcagtatcaagactgtagaggttctctgcctccctaaactagagcatctattatgtgaatcttggttcttttcaagttgcccctttatcttttggtgtgattccatgtcttgaggggttaaagcttgtttgtgctgcgtatagtaatcaatcagggttcaattgactngatcttatgtgcggtgcttcaaatgtaaaggatcttactttggatttccaaggagaggaggcaagttattttattacatgcanaatcatcgtatttactgtcatgtggtggtggctgatagccacatgtttatatgcaatttagactgaaactgaaagagcattttaaaagcaccttttatgtgattagatgttgatggcaactactgtttaacttctttctcttgatcaaatttcaaatatgtaatacatgctctcagattatcttttagagtatatttgtgttattactatcgcgactagggttattgagtacataatgattggactgattaagagatttttgtgcttacaattaattccttgtttattttgttaattttgcatagatttggattaaatttcaaggaaaagaactacgcaccgccttgaacaagataacaaagttgcttctgcatggcatctatgtgaaattttttgacgactcacacgagacggtgcgaagttctattgatagagcaggaaaaaaaagtataagat

SEQ ID NO: 37429 - DNA, 673 bp, Oryza sativa
catgtgtagagataagaaggcttgtagggcccgggagggatacgacatatgtggagcacgagccagcgttgtgcattgccctcgcccccgggatctttctcctttacctcccgatcgattcggtcggcaagccgtgtggctgaaggtgtaaatcagtcaaaagcttttggcatatggtgtgtgtgtgtgtatatgttctttgcaaatattgggtaaaaattcctgtgcccacgggcttactctaacctcaccggaaaagaagaagaagaaaacaaattgacgacgacaacaatagacataccataacccatgatatgggtttggaagtacaaaatttggacaatgcgattgcaagatccaaacaggaacttcaatcaaattgatctaaacaaaacgaaatcgtgatgacgatatcgtagttttgtttgctagcactgacgattgacgaacaatttgcctattggttcttaagattaaacaaaaaaaaaagggggccacctagttggggtttggaaggtagcactagctgggcaaagcttggagaagcatcagcacgcgaagctacacgccaatacatgatgatcgatcagaaggacttcggttggatcacagaaacaaatatttttggcttatctttggatgaagctgtgtgaaggtgcgacccagcaacaaa

SEQ ID NO: 37430 - DNA, 586 bp, Oryza sativa
tcatatgccctcttcttcctcataataccaatggctttgttactgtcatactttaaaaaacacatcggctcggctccgaagggcttggctgtagctccaaaggaagggctcggctccaaaggaagggcttggctatagctgcaaaggaagggcttggcggtagcaggacatcggatcggggacgcaccgcagagaattttatcccaatagaactgcatgtgtaattgttttggttgttgcaaaatctcttaaattttgaacgcacatctaactaacatgaactaactatcctattttttatagctcttcctacatgtatatattcacgtatggttacaacaagctacgatcatcacttcatattcgtagtggcggcgatggagttgccagggaagaagagggcagaggaatcgtggttggagaaggaacggctctggaggaatatcgtgctatcgatggagttggagtgggctggatataggcccaatatcggtgtactaaaatacccttgattaagtgctaatcctatttttaatctcagctactgatgatctttaattttcgtgcaactttttttagagcacat

SEQ ID NO: 37431 - DNA, 837 bp, Oryza sativa
agcccattagccggtcttcctgaatccacagcaataatctgatcgatgatctgaatcaaacatgactcttgtttctctcatagcccattagctggtctacctgcatccaccgcaataatctgcttgataatctgaatcaaacagggcacatgttgccttgatttaccttataaacttgcacttcgtttacagtttaaatttggcttgagagagagcttatcttgaggttctgtacagattttttgtgatactacatatgccaaaaaactcgtgtcttgagactctgcacagatatgtccatgcattatattcccaaaatcgacgtcgaggcaccttgtttaagccatggcacaatattttccaggactatgattacccaaaattttgacaaactaacccttttaaaagaattgtattttaaaaaaatgaatcgtgccaaaaactaattgaagaaatgaatcgttgtcttgatggtgcttaactataacgttttagcgctacaaatataggcactgaatggcacggttcattattaaaaataactttttataaggatcattgtggcaaaatttcagctaagactacctttgtcactacaagattcatgcggtcatagtttcatgcagggcggatccaggaacaaaaaaattggaggggctcagttacatagtatcttcaatctctagccatttaagaacctttactttatcattcacggtgaaaaaatcgaggggggagtgttccgggggtatccatagattttatgggtgcaggggggaccacgttggatccgcccctggtttcatgtcaatatgccatgctttcaagctatgcaca

SEQ ID NO: 37432 - DNA, 692 bp, Oryza sativa
ttaatagatgtcactatactaaaatttttaaaaacatttataaaaccatttcaatttaagagaaaaattgtttacgtgtctataaatttttctcagtccttatgtatactgaatttttccacattccctacatgcccttgcatttatattttatattttgatcccctctatatagaacttaactttgttagttcactgtgtgttgacaattttaatttttttttttcaaaaggctgtatcgccccatatctcgtgctcacgtacttagcttacttaagaaacataaatctaaatgtgagaaacataattcatgaaaaaccaaagatttaaatgaattgggacaattatttggtaccaaatttgaaaaatacttttaaattttcgagctacttttttcaaaaaaaattaaaagattaaatccataaaatattttcacatagaaagtgaaaaccaaaaaatattttttattttggtttaaattttgttgaaaatgatgtacaaatttcatttagtttttgttctaaaaattaaattttcatttaatttatggtgaaagtattctatccccatgctttattacaaatatattttttacgacatgtaagcgatgaggtaaaatttagagacataaaatgggctgacgggaaaatattctatccctatgctttattacaaggtaccgagctcgaatt

SEQ ID NO: 37433 - DNA, 3156 bp, Oryza sativa
accaaaagctggagcacacacgcgcacacagtagccactatcatcggataaaaaagagtgtctttgctaagttgctaggccacagggatgaatcagattcccacgatgtgttatccatctccctgatcatgactggacacttacaacctgatccacatgtgtgtatgcaccgcactgtgcaccaggtacccttgggattttgcttcagcttaatttcggtttgtagtctaacctctatgaagcaattggccaagctcttgtgattgatgtcttatctaccccaagcactgccttaatcattcattttgtcgaataatggttcccgtattaaaaacgtgcatatagtttggacttaatcgttaagctattcgttcctctcttttttgggttagtggaatgtgatctttgtgtcttatactttggtgccaagtatatatatattgctagttcacctggaagtttgcactttgcactttgaggacgtgctgtaaaatccctctcctgttttttgttgggaaaaatataaaagccactccaaatattatcttaggtttgagattcccttctataagacaatttgttgcaaatatctcttcctaattcccttggtttgagattctcccaattaaaccttgttgggcagtgtgatgagtctccatgcttgaacatcatggttatcgaaagatgggctgttgcgcttgcctcatgaggaagggcgactggtttctcagcaaagacgacgaaaataagttttggtgtgaagctgttttgttgagaaagatgtgctaaggcctggtttaattccctaatttttttttctaaaaacatcacatcgaatctttagacatgtatggagcattaaatatagattaaaaaaactaattgcacggttagagagggaattgcgatacgaattttttgagcctaattagtccatgattagctataggtgttacaataacctacatgtgctaatgacggattaattaggctcaaaggatttgtctcgcggtttccaggcgagttatgaaaaaaaattttcatttgtgtctaaaaatcccttctgacatccgggcaaacattcgatgtgacaccaaaaattttcttttcacgaattaaacggggcccagttatataacacatacagaaagaaggaaaaagaaagtgaacctagggaggaatctcaaactaaggtatagtttttcaaaaaaaaaagaaaagaaaaaagtttgcatcgtgggttttgacttctggcaacatctttgcaatggatgaaatttctcgttcattcgttgaatatctgtaaaatatttgcagcatcaaccagaaggagaagttcatggtttccccactaacaaaagagcagatgtgttggtcaacctgaaccccacgagttgacccaaagtatttccatgctcaacccaacccaacatgcaccaggatttcctctcccatcttcgcatgcgcaatctgcaattctccccctccttttttttcccatcaagatattgttcttgatttgttagttccagttttgtcttgcagccatcatgaggcttatcttcaaccatcatgtttttacataggatgcacaaaaaaggctagagcttcctggaggctccatcctctcttttgtaccctttgttgctgactttttggccctctaacctgcactactactgataccagttgcaaagctcttgcctccagtttacattgggccacgtgtgccaatgccttgtcactcctagtcagcacacttctcccactaaccagagaagtccaagcacaaaagttaaagcctctcaaatcgcgcgttccgtgcactatgcaacctcctaatccatctaaattatgcacaggcatcttcagtcataagcccgtaaccaattttgaattttagtatgacttaaaagttcttttcattattatttttgccactcaactttggttctagaagttagaacaacatggagtataaagtttatcataaaatccagttttaccaccaaactattttccactacttccattaagataagcagtcatcatcttcaatctctcttgggggtgatgaatgttgtgaaatcccatgaattccattcaaaactcaacaagggaacgcccgcaataaattcaaacagttttctgaatgcagcaaagccgcagcctcaaaaaaaaaaaacgccttgccatgcataaataaagtccaatggacacttaatatctgcacaggagatcagaggctcacgtcacccgatctgtcatgaggagccagagtcctttggtcctcagagcaagtttaatagtataccctattactagctctatagccaatctaataactaattcatacaatatttgcttactatactattaatatatggtcctacctgtcatacacatattgcgtcttagagttcatgctgctattctctttaatcttttactccctctgttttttaattgatgatgtcgctgactttttctcacatgtttgaccattcgtcttatttaaaaattttatgcaaatatataagatacaaatcacatttaaagtactatgagtgataaaacaactcataacaaaataaattataattacgtaaattttttaaataagacgatggtcaaacatataagaaaaagtcaatggtatcatctattaaaaaacaaaacggggtagtatttcattaagggggtgtttagatggggctaaaactttttagtccgtgtcacatcgaatgtttgacgctaatttggagtattaaacatagactaataaaaaaactaattttataaatgaaagctaatctgcgagacgaattttttaatcctaattaatctataattatgaaaagtttactgaagcatcacattgtcaaatcatggtgtaattagactcaaaagattcgtctcgcgaattagccaaagggtatagaatatgttttataattagtgtatgtttaatacctctaaattggtgtataaacatccgatatgataagtcctgtttcccaaacagaccttaaaatatacatgctctcaccggcgagaacacccgtcacccgtgccgtcgtccaattattgggcccgtgtcccgtcagaaatcccgcacgccacgccagagagaaccccaagccgccacccgcgcgt

SEQ ID NO: 37434 - DNA, 658 bp, Oryza sativa
atccactcctccaccatctcctcctcctcctcatccccacgctcgccgccgccgccgccgccggcacacctctccttggacagcatcagcgcgaggtactcatcgtcccggtccatgagcaacacatggtcgtcgtcagcaatggataactcccagtcgccgccgctgccgccgccgccatcgtcgtcggcggggtcggcggagaagaggtcgttgccatcctcccggcagatgagcgtggacgtgggcgtcgcgggcgcggaggtggatgcccaggcgtcccccatggtcggcgtcacagcccgccgcgcatgcagaagaagaagaaaaaggaaagaatcgagaaaagggaggcagaaatccaccgggacgaaaaggcggcgtgcgggtagcgggcgatcgaggcggccggaacagaaagggatcgattcccaccacctcctccgccgcctccgcctcgtgccgtgcctccccccaccacccgcgcgcgcgttgaaaggggagggaaatctgcagttagagagagagagcgaaggaaaggggtggactgattcaggactggattggaatagagagagagagagagagagagagagatacaggtgtgtgcgtggaggagtggccgcgtgggggggttggatggtggtggatggagaag

SEQ ID NO: 37435 - DNA, 629 bp, Oryza sativa
taatgatagcaagaaaaaactagaatatacacattaaatgagatttggttatgggtgattggataatatattggtggttaaaataggtagaaatttgaattagtgtttatggatgtgacaaatagtacaccaaaattatttatattataaaataaataaaagaaagaaaatcttttatattacggtacagaggccacgattacttatcttaggcaccatgtcaattaatctttggtctacctctcatgtttagagttactttacatatgccatttcttctgtgtgtgatagtcgagaatgttggcgttcgtgcacatatgcaacaatccttttatttgatctggaaatttagctgggtgccctagctatatatgtgcaaaggtcggagttgaaatatatttttcattacaggaaatgcaaaaatcttgcacagtacacactgtatagaggaagttccatttatgtaaacattggcgatgccaagttcaaaaccaactatactaccaaataatacactgcctgtccatttaaatgccttggaacaaactcaagtacatcacatgtggctgcatgcgctcccctcttcagtcctatacgtatatttgaagggttcagtgctacgtttatat

SEQ ID NO: 37436 - DNA, 565 bp, Oryza sativa
tctttggctgagatccctccggtgaccgatgccggccgatacccgattcgattgccctggccgcgcgcggccgctattgaaaaccgatacgtcacgtcacctaacacgtggggtacaccgtacacccagaaaaccgatgcactgtccgtctatatggcggatgcgggcacacggtgcgcggcgaccttagcggagggtttttccggcagaacgtcgcactgcttctgcggcgtctggggtaccgcgtagctatataggctggcccatctggatcattagcacagcattagtcacatggcttcgagtacctttagcaccgggcctcttagctgacgcaaatgattaatgatttataactattcttcaccacaagaaactagagcaacacagatttaactttcatttatgagattcaaactttgtattctgtccgaagctacaagaaatatgatcatcaatagtttgattccacatgctatgggtaaaatatacgagtagtaatcataaggatgcttcaaggcatcgtatgctttggccgagtctagaccacgtcaaaaaaaaatac

SEQ ID NO: 37437 - DNA, 933 bp, Oryza sativa
atattagaatgtgtcacattcatccacaattctttatatttttggaatgaagagaggagtaatttctacagtagtactgtacttctgagcaatattattgtcactgaaatacttcgaactcccttttctttctctctttctctctctctcttgtttttcttgagcaatctgttcgatctggtacgattgcaaatcctgtccatcacgatcacatgtttgatttcaggtcccatatcccgtcaagatcgaaccatttcagccctcagggactttggaatctcagagtatctttaatatttattacaaaactactaactccgtcctttgagtttttatttgtaacttttagccattcgtcttattcaaaaatatggaattattttttttgacttactttattattaaaaaatactttaagtatgtcttatcttttttatatttgcactaatttctaaataaaatgaatggtcaaatgttgtaagaaaaagttaaagcgaccactaacttaagacggaggtagcatatagtaaaacgaagccttgttgattaagtagtaatagtagtttagagagacacgtaccataatgtatttatgttagataataagttgggattcatctaaaattttctttcaaacatgaatcataccacaattaaaatgatagatgagacccaccatatataaaaatgctaatacctgatagtagtagtttataccatttttataatgtatcttaccttatactccctctgtttcacaatataatgtattttgagtttttgcttacaatgtttaactactcatcctatttaaattttttttgcaaatataaaaaacgaaaagttgtgcttaaagtactatagataataaagtaagtctcaaataaaataaataataatttaaaaaaatttgaataagacaagtggtcaaac

SEQ ID NO: 37438 - DNA, 848 bp, Oryza sativa
  unsure (1)..(848): unsure at all n locations
ccagcaattttattaacatttgcaggattggcgggataagaaatgtgacgcaataggtcgtttaaatttcaactcaaccgtaggcagtggccgcccttaaattagaaagatttctaaagcatgcgcaaattgatcctattatattatatcaatgtgtttttggttatgaaaattttctttgtgattcatcaaaacaagtcaaatttctattgtgcatccagctagctagtctaagtttgtcgggtggtggatccgccttgatacgaggttttgtgaacctgagaactcatatactctaagaggttttatttgaagtttttatggttccgtgacaagatgatttttcggctctgataaggtttacctcttctagtgccatacttacttttggttggcacataacacattaatctatacattgtgtttccataaatcatgtgcaattgatagttcaattcgatcttattatttttgtaaagatatccctatctatcaaaatagcaacataattaccaccataagcatagtttggtgacccactacttcaagagtatggacaaaatattttgtcatattacttctaaaatccacacaactatcattgttcaaaaaaaaatcgctatatgtaataaactttatatcaaagtggttatttttcattaatgaagtgcacgttttctaaataaagcccattaaacaatggacactcagtaatgacttaaaactattagaacatattttgatactttaggaatcaaaatctaacaaaaacaagttcaaattcagttcaaacttgctttaaacgggtaccgagctnggattggtgctatntggtagtaggtgataat

SEQ ID NO: 37439 - DNA, 833 bp, Oryza sativa
  unsure (1)..(833): unsure at all n locations
agcccaccttctgcctttacaaaaagtggtccaacatattaaaaatatcatcaatatcccacccacccaatttaaattttaagttaacccaagtgaatacatgtccggtgctcaattaccggagcacggctattcaataatttggtttactcccctgcagtgaatgtcactttaccacaactcaggaattgccaacacatgagcttggtcccaacacatgagacgcgtcacggcaaagcttttcgataacctcgcattgtcagtaccagctccatgaacttacatccttcatgcactctaggcgtacacggtttctagcagtaagaggagttctggcgcacccggaaagaaaagactcacacatgcattaagttataattaggtttaaattctcacatggcagtcctaccgatggcgacaccactgtagacacccgcctcgcggttctaccaatggctgccccaccgtagagcccctgtctcacacatcaagaaaccactatgcatggatactgcctccgctcagctatctattccgctaggtctatacccatacaagaagtgcggttgtacgagggtcatttcatgcttaacttcatggctcggtccttaattgaccggggacggtactagccttttccgaataccacccaaatcctccgtccgccccagtcaaaaacagttgttacattttatttctcctttcacaaattatgtcatcaacatcatggcaatgtggcgctcatgtctccacatgccgcatctcaattaccttcccaaaggtaatgggtaccgagctcganttcgccgttggttagtagatgtcagccacct

SEQ ID NO: 37440 - DNA, 1737 bp, Oryza sativa
tgaagggatccccgtgacaaatcttaaaatattataaaattataatggactcaatataaataggcgaattataggatatattcccaccattctaaaaagagctaaccttttgttcagattcattgtactaggaggggtcatattttctcttagattgtttttttttggacggagggagtatttttaaactagagaatttataatgttggtatggatccttaaagtttttctaaagcaaacgcacatactacaaactgccaccgcttttgtatccgatatctgtctgtattcacgtacaagccaactctgaaatctggactatcgcaattctcaatgcttacataataaggactataattccttttcttctgaatacaaacgccatgtttgttagctgcggctatattgccatccatcatcaacaagctagtccaaaacatacgcaccattgttttgttttcttattgacgggactgattcctcttctcgtcaatcgtgtactgacgccaagactttcatacgttggcacggtgaagttcctttgctacggcggcgcgcgacgccggaaggaaaacggaatcgccctaatctaaacggctgtcccgccacctgatccaacgaggctacgacgtgcacggtacatggaaccaattgcctgctagcccctgtcctccgcgagggtggagagtgggacaacttcgcggctgcagtttcctcgccgttgccgtaaaaagaacttccatggaggaatagctccctagctcgccgcagggacgagaggtgaacgaacgagggaagaacacgggttgttgcacgccacgattccccggatttccagactacaaagtcggatactcgccggggtcaggcccggagccccggactgatggtgttgggcttctgacgtattgctgaggcccatcttatgtcgctgcgtcgaagactgcttcacatgaggaataagttcactttacctcccttaattcgctgcgtcgaagacaaatgggcccacatgtttttttaattgtaatgtcacctaagcgtcatgtccatgccatgtggcataaagaacaggtcaacacagacgcggcttgcctgctcccctacagtgctcccatccgtgctcccgatgcatcggacggctttgtttctccagcggtgggtcctgcagcttcttctgtagtcttccgaatcagcgatgatgtttttccaaaagaaaaaaaaaatcttcaacgaaaagagaaggctatgaggtattggggtatggcagacgataagattagtgtatgctataactattccttaatgatccattccattcttttcctaccaaagaaaccaaaggtaatgacctcagatatgaggggaaggcatctctacgacctgttctatctaatactattggaatctggagtcatattgaacatgcatgacgtacaaaatatcctaataatctgttgcacaatgttaattacaacaataatcaaggtcaaatcaacaatcaacacttgatcctcagcgttgatgatatgatctatcgctttgccgaagaaaataagaaatcttgccgctgctgatctccattctgactcctcatgacacacgtcacacacctccgtagtctattccaagtttccaacaaatttcttcattcctcgctgaattgtctgtgattcctttgattcagttattttgatgaaagaggccgaacgtgataaaaaggtaaagatgcaatgc

SEQ ID NO: 37441 - DNA, 512 bp, Oryza sativa
attttgagtatttgaccgtactgttgtgcatagttcgaatatataactgtttgtatttgtaaatgatttcatgacttattctttacttaaaatttaagtatgatcctctctttctttattcagtcctaatggatgaatgaagacagtgatatcacattttttatgatatattttgtaatttgtgactttcttatacgattgacaaattatcaatttcacaaatatttttagctgattttataattaaggtacacaatttctgtcctttttctcaacactttcttttagtataatgccctcaatgggagaatcgatgtttaggatacacaataatctgcataatactagtgttagctcaccagccgatctcattagagatgagagtgacaaatccttaattgacacttataagagtggcaattagtaaaatatccccacgcttagaagcatcgggtaggccatcgaatcaattcttttttccaaaaagttgatttgtatgaatgttaatttcg

SEQ ID NO: 37442 - DNA, 843 bp, Oryza sativa
  unsure (1)..(843): unsure at all n locations
cgggattaaacttcatagcacaggccaattcnagctcggtacccttacaatgaacgtaatgttgtagctggatcatagatcaaataaataatttaagagaattttctaagaagaaaaaaagcacgcataacctaatagaaaaaaaaacttgcatgtctgtagacgtgtagtagtacttctctcacatatggctggcgtcgctcgttaagcctaaatcgagaggcccctcgaagtagattttgtgaaattaataaccatgtgtttggtttggaatgggataagttaggtcatcataggttgcccatatttcctaataagacaaaaacggtttattaggaaataaaaattaatttgcagttaaaacttttatgtgtttttagtgataagtcaatgctgaaaaagaagctatgtgataatatcctaaaatcaacttgaaattaaatttgaaattcaaattttgccttttttttttcctttggtttattagagcaaccaatggggtatttaggtaaggatgaattttttatggcgtttgattcgggacagataaggtgggatgatcactaaaaggaaaatattattccctcaaaatctangttagctccatacgactaatcaatttaacacacttgctctttatcattagcatacaaaccacactcttntaacagcattcttaagaaatatgacaattntattctttcattgcaaaaaacacatgaatactacgatctttctctactctcactgtgggattttcttctttctttttggtgcccatcctttaatttattattgcctttttgggtggntgnggaaggaaaaaaagatgatgagtgggtt

SEQ ID NO: 37443 - DNA, 1218 bp, Oryza sativa
  unsure (1)..(1218): unsure at all n locations
atagagcagagtagagtatctttgatatgatatatacaataagatcatgtttggcttgttgacatcaaacatgctaanagtccagaaaacacaaacacacattcagcaacatgtcaatacttagctatgtgtttgtttaaagtttaaactgtccaatgttgttgatctgttaacacatctatcaaacagaccatgtcataggagggtatataaaaacataaaacatatacaataaaaaaaataatcaggcagctaaagctaaactgccaaacttacaatggtcatctaaagcctgcaaatttgctcttttggggagaagacttggcaataaagatctaaatatcatcattcagcacagtttaactaagaaacctactgaagtggagatgtgcaatgaatcaaccattttcagaatgcatataagacaacttagagcatgaaggtcaaggcaggaagctcaacactcagggtgtagatttaggatgttttggttatgacagagtagcttctgcaattaagataatccaggggttaagataatccagtagataccctcgctcctccctactcccacactcagtacgctgcactcagcactaaaattacaaattttacgacactttgtagaactatctttcttcaatactggctctagtacatggatgcctctagtacattgctcatggatgactgcagtacattgccatatactgtttccattcctcaaaactgcggtaaaataaagatgtctttgttttgtagtgagcatgacaagaataaatggctaattgtccttttgtggagacacatacaatctacaaacttatgagcatgcataagtaaaatagcaaaaaacatttccgtcactttgtacttatcaaaaacagtccgatgataacattacgaacccatttcagacacagaaaaaatcatgtgtgaaatgaattaatctacggtgaaattgatataaaattcatgcattcgaacaaaacactaaattattgttcttgttgacattataagatatgctagcaacaaccattttgatgtgactctatcgagaagagatggtatgtatagctttgctttgtacaatgcatccgagtattgtactactgaagcaaagccgcagatcaagctaagaatcatggtattgaaacagtcatagtaataataatacaaggcgcacataaaaattatcttgagaaaacgtatatt

SEQ ID NO: 37444 - DNA, 829 bp, Oryza sativa
  unsure (1)..(829): unsure at all n locations
gtgatctancctgttaggaccaacgcgagctcggtacccggcctcacctcggatggcgcgaagcgaacgctcgatcgccgctccatttctcgccgccggcgaggtcttcgtcgccggaagaacggggaagacgccctgctcgcaacttgcagcaaagagtagaaaagaaaatgaaaaggaaaaagaaaaaaaaattaaaagagaagtaggggaagtggttgagtgggccccaccagataatggccaaagaagggactggttggtgggcccaggaatcatcctgccatgccagacactgacaggtttctcaggacagattggaagcctgtttggaattctggccctctttagggtgtgtttagttaaagtttagttgaaattggaacgatacgatggaaaaattaaagtttatgaccgagtttagttcaattggaagtttgaagaaaaaaattggaactaaactcggcctaagatttcaacttttttcttcaaacttctaaattttccgtcacatcaaactttcttacccacacgaacttctaantttttcgtcacattggttccaatttctttaaacttttcaatttagcgtggaattaaacacagccaaaattgggagtttgatttatattggatctatgccactataaatttgtttgtttagaaaaatacactacaattcaccctatatgaaaagggaaatgctgaacactggtataacgtcccgacgggatggatagacacaaccaatccactcttttctactagctatttttctacaacattttttacacgtgctgttgactaagtaacaccagctccgcggggt

SEQ ID NO: 37445 - DNA, 819 bp, Oryza sativa
ctcggtaccccctttaactggcataactgcatttttcgatcaatcacaaataaagatataaaattataattgttgtggtagctagagtcaaaagctgaccttaaccaaatgtgtcattttggatatgtattgggagtgaaaacataaagtaaacatcgattgtgccaatatatagcccgaggggcattgtatgtatgtacatacgtacaccatcggccaacatccacccacctgcgcctcattcatcccctctcccaatgtactgtctctcatgttttcatcatatattagtcaggaaccctaatttattataatgttttaaaataaatagctattttttatcgacttatgttgttggaccattattaactatattcgaacttcttaaataaatatgttattttttattacattctgactattttcatatcatttaaataattattagaaaatatgaaaaaaaaccaatgatatatactttacctgttgaaaatatttttggtgaattttttttacatctatgtaaaatgtacgaattattactattgaaataccaacccaaacagtttcaaaaatttcaaaaatgattggagaatgttaatatcacacaaattaaaaatttaaattgggtctacttaaaaaacacaactaaaatacatggtttgcatttttacatagtcaaaataccgtggttatttgttaagtaaaatttgatcccttaaggatatacgttgatgcgggttttttttgtgaaaaattggtatggagtaaattaaatcatgtctatgttattttgccgcaatgtattttaaatacaat

SEQ ID NO: 37446 - DNA, 860 bp, Oryza sativa
  unsure (1)..(860): unsure at all n locations
agtgactgataacgtaagtcaantngcaaacnacctcggtacccataagaggtctcagtagaaagacaaatgaactccacatcctcaaagtcaaaagcttctagcttaagcatgctaatatatactccctccattccaaattgggctacatatagtttttttgaggttattcctaaatgatctacatatttgtgttcataaaaaaacaagaaaggagaggagaaacccaagtgggaagacatatatgaatcactcaaagctgctaggcgagcaaggggtgaatgcttcaagtgtggggagaaatggggacctgggcacaaatgtccaaagtcagttcaattgcatgtgttagatgagttgcttgaagtattgatgttacaggatggaactgctgacatccagaaagaagaagaagaagataatgaataagagctaacactttcaaagtgtgcagctgctggaacaatgggaaagaaaacaattaggctgcaaggtatgattcagcatcaagaggtactgattctggtagattctgggagctctagtaattttattgtagagagtttggttagcaaattgcagcttcccacagaaagaatgcctgcaaattcagtgacccatagcagatggaggaaagatgacttgtgacaaatgtgtacaggttggaatggtggtgtcaaggtagtacattccaggatacactaaaagtgttgacaatatgaagggtccaacatgatcctaggaatggcattggttcgaggagtttaatccaatgtggatagaatgggagagaaagaaattgacgcttgttccaatggggaacaggatcattttgttaggactaaaacaggaaaataaat

SEQ ID NO: 37447 - DNA, 683 bp, Oryza sativa
ttgagcttccatgagctaattgcgtcaacagtctgttgagttctttgctctcaagaagagttactatacctctgtttcttgcacggaatgttaatggaagcgattttttactgtatgttgtgccaactccctcctcctactataaaaagacataccttagaattcgtggggctctcaacgactgtccgcttcatctataaaaaataccataaatagaaagaccacaaggcacatataaaatattaatcatgtttaattatctaacagcaatgaatatacgaattataaaaaaatttcatataagacggacagtcaaagttagagacgcataccaagggtttgcctttttataggacggagggagtatgtgtctgctgtttagttcctgtacactggcttccactgatcatggttatttatttttattggttccccattactgttgacagttgagctatctgaaaaagaaattgtttatactcctcccatctcaaaataaatatatttaatttaagatagaaggagtaattgtcaacataatcaatctaaaccgtttaatagatatattttatagtaccacctcaaatacttcaactaatgctaagagaaattttttctactaatatttaacctataaataaatggtgagataaattctatttctctactagggattatattgg

SEQ ID NO: 37448 - DNA, 703 bp, Oryza sativa
gctcggtacccctctgccttcgccactggtcgctcgtacgggtggatgcattgcatggtggccacttgtacatgtcagtttcagcacacgcacccatgccaataatgccgacaattagcctctcaacgttcgaaaaccagccgagtcgagtcgagcccactttggcaccttgcttccaccacacacacacacacacacacaaacaaccaaacaaacccaaaaaaaaaaaacagagagagagagagagagagaccatggtaacacagccaaacaggccacgttactactagtagtaggtaccaaccggcccagcagaaatatctcccggaatccaccggcggagaacgtgacactccctcggcgtctactgaaattcaccgcgaaaaactaggcaaaaatccggtcgccgctcgctaggcgcttggctccggctctggcgccgatcgatcgagagctccgatcctagccaatgcgaggccacgtcagccgcctcatcattcacaaaaaaaaaaaaagaaaaaaaaagaaaagaagagtaaaccgtactttgcacaggcagattgtgtcttgtttcactttgcatcaggtttaccatataattttactttacatcaggctggattgaaataagttcataaaattgaaggaaaatcttgtgaaatccaaatgaaacctgggtaccgagctcgaattcgccgtatag

SEQ ID NO: 37449 - DNA, 507 bp, Oryza sativa
ccttcgtatttctaccaccattctcatcccttcttctcttgttacacattttagcaaaggggcagtgactccgctcttgtacagctgcccttctatcaccttgtacttccttgacattaactgtattcttcttgcttcttcttccttttctggaagttgttcactaaccagatacttcagaattggctctctccaatctatctcgccttgtatgtttgccacttctcttttctcataacttggttgaattaacacatcaaagaatgaattctccaatggttggcttgtggcagctgcttttgcaagctcatcggcttccccattttattctcttgttatagcttttactgtatcccaaggaagtgtttttcattcagccttgcttcttccaagtactttgtcattgctcttcttttgcttcaaatgtcttggaaaagtgacctgccaccagctttgaatcgttttgattatcaatcgtcgagcccctagtgctcttgcctttctcat

SEQ ID NO: 37450 - DNA, 1767 bp, Oryza sativa
  unsure (1)..(1767): unsure at all n locations
ttagtttatattgcgttagttagccaatgattagtttgtcgacctggtatggcgtgaaatttcaaccaatcgtacataatttttgttcggtttatcctggctcttctacaataattgttgacgacacagcatattttgtataaatgtgttatatcttgtatacatgcatccgccaataaatcccatttgaagctagatggatacaaaaacatacaattaatctgatacgtgacagatttgtagacatgattaattgttgacatgtgaactctaggactggacgtttccaaaggaatctgaaaaaacaagcagttgctagcggtgggccgcgggtggtattttaatttaccgtattagcataccccagctggtgccgtcgtacactacctgcatactcctaaatgcagatacgtacagatcaagtgcacgcaaaaataaactaaaggataatttgcccatgtaatttttttcagataaaagtctcgcgcggtcggcatgtgtctgtatatactccgatgcatgggcgatttactcggatgaacaccgtgggcctacaggtaccggcccaccaccaaccacgttgtaccgcggtgttcacctcaatcagaacagtccactttcgcaagggacccgtgcattagggagaggtctcccgtttcaagccgttagcctctcccactcccgtacgtttctgtgcgttttcaatttcttgtgatccattggtttatcgtgttgggagatatttatacgctccgtgcgtccaggcaccgatattacagcgtatgaggatcgagatgcatggttaataatgatcatccatgcaaaggtaaaaggttcgtgcatgcaaggtattgcaactgccaccatgccaaacctgacgaaccaatgcttcttgtgcatattcctagatgtgtcggtctgatatagcctgatagagtaaaaaaaatgaggtcctggagagatgattaaattcgtgcagttactagccaacacagtcggcccgggtagcccgagaccacccaccgtggcacnacgcgggcgcgcgcgcgcggcgagtaaatatataggcggcgccgccgtctggttctccccggaacggaggcctctcgcgcgcaccgaacgtcgtcgtggctcttcaacgttgggatatatatgtccatgcacacgcggctccggtcattctatttccaccgcccgcgcgcacgggctgcacgcgcgcgcgacggccgcgcaccccgtgcatgccgcgcgcgtgaggagggtagggtagcgtggccgcgcgccgtgttccgacttccgacgcgcggcgcgcgcgatgtcagcgcggcccagttgtccccgggcgcgggcgccacgtcggccgggcgccgcatacgtgtccggtgaaccgagcgagagactctcctcatctcattccgtttcaccgctgcggctgcatctgcatgcatgcgcagcccacaccgtacccgcgctgttttgtccccatgccccccgctctcataaatctcagcatgcctatcgccatggacccccacaggggaggctataaaaacacggcacggtccctgtaacaaacagtgagtacccttcctccctgcagccgcatacacgcggtacatgagttgcggtcagtaattcgatcggctgtcgttgggagatcgggaagagtcgtcgccgtagcagggtagtgagggtgtatacgcgcatacacatacacatccaccagcccttccttttgtaggcgctccctgattactttctctctct

SEQ ID NO: 37451 - DNA, 3785 bp, Oryza sativa
cgtcgtagcaatcggtcgtgggggcgcatggatccagctcccccgcccttgggatcagcagcggcttaaggggtgtgctggcacgcagattctagagggggattctgacgcccccgccttcgggagcggcggaggtgccgtcggccgcggatccaacaccactgccagcagcagcagcagcccgtgcggtggcccactgccatcgccacgccagtcgcctctcctaccctctccatccagccgtgtggcttgggaagaaaagagaagaaataagaggtcgactgtcatgtgggtcccacattcttttttttttactagatgccacggcagtgaaaccaaacatctatactgccaggtgaagatttctagtatagggacgacaggtgaacttatttcccccaaatggcatcaagatgatattgcaaagtccagcccatcacagatgggcttactttcctggctcactagattctctccgtttcccgcatcttgcagatagcatccgaccaagtttaaggtcatgttaactagttgcacggccctttgggccggaaatttgcataggcttaacatcctaagaaatacaaaataggcactagcatagtttccttctcattgctaacgctaaacgtatacttgttcgaaaaaaaaatgctaaatatatacaatgaacttaaacaaatcctttttggcaccggatcagggcacatgagctgtggagtcatgacacccaaaaccggattcttcttgtgtcagaagcctgcctagagcatctacattgcaggataatatgcggcgtcggacactgatgtgatttctgtccacttctttttctccaagctccaatagctttacagtacaaagctcacaatctttctttcaggattcagaaaagtagcagctatcttctctcagaagtagttctgcagagcaatcgcattcttaaaccagtagattgccgtggcacaagaactgatttgttcgctgccaggaccattttctgtaatgcagcagtaaccaagcaagtggtgcacttccggaacaaaaggctctctgtctctgtaacatcgacagggatgtccatgtacgtttttacacaattgttctataccatcttactaccactactagtacctaccattacccattgcagttggtgttgtgtatgaatcacgagtcgttttctttcggctaaagtatttggcagtacgagtcacaagtgctactttgattccacctatctaatgagaccagcaaagcaaagattcttgggggatgtcaggtactcttttatgggcatcctttgagttggatctccaaaagaaagccctgcacactgcagtgctgtgcatttcgcatgcaagtacaacagcggcggctgagctgagagggggcggaaattggcacgaggagcgcctttcgcgcgcaaaacattctcgaagtgacgctggtgcacgacgaacatgcaatccactcgtggcggtgcctgccctaacctcacgcaacggcagccagccggccacagaaagatacttctcctcgttcatgagatgtcagatggataaattagattaggccaatcaatcatggtacgagtactaaaataacaatggccagcaaagtacatagttgcagggatttcaggcaggctgccggcactgctaactctcaggtcatggtggaggcatgggccctttttatattcactcatctgatccagtgatcgaccacaccaccggccaccaccgtgatcgatctgcagccgcagctgctgcctgcctgcgccgtgtcgtcccttcatgctttatacccctactctctctcccggtccctggctccctgccgtggttgttcgtctggacgggatggcccagatagcccctgaggcagctgatcagcaagagatcgatgaatcatcaatcgaacagagaacgtatcgtactatcgccacagttagtcgctcataggcgccagcagaattgaaagagccttccatgtcacgcacgcagatgcatgggaacgtgggacgaggtgtcaaatcaggcaggtagttggattaattccacttgggaaacctggctgtcagatctggatgcagcccggcggtgattggatttagtctcgctgtgctcgtacatatatacagctgctactgcatagccatctggtccccgtgtacgtacgcgcacaggctaagtaaccttcccgtggtgcccggtagaacgccgcctaccacgtaccggctgagatgagatagttcgacgcggcggtaaagcaaggccgcggcaataaatggcacgtaaatagccgcaacacggcagcacgagccgcgattgctgaattccggcgagatttcacgtgccccgcgctagcgatcgagctgtcgacccaggcacgcgtggccggtggccggcatctctagctagctgagtcgggtacaaactaggaaaagtcccgcgcgcgtggggggcgccggatgccggacgggcgcagttctaattcgtcggcgcggccgtaagacacaataaaagcgcgcggttagttcatcccggttgcgcgtgtgatgggtagccgatcgctcgagcggattacgcatgatgggttacgctacgagctagtagtatatatgagcatattcgccagtgtttgtgtgggaggggttgattactgcggcggcggcgcagcgtcgtgcgacggcaaataatgaacgtgtcacgctttatgtggagcttgacagttgcaaccaactaaccaactggtggccttagctcgtgggcaggaggagatgggggcgtagtggtgccgtataactccacacacacacatccgtatatatgtacatcaatacagtacatacgtatctctcatccatgtccgatacagcttgcagacgcgaaatacaggtgagcagtacttactactctagctgctagtaggatcgatcgagtatcgtggtaatcataatgcacaacgtggcgtctttacacacgggatgggcacatggttatattccccccgggtggatcaatcgatccctcctccatctcttttgtgcgcaacgctgctgctcctcttcgatcatgagcttagcttgtgacggatcgatcgatgatgtgattgtgttaaggtattaattccccgttggattcccccccggatgtgtatgctgcacagtgcgcgtggtgatgctcgcgccctagctatagctcaagcgttttggcgcgcgctgcagggccgagggaccaccgcgcgcgcggccggcgtcatgtgacgctacttgcgtgaacagtagctccaccccagctcatctgtcctggagatgttggggtgaatggccgaggcggcgacgcaccacattttggtagagtagtgattgtgcgacgaccactacacgcgcgcgtaacgtcgtacgtatacaaccggtaactccgtgttttacgtcctcgcggcgtcaccgatcggttagcgcggccgggccacgccgaacgtgtgtactcacgatttcacgtcacgtcacatgccactgcctgcctaccaggagcccaggacgagtactgacgaacgaacgggtgactggatcagtgccgatcggagcagtgcctcagtggggcgtacgtgcatatgcgttcgatcgatccggccggtgacttcgatcgaatcgccagtaatcaagcaagggagccaacgacgacggcgacagtgtcgtcgatcgccccgcgctgtagggatacagtttgttcggatcgcagctccgtgatatacgtgtgtacgtgccgtcaactcgg

SEQ ID NO: 37452 - DNA, 1633 bp, Oryza sativa
aataaaagctcaaagttagtgaatgacctgcccctttaagctcaccgtgttcattccagtcgtcttttttatacaagtccggtggttcaaagagagtactttaattccttctagacgatgattagagataacggattccagctctccaaggtcgcaactgagggagctatatatcaaaataggatattattctttgtttgtagttgagatttcttagatttgagtaaatatttaatgagtaagaagtcgttcccaagcggagttcttgaaaagagttgatttccgaaatttatatatttggaaattcgaaacttgtttggtcatttgaatgtcttttaagccaggggaaggtgaggaagtggattaaacaaggaccaaggcggtcttcttagaattcaatggttcgtcagaccaagcacactacctggtcattacatagcttcaaacatggcaatgaccaaatttaaaatgaagaatgagtacgtcgccaaaacattactagggttagccaaagttaattttcagtgcagtatattagctttaattctaaacacaactataaaaatatgaagaggacatataactaatgcatattacaagccaaaacttaatgtctagggccatgtacccctccgtcccaaaaataataataatcctagcaacaaaactggacacatgcgtgtctaggattagtctttttttttggacggagtagtagatctttaccaaattcgatatagatttataaatagacttgaataaatgttgttttctcaagtggtggtgtttatttagtgtttttatcctcacttttttatctttttttttgcggggctcacttttttatcttagctgctactgttgagcaaattgtgtaataagtgattataacttccttcaaacaaaagccaaaattaatattccattattaaaagagctatacttctttttctttcattacagtgaggaaataggggcattttttgagtccctgacccccggacaatctgggccataaaacaaaaatatgagtcaaagtttcaggctccctaaatggaaataagttcacttgatgtccctcgattttacattgagtttgtttgacatcattatttccaataccagaaatcattacccctaaactatacaaaaccgtgcaatttagatcctatagcagaaatgcaatatagatgactggtttagcttatgtggcatcctagtcaggaaaaatttcaaaaaaaaaatgtggacccaacatgtctgtgcccttttctttattctcattccttcccaagcctggagagagagaggtggctggcatgagaaaggagagagaggcggccggcgagcctgcttgggacttgggtcaagctccacgcccggcatcgacccgactaggctcttcaccgcgactggtcttggtgctcttcgaccagcagcatggtggaggatagtagtgaccacgttgctgaggaccagcttgcggaggaggaggagcactacatcgatgacgccaaccacctcgttcccaacagcgtccaagaggagggatccagtggtcgcgacatcgtcgtccccggcaaccacgatggtgaggaggactaccctgacaaccttgaccttgacatactcg

SEQ ID NO: 37453 - DNA, 845 bp, Oryza sativa
  unsure (1)..(845): unsure at all n locations
gtgggcgggtacaacgactaccatagggcgaanncgagctcggtacccggtataggccactggccatgattgtctgtcttgctgacgagagaaacgagcagtacaatgcctagatataaaattgttccatgatcgatcgatgagagattgagagtgctagcttgctttcaattcatccccatgcatgccaggagaggtgaatgagcatcgggttcagaattcagatcatgcttgggcccaactcctccccggttatcgtctttgccggtggggttttctccccgatagccatgcccgtctgcgaaaataaaacccctacgtcaccgaaaatgctntttctagtagtggggattgaactcgagcatgagataacaccgaacatccatgcatccatatatccgatgagtgatcgataggcattttttttgccgggacggcccaaggcaggccgcccaaattgtattaaggagcgagagaaggtttcaaaaacttttacaaatcgacattaaacagtcgaggagaaccaaaaagaaaagnnnnnnnnnnnnnnnnnnnnnnnnnnnnnctttagctgacttctctaaaaatgttggcctctcttcacactacaacttcatctttgatatctctgaagagtntccgcgcctcgataggcattggacaaccgcaacattgatctatctatctccatggacatacaaatgcaaacccgctatggatgcngatataggctacgagcataaatgcatgcatatgcngaaccgggtatagcagtttttttaaatggatcaacaaataatntttaatggaaaggtatgtatctaaaccgggattctnttaagtcg

SEQ ID NO: 37454 - DNA, 849 bp, Oryza sativa
  unsure (1)..(849): unsure at all n locations
gcgcgtctttgacggtagnntcantttgtaccaaccgagctcggtacctgttggttttacagagttttgggttatctccatcaaactttgggaaatctgtcttaggcagtctagggctggcggatctaacactaaagctggacccccctactcccttctctgatgtttctcccaactcaaaattaacaggcgaatggtggaattggggcttactcttgaccagggtttgctccttagccttgaaggcttcggatgcgtcaccctggtgagtcgattcgacgccgtgcctacgggcgcttgtgccgcctgcgatggtgtcgttggcgtcaccgcttctagctgcgtcaccctgaccgcaatctcatccaccgccttgttcagctcccggattcctgaatccacgcatgggatccatttctccagaccttgaagcgatccgaggatgttgttgatacttgttgtgagctccaccaccttctcgcccaacacctatgcttcttcttccgctgcccccatcctctcggttagggttggatttgccttcttcctcgccagtgcgcacgagaaccgaagtgctctaatactagattgtcacgaattccatgactcttccagcgtttcgcctaattgaatcaggatttcgctagagatttggattagagattgtggaaagggatgaattgaggagggaaaggttagttaatggcatttgatttctttaatttttccgatccggttacagaccagggattttccctttaatggtcacaatgccacagaacacacacccacctgacgcggtttgccgacccaacacgggacgttaggttactcacaccaccttggcct

SEQ ID NO: 37455 - DNA, 823 bp, Oryza sativa
  unsure (1)..(823): unsure at all n locations
acgcacggaagatncgttncanacannatgcgaccaancccagctcggtaccctaagaccatcaactcacatgaataagttcttatcgatttgcatgcctacaaagaacaccgatcttgcaattgaattatactgcatgcagattgtgcacactggattctgcagtgcacgctagactctacagattgaattaaccatgatactaaaattataccatatgtaggctgtagaaatgcagggctagaaaagaattatgtgatgaaacagatatattttatattggtatagatgcagataagttaatccattgaggatctgccttgtataggaagagaccattgattcccatgccatattaacattatcaagtactccctccgttttataatgtaagtcattctagccctgcgctttttctgtactcctctagagtaacttttggataaatggtgaaaccaacagttgcgtcttgcgtgccctgtggatacttgagtgcacaatcgggttccggataaaagataaacatgttcgagggtcttagtggctaacaaaacgttggaccacaactaaagggaagatggtctcggtgacagtgcgcgaattgcccatagtgagacgtatacaaaaccctggtcgttgtatcacacaaccacaccgtttacacatttttttaagaattattctttattgtttctgcgcaaaaaaaaggaacctcaattttcttaactttacatggggatgatatgcctctttattaggacccgtcataatataaaatgaacttcaagcgtgttggatatgaaaaaaaaacatgcgggcaact

SEQ ID NO: 37456 - DNA, 2882 bp, Oryza sativa
tgtctctgaaggttgacatttaccgaatggtaccgtagcgtcagcgcacgggtaagttactagtgtgaacaattcgatgggaatacgggattgaccatgtgtcatcatctgcattactgcagggagaatcaacatacgtgtccgatctgcgttcgtcgtcttcaaggtgatgggtcgaatgcgcatgcttcagccgttcaccgccagggaatatgccgcgcgcgttctgatacgattcattttcttgtggacagatgagttctcaacgtataaaccttcgcccccctcaggccttccagtaggacgtaactacacagcgctaccacttcatctataaatctataagagcacaccatctacctatatttcaaatacaattttcttttaaactactcatccaatctacgatccgattgcaccgttgtattcgtaacaattaaatctttacaacaagatctcacatgattatattttgataaaaatcacaaattacttttatgatatgtctaaattacttttaaatatcactaagttacttcttagatatataaaagtaaattcagtaaaacctaaaagtaatttacatatatattatagaagtaacttagaacaaaacgaaaataactttggtatgtcatttgaagtaaatccgttgtaaagataaaaacatgactatatctagaaattaaattaatcagcacaaattatatatacgcataatccgttgatccgaggtttaaatctgcatcttggactcttgataccgtgcattcatttgttcattcagccattcagaccctagtcagagcctgctattctggttggcgcggcaggcggagcatgtggcgcgtgtcctttcctttcagcccctctcacgcagcgactagtcaaacaacagtgggtccaaactccaaaaaggctgcatgccttcatgggccccaggccggtatgtgggaataagtttattttatgttcctccgtttgttgtccccgagtctgaaaattatccctggacagcaaaacaacataaagtatccccaacttacaaaagcaggccaacaagatccctcggcagcattgtccttagttttaactgacgtggcacctgcgttggtccttttactaggttttcgtcccatgtggcattgatatggcgtttacgtggtaattcgatccagaaaaataataaaaccatcgaccctatcaattacacataaaataattaaaaatggtggggccatatggtccctctccctcatgtcatccttactcctcctctcttctctctatcctctctctctctctctctctctcccatgctaggagcgaagcggagcaggcggggcggtgccgggcgaagcgggcaggcctctaaggaggttgagcgcagaggatgtccccgtcgtcgtcaactgctgtcgcacctgccatagctgcacactcgtcggtggccgctcgagctcctccatcattgctaccccctcctccgctcgctgcccaccccgcacaagggagaggagcaccacgcggggcaacaacgggggagaggaacgctgcaccacggccagtgggagagaggagtggttgctctcctttccctaccagatccccgtccccttagctctagctccaccaagctccaccagaagccgcccgacaaaggggcagagaggaaggaggctcaacggcctctccgctcccctcaacctccccgtctcctcctgtccctagctattgcctcaccgacctccccgcctctccctctctgccattagatgaagacatgaggagataaggtagagagtgtgagttggaggaagtgggttccactgacatgtgggtcctacttttttttactgacatacgggtcctgtttgttttgtttaatttttttgggcctgtttagattgtagccaaaataaaccttaccaaattttggtaatgccaaaatttaggcaagataccaatatgccaaattttaatgtatttaccaaatttggcaacaaactaaacgcatacattttttggcaactttgtccagaaatggtatggttgaaaatggcatcaatctgaacagccccttggttttcaatttttcttttttttttatcaaactaccacgtaaccgtcatgttaataccatgtgggacgaagttctaatcaaataagccacgtagacgtcacgtcaaccaaactcggggacaatactatcgagttgcccggattttgtaagctggaggacgggttgtatttttttttgtttgaggacgaaaatcagatagaacaacaaatttgagggacctaaagtgaactcatttggtgtgtggacatgtggcttgttttgccgtggtgggctgatgcgatcatgcgaaggaataaggttaatctgaacaatactagatatcttcaccacttaactattaaaaccggtgtaatgtgacttcctcaatggtttttaaatggtggttttgctgacgtggtgtctatgtggtggtgttgaccggacgcggcttgcctgctcccctacagtgctcccatccgtgctcccgatgcatcggacggctttgtttctccagcggtgggtcctgcagcttcttttgtagccttccaaatcagcgatgatgtttttccaaaagaaaaaaaatcttcaacgaaaagagaaggctatgaggtattggggtatggcggacgacaagattagtgtatgctataactattccttaatgatccatttcattcttttcctaccaaagaaaccaaaggtaatgacctcagatatgaggggaaggcatctctacgacctgttctatctaatactattggaatctggagtcatattgaacatgcatgacgtacaaaatatcctaataatctgttgcaca

SEQ ID NO: 37457 - DNA, 846 bp, Oryza sativa
  unsure (1)..(846): unsure at all n locations
ccgcgtgatgactgacnatccctgccaannnncacctcnagctctgtaccctcataatgaaaccacgcgcagatggaagttcgtatctgctgaggacatcttattcagacccagactaccattctcatgtcaccacaggtcatctagtggtgattcaacactctgaacaacttcaccatcatcaagtatatgtaatgctcggaccatctcgaccagacatcattggagcgctatccctgagcaagcccaactgcaaacttttggtcataaccgctggccctcaccaccacatgctggccttatgtgacctggagctgctcgacaaggatgccaccccattctggtcaccaaggataagaagagcgctacagcgtacaaaggcaaaattaccgagcaatgtgtgggtctagagtctagaccaaatgattgaaaaaaagactggaaagggcaaaaatagaatagatcctctcttcacaagggcattagaatgattatatatagttgagtggccttttgggcatgtcagcctctgcaatggtaaatgtcaaagttttacctacaataaaaagggttagaacaccctgtagggttgtacactgtgggactcacttaaattcttctgcgagcttccggcagaaaatttcattcagacttgttctttttatgtgtaacacacttcttcattctttgcaatttgaccaggaagtatttagggtaccttggaagatgcaaactagcataagacaaaattgctagcttgtttaaccctgataattccgcatgcagagggaaaagactgtgtactatcctagtggttacttaggtgcaaggggtgggatcatttgt

SEQ ID NO: 37458 - DNA, 831 bp, Oryza sativa
  unsure (1)..(831): unsure at all n locations
ccgcgtgacctattgaagctacnttccnaagancaacccnagctctgtacccgtccttaaaaaaaacttaacctattaagagaatatgagtcatgtgatcccttcttagacaacaaatctggctaccctttatctagaatctagatcacaggccctcctatgttgagtttttttttgacggaggaagtatgctcttcttaccatgtccaaaatttagacatcaaggacctcacaaacagcaattcaaatgggaatttgcccaagtgagtgggttgaaatgtaccatcacatggggttactcatgagttcataaaacattttagaccctaactatcggattgaggggctgtttgggttgcttctaaagattgccatgccaaaccttaagcatgccacaatttgttagtacagtgtttggttggttgctacacttgtatcatgccttactttacaaaatcattgggcctacacgttatagacttaaattcttaccaaacttagccacacttgtgggcaacaaattgttagccttactttttgtgggataacacacttgtgacaaagtgagatatggtaaacttagcaattaccaaacacccccataaagtaaggtgtggtaaacttaggcattcaccaaacaacttttagtgcttttaatttaacattggcgcataatggaagaggcacacgttttttcacaggttgccccaagccatagagtggtttggcgttggaacaatttttaggttaccttttcttgccccagaaagaaaaaaacataagtttttatgctcaacttaatttgttgggtggggagctggcaactaccct

SEQ ID NO: 37459 - DNA, 733 bp, Oryza sativa
  unsure (1)..(733): unsure at all n locations
aggatgatatttcatgccnatncancannccactggaccagtaacaaaagccctttaactgaggttgcacgctatatattcaaactgacaaaaattttgttgctatctttttcgcctttatcgggggcacgcactgacgaagctgaggggccccttctctccacttaccactcccaagcgcatagtaccgtcctacggaggggaccggatccgtcacgcctagccgccttcgctcactaagccaccaccaccgcgncgggaagaaagggagaaagaagatggagctggcatgtaagtccacattttttttctaacacctactatgggactaaattgatagtttgatagctcgggtaagattatggaataaggatcgggtgacttattcaagtactatacggatggttgatggctttcatggctggagacttcgctgtttaatggcttttgcattaaaagctaggactgcttcctttgtcaaactcagggcccgcagtgagatgcacctagcctggcccgacgatcgcgatagatttggccccggccctaggggggggacttcggatcgacggtaattgccatcctagccagactgaggtaaagaagtttggattaagaaattatatgacacactacgaaccactagtcgttgtttgtttagagcgtgacaaaccattctaggttaatcccttttacctaaaagaaaacaatgggcttatctttgttaccttct

SEQ ID NO: 37460 - DNA, 855 bp, Oryza sativa
  unsure (1)..(855): unsure at all n locations
cgcgtaggtgaacctacatacanctgcaaaacnaccncggnaccccacaaaatagaatgcatatagtgttttagtccaataataccaagcgaccaacaaggttgaatcaattcaacaacaaaatcaagggatactttctactccaaaactatagcaattggcaagtaggaaacaagtcaatatgaaatgaagtaacatctacaattgttgatgcaaaagaagaccaactaaccataggacaagttatgaacattttaccaaaagattgcatacacatttgcgtattcaacaaatgaaaagacgcactacttttggattggaaaggacctaattaatgaagaacaagagcataagcttttacaggttcaatactttacgaaatcaagcaacaggcaggaaattagtgctacaacaaccccatgatttggaccgttggcaatgctcgagtcaacaaccaaagatgcacacagggtgttcgatgaaatgcccacacaagcaccgaaaaagaaacaggcgacccaccgaggatgacgtgggtacccctctcgcgcagcgccggcggcggcgttttgccaagcccgacgttgtctgtacacgcatacacacacacacaccctacccaacatgagctgagcacatcacaagacggtgagactcgaaagagagagagaagcgacttcatctgcaagcaagcaagcaagaaagagccggaggcgagaagccatcggttaccccagtaatcactcanaccgngcggtngctgcggcaacaaccgcgtattccttcggcttcggcataagtcggaagcaagggacgggggcgcccccgcctgagaagaataagatgatttttaat

SEQ ID NO: 37461 - DNA, 852 bp, Oryza sativa
  unsure (1)..(852): unsure at all n locations
agcgatggattaacttgcaannacagctcgaaaacnacctcggnacccagttcatccctttccccaatctccaatccaaatccctagcgaaatcctgattcaactaggcgagatgccggaagagtcgtcgaattcttgacagtatttctgaaaatattgatgaggtggcaagttaatcttccaccattcccacggtgtttttcctagggttaattttagagataatccattatatgccactgactttgtcgcacgtctatgatttgccaccgactttgtcacgttctacaatataccatcaacttttgcttaacttctacgattnannattgncgtncnnntnnnncttnttttgtccgttcatatctttcccttctgtctgtctaccactttaattcagacaaactttaaccgggatttttattctcgatcaaagtaatgtattcatcttctactggccaatccacaaacgtgcaatatctaaaaatgtatgaacgtcatcgttgagtccctcctacagcgttagtgcttccaaggaaatatgggtaacccgtataaacgtttttagcttattgcgcaacatcctcatccggcatgagtaccatatacattatacgttcaggaaaacataacctttcaattacacctgttctcatgatgtatcaaaggttaagccctgtacaggcgtataatgagccaatggcattatcttggtctatagggattaaaacgctatacctccctaaactcgcaatatctccaaaactcccgttcaggtcgtaaacgcgtatatatggcttccaaaggctagcaaagtcatttaaagctctatatgattttataaacgtagcg

SEQ ID NO: 37462 - DNA, 1009 bp, Oryza sativa
ttagtttaaatgaaaattgagggctagatgtttcccgtctattataacgccacgtgacggtttaggagtgtttgtagaaagtttaacggactttagtatataataatagatagatttaactaaatttatttatatttgtgaagttataaattttattttttatattgtagaaatcatattttaaagaccattaatttttatggatgtatgttttttttgtctttttctatgacaaaatttctctcggtttagcgttaaccagcgatgaaccaatttgtgagaaggattgctacacgtgctgatgtgcatgcttgtttttcctcttaaacatgcatgtctttttcttccttcttataaagttttatctcaaattacttatccgatctataatccgattacaccattgggttcgttacaattaaatctttcacaataagatcttacatgattatattacgatgaaaaaatatttatatttgtaaattacttttattatatgcataagttacttttatcatatatataagttacttttaagatttgactaagttaattcttagacatataaaagtaaattcaataaagtctaaaagtaatttacatatattataaaagtatcttaaaacaaaacggaaacatactattgcatttttcaagttgaaaggaaacactagatggagtacaaaacagctaccactagttgtgtagtcacgtccaatgaaaaaaagtcatgcattaaagtaactttctttttgttataaatcacttctataatatatgtaaattacttttaagctttattgaatttacttttatatgtcgaagaagtaatttagtaaaatctaaaagtatttacatatattataaaagtaatttataatttttcatcaaaatataatcatgtgagatcttcttataaagatttaattgttacgaacacaacggtgtaatcggatcgtagattggataaccagtttaatagaaaattttatttaaagtataggtagat

SEQ ID NO: 37463 - DNA, 639 bp, Oryza sativa
ggtaccctttcaaaaatagatctttaatttgtacggtgcgaacaattataaaatgcaataacgagattcatgtgatcagacctaagaagaaaacgaatatgttatcattgaagactctccaaaatccatgtggttcaaacttaagatcaagctgaagcgcatggaaacgttattattaaagagtctaaaatttttagtagtataaagaaaggtccggaattttgaatcaaagacttcttgggagaaaggcagcatacaattagtaacataggggtctgagacattctaaaattcagggcagtgcacaaatacttctgaggaaaaaaaaaaagaacacatgacatatgctagcaagccgataaataaactatcagctgaagagacataaatgcaaacatatcctacaacatcaattattctacttacaaattcaccagaacttaactttctgtatgctaagaaagtggcgatatcatacctgcatagcacagaaaatcatgtgatgactatggcattagtgttggcttgccaaagttaagaaacaaaacaacataagaaaacttgaaattagtcagtacatgtacaaacattaaactaccagtttcatacagcagtactaagtactaagaacactgcaca

SEQ ID NO: 37464 - DNA, 834 bp, Oryza sativa
gtggtcgatgacgtccactatcggcgaatccgagctcggtaccctaatatttagctacttacaattaatactcacaaaacctcttggttcttgtgtccaagttgaccgtaagattacagcccggttgtcctatctctcctgtgttgtatcctccaactcaacatttaaccgacttacaccctcctgttatacttgctcttaaagttatagccaattggtggctctaaatcatttatagtcaacttaatcgccaatttatattataggtacatataaacatatactacacaatcaatatctggtcccacctgttatacacatatgtgtcttaaagtacatgctgcagctggctattaatctgtagtccgctactcttatatctcatcgtttatctccttaaaatatgtttatatctggcttacagtgtgctattgtggctgcatttatctagcagttacatgctaacattaacggatgtgtgatttcctttctgagataatgttaacgaccaaatttgttgcactagagtagcagatctttcaggccaatgcgtgttcttcgcgcaagagatcccacgcgaaaccccactacgtgctgcgggagttcagtatgctcacaactaaaaaaaataatatgtggcttagcgtgaccatataaccttacttgaggcctgtgaacaattgttgttatatgactaaattggggaagaaagaattacctttaccaattgatgtggaacttcttaggttcctaagaaattataagaaaaaatgaaggtttatttgaattttaatgaatttgggggaaatgaataaatgctttttttaaagctct

SEQ ID NO: 37465 - DNA, 843 bp, Oryza sativa
  unsure (1)..(843): unsure at all n locations
catgatgatcgactgtcaccatacggcgaattcnagctcggtacccttcccattgacctaagggagtccttcaatagttgagcaaagaagttcaggtacgtgttttaatgctttatggaagaaccaacaaggagatctagacatcgcttctgattgggattaaggtaatgagccctatctgatgtcagtggggattgtttacagtaccgcagcaaacactgacgtatgggtctggacccatatgttagccaccgctactgcatcagcagtattgcagagaatttgcatcagcagtactgcatcagcagtattacagatgggggtgcacaaagccgggtcagtttacccaactaccttcctcctcttaactataacttatattcaatttatgtctctcgaaaatagatatgaacatacttttttaaaaaataatactacatattgtgaatntgtgatccttacctttacatttgagttatgacgaacaactttatcgattatataaaagaaaggatgacttcttatccaaacaaatcctatagtaatgtctttttaactttcagtgactaacatataaaccatcaaacgagtccatattaaaggataatactacgaagaattgtcatcccacatttttacactggcactatcagttaaaactgaaaaccagcttaccccaagctcaccaagaatctttgagaaacttataaaactcgccgaaaaatccggacaaacccgggnttacacggctncacgcacccaaaccccaccctagaatatcctttctttggcaccgggccngcacattaagcttcccaatttncncgtcctacgcgcgagcgc

SEQ ID NO: 37466 - DNA, 835 bp, Oryza sativa
  unsure (1)..(835): unsure at all n locations
ggatgtgatgactttcngtcacccanaccaccaanacnagttnggtacacagcttctactagtactcgttctgcacacacttcacaccacctctatacttttttctcctccctctgtgcgtgcgcctccagatttggccacctccggcggcgccaaatcggagcgtggcctcggccttgccgttgccaggtgagcctggcgatccgatccttctaccctcatgctctcgttgttttttttcccactcagatttggccgatccgtgtgtgtgcccgatctaccgcgacggggggaatggaggcgcggcgtggtgttgcagtggcgcgatctggagtgtgtgtgtgtgtgtgtgtgtgagtgtgtgtgtgtgtgtacggtgtgcgcatgatagatgtggatttagagagaacgcgtaatttcaacagagatgtgtcggataagcctattgggcttaaacctttaaattatattttttacccctcatatttttttaattttaaaagaaaaagtgtttatttggaccggccttttataatatgccttactcattatattttgttttgtttatttctttaaatcttattggaacaatgcccttactttctataacggctacatcgggataatccctatgatttattcagtagcattgccggttaaacgtgtattattttcaaataattaaagcgcgtctaatctctcatttacgtatttgttgttataaagctaatctcgcttcaatttttaaaactcaattatctgttatatactttataacgtttcattcgtttatatccttacatcgttcatatgagtatacaggatactattggcc

SEQ ID NO: 37467 - DNA, 854 bp, Oryza sativa
  unsure (1)..(854): unsure at all n locations
agctgagtgtgtacaacanttacgagcgaaccgagctcggtacccgtatgccatgtaggacaaaaccgctctggattgggtcgagagggggtaatttgtctggtattgaaagttcatggtaaacgatgtccggtttcgtggttcgttggggggggggagggagggagggaggggcaaattcagatagtttangggagtaactcaaaccttttcctattcataaattaattatgtattgaaagtatttttttgaaagtcacacacattaaactttataggctttgaaaccttgccgctatttcgttgtacacaaaataacatgtgttttgggtctcaaagagtttcatactacaatgcgccgcacgtttcacgggaactccaactgatttttattaaagaacaatgccaaacttctaaacactgcggggttactttaggtgtacctcaccaactttttctcatgcgggccccaacacaaaatagttcaatcttattattttcaccctagaccttttccaccaccggtaattcattccctttacttgcgcattacctaaactaagaggttctcatgctcctcaactttcccggacctttcttatacttacaactgttggcgcggtttgcaaaaagacactagttgcagctgatgtacacatgcgacaacaattgntgagactccttatgtcccaattacttcttcctgatccaatgacgctaccaggtgcctcatttcactgatacctcgagattgtgtgtaaacaagaaccaacctcgggccagtgctcctatgccgtttcacctggacctcagcgggtagctcgaacttaacgtcttgaaccgacaaattgcct

SEQ ID NO: 37468 - DNA, 849 bp, Oryza sativa
  unsure (1)..(849): unsure at all n locations
gagagttgggtacgaccanttagccacgaaccnagctcggtacccgtcagcattccttggtgctagaatttgtggtgtctgcttttagacaaccgtatgtgtaatctaaatttctgttctcttgaatgagagaagggaagggaaggttctttttctttctggaaagcagtagagtgactaatgaatatgatgggggtgaggagggaaatgttcacatatcgcgttacggctatcttcttgttgaaccttctcatctctattatgagcaaattttgtcccaattgtggttctttgtgagtcacagtgctagttttgtttattaggatgtagctatgccagcagataccagtaggacacaacataccacacaataagctactttgtaaaatgcatcacattaaacacctaatgccatgccatacttatttgatgtgcttaatgatctaaaagttcgccctaggcacggggcatgttttaagagctattgtcctatgtctcggctgtgatattgcattcggcggtgcacctgccttggtagctctagtgctgatatttaaattgctatattttatgtgatatcgttggtaattgctaggaaaccccttgccaagttatcctaagcggggttaagggccttgagctgctaaccttgctgaccaccttagagtgtttataaccttatttgagcattggtttcccctttgacacaccgtcattgtggtgacatggctcgtgtgccccctgtagtataatgtaccactcacctgcttggctgcacagcctgactcatttgttcatggccacattccccacaactgattgttttactcttcctaaacgcctaaatcg

SEQ ID NO: 37469 - DNA, 754 bp, Oryza sativa
ctcggtacccgatttatttttattaagcggaaaaatataatcctaaatgcttggaacgtacatttatatcgtcaatatgagccatatctattaccattaaacatgtatcataagctaatacaacaagctcgaaaaatctttaaacatactgaaatgcattgacatgaactaaatatatactcctacctccgtgcgagaatcggaggtataaaaaatccgaggccttaattttttagggaggctgtttagtgacccctgtcaaatagtacttgacttgtttctgacactcataggttaagcatgcatgaattcagaactagtaatccttccgttctaaaatacttatatttttcgaatattgccaagtcaaatattattaactttaactattattagaaaaaaataaaaaacaatcatgtaaaatgatgttactagatttatcattgaacaaactatcaaaatatgtaactattttttaaaaaatattttacttttatagatattgttggtcaaagtggtatctcaaaaaccgtgtccaaattcaaaaatgcttatatttttagacggagggagtagcctggatctacaggatagtgggagtgcaagcccgtagttaatcttgaaaaatagaggttattgggtatcccatatacatatgcctaacatatctaacgagctactccctccgttgtttaatatatcacgtcgttaactttttaaaatatattggaccattaattatattaaaaataat

SEQ ID NO: 37470 - DNA, 692 bp, Oryza sativa
tttttaaagtgatttcttatacgatttcttatgtatttccaaaagcgaaccgaacttaaaaaccgaaaccggatttgtattttcaaaagcgacggacttaaaaccgatttttttaaaccccccaaccccggggggggaaaaattttggggaaaaccccccgggttaacttaaaataccagtaaaatcatcttcaatttttatatcgactcttataaataagaaatgccgatgaaaataagaacagaacttgaagactgagcttcgaatctatgcttcctgatgagtctcgccacatcaaaaacctgcattcagtcagtcttaatacgcagcccaaacttctgcagtccttatttgtgtgcattcgagttttcgatgatattcgaagaggagaaccattagccctgcagctctagtctcatcgcccctacgactcccctgaaccctcgactccttcccactagctcgccgctgcctgagcacaccgctggagttccacgtgggtgcaaggatggcggcggcggggttcctttcagctctcggcaggcctctatggccgcttcttgcgggcgggcaggagcggcgctaggcttcgggcgtggcgtcggcaggtcggctgctccggtgaggacggcgtccggttgaagcggaactcgcgactcactctcctagtggcagagtggcggcaacgctg

SEQ ID NO: 37471 - DNA, 531 bp, Oryza sativa
aatagtataactatcactttgtcggatgaagaagtgaccaaaataaaagttgtagatcttgatgagaggatcaactttgttattgaccatatttccatttgaaatcatgtcgtatttacaaatgttgtatagatttgtcatattgtcaaaatcaatttcaagctgttggaaacaaagttatatagacaaatgaccaaaataaaagatgtagatcctgatgagaggatcaactttgtttttgaccatatttccatttgaaatcatttagtatttacaaatactgtttagatttatcatattgtcaaagtcaatttcaagctgttggaaacaaagttatatagacaagtgaccaaaataaaagttgtaaatcttgataaccactacaattttgttattgaccatatttcgatttgaaatcatttactatctgaaaatgtattatgactaataaaataaattattatacagcagctatatattttgtactcacaaatataaagacttatctggaaaaatagaaaaatagtcatc

SEQ ID NO: 37472 - DNA, 548 bp, Oryza sativa
aacaatttacaaaaggagaaaaaaacagaagagaattacagagggaagggaaataattaatcaaaaggctgaatccatgattgccagagggtttgttcagatttctttactctatgcatatgtagagtaaactcttccttgaaatcagatctccacctttgaaaattgactggaacattattaaaaataaaatcatttcttctgcttcaaatgttccaacagcagattgcaaaagtctccatgaagaaaggaaattgaaaattctcttttgcttctattatcatgtccatgaaggttgtgtgaaaattcccattaatgccaatgttgtgccacattgctgagcaaagctgcaggtgaaaaacagatggaatgagtcttctgtggtcaaggagttgcaagttacacatctatcatttccttgggtattgaaatgttttctttgtaggaggtccttgctgtttaatctatccatcaaaagtaaccagaggaatactttcagctttagggtgcatttgttttccatatccaagagatgggtgcagcatgct

SEQ ID NO: 37473 - DNA, 591 bp, Oryza sativa
caggcgaggccagcgaggcccgcgaggcggcgggcggccgggcaggcggccgacggggccggcgaggcggcgctccccaggtgggcggcggtgctcccggggcagcggcgcttccggggcggcggcggagcccgaggcggccgggcgggaggccggtgaggcggcggacggccggcgctgatctctgtgatgttttttttcttgatctgtgtgatatgtgcggccgatttgtgcgatgtcgatttttttttcgatctgtgtgatgtgtgatgtgtgaatgaatttgtggagatgtttttgtgattttgtgaatgatttgcgatgtatttggggataaaaatacagcttgatgtatttggagattttgtgaatgatctgtgatgtatttggggataaaaatgcagcttgatgtatttgggaaacgagggaaggatccgtggtgttaaaatgatttgtggataatatgaatggtggtgctcgaaaacatgaaagcaggaaaaaaaagaaaaaagaacattacccccggttgttaactctaaccgggactaaatctttagtcccggtttttaacactaaccgggactaaagatc

SEQ ID NO: 37474 - DNA, 656 bp, Oryza sativa
gatttaatatctatttaaccaccaaagaatggttcaatcaatatttcacaaacacctgccattctcactccgaaaacctgtaaactactccaggaaaccataaaataagcatgacaacaatcaacagtgccaccacaaatccaaagaacaaatatagactttagctttcctgcaagagacattctgagtaaacccatagaaattccaactcttaacatcagcaaaacaaattcagtaaccacaaattaagcatgatgccaacagcattgccaatcgaaagaacaaaacctaggcaagatgactgcgttcttacaaggaaaattctacataaaaccctagtagaaaggatcatccttctacttcaaatctgtctctccacagtacacaccactagcactacaatcagccctcattcctaaaacaacaaattagcatcatcacaataataaaagtaaagcttgattatcctagaaaatcacaaacaaacctggaggagcggtgtcgtgcaggcagacataaaccgggaggcctccctgcgcaaaaaataataataaaaaatcataaaaatcagagggcttttcacaagaacccttctaacatgccaagaaaaaggctggtccattttaggggtgggggggaacgaacgcaccatgctg

SEQ ID NO: 37475 - DNA, 537 bp, Oryza sativa
aaaatcaagtttagaaggacgtacagagttaatttggaggaattaaatctgaaacctggatcgtcctttcggcggtacacgaaagtgtaaaatcactattggagaaagcgttttttctctcggttgataacccctatactctcagttttgcaatcgggagtatccgggaaatctttagtaccgggtaaaataatcgggattaaaaattcatctttagtcccggttggtggcaacgccaatcccggttagtcactattttttttattattttttcccaaatcaagttgtaaccgcacaaatcgagttgctccctgtatccccaatcatatcctcaaatcaaaatcaaagtatcatcacaaacatagattcacatcacaaattctcaaaaaaaatacatacaaattctaaaagaaatacatcacatatccaatggatgacaacttctaaaaattctcagatccaatgtatcaaaaattcaaaaaaaaaaacaaaatcgagttgccgctgccggctgcttcctcccgcctcccctttggt

SEQ ID NO: 37476 - DNA, 2351 bp, Oryza sativa
ctactccagctaggaatagagtactggatagctactgcgtgaatatgtacgcgtcgatcgtcttgtgatgactaccaggtcgtctgttgactgatcgatctatagatagatagatacagtttgtttttgacggtcaatgtatacgtgcaaaacgccgaagaagctagtggactggtggttaaacttgaacaagcacgttgcttaattaattactccgtccgttcacatatggtatcctcatcatcccgtaatgtatgaaactactgcagaaaggatcttcacaaacggccaaagctagttttcatatcagggagctccactcagaatgtttttttttacttttttagacttttttatgttttagttttattattagaccactcccaaaagtattttcgaaaactgaatcttttgattaggcgtgccagcgatgtcctgccacgtcatcagtggtggcgtgacaagaggctggcgtggctggtatgatagagttatttggccacaccaaggggctggcgtggccaaattaatacttttggaaatggtctattaataaaattaaaatataaaagtctaaaaaataaaaaaaaattcctccactctcaagtaataggtgtgagttgtctacgaaaatcggtattttaacgtgcgagcatcacatccggatgtaacaaataattttcacagatggacatcctaaggaggtcattataaagacccgatttttccaagtagccaaataaggaagcaattatttttttcaaaaaataaaaaaaataaaagaattccaaaaccctagccaggtcatcgtgaggccaccgccgcagtccacacgcctcagctcctccgcctccattttaactacgctgcccttccgcctcctctccgtcgcgctagagccgcgagcaatggatccgccctccccccctccccccgggttgggggggaggggagatcagccgctcttaagcctaccgacggtgctgtggtcgtggactcgtggtcactgctcttggtgccacggtcaccactaccgccccaagcccgaagtccgccatcgccattcagagaggcaaggaggctagtcgacccattgggagagagagaagagtagagaggaaaagtagcagtgagtgaggggagtgagagtgggagtgggagtgcgaaggaggaaataaaagagaggaagagagggaatgcaaaggggagaggaaaagaacaaagatattaggatgggggagcgtgcaacaggtaggaggagaagagaaacccccttgtgaaaatcaatttcgtagacatatctcttaatcaagagatctgtctatcaaaatagctattttctcaaaggagcctagtaagaaactcgtctgcgaaaatcggttttgacaaacaggccttgatcgaacatcatcaatgaatttttcatatggatcacctttcaaaataaagagaggtgtccgaaaaaatacctttatagttgttgcaacgtgtcaaacagaaagaaacaaggaacagagggagtatgaagaatcattctaagttaatacgaaagtataacaacatctccaccatcaaattagttttatattaaataaaatattaagtatatttttatgatatatttattttacgtcgaaaatatttctatattttcttcaaacctgattaaatttgaaaataaaaaattgaaaatgtcttataatatataaaacagatagagtatgagttacggagacgtctaaataacaaattctagagttctaacaaactcgatcggtggaacgtgacatgttctagagctcagactattcgtcgcgacatatattttaatcttttttaccgcattgctatttgccagcgagatcgatcggactatacatcttccgagccatagctagaggtgctggttcggcaagtatgtttacatgcatgcttatgatgaatgcgtcgtattatatataaacacgagcctatacgtacgtatgtatacacgttagtattcacactgcaagtgtggacatattttagtatttcactactagagaaaccatcgtccaaaatccataatagtcccgatttgaataggaaccgggactaaagatgatttttaatcccgattaaaaactttttgatctttcatcccggttggtaacactaatcgagattaaagatcatttttagtcctggtttaaaaagttgttgggatgagtcagggctccgaatatctttaatcccggttggtataaacaactgggactaaaatatcttttgtcccggtagcttatacaaaccaataagttcaccccgatatgcgcgcatcgttcttgatcagtcgctgtcaatcttatccc

SEQ ID NO: 37477 - DNA, 930 bp, Oryza sativa
  unsure (1)..(930): unsure at all n locations
aggaagggaatcacggggaatatttcccccctcttgattgcacgcggggcggacgggagcggcgggatttgcggcggcggcggcgctagggcacgggcgaggcggcgggagcggcgggaggaaggggatgacgggtgggccccacccgtcagcgagggtggcgggcggacccgcccgtcagcggcacgctcgcggggaggaggccgaatgggccacggggaagaggagagagagggggagggatgggccnagccggcccaagagggggagggggaaaaaaggactttttaggatttttctttttataaaatcattttaactttgttaatttcttaataattattatttgtgctctgaaaattccactaaaatttgagggctctttttagactaaggagaatttaacaaaaattctccgggccacatttgaatttttcttgtacgtattttagtgtttgccaatttcttttcgaattttaattaattctattattccttttagaaaatgatttttaatttcgggatgaatttatcaggacgtgacaaatccaccccgcttacaagaatctcgtctccgagattcgaggaggttagcaagaagataggttgggcggtcttctcttcttgtctgacttcttccgctccgtcttctataacaaacttgcctaacaaaacttctccactctggactgcttggctcgatctcctgttgcaggtggaatcttcttttcacctgactcgaaccagggtgcaccttttagctgactcagactaggttgcggtagtttaatgatgcttccgttccagaacttctcacgattcatatcttcggcgtcaacctcacacaagttaccaacttcacgtcatgtgtcgataccagcttgtcattactaggataccatgcttgtcatcatgagaataccatgcttg

SEQ ID NO: 37478 - DNA, 674 bp, Oryza sativa
agatttacctggggtatgacatcagggaatagatctgtcataaacatcgaagccgattgatgaaacaagtgcagcttccattcaccccaccatcagttgaagtttctgctgttaaatcctaccaactcaatattgtcaatgctgcccagaggggctcctgggaggttaagtagtcgatccaccattagagttgatgtgatttctcctcggcactagatcttgtcggcaaagaataagccgattgggagttggcctagtccaaattgtctagctgagctcattgggtggtagaactcataagaaacttggatatttcttccctgatgaatgccgacaggaaggatgcatgggctgattgcagctgtaagaacttccctggatttttgatacttttcgtgattgatatcttcaaatctaaagtctgatggaagttcaagatctgctgagtcctcataagggaaccaaacccgggcgtctttctgaaagccttcatagaagctgcagaaccaatccttgagtagctcagccgatagctttgctccaggatcggttggtgaggatgcatattctccgtatgatgtgcatctgcgatgagtgcgttcttttccatcaactcctacaatcggctctgggaatgggaactcagcttctgtcacagatggccgattgacaac

SEQ ID NO: 37479 - DNA, 686 bp, Oryza sativa
gcatctccctctgtaatgtttgttacctgcagcctgtttttcccttgctctttcaatgaccgcaaaacctaggagccttcttttcagggccgcgcggagcctgtgttctgcctgtgttaattaggtgtcggccctcttgggccacgtcaaatcggtggattacgtccaatgccatgtgatatttgagcaaacgccctttacacatctttttaaagcaatcataggacgtctcattttgtttgctagctaggcgggtagaggttcgtggtgtgtcgtttgttgagtccaagcatgcaggaccacctccttgaatcatgatagtcttacccagaagttctcaaatttgaaggttctcggctccgtggcctgcccgggttggagataagcaaggggtagtgatcagatattccaaaagacaacgcatggaggatgtgatgcccaaggtgaggtcccattcctcgttgcagaagaatctgtccatcttaacaagtgtcagctaaactctctcatttctccaagtgattttcctattttgaaggtggatctctttgagctcacagtggttaagagcagcacggaaccggctcattcacctcaagttgaggttcgtgttattttttatcgtttgccttataaatcatgttgaaaccaattaatagccacagctcgtcatcctccggctttgg

SEQ ID NO: 37480 - DNA, 731 bp, Oryza sativa
tggaatcttcttttcacctgacttgaaccagggtgcaccttttagctgacgcagactaggttgcggtagtttaatgatgcttccgttccagaacttctcacgattcatatcttcggcgtcaacctcacacaagttatcaacttcatgtcatgtgtcgtaacctgcttgtcattactaggataccatgcttgtcatcatgagaataccatgcttggcgtttccttccagcttaccaccatatgctttagactatgatatcccgcttactaaggataccatgattgacaacttgccattaactgtctcatattagctttcctggtctccggtgctaggtacttctgctattcgatgcaagggtcaaccactcttactataagttatgcttcccaagagaaccaatttatcccacttgacatgctttgacgtcttcccgaatgactttgctgctggacttgttattgtctgatcgtgatcctgccagatctgaagcttcgttgttagatgtgattttgatctgacctctatagattatcttcaaacatatcacttgttccataactgggaatggctctcacgaacaagcagctcggattcactttccttacatttagtttacttcccactattctctttatgttgttatcatttagcattcaacgtattcctttacaccttcagccttgatgtgttctttctcgatggatcgattgctaggaaagtgcgttgaa

SEQ ID NO: 37481 - DNA, 888 bp, Oryza sativa
tagctgcttctcataattctaggaatcaagactttttgcatttagtgtataaaagttatagcaagtttttctaaaatgctatctaggccagggtttacgattccgacaggcccttccgtttcgggcaccggcggaattcgggatttcgcgaaatccggtgaaaaaccggtaaatttcgaacaaatttcataaccaaaatttgaatacaaattccctgagtttgccgataagttctcaaaaccagtcggttttggcgaaattcagatcgaaatcatcgaaatttcgatcagtaactgggcctagtacatgtattctggcccatgtaagtgttttcctttttttttaaattctttattcttttattttctgagctaagttttagtaaacacataatacatcattttttaaaaaatttatatcctaataggttatatgaatatcatagtatttataagattttttttcttttttttcttttttatcaattcaaatttgaatttggatgaaactcttcgaaatcttatatggtttctacttttgagcctcatcgaaacgtcgaaatttcgcgaaatccaaccagatttcgtcggaatcgtaaaccctgatataggcaatattagatgttggggttggttttcataacaaaaacatgaggtaggagttaggccccatttgtttggtccattggcttcagcaactctcttgttattcgttagcatcttttttcgaagagcgtgttttatgaaaataaattgtatatataattttttaaaaaaaaatcgaacaaatccatcttttaagtttattataattaatattcatttagttatacgctagtgatttatcccatttttcaagtcttcaaccgtttgtacacctaatttaaac

SEQ ID NO: 37482 - DNA, 759 bp, Oryza sativa
ctattcgaatattaattctttggaaaatcacaaaagcccacctcatgggatggcatacatgtggagtttagtaccactttgcttattctaggagaggggacctccttaaaagggaggatgccctcctagccacttgaagcatgtgtggtggagagaagagggggaacacgcgcttgcttgctcgccttgcctagcagggcagaattgactcctcacccttacacagatgcagccttcttttgcagttttgttttgctgcaggaaaattcggatttgttttgttgttggaaacattccggaaaatccggtgcatgaaaacggcgtggagtccggatcagatacgcacgacttatccggtttggttacgcggagtggagatcgtgcgggcgccctgatcaagcgacctatctctatataaaccgagccgctgccttcacgcaacacacgtgaaatcaatctagggtttgcctcctcctctgtgctgcgccgtcgctcgtagactactccagttttgttttgctgcaggaaaattcggatttgttttgttgttggaaacattccggaaaatccggtgcgtgaaaacggcatggagtccggattagttacgcacgacttatccggttcggttacgcggagcggagatcgtgcgggcgccttgatcaagcgacctatctctatgtaaaccgagccgctggcttcacgcaacacacgcgaaatcaatctagggtttgcctcctcctctatgctgcgcgtcgctcg

SEQ ID NO: 37483 - DNA, 560 bp, Oryza sativa
caactcattggctccggttttaggtacaattacaaaggtgtgatgaagatggagaatttctgaaagttgcatgtcgtaagttggagacgtcggttatgcaactttttgccaactatagatggagattcacaaataggcttgaataaatgtgatcttcttattttggattttcctatttaaatgtttggtgtgttctattttatttgaactacacttttatctcgagtgctactttataataattggttgtagctcttcttgagcaaaggttgagatattatattgcattatctaaaaaaatataatatttgtagtaataaattatatttactatatgccttaaccttcctctatattgaatgcttttatatgctagttgaactaattaattatattgtttatagatacactaataaggaggtggatttgtgatctatttagtataaattgaggattcatttgtttttaacactaaaccaatatccattcacttgctcatgattcatcttaattcttacttatgtttagttagttaacctataaaattttgtaagttttgt

SEQ ID NO: 37484 - DNA, 671 bp, Oryza sativa
aaaagaaagccaattaaactgtgttgggttaaaaagccaatgagacagtagttggggataggagtttggatacgccttttacagatcaagataaggattgttggatgaaacccataagggtacccgccatgcctctacattgataagttcggatatacctgcaaacagttaagaagatccaggagacatcaatatttgagaacatagtagtcgatggttggtaattagtctatcaggtatcagaaaagggtcaaaggtgatatggcagaagaacaatttggatgctccccatctcgaggaagcactaaagatgatcatcggcaattaaaccctagtggcatagatacagatagcaagcaatgtatttccttgaaggtagtcagtgcagctttttgacgaaccacatcaaggtttcactgaaagacagcaagccaaaggacctcatcgtccccagaagcgtccgcaatccacattaaagaataccacctgttagagataagctgaaagatgattgataaaagagattggcaaagatgttctctagcaggaaagaagtaggccgaaaggtgattgataaaggataaacagaaacatgctctgcatcgctcaaggaagacccctgatagtaattgccccgcaacagtcacctggtcattgaggcatcatgaagt

SEQ ID NO: 37485 - DNA, 846 bp, Oryza sativa
aatactaggaagttacacatgcaacaaatcgatctattgctcaacaattgcggagaaacggaaggctaatctggatggccgagccaaggaatacaaagggcgttctcctcactcagcataaccgagggatattctctgaggacttgtggcttgtccaggggaggcccgatgtgatcacagcggagggttgacgcccacggccacactcttcatgtgtgctggaacgcatgttgcgttgccattgacccacaagtcaaaagtaactaaggcaaaaacaaaagttgttaggtgtggtgaggagaagagggaacaaagagatagggaaaatcttgactcatttgtaagggaggacgtcatcttttttatgcccgaagaagatctcgaggtggaaatgattgctaagagctttatctcccagcgggaatggctagaacgcaaccagggatgatggagacacggtgtggagtgatggtctgaggatgttctcgaagtcatcgggtcaaggtggaggtggccaagcccagggtgtgctagcgcgttctaacgccagcacgtgtcgagggcggtggtgtgactgccatatgggtctagggggtgctgggtggatgccaaatgagccatggggcctgtgaggtccaattggaagtgagggatgaggggaaaccaatgcttttgctaaatcagagaatacttgcaatgagatgttttccagcataggttttatacatataattttagacttgcaggtggtagggctcattgtttttaatctttactctctcataatcatctttcaaatatcagcagggctcattggtagcaactctaactcgttaccattatatg

SEQ ID NO: 37486 - DNA, 1046 bp, Oryza sativa
caaaaggatcctttttatgtgtgagcatgaggagagtcagacaaagagtattacttgttccatattagttttacctagggcaggtcttttttgttgaagaacttgtccagatgtttggtcagaagggcaatgttttacagttccaggtttataatgcccaaaccacctttcttctttggctggcatactaggtcccatgtagccaaggagtggatcttagtgtttggatcatttgacttcctccaaagacagtgtcttcttgctctgtctatgtgttgaatcactttttttgaagcttaagagtgcacatgtagaaattagggggagcatatagaacaaaatttaccattgttagtctctgaccatgattgagaaaagcagctatagatgggagccatctctccactctgtcaaccagaggggcaaagtcaataatctttggttttgtggtccccattagtaaacctagataagtgaagggcatctccccacttgtgcagccaaaggttctagcaagaacttccattttttgactgtcaacatttatcattcccatttcggaggctattctgatttatttctagggatggaactttctgagacaaaccgatatcgatgtgccatttcagagtttaataaaataacagacatttatcattattacattcaattgtgtgcatataatattccaatgactaaatcccttctttataaagttatgacacactaaatgcaattaagaccctaaatctcaaacctcaatgttccacgtcatcatcaattctcagccgttggatcactagattagattacattttaggcgttggatgaacaaaacgcaatagccaccacatgaggcccatgtaccacgtgaagtacttagggtttcttctttgattagtagggtctccttgtggagttgtggtgctagaggcagctggttttctccattgatggcaagtggtgccctggcgtgcctcgcacgtggtgtggcactggcctgatgaaaaaacaacatgcattaccttattgctaacagacagtag

SEQ ID NO: 37487 - DNA, 672 bp, Oryza sativa
ggagtatcacccaggatttggtttgttcattttaaggaatgaacttcaattatgatacaattacatacactcgccttttatggaatattttcaaactttataagtaatattgaatgatgtggaactaagatggtaacccaaaagcccatctggatcttctctgattagaagtgtaaacactgtatatgacttatctagtgaagttccattttgccatcttcagggaatacacaaaaacacttcatgcttctcaatttgaagatcctcgtttcactcatgtatcctctaataaggtatgcagtacaacagtatgtatcctctaataaggtatgcggtactgcaaagtaatataatgtttggaatttggactctaggtgagaaaccaagaggttattcattgagaaaaaatatggcattaaattagcagggcatataatggtgtaagccaactttcttttcagaaaaagaaaaacagaaacaggggaattaatgcattgagtcatacatagtacctggaaaggcaaattctgcaataatttggaattttgtatatcctgccatattattgaacttagtattcttaccaatttgtggagaaaatacttctttgtaggattattttccatctgagtcgatgaatgcaacagggctgcaggaatagatgcagtcact

SEQ ID NO: 37488 - DNA, 537 bp, Oryza sativa
ccggccatataacaccttgtgacccctgcatattataatatttttaagtaataagagaagtgcatcatgtaaacaagaggagaaaaaacccttatagtagattttattgtttgtgagataaatgcaaaattgccagatcaattggagaacaatgaaatactttagcatgtacattacataaccttagtatttgagactaattcttctttgaagagtccatatgggtgttactgttactgttccataattcaagtaggggaaaatttgagaaatatcatcacaaagatatgtgagcctggaccctctcgtgtcaatgacacatccgatggtatttttcaactcagtgatttttgcggtggtaataggcaaattggcccataaagtggaggggatgttcagcgtgaatttgctagagaatagtgttctggttggtacaatacagtatcagcttattcatacatgtccatcaacaggccttttgttgaatcgtactgaaatatcgaagactactatcatcttcttttgcgtatattctat

SEQ ID NO: 37489 - DNA, 610 bp, Oryza sativa
ttaagatggtggttacagcgttgtccgcaacagtagaatcgcacactaactaggcctaaatctagcagccgccccgcaagcagagcaggtactctactcattccaatgttgactatcgcgggtacttcccgagaacgcctaagcatatcccgcagggggcagcatcgcgagctactgccagatcacaatatcacatcagtgagctaggcgctagcagccaagtagcagaaaccccgtaatgctcaagccacagcaagggagggagcaagaaaaacaaggtgaaggcgacgagtctacctaccctagaggccgaggcggaggcgcgcttctggaagcgggagccgccctgcagtgcccgccacggcgcgacggccgagcttggaggcggccgccatggcggtcgatatatgtgtcggttaactatcgagggggaggacgagtagggggttcccgtcttcctaagatgcgccgtggaggttccgttccgtgagcagcagcggcggccggcagcccgccctccccacgacggcacgatctggcaggtttttgggcgatatcgtagaggacggtggcttttccttttggccccctcccttcctttcctcgtttt

SEQ ID NO: 37490 - DNA, 633 bp, Oryza sativa
actagataagcgtgtagtgtctatatatggtatgccgggccttccagattttgtattctgaacatgacgcagatcattaacactgtttactacatatattcttcagagcattggttgtatctgttatctcatcgcctgcagtcttcgtaatgcatttatgtcatgttccaaaggtttatggtcttctagcaggtgctgtcaataacttagcacatgtcttcttgcatgttgtatctgtttttgttgccatattgatgttcttctatttgcccttttagttcggatagtgttgggtagtattatcctgatgactttgagacttctccgagttcaggtattccttttcacttcttgttctgtttaaaagggtttattgcaagtatgcactgtttctcagttctcctaggtactaccaatattctgaaaacgctgtttccctgaaaaggggtaaacctcaatccttttacctgtataaccttctcctggccttgaagtgcagcaactcatagaatggccaccattttttttaaaaaaaaggaaccttgcttatcaaatttggtttttgttttgatgcgtctgtgaatttgccaagggcctaagatgcatggtcgtcttgcctgtggcatacctgct

SEQ ID NO: 37491 - DNA, 1451 bp, Oryza sativa
tcatctgctccacctagacatcaccatcgtgtacaccgactggtatggcggcacgtcttccagcttaagggtggacgtggtccaggtatacccacgggcctcgttggcccgtcccacgattttggcatcaatgggcagatgggtcggtccaaacaaaaacaatcagctctacagggtacccgggtcggcttcattaggacactgaacaggctgagcgcgacaccccttcctctggcggtggtggcgcgagcgccccttcctctcaccgtctcacggcggcggcgaggcgcccatcaagcgcggaggcggcgaggttcagcttcctctcatggtggcgccgctccatcgtgcctgtcggtcccccttccccactagcaccagcgtcaccgctggccgagccgcgcctcttcactaccatcctgtcgtccaccaacctccttgactccctacttgctaccctcctttgccacctctccctgcgcctatctccgccatctccttcatggcgatggcgacacgacctcatctagcctcgatggcggtctccatgtcaacagttcctcctgtgtctggagatggtatgttccaactagccaacaactcctcttttattgatttcaatccaagaaagcatgtttttcttcttaatttcgatctactgtttccttgccaagtattggcggattgctagctaataattctgtaattcttttgtaacgtgggaataagttcatacaaattgaattttcagtttcagcagaaatttttacagttcagttttagcagaacacttagttcagtttcatcagagagtttcacttcagtttcagaagaaattttaagttcagtttcagcagagattttatttcagttggctgatttcttgacaaatgtgcagaccagagctctgcacaatttcttcctcccacccttctgttccttttttatgctccttctgtgttttctatattcggcctggagtcctcatgttgaatacaagtgttatcttggtatgagattctaaagttttgtgtattacatctgtgatttgtatggattgacagagttgtgtgtattccatgtttgaaattgaatattcggcacttggtagaatctgatgatgctttgttgttcatcacgtgttaattacaaaaatcaatgatagcacatactgatgggccgacccattctacccaatggatccaatggacaatgggtcgacccactcggtattgttataaaccatttgggtaacatggtctaagtatgggtcgacctgtcccggaccacacccacccatgttccagctttgtggatgcacgagctcattttttttctttctttctacatatgcagtggctggctggttgctgccgtgccgactgctactgtagtgcaccagtagcatttcatttgaggcttttcagctgcctgagcattataaagaatcc

SEQ ID NO: 37492 - DNA, 1350 bp, Oryza sativa
ctgctaaaccaaaggaaggggcttctttggcatatacccatggacaattcagggcatagtgtcctcgttctctacaatcgtgacaaaaggggacatcctcttctggcattggaagctcattgacctgggtggcaaatgctcgatcaaacacatactgattttggtcttgacttccaaccaatggtagctgtgaactaagcagcatgcttggaatggaccaagggtgtgcccttgttaactctcttgaggccagtggtggattgagttggaaacttaagttactagaggcatacccgctgacattctttcctttttctctgttaaacatctgtgatagggattgaggtgagagaggaaacaagccaggaaagaatagaccagaactagggacaggaccttaaaggaactaactcttcttgttgatgtgttgtttgtttcacttattctgcaagttgattaagcaaacaacctagcatggttacatcacacaccactgatgcaaaccacgcgctacacacacaagcaaaggagcacacgactaacgaaacactagagggtggcttaggttctgcgacgggttctccaagatcttcactcctgcttcacagctggcttcattgcttccttcgcttcgctagcggaccctgcggtcttccggaccttcggcgaacaattgacgacatcttcttcttcgtaaaactaaccatctagtactagctgaaatttgaagaaggaagaaagagtaaacattttgcaaatagcacaggggaaaggaggaaaaagggactttcgcaaatagtttcgtttataaaatatgtccttaggttttatccacttggcttatcctacagtcgagatggctctgataccagcttgtcgcgaccgagaaaattgccttttcccgaacgctagtgtattaatccccgtcccaggaaaagccggggtacaccacacaaacatgatataaaagacacatctttattatatcgataatatttacattattacaaaggcacctcaggcctgacaaacaaaaataaacagcagcggacttgcgggcctacggctccatcttcacaggcgctcaactggggtataagccaggactccacctaagacttcttctcctaagcttctcttactgaaggggggggaaaagattgagcaagaatgagtacaaccacagcactcagcaagccacaccggcagatgcatgattaatgcaagggggtacaaggggtaaaaatataggggttaagctttgcagaaaacagcatttaaaagtcacttagttgcccaaagccattttataagacgatcctagagttacacagtattaattaatcaagg

SEQ ID NO: 37493 - DNA, 896 bp, Oryza sativa
ttcttaataggttcttaatagatgacgctgttaacattcgaatatacgtttgactaattatctttttaaaaattttttaatgtaagtgtataagatatgaatcatgcttaaagtatttgtgaaatatattgtatatggtagttagatattaatatttgagtcataatatcttatactgcgaatatttgactcattgtggattccttcagttcttccatatctgtaatttttctttatcttcttcccatgtactcctatatgtacctgcctccgcaggcttaatacaataagtcaaatattcacagtattcctttcttcctataatattcaatatggtatcagagtgggcgatctagcgccgctcgaacgcttccgccactgctgcccctcctccccggcgaggagtagcgatctccaagggcggccatcatttttcctttattttttccatcgtctgcaccgttgcctggaggaattgattagagtcataatagaatatgattgatttgtgtgtggactccttcatatatgtaatcttttcttatcttctcccaacatacttctatatataccggccctataaaggcttaataaaatgggtcaaatattcgtggtatttctctcttcctatactattcaacaggataaaataactcacaataaaatagataataattaagtaactttttaataagatgaatgatcaaaagtgtgttaaaaaatcaacagtgccatctatatttaaaaattgagggagtacttattgtatatctatacaaatattctccattgttttgatttgaatagatatatgtacctatggtgactttaagttgaatagatatatgcattattttgattaaatttaacgaaatttctactttttattttctgaa

SEQ ID NO: 37494 - DNA, 766 bp, Oryza sativa
cttttgaacatttacttatgaaccaaaaaagaatagcactcatttattttgagatcactcatctaattccttttcttgctaaatcaaacttttgtcccttgttgcaggatgaactgatcgcccgcttaattgagtcctcggagtgatctgaactgcgatcggaacctcattttgttggatgttgtaccgtagtgacgatcatacaccatgcaagtgaacttctatcgcagacctcatgtaagcatatatttcatacagtgccgaaatgaaagatctggctgatagtttccacattgcaccttgttcgatggagctccttcaacgtttgcacgacgtgttgtgtttaacactagtgttacccagggcaccaagtctgtctacgtccgattccctcttggtgaatctgaatctcctattctgacacttcgtttcgcatcgtgtcggtgcctgggtacacctgtgcaccctcacctcgtttgtactccgtagctttctgggtgagaaaggctatttagaccattcccaacccaagacactagacatagtttttataaactccgcgtcattatcatcaagaaactagtactaggcactattcttccaatgcaaacacaactattccatacatacttatcccacacaatgtcttggatgttgtgtagaaattatgtctcatgcaagatatggttttcttctctttcttcattattcgccacatcatttttcgtcctaggtggcagcttatataatgctatggacatcatcc

SEQ ID NO: 37495 - DNA, 626 bp, Oryza sativa
cccccgaatccctcctcgaaaatgatgccaatgcattcgtcgaggagctaggacgatcatagagagatgatcgagttacccaaaactgatccacattcatgacctccagatgagctcaaatctcttctttcaggctttccttataccttcttgcatggtgatacggagtcacccgtcaccatcagcgacaggctgtctactgacgagacctccaacctcaaagatgtgttagaaaagcatcgctctgttctaggctactcacttcaagacctgaaggggattggactggaccaacggtcaacaataaccggagcctctttgttggtctggctggtcgaggccccaattcaattctcaaggcgcatatgcctaaccattgggattcatcgtcaggtcgcaggggctgagagatgcgcgctagctaacccaccgtctcatcgcttctgttggtagcaaatattttattaccgactatctaaccacttgaccagctaacagagagcttgtttagtttattcatcaatccggacttaataactatgatatcataaaaaacataacagtatgccacctggtgtgtatattttttagtgacagaacggtacgtggtaccaaaacggaattaa

SEQ ID NO: 37496 - DNA, 1234 bp, Oryza sativa
agtcgaggggccgaagcagaactgccatgctgcaaactgaagcagaatcgtttgcagcgaggtggagcgcatcgaggaggacacgctgccgactctatcggactagatctgcataacgaagaagagtagatcaggcgatagggctagatctggggataccagcaatggaaatcttgtgaatttatctctagcttgttccaatctctgcatttgaatgactaattagagcgattttctagctattctatgccagtgtgactcgatttgtgtgtgtcgcaatgttggctgtttctgaaaagaagtctcggtctttgcctctgatgatgacatctggttggccatgaggcgtggtgtggttgagagtgtggaccgcaatggcaagccacgttcacatctcagacgcctccgtgtccattgcagtggtgggtggtgttgtggagcaaggggctcgacctcacacaatcgcaaaggatgcagagagtgcaaaggtaatacatgcggtgggtgcagagcaacatatgtagacctcggtggcatggcaggcagcggagcggtctcctctttccacctagactttgatgatcagcgcttcctattccacgacgagaaaggcagcaagaaaatgatatcaacgaccggaaaggggtgggacgagaagatggtgctcttgattggcacatgagccttggcggcggtgacctttggactagggtggtggcgtgtcaagtggacaacacgacgtggagtaagctagcaaccgaaggttgacagaaatcgttacagcaatggcgcggttcaaattttaaaaaatgttagtgatacatggcagtactccctccgtcccacaaaatcacgaatcctggagggggaggtttgtcccaaaaaaaccgatctgtgcacagaaaaagagattgtgggccatagtagatgggaaacgagccagccacctctctctctcctatcgttttgaccacagaaaccttatctcctcggcttttctcgtctcgttctctcctccctaaatcgcatcgctctctcttcccccaaatcacgcccagatgcgacctcctgcctccacgccttcctccccgcaaatccctcccctctccacgccgctcccctcacgccctccctgccttcctccccgcacatccctcctgctcaacgcggcggcggtggtcggcgggggaggcgacgagcggacgccggtgttcaagcgtacatgcggcctcgg

SEQ ID NO: 37497 - DNA, 638 bp, Oryza sativa
tctatgataaacatactatgttacattgagataacaagaaacacatgagtttttgacgccattaaatttgataatgccctacaactacctacatgggctaatgttatattaggttgaatcatgtacaaagattaaagaaacatactattctaatcatctatagttgttgaaggatatagaaactattagaaatgagtcaatcaatattggaccttggctatttaccatgcattactatgtactaagaagatctcttagattatggttctaatccagtgcttccattgattttttgaagaaaaaaatcgtttcatttagcctgtctgtactgctattatctgaggggtatgcaattgcttatttgttaagttgtgaagagaaaattagtttactaaattgtaaagagaacttggagaattgctaatttaatatgccatgttaataaatttgaattatctcaaaagcagagcagaattttgcaggtagaaaaattatttcacgagaaatgaaatatatgctttttcaatatattgaaaaggtggcaaggatattttttaaaaaaaaatcatattctattacttggaaacaaataattttaccaatgtttcccatacacaggtaagcttaccaactacaaa

SEQ ID NO: 37498 - DNA, 2184 bp, Oryza sativa
aatcaattaaagtttaatatgttcaaggaataatatgtatctatattcacctacattggttcatgttttcatctatatcctataaacgacccttgtaaaaaaaattggaacacacaaaaaaatagtgtctagctaggctaaaggaggaaatcaaaagtataggaagtttgaataaatagaaaaaaaaaggcaaattacatgtcaattacaatgagtttacagaggtttcatggtacccctttttctctataagctagaatcacactggactattggatgctacaaacagaagaccatgccaactggtggttctattaaatgcatgtaaagctaaaatgaacagatagaaaatgaccttttctcaagtgtagcatgccgatgccctagtcaacaacaatcctccgttatgtgcgattagtgacatcagtacacctgaaaaaaagtatactacctatgtcctaaaatatattgcaattttgagctgtatacctaaacattcctttcaagatatagggccagaagttattacattttgggacaaaggtaatagaaagttttaataacgttagtacagctaaaatagtatagtatcaaccatttatatatagagagataatattttcagcctggcatcacagttctaaacacatgaaaccaatttttctaccagaagttctatctattttcgaagcagaggtagtacaaagtgctactaccacatggcaaagtttacgagcgaaagcatgcatgatcacttaaccaaagtatggatgcaataacataagccttatagttctacatggcatacttcttcaggtatgtcccatttttttcttctctggcccttttgtaagtagctggcataatataaaatgtggaaacaatgagctttgtagagcacagcagcagcaggttacactatagtttgacgaaacagatcggctccacaacttttaggatttaaaagtatggtttcacaattaatgaaaaaaacatgtgtaaaaaagaccggtgaactaaacagtgaaataatctctctctgagcatagacatgtaaaagcaaaccaactgaaagacagaatattaaaaagattgactcatgatattgctttaccattggatcgtaatggttaggacatgtctaggaaaacattcccattgaaccagttgatgcacaaactaaattgaaatgtaccttcaaaagaaatttgtgtctgtttccatgatggacccaatccatatccatttctttttgcgacctaataaaaaagaaaatagaggcatgtcatgaagcatgaataaataaaggtcattctagtgactgataatgttttcatcactcaaaaatggaatcatctttcttttcatcactcaaaggaatgttatcagtcacccttcgtgttttgtacagaaatatggcatgaaggattggctctaatctctctaaattttgctaagatattctataaaatctaaaagaatatgatgccttactacttaaataaatgggcattctcttttgtacagagaaattcctttcaccatctaagcatttatatagttggaacaaaaaacctgagcagcaaaaatggtggacataatgaatgacttcactgagttaaatgctgctaccatatattagatgatcatacatgaacattgatgtgaagctgaagcatgcatgcagtgtatgcacttcaagcagatgcaaacaacacatcaataccaatcgagaagataagattacagaatgaaagaactgtacaaaggtaatggcaaataacggtacagatttctttcgagctaacataaatatttatgcatggaaattttaggaaatatagtagataaacaaaaataaaccatatggaaattggtgtggagcatacctgtaatgaatgtgcttcgagcatatagcatacatcactgaaaatgaggaacacagtacagcagcatatgaaaaactcttttgatgtacattcaagaggtaagccatgtgtacttgcagcttccaaaactgtctgaatatgaaaatacaacctgcagcacaaatgggaacaaataaacctatcaacattatcgttttgccccccatagctgtatatgcaattcctgactgaataaataataatcatagcatatagaaattttagtagcagtgtgcattgcttcaagctaaaaaag

SEQ ID NO: 37499 - DNA, 569 bp, Oryza sativa
cttgtatccccttgcacgtctgcatcgttggtgtggcttgctaagtacggtggttgtactcagccttgctattattcccccttttcagaagtgtagtgcttctgaactgaagacgaagttagaagaccaaggctcagaccccagttgagttttgcctatggagtggagctgaagccctctaggatcgcctttttccgctgctgctgcttttgtttcggtgtgaggactaagtgccgatcttctgtaagtattttacgctttatttacgtttggaactgtatattacttgtcgttttgtgtaccttggctggtcctggacagggatttaatacacaaaatagtctggaaatttgggctaaatttctgggcgtgacatgtgtagaccattatattgtttaagttgattaaacaagcaacctagtatagttacacgctcatcactgaactacatcaatgatggaaatgcaaccatacctacacacaagcaagcaacaaacattctaccctactaactattctgcaaagtcccttggtggtttacgttctagggtcagatccaaacttcatcc

SEQ ID NO: 37500 - DNA, 713 bp, Oryza sativa
ttctggttaaaacctagacaattccctgtagcaatttcagtaccatacagaagttcagacttcagagtaaactgaagttaaaagcaaataatcatagtttaaggacataaatctggtagcaattagactatcacagcctttatcatagcaaaactgcatctgtattgcctacagttcagactgaatattgttttgctgccaattcaaaatatacacatgtcccaaaaaatatcacaaacttacatcaaaggttttagcacataactagaggattccatttgaaggaaatgaagaacagaaatacaaacaaataggccagaaaattaaggggattttatttgttttcttttttttaattgattaaatgaactttgtgctattaaaattatttcttgagctccgaaaattcacaggaaatttcagagagtattttagggcaaaagaatattgcaaaatattcccggccaatgatttttaagggaaaattttaattctcccattaattcactcgaataaattgctttaacttttaatataatttcttgaaatgcattattaaatgattttaaaacccgaacgaaaatcggggcgttacaacacacactagatcaatggcaacctggttaacgtctttgtctttagtataaccactctccttctatcttctctaatttgcaacagatggtgaaccctcgtgccagtggaagtggaaa

SEQ ID NO: 37501 - DNA, 965 bp, Oryza sativa
catgcatttaatagaaccaccagttggcatggtcttctgtttgtagcatccaatagtccagtgtgattctagcttatagagaaaaaggggtaccatgaaacctctgtaaactcattgtaattgacatgtaatttgcctttttttttctatttattcaaacttcctatacttttgatttcctcctttagcctagctagacactatttttttgtgtgttccaattttttttacaagggtcgtttataggatatagatgaaaacatgaaccaatgtaggtgaatatagatacatattattccttgaacatattagacttcaattgattcgggcggcgcggcgtagcgcgcttctattattgctgtatcatgaaacatcatcaggatggaaggtatcatgagcatcagcaatgttttgaatatagcccatggcagatccataattttatgatccaatcgatcaaacaatggtcatgtactgttgatgagctaggcttctgtatgttttactccctccgtttcaaaatacatggcctcgttgattttttaataatgtttgaccaattatcttattcaatattttattataactatataaatataaaagtataagttaagattatgtttctttaatcataaaacgtcacaacaataaatgataatttttatataattttataataagacgaatggacatagatgttgtggaactttaattgatttgctggtcggtgttgtgtcctcaattaggatttaggataaacaaataatgcgccattaagtcatcttaaagtataggataggaaatatgctctttttttagaaaataaattatggaagtagcaaatggacagacacatccctcaaacaaatgagaatgtagtaaaaaagttagtagttcggaaataaactagtattatagttgatatatatatatactccctccatttcaaaatgtttgacaccgtt

SEQ ID NO: 37502 - DNA, 749 bp, Oryza sativa
acggcgcgcatgggggaggaaaaggacgggcggctagggtttggacgggttggcgaaatccacaccgtccgttaaagatccaacgattccacgggtgtggaagggccgccaaagggggaacgtggacggccagatcgagcctatctcaagatcggacggtggacatagcaaggaccggcgcgtaattaatcaaaagcatggggtttattttgcaaaagacggttgaggtggcacgctaatcttcagccattcccacggcgtttaagtaaactaatattcttgtagaatagtggtagataccaatggtatctactgttatgattcatagacaacctctatgatatcccaataaagttacggtaatactcatgatagtaaaatgcagttaattaaacatgtgcatcggttttatttaggtccataaacttgaaaatcacatctttagacccccctgccccctaaaaaaatcttgtaagtatatcatccctgtccaagatcaaacatggcatatcacacaaataccaatatggtgtcaacttcaatcctacatttattaacaaatggggccactatccatatttcctttttttccttctcttcttccaattaacatagcaagccaacccctaagtgaggtcatagaactaaccgagatggagggacctgacaagggctgtaggaaccgacgagatggaaggacccagctagggggtgcagatctcaacgggaatagttgatgggctagaggt

SEQ ID NO: 37503 - DNA, 537 bp, Oryza sativa
ggtattacttcttgaataagaaggcctgaacctgtataaatccttggtctccaaacccattcacttctccagcttgatagccacccccttttattattgccgaaatctagtttcgacactttgatgtgacgggatgatgttgatgcccaacaaatagccatggcgcgctatcttcttttttccaatttctttatgtatgttgggtttctctagtttgagttagctgctctgatgtcaaaatggagggatatggcaccattctgataaccgagacagagctagaggaagttaaactctggaatgcttccatttctctactggaaatgggggaggttgtgacattgtgtcctccctttcttaaagaagaaaaacaaaaacaaaaaaacaatcagccgctagtggggttgcttgcattgaagcccagctgcaagccacaatggatgagctgcacacgcaggaagaacaaacgacgcggaggacaaaaacgaggggctggtcggatattcattttcaacatactattttttcataaagttg

SEQ ID NO: 37504 - DNA, 786 bp, Oryza sativa
gggcgtgtatggatgtggtgtatgtacatatatatgccgtatgcatgcattttccatacaatcgcaaaaaaagtcagtcatgtaaactagtgatactttttgatgaagtacttggtacagctacatatgtaggcaaatctatactttctataaagttaaaccccactaaatctaaagcttaatatgtaaccatgccacatcatcatctgctagtaataattacatatttaatttcatgcaagaatacaacatcatcttaaaaaaattgatacaatagtagtgcttgattgccaaattttttttttttgagaattgcttagtaatttcctacagtaaagcgcggggaatcacatagtggatacaatagttactgctgtaactaatttaggactcctctgatatacatgttttcttaaaaaaaaattccataggaactagttcatttcctttaaaattctcgtaagtttcctcagttccaaaatgaggccttatcatttactaccttcatgctaaaaaaatatctttctagacagtttatcaggttcatagttaaaaagataactgtagtatttatttacggggtagtaattaataatttggctcctctctccattctcaaatatctgacttcgttcactctccccatcttactttgactataaattaccttttattgattatattatgatttatatagtcaaatttatgactccagacacaccttaataatatagtagcatattttcaagcacaagtatatatagggaatttggtaccgagctcgaa

SEQ ID NO: 37505 - DNA, 821 bp, Oryza sativa
aatttgaacaaatattggttgcatttaaataaatatttgtaaaatgtttttatttctgtaatttgagacaatttttgaattttgcaaaatatgtttagatccagtcaatatttgttcaaaattacatcttgcaaggtgacctaacgataaaatcatcttttcttcatttaaagatgatatattgaaataatggtccaaatgtctcttactacctcccaagaaaggtattaggactgagagagtagtaaacaatcgtaaaagtgtgtgctatataataaagtacacaactaaagtattcttaagcaaatgtcgtggatttagagtctcctagagcaaattttacctcagatattggtgtgtgcctttaatacacagttgaatagtacaccatacacccaaagtgcgatttaatgcatatatatacccacaagatatgcacacatatttatactcataaaattggatagcattagtacacaatttaagatttgaacacaagtgagcggaatgcacaacttcaagcaccaggactagcttacatggccacttatatatcaagatcttatttatggaagggagtagtccttaattaagaatttcctcatcagattatatataaaaaaagattttacgctcctttcaagatgcttaagttgaacagattgctgagaggggaggtcatatttcaatttcgaaatgtccatctgaatacctgtgttaatttgtacgaacacgtacatggccgttaattccacgcacccgacgaaagaaaatgactcggcaaccatcaagttttctgctcattgccttttttgaagagc

SEQ ID NO: 37506 - DNA, 1659 bp, Oryza sativa
tgaatttttatgtaatactatctccgtcccaaaataagcgcagtcatacgtttccgcgtccaactttgatcgtccgtcttatttgaaatttttttataattagtatttttgttgttatgagataataaaatatgaatagtactttactcgtgacttatgtttttaattttttttaaaaaaaattcaaataagacgaacggttaaagttggacgcggaaaactatagctccacttattttgagacggatggagtagctagctctacacatggtttaatatggatatattaatttcatagtgagataaagagagaaaacaataaaactaatctattatatatatattagctatagtataaatttatacggggtagttgttctgctattaaacttgctactacgagaggattaggctgctgcagtttaccacctgacttcacacagagtacatactttcttcgtctaaaacaaaccaacctcgtattaggatgtgacagcgaatctgaatatactctatatccaaatttattgtattaggatgtgtcatatcttactactagatttttttgggcggatggagtacatacgtacatggtatcgacaagggtttaccatccaccctaaggccccgtttgttttctccattgggaaagatttttcagcgcatacgtagtgagaaaacttattagtacatgattaattaaatattaactattactaacttaattggattttaataaccacttttatataaaaattattgaattctagttaatttatgacatattgattagtatattagtgagtaattagataattagtgtgtattagacgcagatgttttttttgttgtggattcccgctacgttcatccttgtttcttttatgatatctaatgttttctattaacaagatgttatcatgacagtactaacgcagtatgaatctgtgatatatacacttaaattaacatgaaactaattaatcgctgatactcgagatggaaatgaagttcaagcagaaactaattagatcaaagttctgacgtggactctcctctcgcactagtgttgtcacattccaattcggtggttggagattaaaagagatggttagagtggatggccgcatgcaccggttgctgaatatctatatgcttaattagtgagaaaaaacgtggttttccttttgatttgtgcagtcgtttgttgttgctttgccgcttccatctagtgatggtcagcacatatatgctctgcacgtatgtagctgttcttttctcccgaagacttaaggaagattatgttttttacgtaaaacgagatggtattaacgtatgattaattgagttttaattattacaaacttgaaaaataaattaataggatattttagagcaacttttatatagaaagttttcgcacgaaacacaccgtttagtagtttgaaaagcgtctcacgaaaatcttaaacttaatccaactcttgttagagtagtcataatcttgcattaggtgaaaagttggaggctaatccatataaaaaaagtttgtagttctttgattttgccaaagtgtcaatgcgtcataagtttgatatatttcagtgaacggcatcatatataagttgatatttattgaggtcagtggcgattaacaaa

SEQ ID NO: 37507 - DNA, 1403 bp, Oryza sativa
cgtcaaatttagcgggtgcagacttcatggacttgtgcaacttgtctgaaactctgaataacactgaaacagtccattgccctcaagtcccatatgcctatggaatgtgtttaaccttccaggcttccagctcagaatgtgctcagcatgacagactgaaggacaccgttattaaccgccatttgtcattttggagcgtgctgtactctgtctggctgccatttgcgcctataatttcagaattcaaatgatactcctgcaagaaatgctactcgactggaataccttccatcatctgttcatcttttacaggaagaagatacctgtccctgtactatttcgaatccgagtctaaatttgagtagtcaattgagggtttagatcatgttttgcgataaacttgtacaatattgaaatactcgacagttgatagcactttgctttccaaaatttgttccgtagtctatatcagtattttggtccctcattatcttggtcgagagagggtcactaacaaaataaccaaaatgtaccttttctaatgcgattgtttttaactgcacatccatcttcttttccgcttctttaccgaattattgtcatgaattgtttactccgtgcttcaaaaaacaaattttcttttttttttaaaaaaagaaactttcttctactgcgttgcttggactacttgttttaaagttattacataagtttatttctcaaaatatgtaatttattcttacaactaaacagattactgtcacgataattcgatgaataatctgtttcaaatgctaaagcagatcagcggcacctactgaataatcccgtgtccatccctacttttttttagacacaatttctccatctccctcgaggggagcaagccagcaagatctgaaaaagggttttaataaaagcataaacaattacttcaagttcatgcgtctccatttgctatttgagcaaccattttcaggagggaatccaatagttggcacggtgaagtcagagtctagctttaccaaattgagatatcgcactctcgagcgagtccctccattttagaccacacctaataacatcaagatcatgaatcctcccagatgtgaacctggaatactggaaacacgtgtatttcgtgcacaatgagcaaagttagttttacatccagaaacctgtttcgcggcgatcatttcacaatgatgttcgctgagatttttttatataatggataaaaatccggtctctatatccacaagtgtatatacaaccaaacatttcagaaaaatattattttactataatattctatagcaatagtcaagattcctttggaatataggaattttacaggacttgaggtatgttcttttctcttacagatgggtaccgagctcgaa

SEQ ID NO: 37508 - DNA, 501 bp, Oryza sativa
gggaaccgaatcccacttcccctcatagtgccgccacccctctccctggccggcacctccttcctttccttctgctgtgttcgcatctctcccttctacagcaaattgctctctctatatctccgccttcatagcttggatcaagaagcaaagtagaaaaacgaaacgaggaggggagagaagtaaaaggaggggttagatcggagtctcccctattgtctccttacaagttctctaaagaaaccctaggtgaggcttattcttttgttgtatcagttgttctagcatggctttagtgctttaattcgtggtcagggaaggctagagaaggagtttgggtagttgcggttcggtttgttgcagttctgcatgtgggcagatttacagtgcttcagttttttgatattttggggctctaaatgttattttctgcaaacgtgtataactaggaagttgtagataatgtttggatctatcttctaaccaaagggcgcgatttta

SEQ ID NO: 37509 - DNA, 647 bp, Oryza sativa
tgaggttgccgaccgtgcccacgggcaccgctcctctcaggctcttcccggggagccggagctcggtgacgcgtttcgccggaggcggagcacccgacgccgcgccacgcgccgccgcacggcgtgggcgccgaggggtcccacggcaggtgccgcccccccaccgcgtccgcagcgccagcagcgccgcgcggtcgcccgccatgtcggccgccgccgcgcgcgcgacgagcaccagcagcagcagcagcagcaggacgtcgcggcgtcgcccggacgacgccatggcgaagcgagagcgcgcgaggaaggcggaggatgctgtgctgggtaagggatttatgggcgggcgaagaaggcggcgcgcgcgcgcgcgcggcggcgagagagcttaggtttctccatttggaagagctcggtttttgtccagctcgattgatcgccatgcgcgcagctggcatgcacacgcatagcatcgtggacgacgacgtcgtcgggtggtgaggtgaaagaactgaggcggggggtttggaaggcagcgagcgaacggcggcgaggaagagcgacgccgtcaatggcgccggcgacagccggccggccggcgagcagatgggcccgacatagcatgctgaaaaagcccattgatt

SEQ ID NO: 37510 - DNA, 660 bp, Oryza sativa
aattcgagctcggtacccaaaactacctccttccttttttttgtcctccatgaaaccattgatgccatccttttccctaaatctaactgaccagagtgggggacaactgccactaccccgcttttactcttcatggggattgccgatgcagttgcactactttgccctccactctgctccatgaggagagggagatcaacggcatcgacaagacccaaaacttgatattcacttgcaacaccagaaacttgagcatcatcaagaccatgagctcgatctctatcatcgcctatgctctcatggctcccaagcttgacctcctcctcctccaatttcacttgatccagtggcgtttgtggtcgaggtgctaagaggcatgatggagaaatgggattgggaggaagaatgtcgcggttcaagagaaaaggagcacacagacgccttgtcaatcaaggtccgaatggtggtggtagggaaccagaggtggagaagagatagatggagagagggtggtccaaagtgcaaaaggggataaatataccatggtaaagaaaatggggacaaatatacatggctttcaatgaaaatattagatatgggtagtcttagtgaaagtttggtaaaaatcttactcccaaaccacaatttactccatttctt

SEQ ID NO: 37511 - DNA, 733 bp, Oryza sativa
tttttattttgttttcttccccttgatgaaatgaaatgcagttctctcgttttcgagaaaaaaaaaggtatttgcataagcatgtttcataatagcgcttaactcattgttgagcatgtctcattataatgcactcaatgttatggaaagtagtgtaatgatcaagagtagaattgttatattcatgtatatgctagaggtagtgatggtattatagtctctaggttcctgtactctcttgcgtaacaagaactaacagggaaaattgctcagtaacactaatcactcgagttagaaaataacatcgatgtgtcactgtcatgtaggcctagggccaaagctaattctcctagtttcatcaggtacatacaaagctagctctatagttggtctaacttactcctacgctttctgccaggcatatgcagaacaagaggaacggagacaagccgaggagaggaagcaggaggaagctcaggctcttattaggtggtatcagctgctgtgttccgtcgtaaccacacagcggttgaaggactcttacaaagcaccctcatcagagcacggaccagaaggaccatcccaagatgttagtcagcagaagggcacacgcaaaagtcgaagctcggaaacgaagactcgctcaagcagactacaggcggaccgaccatttgattctccttttcctgtccatgaccatgagcatgagtatccagaggaagatcagagcttc

SEQ ID NO: 37512 - DNA, 1398 bp, Oryza sativa
ttatccataatagatgctggccagaagttacagtcttctattgcgtaaatctgtttactactgcagaatgctaatatatatgttcaattttgatgctttgttatttctggaagatgaaatcaatatcatatgctcatgaaaagtacatattcacttcacgtcgtaccacttacttctatgcaatagctttagtgacctttgggtgcattttatctaacttattctttaacttgcagctctatatgcccagatgtacaggcttgactgctgaaggtgtggtgaagattgtccaggttctttatgaatgcaaggggaatctaaaccgcattcgactccatggtatttgcaggatgactaagcatcatcttgatgctatcagttctgccatgtgcaagggtaaccaacaagaagatgatcaatcacttttctatagccacagagtccatgaagtgctcaacaccaacgatgaacgccgtattgatgttgatgtgtgccctatgtgcacaaatgtgaggctggtgtttgattgtacaagggatggctgtaggtttgtaccttctgatcttttgaactcttatttgctctttgcttcgaaaatttcccttcaaatttgttgaaagtttgccactgtttttcttatttgcttattgacaactcatctttgctatatggtcacaatattcagtgcctttagatatttgatagtgttgtctcctgtggttgtggaatagctgacatagggatctcatctttcctggaaagcttttaagtgatggtccagaaactcatttattctcctcccctatgggctacaggaaagcaactgcacaattaatttttatttggttgctctcgtctttggaacaactggttcaatatgttaaatattcttcagtattttttcaggtctattgactttgacctgaactttgttcgcatttctacaaaataaggtttgatctattttgatgatttatttatatttcaggagaaaggatagttgggctcaatgtcgaggctgcttcttctgtgttgcccgatgcgaaacatgcggtgggtgcatcgacttggaggagctcagcgagactgaacttgcatgctcggacttcctgtgcatggagtgctggcttccgctcccgaaatgtagcacttgcaatcggccctactgcaagaggcatgaaaatctgaaggtagatttatcaccatctggccagtttacttgtcatcgttgcgtggaattttctagtaactcacgcgagaacctggaagaaagttcttagaggtgagttcctgcccctctacaggaaatacaagttgtcgagtatacttgggtatgaaactactgtctgtgtaccagtacttgctgatgacttttacttaaagcgtcaaatgtactag

SEQ ID NO: 37513 - DNA, 541 bp, Oryza sativa
ctataccacccactagctctctctccagtcaagccctagctagttgatcttaaccacaaccatacatcttatgaagccggtcctacatactttgcggtgtagataaattaaagatgaaagcatgcctaagaacgaatatgcaaaacaaataatagcaaaacctgagcaatttactgcgagccattctttttacgattacatagtagatggacatgcacacaaccatgtgtacctccttacaacacggtcaaagagaagtcgacaacaaatatttaagcttaccaaatttctattgaaacacacctaataaatgcgagtaatatttatgatcactggaatttacctatactgtaactccactaccacacatttaatttggttcttggttcttcaattttgccaaaaatgcattggcaatatttcctgcagaactataactagttacctccgatcctccttatgtcgtataaaactttccggagatattagaatctgatcactagcgtggctccccggcatagatgacctagaccatcatcac

SEQ ID NO: 37514 - DNA, 1890 bp, Oryza sativa
tcggtacccataagtttaggacatagacatagatgtctccgaaatacagaccttaatccttaatgtcaatcgtaaaacatttaaaaacctgataaagtataatattgtgaaagttgttttcgaggtaaatcaacatgtatatatgattttcgcacattgaatctaaatgtgttaacaaatatattgatatgatttttaaaagtttgatcatttgaaaaacctttacgaggtaatcaacacacataaacatgattttcacacatctaatctacatatttaaaaatatattgttgcaatttttaaaagttttatcacttgaaacaccactgacattaatacacgttatcatgcatgatgggtctaattaaattagaagctagcttgactatattatttagaaaaccaatttaggtgttctcatatcatgatcgatcttcccactaggctttagatgaacaacaccgacatcccttcaaacctcagaccaggtcccattttgtattattatattatatatccaattggatctagcttttatactacttcattagagacccgtacgtatctaacttattgaccaccgtgtgcataattgtatgacaacctcttaacgatagtaacacttacttgcacaagccctaattgaaaaggaataaaatagcaataatatatatgtgaaaaactagttaattaaatggctgcccaactacacacatatttattgtgagggggcaaaaatcttgcctttgctaatcttgacctcatataaagttagaacccaccagacatctcaatctcaacatgcaagcattatttattagtacttttaaaacttaccatgtaagcatgccacatcaatctactaaacacctaaagctcaacatgcaagcatagtaattatatttacaattttattacattctaaactcaaatgtatacacacacgctaaatcatcatcctcaaatcatttttcaaattatttcaatccaaattcaccaatcatttatacaacattcaacacactttcattcatatatcccacgacaaagcgcaaggtgtcatctagttatatatatgtaccctgtcaataataacagttggatgtggcttacgttttgttatgtgtgccacaccattccaactaatcttaaattaaggacataattaaagactagaaatatagatctggatttggtggcaataatccgagttgtcacatgacaatatatatagactagttatagcgcagtatggccccatttgaatcttctatagatgaagattaaaagcgggcacgcaaaacgagaaagtcattaacgcatgattaattaagttttaattattacaaacttggaaaatggatttatttgatattttagagtaacttatatatgtaaagttttcgcataaaatacaccgtttagtagtttgaaaagcgtactaacggaaaacgaggaaaaatctatatctttatgaagttagaacgggccgtacatagtccttgttgctctgctaaattatgatcaacatatatcggtttttatgatgcagtcacttacattctaaatctgttacatatgtttggcaactatgggcatacaccacctttttttttaaataataggcatcaatatttgaaccctgatatatgaagtaattcttacaactttaccaccacatgtatttgaaaaaaaaaaccagaacacgtataatcggctaggtggaacaagtagagagttgaagctaggtagagactggagaagacacatacttatatatatgcatcacaagaagaatataatcattgtcaggttagatattttctctgtttttttttcatgtgcaaatgatacattacaccggtcaccaagtcgcaaagaggcattaca

SEQ ID NO: 37515 - DNA, 652 bp, Oryza sativa
gccctatatctttgcagtaagtctttcttcctcctctctttcactctatgacacataaactcaaaggcgacgacccacagggaataaagccaaccgtgcggcgggaggtgggaagaaaggggtgacgccgggcaagaaaggagtcaacggcctccgcatgttcgtccctagcctgcgcgccacatgcttgccttcttccactccgtcaggcggaggggaggagcacacacgggctgtcgtgcttcctattcgaggagtccacaggcggggccatctgcctcctcttccacctccatacgccaccggaggagtggaacaccgccgtcctagtggcacccattgtgctcactgttgatgctcctaaagttcgtagtggcgccggcgctggacgcaatggcagggacaaggtgagggaggaggctgggggctcgtcacatcggtgtgggtcgtcggtgggtgtagtgcgtctccggcacagctacaccctctcgtgtgggaggaggttggcagcgcctgggacgagcgggaggaggaggtgcttcgccacaataaacacgctcgccaatgccatcttggttgaggataaattaagcagcagcaacctagttaatcgtggcggccaccatggccgccatgaagccagagctcatgc

SEQ ID NO: 37516 - DNA, 717 bp, Oryza sativa
gctcggtacccaaaccatactaagttgatactgttgtggtgtcacctaaccatatctgctctgattgtagagctatgctgtggggtctggtttaacagacaaaatacacaaggtgtgtttttgtgtaaaacagcaggcagcattcaaacaatgctagcggagcaggtgggcatggatgagttgtgctggaaaaagttgtgcagtgctcgttgcatttccaacacaaaacaaatactatatcataaaaatatttccgatgatagattcactttgagttttttgttgcaccacatgttactatgtttgtctataaggttaatcaaacttaaataaatttgagttacgaaaagcccaaaacgtcttataatatgaaaggtggggagtactactgaacgtgtatagaacctgtgtggcttcaattacggacttgcaatcgccagtattaacaacacagaatctcagttcaatgaaattgcatggccagtaaattaagagatgactggctgggatgggccggcgattctcagtagcgggctgacttctagttgggcctatatgggcttgtccgctcgtgagaatattgggccgactgagtgaccggccatacgcttgggctggaggaactgaagatttatagtgcagtaagttttttttttctttgagtaacaagtttatagggcagtattacttgcactgggccaaaactggcctttcttt

SEQ ID NO: 37517 - DNA, 852 bp, Oryza sativa
ataaaaaaaatcaatttctagatgaacctaaacaagcatgtatccaagttcatcccccaaaagttatctatttttaggatagagggagtgcaataagtaggaacttaggcccttcacagtgctccaccctggagcgttccttcgtcccaccacgtagacttcgtgatgtcatggaggagagaatgtgtgggcccgagttcctccgcatgattgctcggttccttggtgagcaacgagttcctcataaaaaagcctgcaaaaaggtctgaagcatgcacaaaaccatcggaaagaggcgaggaagagcatgaggaggagaacgggaagagtctgggtcacgcgtctggctcgccacttccccaccgccgaggccgccgcgctcgcctacgacgacgccacaagccaccaccgccgccgcgctcgcctacgacagtgtcgcgagcgcagcggcgcacgacgacgctgcaagccgccgtcgtcgcgtcccacccggtgatcgtcgggctcgccagggaggtcgccggcgagtgccgtgggctgccactcacgctcatcaccatcagcatggaggaggagaacgccggcatgctgtaggaccgagatgtcgactagaggagggtgaataggcgatttaaaaactaaatgacacctaatcaaaactaacctaagttgctaggctcggtgagggttaagtctaactaagcaactaagttatgttttgcaaacctagggtgatagtggctcaattaattctctaggaaagtaaattacactcctatgtcaatgttttgcaatcctagggtgatatgatctcaagaaagtctctaggaatgtaaattgcacaaatgtaaa

SEQ ID NO: 37518 - DNA, 599 bp, Oryza sativa
agctcggtacccattattaatgcactatttaaatttgaattttgattccctatgttttcaaaataaattataatgcttgaaaaaaaatgtcatgttaacaaagtgtgcattgtcataaatatagtgagctagaataattagttaggctccttatagtggacgtatccacacgtgttcaagttgaaggcctaatatcggaggtgttcacatgagaatgctaattcgcacagacacgctaactaaatatctggcgcgcgtttatggcccagttccagtccatgccgccaaaccctcacgcgggcgtttcctttttttcgcaacttccacacgcgcttcttttttcttttttctttttttttgtgcaattgccacacatgttctttttttttccttttttttgttgcgcaatagccgcatttatttttttttcctccacgtttcttttttttcttttccccgttgattactacacgtgtgtagaaatagatgtcaagatttaaaactttcaaatcaagatttttttttgaaatgttaactcagatttgaaaactttcaagtcgagatttaaaaacttttaactcggatttaaaaactttcaa

SEQ ID NO: 37519 - DNA, 739 bp, Oryza sativa
catactaaaaagaaccatgataaataggagcaattgcgaatttaccccgttctaaatcgttatggcaaaattcccactataaaattgaaaagaaaaaaaactaccaacagaactatcattcaaatagtattcttacaataagaaaatccggtggcaaatttgtaaatgccactatacttgtgaaaacataagaataggaaaaacgtaggaagagtgtcatgcccattgattttctataggaattaagaacacgtggaagttcaaaaattattgttttggatggtacatagaaaaaacagaggaaccttgtggctgtgccatggaagagataaacatgcggtagaaccttatgctagattgccctccaaattcctatgaaaatagtccattactgaatttcaaaataatctgagagagctattcctttattccaaaagactacatagaaatttttccatatgaatcaaatcctccacaatttccgtagttctctttgttccaaaagagttcacgatcatggcatcatatttgttcaaaggttaattcagttgcagaaaaatatttaggtataattttacaattcaactaattacattcccatctgttccaataggattgggagataaagttatgatttagtttctttctatgccggttttcatgatgggctgggtctttggagcttttattggaagctaggggatcgacatagcaggattttgtttttgggaaggatgga

SEQ ID NO: 37520 - DNA, 790 bp, Oryza sativa
taaattaataagtgcttgtccatcctttcatacattaaaattaaatgataggctaagtctctttaagagcagagatctaggtctttttaaaacagagtttttttagtaaggccttgtttagttttcaaaaatgtcacatcaaatctttagatacatgtatggatcattaaatatagataaaataaaaaactaattgcacagtttgtatgaaaatcgcaagatgaatcttttgagcttaattagtcaatgattagcgataagtgctacagtcacccatatatgctaatgatggattaattaggcttaataaattcgtttcgtggtttccaggcgagttatgaaattagttttgtcattcgtgtccgaaaacccttccaacatctggacaaacgtccgatgtgacacctaaaaaaatttcttttcatcaactaaacaaggccttgtattattcgtgatctcacgatgaagtcaggcacacgcgtgatcactacagtagtacacacaaatcgatcgatatcaatcacacactcatgaatcattttgtgtttgactcggaacgagcgatctatcactctctcaaactgtgctcttcctcactcttgacgatacaagtctaccggtttgctaattagcaacaaagtcaagaaaagacaccagaactcgtcaattacattgaacgttcctacctacgcgtaccaacacacaaatatgcctattgcctaaggtctaaatcttgaagataaatacatatgtgtacaacgtatgtatacttcatgggtaccgagctcga

SEQ ID NO: 37521 - DNA, 579 bp, Oryza sativa
atttttttttcattcctgcgattcaaagggctcttattatttcactcaatagagagcatatataaaccagaaaaataagtagtaaacaataactaataaccctaacacaaaataaagacaaacatttattcaaatctatttgtaaatctgcacatgaagttgataaatatccatatggccgctgtctttatgctccgtcacatagtatttagtactccatccgttccagaatataagaagttttaaggttggacacggttattaagaaagtaggtataagtaagtggtggagggttgtgattggatgagtagttgaggtaggtgagaaaaatgaatggtggagggttgtgattggttgtgaagaaaatgttggtagaaaagttgttataaattttagaataaattctgaaggctaaaaattattatattttatgatggagggagtattttttttcatgtcacacttttgtagttgtgtttaaagttggagtcaatacgtttcctgaatagtaacttcatataagatttgattgatgtttatgtaggcaacggcgagaagctggacttcgcggcgcgggc

SEQ ID NO: 37522 - DNA, 767 bp, Oryza sativa
agggaagagaagctcctcgtctacgagttcgtcgtcggcgcaggcagcctcgccgccctcctccacggttcgttcatcacatcacctcgccttctcacttctcttcgtgcagcgaaagaaacacggtcttttgcttataaagagattatgggtttggcggaaaaacataagaattttggaggattttaattctataaaaaaaatttccatgaaggtatttgaaataaatgattgaaccctatcttattctttgaaacttctatggaatggacaatcttatatggattttggaggaaatttagtaagagctctaacctcttaaaaatttttcttttgagtctatatctctcatcccattcctgtattttttatgagtccaatcaaacggttattcctatatttttcttatattttgcaatcatttgttttgtatttaccttcctattaaaatcatgcacatttcctatttttttttcattcctgcgattcaaagggctcttattatttcactcaatagagagcatatataaaccagaaaaataagtagtaaacaataactaataaccctaacacaaaataaagacaaacatttattcaaatctatttgtaaatctgcacatgaagttgataaatatccatatggccgctgtctttatgctccgtcacatagtatttagtactccatccgttccagaatataagaagttttaaggttggacacggttattaagaaagtaggtataagtaagtggtggagggttgtgatt

SEQ ID NO: 37523 - DNA, 615 bp, Oryza sativa
tgctagtcgtggcccaagtgcccgcgaatctagcgggcatttcgattgttctgccacgtcataatggtcccgtttgagttcactgaatataaagatttttttacgaacacataaaacgagaaaatcgttaatgtacgactaattaacttctagttattatagaattaaagatagatttaactgatattttgaaaagtaacttctacataaattttttatatgaaatataccgtgtagtagttcaaatatcgtgacagcaaaataccgaggtaaaaggtttatcttaattagaaacagagctatgctaattgattaggctatgtttggcaacctgggttaggaacccatgtgctgcgcacggaaaacagagcaatctattaatatgtgattaattaagtattagcttcttttaaaaaaaagggatcaatatgatttttatgcaattttcgtatataaacttttagaaaaacatattgtttaacaaattggaaaacgtgtacaaggaaaacgagagaagtgagttgaaaaaagaggggaagaacatagcctaaagactattagaccctgacttgttaacccaaaaatcatgcaaaggaatagcaagtacggcctcgg

SEQ ID NO: 37524 - DNA, 632 bp, Oryza sativa
gcgttctgctgttggctgcttcattgttttgcggtataactcagtatggagcaaatttgcacttattatattcagatatattgttaatttatttttcatttgttgcagtacattgccaatattaaatgataaattgagttctctacatatatacagttgcagcattcatttttcacatcattgttgttagaaattagtttgatactttgattcttgctgtagaaattcaagatttgagaagctcgccatgtaggacaaataacttcaaagttccaaatacagcatactaaaatgtatgtgtcaaaaagcaagtttccccagcagtatggtacataaacactgggctatgtagagtcccgctcttcagggctatatatataacaaaattaaattggactgtccatttaaacatgaataaaaaaaatcctaaaataaactaattattgaacgcacgcatacaaaaagggttcatgtcccaaaataaactattttatcacatcacgcgaaaaaaggtgatgtgacatgaatcacattatagtgctttataatgggcggcttcaacatgaatacaaacaaatcctaaaataaaatatttatcaaacgcgtggcaaaaaacaaaagatatgtgtggg

SEQ ID NO: 37525 - DNA, 2739 bp, Oryza sativa
ccttgttgttgactgatgatcaaccgaaagtttaatgaattttgcgaagattaattaaactggcatgcagtagttgtagcgaggtgtggtgtgcatgtgctgtgtgttgcatcaacctgcagcagtgtagcgtgccattccatgtgttcagtattcgctgggttttcctggcgtcgtacacgtgcaggttggcatctgacactgccatgcatgcagcgatgcccgttccaatgcctcaggtacggcgtgtcggctgtcaggctgaccactgggccccctcctgtatccttgggctatcgcccatctatacatacactagcaaaatagtagtacgcagacaatcagctggctaaatgcatgctgagatgggggagagtagagaagagagtagaagtggacttaaaacttgcagctaatttagacacaagaattaaaaaaaactttgtaagagagacaagtggacctgtattaattgtaaagagctaactattatatgggtaggttgaaaaaatgctacaaagaacctataactaacagatcggctgtattataagccttgctctcaatagtaccggttgagccatctttagtctcggttgatgttaccaaccgggactaaagattgatctttagtcccggttatttcacccgggactaaagatagcgatttttagttccggattggtagtccaaaccgggactacaaacgctttctccaccagtgacatctcgtagaaaacctacccgtcctataaaaaatgaatctacgaccgaatatgacagatgttggttttcatgggaaggaggtactcttttaaaaggaattatgtttgtttttgcaggatggagggtatacacttcggctatcataacctaaaataacttttaaataggagataaatgcattcagagttaacgaagggagaggaatacttacgtcaggatttgataaagttaatgtatttaatctttttatttttattagtacgtgtatgatagataaaaataaatttattttggaacataggagtactctcagtccctaatccatactagtaacttttttttagagcaatccatactagtaacttagtacccctgcgctctgagctgcaaaatgtttggaaaaaaaatgcgctgatattgtgtgtgtcattggatctgaaatggacggataaactgactgcagtatgacccaacatcatcaacaattaatagtaaatatttttttcgtataactagctcctaccttcatccgaaaatatagttatttactccctccggtttcattttaattaacgttttgggcaatgacacggtctccaaaatatatttttaacattattttttctattataacatatagaataaataaatgcatgtttacttttattatagtgcattgaaagacaaatctatatatgttgttctagtttctttaaaccaaatatttttaaagttattgatggttaaagttataaaagtttgatcttataatcttgtccaaaacgtcaattattatagaagtggagggagtactaataatacattttaaatatagtaatagagaataagacaccacatagtaacaaaccactaggtacctacattaattttaacaaacgctaaaggtagctatattcatagaatgtttctgcgtttgctatgaataaaatggtagttttcctaaaaaaaataaagtgcatataaacgtccttaaatatttagccaaaacaaatagacttggttctcgtagaatatgtaattcaattatatattgtgcatgggattgtttagacattttgacatgctacacgtgaatatgtgactaaatgaaactagcgtccgtaccgtgcatagcgcaggtggtaaggtacagccggtgtgcttctcgggacccgtgtccgactccctgctcaccccgtgtctagttcatactgaaagtttagaagtttggttgaaattggaacgatgtgactgaaaagttgtatgtgtatgaaaggtttgatgtgatggaaagttaaaagtttggaaaaaaaactttgaaactaaacagtacttaaagattgatattgggtcccttctcattatccgacgcctttttacatgtgtatatgtagtaatttcaccgttttatactatattaatttgaatcactggtggagaaaggggctttactcccggttggggacccccctatagtcccggttatacaatcgggactacgaatccgggactaaaaatgggtatctttagtcccgggtgaaataaccgggactaaacatccaaccgggactaaagatggtaggagcagtcccggttaatttttttttcttaaatcgatttgctccctaaatatccccgatcgtattcccaaatcatccccaaatcaaagtagcatcacagatctggaaagaaatacatcacatattgaaaaaaatacatcacagatcataatacatcacatcacagaatcttaaacaaaaaatacatcacaaatcctaaaagaaatacatcacaactcccagatcagatccaatatcacatacatcacagatcaaatccaatgaatcacaaattcaaaaaaaaaatggcaacaaagaggatggcgccgccggcctcccggccaccgtcctcgcgagctcggccggccggccgccacgcccgcccgcctggccggccgccacgcccacccgcccggccaaccgccgcgccaggtcgcacggcggcggcctgccc

SEQ ID NO: 37526 - DNA, 646 bp, Oryza sativa
atccattttaggaagtggctgatgacgccgataaatcccatcaccaaaaccacgacccaaatcaaccccatccaacacaggaggaacaggtggattcaacggcggaggagtcgcggaacctgcaccttgccgacggaatccatggcgagatccaccttggtagtcaccttctcgagactgccaccttgggaatccagccgctgatcaatctcgtgcatccactttgtgatgccttccaacttctccaagagtttggactccatggagtccattagcttgcttcaaaggggctgaaagttttgcgggcgccgtggcgaatcagtaagaatccaacgcacggcgacgcccacaacctggctctgataccactgtaacactatgccaccgcgaaactcgccgccgacgagagagagagatttagacgagatcggagttggggacgaagagaaacagagctgaggcagaggagagatagagtttggagagagatagattcgatttcttttgccaggttggccacagccattctctctcttgagtatttatctcctgattacatgggccattggcccaaacgatttaaggcacgcaggccgcattatatttgataaagtctagcccaaaacacacacactatcattcacag

SEQ ID NO: 37527 - DNA, 518 bp, Oryza sativa
acccagcctttttacttagacaaaaaaaaaagaccctattgttttgtttctttgttacgattggatggaaagacaaatacacacacctctccacacataggacacacatagggtgtgtttaatttcatgtcaaaattgaaagtttgattgaaattgaaacgatataacagaaaagttagaaatttgtatgcaggaaagtttcgatgtgatgaaaaagttgaaagtttgaagaaaaagttgggaactaaaccatgccatactcccttagaaaatctctacccttagaaaatcccacaattgaatgttcacgcatttattatttactcgtttcgagcgattaagacattcaaacgttcagatttcaggccacatctgggagctgggagggacaacaccgtgacggccggtgtgtgtgggcggcggcgaacaaagcacgcagcatctgatgtgccgcgacccgcacatttaactcagagaccgcgaacgaacggcgcgaagccttcgggccacgccacgcc

SEQ ID NO: 37528 - DNA, 594 bp, Oryza sativa
aggaaattatcttaggacagtcaaacatttttggaacgtactgaattttgatttttcgtcccaagaactgtcgatgaactacctgaagtaacctaccaaaagtacgatttggttgcaaattatttgagaaaacgcacagtttacaaatgtatttcctatagtacaaaagatggaatgttggaggaaaaacatacttcaaccgtcctaaaatgtagctacctagtacaggatggaacattatctagtactacgaatctggacaggtcctgtactatgtagctacattttgggacggaggaagtagtaattttagagaatttcaatcctataggaaaattttctatgaagccatttgaaacaaaggattaaatcatatccaatcctttgaaatttctatggaatggacgatcctatagagattttagagaaaatttagcgagaacttcaacctcttggtaacttttctctgagtcactctctcatccaaattctgcgtttttcctacggttcaatctaacggtcattcctatgttttttctgcgttttgcaatcctctattttacacttatattcctatcaaaattctacgttttt

SEQ ID NO: 37529 - DNA, 541 bp, Oryza sativa
ccgcgcccgtcccccggtgacgccttcgacggcgctgccgccatgaagcaggttcgcctcgcctccgacctccccgtcgcccacgtcgtgtccctcccatggtagattctaacggtctgagctgtgtgcagcggcagtttggattcaacggccggcagcagtacgccgccgcggcgcagcacggccaccgggagcagggcgtggactcctacggcgtcgcggcgccgcaccatttcccgtcgccgtcgccgtcgccgcgccaccccgtgccgttcggccacgcgaaccccatgctccgggttcatagcctccccaacgtcgccggcgggagcccctacaggaaccaatccttctccgtcggcaactcggtggccggctccaccgtcggcgtctacggcggcccaaggtggataatctctactctgctctaatagaaatcatttctgaattttgagtgcaaagctaagaaaaaaaaatgagaaaggcattgagctgaccattggatcgttgacttgcaaaagggaccttccaaatccgaagg

SEQ ID NO: 37530 - DNA, 699 bp, Oryza sativa
tcgagctcggtaccctagacagtaggacgtttcagtacgtcacacgatgcccaaaagcaaagataaaccagcgttagtttttttttttttcttcttattaccaaacaccccgtttgatagatacttgttcgtaataaattaaattatattccatgaagaaaagagtgttccatccatggaaataatcctccctcagtttcttttctttttctccaatgaaatgaccattagtaccagaattcaatatccattaattacgcttgtagtccacttaatcaaattctccatccgtttctaaatattttacgccgttgtcttttttaaatatgtttgactattcgtcttatttaaaaaaataagtaattattaattctttatctatcgtttgattcattgttaaatatactttcatgtatacatatagttttacatatttcacaaaatttttaaataagacgaatggtcaaacatgtgctaaaaagtcaacggtgtcaaacatttagaaacggatggagtactgaagtagagcgaaagcagcaaattttgctatagtacgagtctgttcaaattgatgacatttttaaccatactattatttggtaaaattaataattatgtggctacatttagtttgttaccaaatattggcaatgtgtatggaattttggcaacattattaagccaatcctaccaaaattt

SEQ ID NO: 37531 - DNA, 644 bp, Oryza sativa
ctcggtaccctctgtaccatactaccatcttgaaaactgtttgttgcgttctaatgagtcatgtatttggtggttccattccaatacatgtacttcattattttaaattacaatgttcctacaacggaaaattgagaaagtcctcatggttgacaacacatcagttacaccagatgaagttattctacacaggcttggtttgattccactggatgcaaatggatcctttttattatatctcaggtcaataacttaaaattttctaattccacattcatatatttgattgctatgtatgaatacttgtgtatgaataatagctgtattattctttcgttgggttctgtagagaacgatgcctcattattgtgtacaaactgcgtgtttcatgttagaaaggcccccagcttacagttatcttcgctgtcctgcaacctaaccctttcacagtttccaatcatcttatttctaagtacgaatttcctcccttccaatttgaattgtgcaaaactgcaaaagtgatttatttctaaatattcttctccaggttattctttggagtcatttttattcactgctttttaacttttaagactaaatgccatgtgtttctcatttttactaaataagcatcaagtttacaa

SEQ ID NO: 37532 - DNA, 660 bp, Oryza sativa
acaatttacacgtaatatgtgtaattagtgtttttcttatatttaatattctatacatatatctaaatatttaatgtgacagcgtgaaaatttttgttttgggaactaagaggctaaggcaaccttgcatataggagctatgcttgggcgtgggcaccacacattggtgggaaatttgtacagttgatgtaataggagacgttgacgtatgggtttagtcaatgtgtcagtcgttgctactgcattacaccctccgttcaataaaaaaccaacttttggggatgaatctggatccatatttgtctagatttatccctagaaattatttttttttgacggagggagtacgtagtagcatttatactgtcgagtatacgtgttcgccatctgccggccggaacagtccagacgctcacgataccaggtcaagtggatatgctgtactattgcaaagcggtattaaaaccgcgtcgtctctccaaagcagctttaataatttgtttaataatttccctgataatgaaagatcgtattggtttcatgtagtgaagtgagcctacctcaactaattaggttttttttttatagaatcagttcactcgaatttaaatattagatttaacgtgtgtgctcgtatttacaactatttattattttaat

SEQ ID NO: 37533 - DNA, 539 bp, Oryza sativa
ctcggtacccatctgtgtaattagttatttttttcgtttatatttaatactctacgtatgtgtccaaatattcgatgtgagagcaagtataatagtaggctataagcaggctaaatgttgaggtggaggagaaaagagagaagagagaggagaagcgggctataaacttacagccggcttgcacacaagaaccaagaaactctgtgagagagacaagtgggccctatattaattgtaaagagctaactattatatgggtagactaagagaaggctataaataaccttatagccaacagattggctgtattattagccttgctctgtcagggtgaagaattttaccgaggatctaaactggtccatactctcatgcataatgcctttttggttgtaggcttggaatttttaataatttcatttaatgagctcgttttggaactgtgactgtcaacttgaaattggtccaacacatagccagaataaattggaccttttgctttcaaattattttgttaacctggacgttgcactttctag

SEQ ID NO: 37534 - DNA, 742 bp, Oryza sativa
agctcggtacccagtattggtatacaagttagcaagcgagtcttcataaagttactccatactatggttttggccactgcttccatctttaggcttatatataccactcagtgtgctacatggtacatactgtgtaagtgaaataaagggttccgagatcctattttatgagccttttttatcacagattcctgcactttggaattgggataaagcaggtgccagatgaatagaaatcgatgcctaatacacataagaaaccatagataaataataccagacacagaacattcccattgaattgacaccacgaaataataagaatttcagtttgatcccatgggtataacagtacaaacatctgattgaattattgcctaaggctttaagatggtaacactgatcctacacaatcttgggtaaccacctcacgtattttatacatggttgtttgatgttcttgctgattaaacttgattttaacaaattttttgtgatctcagacattctgaatgtttcatgtatgcacaagatgcatctcattgtgcagtatgtttttggaattcacacgaaacagttaaactagtgcgggaaactggaaaagttattgggttccaaggctcccagcagggaaaagttcttgatttaggactctttgttaaaagatggataaatggcacaccatgctgggtttcttttactcactttcgctggggttgagaattctctatacgtcttgggt

SEQ ID NO: 37535 - DNA, 727 bp, Oryza sativa
ctcggtactccttattttttatcgatatgtgagatgagtgaaaaatgaacctattttgagatggagggagtaatatatataattgctggtattaattaatataaacttgtatgtctaattaagtcattttccgtgagaatttcatatacatgttactaacataaaaacacaaaattgctcccaattctacatttctttgatgtattagacagtcaatgcaacacaagtcggagagttctcgaagctgaactttctggtaaatcaattatcgccccatatatggccattcggtgatggaggctgcagcggctcgaaatttcctgtaacgttcacatatatacatatatcgtggttaagcttatttaaatttattagttaattaatcactctctcggtcatttctggataaaccacttgacagtttatgtacatgaacatcttgacttggtgtgtcctggtgatggtttgagtcttctgaaactgactgacgatgcataagcatgtggtttagaaactctggaaaatcacccattgcacgaatgggcaaggggggggtctccatcataaccacatcaaagagaccatcaaattaatcacgagtaagcgtatcactctagaactcatatctgagagctatatactttggtattgcaaaagactagacactatcaaaattcagtgggacagagctactccctttatttttttatataccatacttttatat

SEQ ID NO: 37536 - DNA, 728 bp, Oryza sativa
ctcggtacccccaaccaaacagaaaacaagaatttcacctccgggtagggcgggaaaggcggcggcttggaggcttcgtcgtcggcggccatggcggaggaggaggagggggtgggggagaggggatggggaattttcgctcacgaagaggaggatatatgaagaagaagagatggatttggatcaggaatagataagaaaatatggaggaggaaggaaggaagaggagatggatgggctcgccttctttatttcttttttttttctctccatttttttttattgttaagctcggctgtgtcacctgtgtgagaggggaagtgagaagatgaggatggacggctgggatgagtcgatccgccgccatcggacggcgcggggagggatgggtcacgcggatcggtgacgtggcaggggtaggggtaggggaggggagaacgcgcgcgctcgagagctttatgttttgtttgcttttgcctcccgtcccgacccgacccgcgggtgccttttttgggggagctgtggaatgacggtattgccctccgtggtggcctcttttttttggttttttctgtggaagtgggcggtggtcaggcctgtgatttggctgcatggacaaagcggaaatgccctccctcccctgagttgggtgtgtttatatcggtattattgctaatattgttacatgcacagctgaggatgtacaacggtatagtgtggctggaaat

SEQ ID NO: 37537 - DNA, 541 bp, Oryza sativa
gtcaaacaagccacgtaggcgccacatcagccaaaaaccgcggaaggaccttgtttgcctgattttcgtaagttgggggacgggtcgtacccggttttgcggtcaagggacgaaaatcggactggacgagaaatagaggcacccaaagtgaacttattccaaattctgcagctcgtttcagtaggaaggaataagttcactttgactcccttacaagtgacccgaatctaattcatgaccctaaaccacaaaaccagatatctagacccccaaactattgaaaccagtgcaatttaactccctgggtggttttggaggggcggttttgctgacatggcgctgatgtggtggtgttgacctagtacgtggggttgacgtggcgcttaggtggtatttgaataaaaaacatatatgtgggacccgtttgtcattcacacacataaattttgtggggtccactgacatatgggccccacaagtaatcctctttttttggttcctccccttttcctcccattttttctttctttttctttctctg

SEQ ID NO: 37538 - DNA, 524 bp, Oryza sativa
tactcataccaacaagttacaacttcttttttggaagccgatctcgaacgaattcttaggttgcaacccaaaagtccaataaatgtgaggcattgattcatgccttgatcaatggtgaagattgcctcatcttttgtgatgggaagaaaaaccagcctccattgaaagagtagagtgtaacagcaacgattgaggattgagaagaaactagcaaaacacaagagagagagaagagagtggagaagaaaagtagctgccagatgtaaaagggcccggcctcggagagtgtggggcgtcacactgtgctcttagcctattgcagcccaaaagtccaataaatgtgagccattgattcatgccttgattaatggtgaagattgcatcatcttttgtgatgggaagaaaaaccagcctccattgaaagagtagagtgtagcagcagccattgaggatgagaagaaactagcaaaacacaagggagggagaagagagtggagaagaagagttgtaatttgttcggcttg

SEQ ID NO: 37539 - DNA, 572 bp, Oryza sativa
ctacctctacccctacctttttttgtctttgtagccaatcaagcttaaaagccatggataaatggagaaaaataaaaaagataaacccagcatgatggcctacgagatgacctgcaaggtgggtcctcccaaggtgagtgcacttgagaatatctcaaagcggggctctcctacgtgtgggcccaccccataaaatgtggtactttgccttttgggagcctgtcatgtggggccccgacctacctctcgatcatgaccagctagcttaagactaaaaagcaatcaaaaacatatttttttaaaaaaacacttggaatccgatcaaatcattccatgcatgggctttttcatgggtgagtgtgtaggtgtttttacatttggtcactcatttcgcttgcgattcattcatcacaaccggctgctttccgttgaagtttctcggagccaaaccagttttaagctttaggtgaacagaacgaacatttgtgtacacatcaacacagctgtgttgcttacttgctttgatgggagctagccgccatgtgttaattaattaatttcttgaaagcaat

SEQ ID NO: 37540 - DNA, 1043 bp, Oryza sativa
atctaaatttgtcttttttgtttctcgatgtgtagatcgaatttgaacatgaattttggtggactagtaggtatcattatactctacattgttaatttttttcagattttttcacaactatttgcatcgaatttgaaagaaaaaggtatacgaggggatatcccctcgagggattagaatccactcctcatatagaacgacatcatcattggagcagtattttgaaacccccatcagggcagacagaagaacgacatcatcattcgatctcattaaacaatagtcgcgttaacatcttcgagaagaagcttctctttgaattctcatgccagatttaggcaacacggataagataacacgagccaactcgatctactatagtgcagagcccaacatagcacgaggatagcaaaaaaaacacggtgtatatcatcagcatgcatgatagttacaacacgaggcaccattgaaaggaacaagaaataaaagcagcaagttctgaaaaaagaaaagaagtagaaaagaaaaagaaagcaacacaatccatgcacgcacgcagctagagccatcgagaacgaaataaagcaagaaaagcgtgcggcgacggagctctgtttcccgaatccttcttctccaccgatcgatcctcgggacgatcgagaggttggcaggcaggacgatcatggcagtctcggcttttgggctttttcgaacaagagttccagtcagtctcgtcttatctgccaaagggtgaaagtaggaagatttttgactgtggatgttgtggcgcgcgctagctgcttgagccacgcacgccgagcttcttgacctccaccttgagcgacttgaggtagcggacggcctcgtcgaggacggcgggggtgtccatcctgtcgccgccggggatgatccccttgagagtccgcatcatcttcttcatccgctccttcttcctctcgccgccgccggcctctggcttccgcccgccgccgcagtcggacctggacgcgccggacgagcacgtggagtccggcgagcccccg

SEQ ID NO: 37541 - DNA, 551 bp, Oryza sativa
actgacgctgaatgtggtgaaactataatgagctatcaaatttcatcaaacacggcagaagacattacctgtttgcagcaccagtatcgctcacattcttctcagccttatcacctgcagaagcttcaccctcccagacaacctcggttactgaaacagaaaagcaagtaagaaaatcaatgtctccaattaatacggatgtaaagcagaccagggaattaaactaagatgcatgttacaataatattctgacaatacatggtaacacatatcagtgccaccttaatattctgtaggcattgtgagcatgcagcactgcagccatgcacccaaagtaatacccaaagtaatacggaaaaaagcaccatttccatgatttccttacatgagcttaaaactagaagattgactataaataaatctggacatactaaacgtcactatagtgtaaactatttcgttcgtctatattagactaaactacacttttctgtactatccttactatttcaaaagaactgcatactgtctttattgctttgttatatagg

SEQ ID NO: 37542 - DNA, 668 bp, Oryza sativa
gtctaacaaaatatattttttcaaactgggagatgatgtgatatgaatgaatatataaaagaaaggttatatgcagagctcagatggattttttatgggagagtactcagatcagggcgctaggagaaacgatgctcgctcgggcgcttcatccgccattcaatctgggtcactggaatggtagtgctgttaaaaaaaatcggatgatagatataggaagtgaaacagcatacacgatagtgtcacgcatctcttttaatttttttttgccacacgtttgatgttatgctcagatatttttttggtgggtatgtgataaaatattttattttaggataatgtcacacatatcttttgttttttgccacgcgtttgataaatattttattttaggatttgtttgtattcatgttgaagccgcccattataaagcactataatgtgattcatgtcacatcaccttttttcgcgtgatgtgataaaatagtttattttgggacatgaaccctttttgtatgcgtgcgttcaaaaattagtttattttaggattttttttaatcatgtttaaatggacagtccaattaaatttggtaaaaaaaaagcccttaagaacgggactttacatagcccagtggttaaggaccataatggtggggaaacttggtttt

SEQ ID NO: 37543 - DNA, 580 bp, Oryza sativa
  unsure (1)..(580): unsure at all n locations
ttgcatattagtttgtattaattttatgtgcaattaccatttgtaaggtaacatttatagttttttattttttaaaattttttaaaagaggtttaaaaatttagtagcattttgttatgttcactaaccattgtttgaaaacttattttaaaaagtttgaaacatttaagtaatatttacatttgaaaagtagtaatactaaggtttatctatttgtatgtacaattaccatttttattacaactattgtagacattttcaaatcatagaaatgattttaaaataattatgaaatagaaagggtcagttctgcaaaaatctgtccgcctgcgaagattattatgccgagtagggtctacatcttcgcaggccgaccgatagtaaaaatgatcttcacaggtggaccgcccgcttgcgaagatcgttttcctatataagggcaagcccgccgcaccaaaatttctaagttcaaacggcaaccctagaaattttggcgctgtaaggtgccaaattttttcgccaccgcacgccttcgncgtncttcgccgncagcttgttgtgaccttcacccttcgaccat

SEQ ID NO: 37544 - DNA, 1297 bp, Oryza sativa
aagctgcagaggcaggtgaagctgacttatctagagagcaatggcccgctgcgggttgaaggatgagagggtgcgtggtggggaacaagaacgatgacgagatgaagccgctcttgagcgtgacgcttcaacacgcttaggccaggtcccgctcacggagttcgctccgactcatacacgataccagcgccttcctggacggcatcgccaccgcggacgcgcagtactcgcatatgtccctggacatgcatccgttgggaagagagagaggaggaagatgggttggctgctgtcatttggggtccacgtggaacccatgcagtggcggagccaggattttaaagttgggtattcccgtctaagcgttgagccgttggccgcttctacccctcgcggctgccggccacccaaccggcctgactgcctgagcttggcggagtggcgggcgccacccgctgcccgccgcggcaatagcctccccctccgtggtagcgcggtccagttctcgccgccagttgccgcctcgccgcgccgccgcctagggtttggaaatggggagcggcgcgagggagccgagccagggagggatgggtcatggagggagagcgagagggggccgtctggaagagtggtggctaagtggtggctaagtggatcaactgatgtctgatgggtcatataggctggttgggctgtgtttggatcgaagaattgaggatttaggtgcactaatatatgtacatgtgtatagggctatgtttggatcgaataattgaggatttaggtgcactaatatgtgtacatatgtatatattagaaatatacttgtttttcgataaaaaagttgggtattcccgggaatacccgggaatcatggtagctccgcccatgaacccatgctactaactcagttgttacgtcaaccaaaatcaggagagatattgcctaaggatccaatatgatttggttttgcaagattagtaatgtgttatatatgttactcccttcgtttcacaatataagtcattttagcatttcccacattcatattgatgctaatgaatctagatttactccctccgtttcacaatgtaagttattctagcatttcctagatttatattgatgctaatgaatctagacatatatatctatctagattcattagtattaatatgaatgtggaaaatactaaaatgacttacattgtgaaacggaggaagaattttcggttaacgatgattctaaaactaaacacttttccataaaaagagggacccccagtgaacatttttct

SEQ ID NO: 37545 - DNA, 511 bp, Oryza sativa
atatatctcttctctatctctactacttaaaaaatacaaagtgtttcctccgtccgtctaaataaaaaaaatagcgaaaaaaaccgaaaaaaaagaagtccgattccccttaaaaacagggaaaagcaaaaaaaaagagtttgagaaaaaaaatagcgaaaaaaacaaaaaaaatcgtagatccggttcccttaaaaatggggaaaaacaacgacaaaaaaacatgctgtccgattcctatgcaatggaaaaaaacagtagatctgattcccacatatggttttcctgttttccttcttttttttcgtttcttttcctttttttctttcccttttttttcttttcttggttttttatttcttaatactatatatgtatacaaactttatatacacgtatacaaactttgtatactgtatattttttatacacacgtatataacaaaaacctttaaatcaacttttttgaatttaaattttggatgcggctggtcagccaataagcgaacca

SEQ ID NO: 37546 - DNA, 782 bp, Oryza sativa
ccctcgggcccgaccccccccccccgagggggttaggccacgtgggtgatcgtgtctgcctcaagtctctaagtcatgatactcccggtcccatgtcaccgacacacacctacatgcacacacgtccgtggacgacgaacggccgacgatgagcttcggtcatggacgacgaaggaagggccgacgacaaggttcggccgtggacgatgaaccggccgacgaagccgttcggccgaggacgtcttcgctcgtggacgacgaaaggccgatgacgaagccgcatgtggacgactgcgagagagagagagagagatggcggcagcggctgtggagcggccggcggcggtggagaggtcggcggcgcggtggaggggccgggggggaagcagccggcagcggtggacggtggcggcggtggagcgctagcgcgcgagcttgcgcgcggtggagaggtcggcggcagcggcggagcggtggagcggcgccagagcggtggagcggcggcagaggggcgcggtcggtggagctcggcggtggagccgccggcgacggcgaagcgggcggcggcgggaacggcctggccgcgggggagctggatcgatggccggcggcggggttgtcacatactgattttcgttttaggatttataaattatgtaataaattattatttagaatttatattaaatgttcattaatttacaagtgaagttagatgtgggaaataaaatttcctaaatataaagcatggctggatttaatttttattaaattctccatgg

SEQ ID NO: 37547 - DNA, 2312 bp, Oryza sativa
tattattagttttagtgtgaaactgacatgtgggtcccataggttttattatttttctagatcggattgccacataagcgccacgtcagatgaagaccgagccaaaatagccacgtgggcgccacgccagccaaaaccgccaagggaccttgtttgtccggttttcgcaagttgggggatgggtcatatccggttttgcgcttcagggacaaaaatcagactggacgacaaatagagggacctaaagtgaacttattccccatataaagcccactctctaaagcccatcagccacaacgacccacctagcccaccttcttcctatcctctctctttctctcgctctctttcttttcctctcgctctcccccgtgccgccgcccgccgcatcctcaggtctcactgccatcgccgccgctccacctcacacgccggccgctgctccctgcctccggcggccgccccgcagccgctgccggcctgaatcggtttcatggctcctcatgagcctgcccccaagctaaccctctccaatcgatgctgctgcccaacgacgaagacacccgcctagagttccagattgggattttccccagcttcagcaccccttgagccaagcatggcttgtctcccccgagttcctcctttctgatcatccccttttctccctacttctgtgatgtgatttgattggtactctcttgtgtgatagcatgctctgaattgtgatgcttgtgaactaatcctagcgaccaacttgatgatgctataatcaggattgtacttactgtttctagggttctagataaattggcttgctagggttggacgaataaatttctgtatgccatgagtgaatgaatgaatgctgatgcaagtgcagtactggaattagaaaagctaatgaaaatcacactaacataattaagtccttgtatatgcttgcatgatgaaataactgaatttggcacaacagcaggatcatattctagaataaatcttattgaatgatgcagtaatttacatggtactatactttgaaaatcatgccaagatatgtactatagagaatggaacaccttgaatacagatagatggtaactgatttctttggatgatttactgctactgactgtatgtcatgactataatttactagattagagttgttgatgcagggaaaaaaataaactattgattaactaactatttactgtggttttattctgagagtatgattttaaacattcgttctgctacacaaatgatttggtagaaaaaaaaaacttatatgttctgttaagttattgaaatttagtagaactacgactatttatcactatatgcatacttagatgtacttctattgtctcttttctgtgtttcgtagtaaagaactagatacatatgcaaacttaacccagattcataaccaactggtttcgcatgctattctacaattcaaatgattaataatttatgatggttcctctattaagtctgggttgattttcaatacttttaaatgaaatcagattaatatacacataccctaacctttccaagaatatgcacagcttagattttactttgtttgtatgaccaaaatctgaaagttctatattttttttttaagtgcacatgcatgatcaactatctgaataaaattcatgtctttctttactaatttcccgttcctggttatataagcagttacattgtgagtttttgactgtgtacataggcataggtagcttagtttcagctacagagattgagcagattacattctattgctgtctcaaaaggtttctgatggacattatggtgttacaactatcttaatttccaagttcttaacgtatggggcaaactgaaaagtgatctgtgctcatgccagatcctaacaggggacaaatgaagtgcagtgttaaagttgcaatggcatttcaaaaaaaaaaaaaaaaacattcatctttgatttcttgactggggctcatgtcgtggccacctccatcctcctggttgccaaccgctgaggaggcgcggtgcagcccaccgcttccatctgagattgttgcgtgggcgactggaagcggccagaggttgagttcctgctggacaactgtgggcgaagaggcaaaatggctgacgaaggccagcggtggctggagattgatgatgaagcaccagtctgtggaattccttttttccatagccacttagcccctcctttcaagataacttctgtatgtttgatgcccctctaataatagcttaggattttttgagatatcgatagctacaaccag

SEQ ID NO: 37548 - DNA, 591 bp, Oryza sativa
caaacaccagtcatatcaagaatttctaacaatcttacagtagtaagaaattatgactattgcatttttatatgaatgggttataaataaatatcctccttaatgtgaaacggtgtgatatccatacagagcgtactagtactacaagttcaagggtggagaacagacccgaacaagggagaagctgctagtacgtacctattggccggtaatactccactcacttaatgtataccaactgtttcacaaattgcaaattttaactatcttttatgatatgtcatgaagtgtcacaagcaaccacgaggaactgtcctttgcgggtattacgcttgctaataacttaaagttaatgggaggtacatgactaacgcggaggatctaactctctatactatgtgctagacagcttcatatatttatgacactaatatattatttatcttcaatgcatgcagctgccaagattacaatgtcgaacaagcgttgacgatacacgcataaaaaatatccagcgtgatctgtgccacttcatccaccatgagtgctggcatgtgaaaggagatttcttctaactagagggtgccctat

SEQ ID NO: 37549 - DNA, 589 bp, Oryza sativa
aatgttatgtttgccccttctccaaagctacagagatatttcaacacggtttcttatatgagtatttgtactacctactatatactcattgtgtagcaatatatggatgacatccaaacatgccctgtattctataggggatacctcaaaattctgtgccattatgcaaaggaggtaccaatcgtctactaatctgttgtaagtgatgtactgttgtttttattaagctaaagcactaaatttttctttgtgctgcagtgctatagatgagaaaagattcaattagttcatgacgaaggtatctatgagaaaatgctgcaattctcatatcacctaatgattgttgttttttctaacctatactccacattatgtaagatccattctcctctgtcattgctacttttttgtaagtgtacatgattgtacaaacaattatttgagcaaacagattgtattcacatttaaatcttggtgatagtcacaatgtgtacatgcatatgtgggtatgcttctgacataaagttcttttagacaatgtttatatataattcttaaaagttacaactgtagatactgtggctgtgtt

SEQ ID NO: 37550 - DNA, 577 bp, Oryza sativa
tgataaataatagccatgctgcatgttctagcttgagagtataagaaataatatgcaaattaaggaaatgagagacgtttggcttgcctggaacagtgcgccttgtggaagtaatcggtggtttttgatgccgccggcgccggtgcggatgaagatgtggcgggcgcccaggcttgttggcagggcactggtcagctacggcttgcgctggtgcccggcccggctgcagcacacgcgccagttgtcgcagcgaaacgtactcgagccacccgtcgtcgttgttagatagcttgtcgtcgatcctgttagtgcgtgtactggtcgctgaagtcggcgatggtcgataatcagggtgaagatatgtccgccatccttgtctgtccgatccggatatacgtacgtatatgcctcgacaccacgccctcaggctgcacgcgccactgatgcctcgccgcggcgcgccaaggttggacacgtcagtgctcgtggcggcctccacggtcgcccatgcatgatgcgggtgcgccgtcaactcagcatcaatgtagtggggtaccgagctcgaattcgccctatt

SEQ ID NO: 37551 - DNA, 643 bp, Oryza sativa
ctggtgctggtttgctagttgatactattctcagagttcatggtaagatgatgggttgattgtgtaaaatatggttgtcagttgatgaactatagtttacacgttcaaatgatttggttcagccccaacagtagatgctgaattaactgagccttttgggttccgaattaatggatcaatgtgtaaacacttttatgtatggatgatgacaattatgttttttcctattatacgcgtatgaacagtaatgtaaaatatatatgcatttgcagtacatacacacctatcggggcatttaactatttgccacttttagatttggcaattaactatttggcatacctatctcaatgacatgtgggtccacatatgtctatgatatgtgggtctaatggcaaatagttaattgccacatctaaaagtggcatatagttcattatctccacacctacacctcactgacaacgctgggaaaaaaataggatgatactccactacagtttgtcactaattatgcattaattgctgccaacaggaaaaaactgaattttctttctaccctcaccaaataaccttcatctctttttgttggtaacaattcatctccacattaactcatacgctaagctgtttacaggaggcg

SEQ ID NO: 37552 - DNA, 784 bp, Oryza sativa
attgaaagccatgtatatttgtccccattttctttaccatggtatatttatccccttttgcactttggaccaccctctctccatctatctcttctccacctctggttccctaccccccccattcggaccttgattgacaaggcgtctgtgtgctccttttctcttgaaccgcgacattcttcctcccaatcccatttctccatcatgcctcttagcacctcgaccacaaacgccactggatcaagtgaaattggaggaggaggaggtcaagcttgggagccatgagagcataggcgatgatagagatcgagctcatggtcttgatgatgctcaagtttctggtgttgcaagtgaatatcaagttttgggtcttgtcgatgccgttgatctccctctcctcatggagcagagctggagggcaaagtagtgcaactgcatcggcaatccccatgaagaagtaaaagcggggtagtggcagtcgtccccaactctggtcagttagatctagggaaaaggatggcatcaatggtttcatggaggacaagaagaaggaaggaggtagtttttccttactccggacattgatatttagaatgaagctgaggtaacaggcaacaatgagcttgtagaggtcctcgttgtcgagcttgagctccccaccgttgtcttcctacaaggaagagactgagcttaatataggggacaccagagtcaaatgttgagcttgagctcgggggaggtggcaaaccagcaataacaggtggggcgggggtaccgagctcga

SEQ ID NO: 37553 - DNA, 506 bp, Oryza sativa
aaatctaaaaactagcatcggatgtaaaaatagacatctgattgatttgttctcttcaagtcctaagtactagctgtgttggtgcatgcaagtatgccatctaatctgatttcaacatttttcctgatttgatgtctctatcttaattagtttgtgagacgactaggcaacttcagctagcgtgtcatttttaacagaactccctcacaaaaccaacgtacctgatccgattggacctgctgataactattgttctccttgcattttctgtcagggcaactctctcaagcaagccgcagccagtagcaaagaccgaaaaaagcaatgcttcgagtaaaacagccggcaacaagaaacctgccaaggctggaaccaagcaaggcaacattatgtcattcttcaagaaggtataagccttctcgcttatctgacagagttattcaggaaggagtatctgttgttgccctggctaaagctaccgtgccaagctcccaggcaactgtagt

SEQ ID NO: 37554 - DNA, 695 bp, Oryza sativa
tttgttgttttttccattcacatgcgtttgcagcttggcaactagaggagctgacttctggattgatctcctctcttattttccaacaatgagcatttgttgcaggtaatgagcttgtacagcaaaaaaggatcaaatttgaaaccatctgttacagcttatatgtgtttacattgaattagcaagtacaataaagaaggctcaaatttcccttttattacagttaatgagcttgttaaagtctgtctatatattaaggaagaaaattaatgctgacaaattagttgtcaaaatttggaaggcaaaatgtggttttttgagccaagtaaaattcttggagttgaactatcctatcagatcacaattgcgtgattaaaatggaagtccttttacttgatattgatcaataggttttaagatgaatctttgatggccggcttagtcacctgttgctttctccattttctatattttatttttaatgtaaagctttatacaatataagatagtttctcgcaagcactcttggttggtgcataagcctaatgtttttgtcatatatggaatggattggtcttatctattatatctttaataacaaattttaagatataagctttttgtgacttctggtatttttgtaatcaccaccgcattgttcaatacaagacagcctactattcattttattgcca

SEQ ID NO: 37555 - DNA, 1002 bp, Oryza sativa
gaagattgcttcatcttttgtgatggaaagaaaaaccagcctccattgaaggagtagagtgtaacagcaacgattgaggattgagaagaaactagcaaaacacaagagagagagaagagagtggagaagaaaagtagctgccagatgtaaaagggcccggcctcggagagtgtggggcgtcacactgtgctcttagcctattgcagcccaaaagtccaataaatgtgagccattgattcatgccttgattaatggtgaagattgcatcatcttttgtgatgggaagaaaaaccagcctccattgaaagagtagagtgtagcagcagccattgaggatgagaagaaactagcaaaacacaagggagggagaagagagtggagaagaagagttgtaatttgttcggcttggtggctcttacccaatcttcatcaagtcaggaggctcaaacgtgattggattggcaccaaacttggtgagttcgttcctcactttgatcacttcaatctgatcagtttatgtgagaatcggttgagaagagcactggatttgagtagtagtttttcagctcgagttactgcagttacagcttatgcaacatttggtagaatgtcagtttgaggggtcaaatggtgatcgattgtgctgttttttttagagtttggaagggactcatacaccatcatttctatcaagtttcgtacaatttgcatctataatttgggagatcttagctgagaaccgaagaggacataatctactatttctcgcttgtttgatgatatacctcttgttagttttgatggttgatattgatgatgtcatgtgtgcaacttgatgttatagctattagctattgttgtgatgtgtttctaaatgttctagagaagactccatttgtatccattgttgattatagtggaagttcggagtggaacattggtcccgtggttttttattcctcacaccgaggatgtttttccacacaaacaacatgtcttgtg

SEQ ID NO: 37556 - DNA, 1647 bp, Oryza sativa
gcttagacgggaatacccaactttaaaatcctggctccgccactgcatgggttccacgtggaccccaaatgacagcagccaacccatcttcctcctctctctcttcccaacggatgcatgtccagggacatatgcgagtactgcgcgtccgcggtggcgatgccgtccaagaaggcgctggtatcgtgtatgaggcggagcgaactccgtgagcgggacctggcctaagcgtgttgaagcgtcacgctcaagagcggcttcatctcgtcatcgttcttgttccccaccacgcaccctctcatccttctacccgcagcgggccattgctctctagataagtcagcttcacctgcctctgcagcttcaaaactccaaaccacatatctagtttgaatcaacacattcaaaacctcaggttctgaaaattgcatatcaagatacatttgaaaccctgtgttgaattgaagaactatatcgatatgagcaattttaccatttaacatttgatacccaaaggtacgtaccacaaatttttggtacatcgagataccttctagtataaaatttagtacctcgaggtactttgtagtataaaatttagtacctcgaggttttaaaactttatatgcaaaatgtggtacctcgatgtaccaaatgttggatggtaaaattactctaccggtatacgtgtgcacattgcactacacactactcctctcacctcttgtactactacttcctgtttccctgcgaggcagaggaggaagagagacgcggaggacaccgtcgctcacccacccatcactcacctgccgcgcgcgtggccatgaggctccacgcgctctccgcatgttctcttttttctatccccttttaatgaggttatctttagtcaagataagtgctaaccaaatgaacacttcgagtttaactgaaattttaaattcacatcttcttgaaagggtaaccacttgtttctattttcattgcatcataaaatgatttgactgaaaacaaaatcccattttttgtgagtatcccaaccattttgtgtctctatgtagcaattaattggtagtactgtcacgaaccttataagatttgaattcagatcagacactttccctcgtgaaattgctaaagtggtattgtaaactttttttctaagacaagcttctatttcagaaaaaaaaagtgttttgggcattatgttgttacatcttcaggtgcatctggtagatgttgggctaaattctctccaattggagcctgtgtggcatcccagctaagggcttaatagaattaatagaatactcataccaacaagttgcaacttcttttccggaagccgattttgaaagaactctgagattaagcgtgcttggcctggagcaatttcgggataggtgaccgactgggaaatttttcccgggtgcgcacgagtgaggacaaagtgggcctcggagagtgtggggcatcacagatggtatcagagccgacccttgcaactatacgtatatatacgccgaaaattgtttgtatatacgtggtgctaataggggatgttcctggcctgggttgaccaacgaggacgtcggtatcttaaggggggtgagaatgtgacatcccggcacaggtcttaatagg

SEQ ID NO: 37557 - DNA, 7601 bp, Oryza sativa
cccttcatccaaaatatagttgtctttagactatgaatctggaccagattcatagctgaaggtagctatattttgggatggagctagtagttatttgcgtgaaggtggagaaaggaaggagtggtgcggttttataagcacgtgtagtacaaaagttgaaagtggtaagagtgataacgcacgttgggcaaagcatccgtggtctccaaaagactatacttttctacatgaatctaaaaaagtgcctatttagatttgtgcgtacctaagagtgaactttttttagatgggtcttcagactcatagctatatacgtggttaataaaaagataacacatgtgacctacatgaataaatatatatgctatggtcttaatggattctacaatgatacgagacatctaggctggagtaacgttcaaatctctactattagaaaaattaattgattcaggactaatctcatttttgttggtcaaactgcattggatatagagtatttgtgttggtcgtccatatgaaaatcgcggacagcactacggcatggcacgtccgctagggaatcagtctagtgctggttgcttctgcttgcaaggcgtgcagtgtcatttagagaagcaaagtttttcaggttggttatatttttgtcatttttatctattgtgatgtataaatatactagtattaattatgttgggtctatgaaaaattattcttgtcatggaaaggtctcgtgtacgtaatcagtgatcacacagatagtgttttctgaattcaaacgtttgttggaagaccacttcagcacagccaaaatttgtgttcgctttgttgcagcaccaaattgctgctgttttccgagcgtaatgtaagggtcaactgatgtggtaaaaatcgaaactgaataacgtagagacatgcaggtaggaacatgccaaaaacggtgctagaagtcaaatttactacataatcaaagatgctcaccaaggcaattcaagaatctgattttctgcaacaagctttacaaatgccccattcatcgaatggccgaacttacagtccatcttctcataacactaagcaacagtcatcgagcagccgacaatcctatatgattacacagggtacaagtactgtcaaatttacatcgaactaacacagtacatccccgttaatggatagcacactaagcaaagggaaaaatcaaaccatccttgaacagctgaaccccaacgaaagcatccctgtgtggatcaaatcacatgaccagctgacaaaactggccacaatgtagaaccacaaagtagaaaattgcacaaaattgtgatatgatcatttccttacagctcttcccatcctcagtccctccactcccttgatgtaatctctcaacacaaaaaatgttttcttgcccagagtcatggtttattgtgtgcatggattgaagctcgtacaacatgatgaggtggtggagctttttcattaacaagaatctgttctggaaagtccacacggattgatttgaactgatagcgctgtttgacatcaaagaaatcaacatgtaaggtagggctacatttgtaaagggtaattaagcttttgcaatatattcatataatctgatgaaattataattctatgaaagtactttctaaaacaaaactatacatatgattcaacatgtctaaaatgacatgttttcaagaccaaacggagtaactactaacaaatcgctacttgtagcaactcatttaaataataagatgctaatacatgaaccaagaggatttggttatacaagaatacaagggtactagtaccaactaccaacacacttcttttacttccttttttccttctttgtaattatttctaaactctttttattaatgaaaattaaccacaggggattcctctgctgtgtttgcattaaaaaaagcaacgcggttgttttttttaaataaaaagaaatgaactattagcctaactctctactaattaaaaaaaagcatgcggtagtgtggtttttgtagaagaccacactcgaggcatcaggcctgacttcatgagcaccaggtttttataaaatgtactctattgtccatgctttctggtgacaggcacatttttactaactagatatggatcaaatatcaaatcttttaaaataaaaaaattgaaatcccatacctgttctttccaagatatatccagaattctgtagtaaggatccaacaatgccactcgatcaccttctttaatctaaggcatataaagtttacattagcatagtacaggatattagaagaaactacagaaagacaaatttgcagtcaacaaaactattttgcatattggaatataagacagcaactatgtcaacaacagagaactcacaatattttcagcaaatatcttaaacctaaaacatggttggataacttgatgggataagtccattttacaccctcgaactctttgctttgtctaaagtgcaccctcaaactctaaaaccggttatatgacaccccctaactttcaataccgtttaaattaccccttccattcaaaccaggatggtttttcttaaattatgctgacgtggcaatccaatcaaccaaaaaaaatttaaaacaaataattggtcccacgtcagctgccacctatctcctacccaaaatctctttcttttcactttcttctttccttcccgagcgagaacgacaccggcgataagatcgagttcgcccttccccgtcgtcccccacccctcgagcgccggcgagctcgagctcccccttccccgttgccctctctaggtctcccttccccccctctctacccacgtgagacaatggaggcgagctcaatgagcaaggcagcagcgatggtcgcgaacaccggttgcgtcgaccccatgctccgatagcagatctggaggtggcacaaggagccgaggaagttgggcggtcttggtggttggagatggcacggacgccgacgagcttgagggggataggaaacgcaggtggtggcgagctccaccctccacgacctcagtgccgcccacctcgtctgcctccgccgttgcctctgcactgcatcgccgctgcggcaaccttcttcgaccttaggcaaggggacgggctctgtgtcgagctcagccaagcgggcgggcaaccccgtcttctccgacctcaggccggcggatgatggatggatgcggaatcaggcgtggcatgaacgcatggaggcgaaaggatgcgaagattgggctcgacgcgcgacccgcgtccactgccacctctcgctcactcgatccatcgccaagaccaggggcggcaagctcggggaggaggagcttcagtggagccgttgcttgagatgcggggggagggaggttggagttagagctcgagctcaccgggaggaggcggcgcttggggaggcagtgttcgagctccccagcgctgatctcatggctaggggtggtcaccagcgccgatccatggatgagagaagagagagatgtgcctgactgtgagggtgagagaagaggaagaggggctcaatgacgtgaggtcatacgccacgtaaccgaaaaaccactctggtttggttttgggggtaaattgaacggttttaatagttggagggtgttagatacccggttttgtagttgtagggtgtattttagacagacataaaagttcgagggtgtaaaatggacttatcctgattagttgattccatatgccaaaagaaaaagttaactctactccccctaaactaatgcgtcggcgcacttaactactagaattgggtcacttcacacccgaatgaaatttatcttttttcctttcaataatttatgtttctatttggataggtcagtagaacacaaggccagttaacccccgagtccagaaatatgaaaaacttgcaaatggtcatgaaaacattcagaaaatgtctttaaatacaggctcattatcatacctaaaaaaatatttcaatagacttctataagggtaaacaaaatagacaaatatggagtgaagtgacatggttttcagtgaactagtttaggggaataaagtggacctcttcctatgcaaactaattatttctttatatgttttagatactgatgatttcaaacacttgtatctactttttatataacaagcgaaatatcatattatgaaactatgtcatgtaaaagtataatgattttacatgattaacttaaggggcaattaattaccctttgggatattactgatcaagtatataaagtttgactgtaggtttccgaacatcttgcactgcatcgcatttctgaacagcaaggctcaatgagtcatgatagattctaggacatgcatccaattgaactatacagttaagtcaaatcaagctttgcaacattttacaaatgaccatgaagaaaatgaatactatgcaataatatagcaacaacgcaaaacaatcagcttactgccatcactacgataaaaagaattacaaagtgcaaatttccatttatgatagcacaaacattcactggtattaagagatcttactgcttcattccgtagaccatagactgagagtatgaaataagactgatccaagtcgcatgttaaataatacctgaaattatcacatttcagtataaatacaaaggtacgcaataatagaacccaatacaccaagattggtgttttagtatgccatctttgattgaatagagatgcatattgaatctgattcatctaaatgatcataccatgtttgagcagcatacaataaccccaggtaaccaaaactagtagcaaaagttctagttcaatgaggctaatagttaacacccattctattcatgtgaaaaaaacaaacccattctattcacgagtattatatttgcatgtttaactgaccgcattgtaaaacctattacaatgattacaatcaaggttaaatatgccagtcataaccgctcagacccaaaatactgtgcttaaataatgaaagaaaatagaggccaatactttattgaattcaactaaaatatttaacagaatttagttgagcagatcatgactagtgcaatcttactgcttatctttggcaaaaggtcctgaagttaaataaagctcaaggttattatttcagccagtaaaacaaatccaagatccttgcaaaaatgttgatgtatagtaaagcaatttttaaattcaagcttatcattgcagtttagcatccacaattcccagttataaaacagttcttataaggaaataaaggaaaactgttttggacaatgggtggacaatttgctgaaatattttcccttttgtggatagagttagaagatgaagacatgccagttacactgctttcttaactacaactaggtgcttcaaagttagcacactttctaccaggtatagtatctgtgtgcaaatttcaactttcagttaatgtaactaataattcttctaacaaaaagttgctaaattgctctatgctatttacaacaaaaatcatgatgttccaaagaagagcactcaggagcataaaaaaaatgtaaatttgtaatgggtctcgcataattaatattgatttcaaggattaagagaacctacattggagcaatgttgtcgtgtcttatcaaaagaatgactttccccaacacagcaactgtcttgttcaaaccctctgataggatgcctatggttgctttcttgtgagatgattttactagagagaataaaggagaaaacgtataaaaaccaacaggagtacaaaagaaatcttatacaggcttgaatatatgccaagtgacagtgaaagtattactgttgacttcactcaaagaagacactgatgatgctaatctcttggatcgtaattgtccctgtggaagaaattattcataagtacaaataaataagaaaataagttattccaaaacaaatcattgtcaattcatgacaaatgaaacttgaagccttttatgcaggcaaaaacaacttgaacttcagaatggttttatgattatgtgtggcaccatgcaggaattactgttcacgcttgtgaacagtaagcgcggaactctagcatctagttgcgttaggagacaatttgcttgagttagcagtttgattggagatgagatttttgggttgtttaagttatgtgttagcatattcgagttaaatctatccctttcttattaaagatatgttattagaccataaacggctaaatcactacaaagaacaagacacatctaccattcacatcaaccaaagtttctacctgaagttcatcattccaatctataatgttctctcttctgttcaaccaacgccgcttgcttgtcttctcagcaatattttatttacccaatgaactaaaggtttattagtcgcagtctagcatatttcgtaaaagtaactccatagatcgctatagttatgaaaaaagatgtattctattttgtgttattttgctttgttttgccaagttgcatgaatatggacaacataaagttcttatattcatggttggtaagtaggaagcctctttgatttagaataagataaaatgcgagttcaaaaggttaagatggaagaattttcatctgtttatgttaaactctggtctacatgccatagttacatactccctccgtcccataataagcgcagttctatccgtcttatttgaaatatttttatgattagtatttttattgttattagatgataaaatatgaatagtactttatgcgtgacttaacttttcaatttttttcataaatttttcaaataagatggacagtcaaacgttgggcacggaaacttatggctgcacttataatgggacggagggagtagaagataccttcattgcactatctagcttatcaaggagactgatgatcttctgaacttctgtatcagcaccaagaccaggatcttttaaagctgcagcttcaaatccacgaagtgctctttcatagttctctaggtatttgtcagcctggaaggaaccaaaacaaataacatattacacaaaaggatgtcctatacttggcggaaaattcagttgatttagctacccagtttaagttatgatccgggttactcactgtggcacaattatagtagaggtctggattacatttcgtagtctcatccttttcctgagcataaaatgaattcaattatattcatataataaaacaaacaaggccacccaaccacgcccacccaaaatcaggaggtgggggtggggatgggggtgggggtgaggggggtcaactctagcacccattacctaaccgttcgctttgcagactctaattagtaactactccctccatccgaaaataataatagggaaaattgattatagagcaccaaaagtttctgtttttggttttatagcaccaaaaggttccggttcattttagtagcattgcaagttacctccgttactgattttggcactatccaaattgacgttatctcccccaccttgccccgtctatcttcttcatcctccccaaaaggtgagttccattacatggc

SEQ ID NO: 37558 - DNA, 3140 bp, Oryza sativa
acgagatctggggtgccagtggacatcatcacaagctgcaggacgcacgttcagctgtccaggtgagctcatgtatggtcgtgcatccagtctagcttgtggacttgtggttcagcaacattgttctgcctgtatgatacccaccctgctatacttcagtttgtgcacattttttatccatgaaattgggattggctaacaaggcaagaggattgatgttggaacagcgttcatcagcaagttccagtcttccagagatgaagtactagcttgtgtatggcgtggtgatggtgcagggacgaccggaagacaggctcgagggtgttggcttttgggccagctttagtggctgatgtccaaggcgagcttgaggcctcaagggagatcaggaatggaacaggtgggacggccagcgcctgtgcgaggcctgagatggggagaaggattgaagaggaagatggtatattggtatattgcaaaaataatagaaagaaaaagaaaactaacagaagtttggatggagtgctaaaatcagtaacggaggtaaactttcaatgctattaaagtgaaccggaacctttcgatgctataaaaccaaaaacaaaaactttcggtgctctataaccaattttgccataataaaacctaggactagatggggcatttgctagtactagatacattgtactaggaaacgtcacatccggtcctagattcttatattttgggactgaggtaagtatcaaactggtacataatgatcatctacggtcaaatcttaaacatgccacctagacgttggtaacgttaagtattaggaacccttggaattgcaatgggacaacgtgcatacaagtcaccatacaaatacgcagaagagcccattagaatagggtaaatacacaactagctataagatacatctagcagtttgcactttgcccagccaaatcactctcttcccagggtaccccttcctttctttctcttgcatgactagtggaccacatcaggtttatttggcaaactgatcttagcaaactcaggtaccatatctaaatggacgccgggtaaacgaaatacgaaagaataaatgcatcttcagcttgccaaagcgatttttggcatggaattgattgtcactggttttaactgttggaaggtgcaaattcaacagtttgagttgagaagtgttttctggactcacacgaaagtagaaggggagtagaatggactcctgaataaaaaattggaagctttacacaaaaaagtggaaatctttcagagaatatatcttactttcatgaatgaaattatcaaaccaacagaagtatgaaatgcacaaacttacagcattttgataggctttgactgaatgatgaagcttcatgtgatcccaggatccactcacgaaaaagcttgtcagatatgcattacccagattatctatacagaaatgaggaataaagaatttttgtaaaaacagaaataaatcgggaaaaaaaaagagtatctcagaaaaacccattcaatgctgatgcagcaagattgatggacctggaacccatatatgtctatttcataacttatgctgagtgcttcttcatttagaaatataacattgctaattcaaatttactactcaatgcggtatttccaaataaagtggcactgaacataaatgttgatggttggtaacacatcactagtttttgtagtagtaaaactaaacagtgtatctttcggatggcattaagtgtactttaaaacttaggtggaattaaagtaattgtggtcattttcagtggtatgtaaccattttttctgtacttagcatctccataaattaggatatatgatcattcatcgatgaagaaacacctcgattaatggtcatttccttgtacctcagtatatgtatgtttaaaagtttagaagtccagaaagtgttaattcattcatttttatcattccaaaatccaaacagatcctaatgctagttttcgatgagatataggagataactagctagttgaggaaggtaaccatccaaatagtatggagatatataattttgtacttgcatattcactgcaaatgcataatgggctaacaacataatgtgataaacactgtgaaaaggagatcgacaacagctactgcatttagaggagagagtgcatctatggggagataaaaactacttcctccgtttcataatgtaagtctttctagcattgcccacattcatatagatgttaatgaatctaaatatatatgtgtgtctagattcattaacatctatatgaatatgggcaatgctagaaagtcttacattatgaaacggagggagtagactacagaagctcattggacttgagaatgttcatctttgcttaattcatctggatttgctgctttccatttcatacagaaagaggtccttaatacttcaactaagataaagtgtaatatataatcttattactaatgataaaactgaataaacaaataatagccttgtctgctaataacttaggtaactagctgcctttctgctacagcaccactcagataatcatatgtgagtagtaccatgtgaatgtgcacactacctccctgcagataacatatgcaggataaataaccaaatccattttctcttgtacagatgactaactctaccaatacaggaataagacctgagttgattcaaggatagtaccaaagcttttattttaaccaacaagcacactccaggatcactcatgaagaaagtgataatgtgttttgaggtagtactagtgatcacatagtattaagagtacaagtttacaactgaagtaattgttcgggcaaatctcaatttctggcatatatccaatggactaaagtaaatatatatgtgcagtacataaaacgacagccttctaaaggaaagaaggcaaagttcagaataaaatattgcacaatttcagttttatcttgaagcaataaaacactagcattggtctgctccaaacagaaaagacgatgcttaattttaggagctagttgtttttgttcgttccatttcacccgagggttgtgcgcattgaaaacaagaatgcatatcgcaaaaataactagagtgggttagc

SEQ ID NO: 37559 - DNA, 664 bp, Oryza sativa
ttgcaaatatactaatatcatgtttattttggctagttttaatagtttttatctatatccatggtcatatttttaaacattgaccacacatgctctttgattattagggatggaattcccagctaatagttacttctattctcttatagagctaaatttcacaactagaagaaatgatgtgcagtacaaaaaaccttcaatctagtttggcatcttttcgatataaacttgtaaaatctgtaaaatttggttcgaaatacaatcttagacattttgtacttgtgacggctttgtaaagctcaaagccttcaacactacattagattgaatgctgtgaaacatcatatacatgctaatggttttgccaacaaataaggagagccttgtggaggaaagtggaaaaatgcaatggagccacaataaacaaaaaggtgtgcaaagaagaccacccattctttaagcatgcatgcaaaagaggacaaaacaacaataccttgagaattctcaacaccttttaggaccttgaattttccacaatacaggaatcatttggttatgaaatcttaggctccttttttgtgactgccttcctgttgatattctcaatgcttacaatttcccccaaggccaaaattttttcgttctatatagattaattactcct

SEQ ID NO: 37560 - DNA, 1500 bp, Oryza sativa
atgttcacgagcgccactaaaacctcccttggctatggggaaggaagtaatttcatccttttgagtacgttgatggagcccaaatccagtaaacaaagaatacatgtggtctcttacaaatttttttttaagaattcttagatgtattctcttcttttatttatttagtccttatgcttcactctctttgctttaatgttacacaagttgcttagagatactgcactaatgtttggatgttatataacactttttttgccaactttgctcattattaggagttgaggaggctttttatataaatgaaatagctgaggataatatatatgtacttattcattgttacaaatattgcatcaaacatccaatagaagagaacttagcaacatcttaatgtttctctcttttctgttgtaaatgttgcatcaaatcttggatgaaacatttgactgcctaatgaagttcaatgcgacatttgtaacttagagggtgaagcagtgaaatagtattatacttgcatgtttaattggatgttgatgcaacatttgtgactaaggtacaaaacatcacttaaaacaatgtgcaaagttggataaggagttgtgcaacatccaaaattagtacaccatctctaaaataatttatgcggcgtctaaaaaaaagaagaaaacattcgaatgcaagtgcaaataaaaaagaatgcaagtagaccctagtagtctatatatttacccccgtcctctccttcattttgtgaagagctccatcaatgtatcaagtagagattatggatgagaggggtgagcagtgaaagtatgagttccttatctcataagatttgaagcctagcctaaacatgatcgccaattcttgatctcatgcaaaatttggtgttgtagaccagattacttgaagccaaggtaccacatgttgtggtcgttgtcctctctatgttggtgtagtggttgtaagagccccttacgtcaaatcattggctttatgaagttttcgttggaccattgtgttccgaatgttgtcttccttccttcagggtaccgtgcacaacctagaaaatggcccttcagaatggcccttcgggttccttctagtggtttgtgataatctaagatgaaacttttgagttttgggaggtggctaatcgtgtgagagatcatcatctttgcaaggagcccctttctctctttttgtatttgcattgatgggacttgaggggcaatccaatataatagaaagaaaagtgcctctgattatgacgcaagatcgctaataatatatgcgtgaggggacagagtggactgcgtccaagggtgaagtataatacatagctgttaaactagatgaaacagggtgaagcacgtacgagggatgactcaatacattgttgttaccacaaatcacattgttgttgtcatcaccggtcaaatcatcattatcaatgaaggaggttgtgcgtcaactcatcaccaatcaaataacgac

SEQ ID NO: 37561 - DNA, 629 bp, Oryza sativa
ttcctgcagcccattaaaggtaaaactctatcgaatgcttcgggcaccggtcctcccctggtctgccaggctgagtccggtcttgagctctatgatgtacccaaacattgagggatacaagggatggacaaggctgtcaccacttgcattctacctcactttccggggagcacacaacaaacaaagaaaatttctaacctagacaccacacctatgttattaattactactctaaccttgcgcaataacttccttctttatctaaagtcctagtactagaacatagtttcacactaagcgatgaaccaacatcgatgagaatatatctcacttaaataaactaactaaagaacataaagaaactcgaatacttaccttatagaaggaagcatccgctgaaatacaattgagagaagaaggccaacagtaccggctttctccagaactccatttgaagaatgccgactttctccggaattcaatttgaagaatgccgacagtccggcaaaccctttccccccctttttcccccccccaaaatccatttcggaggactccaacagcaacatactaaagtaatgctaaagtgagttgcactctattttgttgtcaagttaagtgtgtatgaa

SEQ ID NO: 37562 - DNA, 669 bp, Oryza sativa
caatttgtaactgaggatgtacatataaactcagattctttgctttacttgtggatggagtcaaagatgcagtggtgagaggaagctggaggcaggtagcgagcaaagaactgatgcttaagcaatgtgtggtctgatactctgatgtgttgttcggtaaaaaaatagaatgtaaacagtcaattatacctcactatgtttcttttcagataataacagtatcatataaactccagtgtaaagttgacattgcccaaaatgcaggtaagattttttttttaaaaaaaaaagtacagagagaacacttccttttcagctatcaggcagttgttgatggaagtgcagatttcgtggggtctgcttctgattctgatcttgctcactcacaacaagctttctttccatctctgcatgtaagacatcgattcagagatcaaattccactaggtgttcatggaactgcacgccactggttcaaaaagacacagaaatccagaaaaaagatctcaccaaacatgcacgaagcaccgaagcagaggtgaccagctatacatctcgggctctcggctctcccgtttcatgggccggaaagcgattcgacttgcgtgcggcccattttacttgggccggatcatggcccatctttgttaggtgaggcccatgatattg

SEQ ID NO: 37563 - DNA, 610 bp, Oryza sativa
cctaaagttggtgcccgccacagatgatggtcatatgtgacggcccataacgttaggcccgtttgagatatggaatgttatctcaattgggcctaaactacggcccgtcactgataggtgtcatccgtgacgggcttaagttttatgcccatctaacatgtctgtgcgaccatatctcaatcgggcacttttcggcccgattgagatgactttcttgtgacggcccgctatttctaggcatattagaggccgtcacagatagaaggatttataatagtgcttaattctattgttgtcttgggagctttgacgttatggaaacatcgtaattgttctgtcttcgacggtacttctcccaacatggctgaagcattgctacttgctagagaagagttgtataaatggggtttggcaagggctaagggcattcttgcccttgtgccgaacactgaatagtgtttgcttgtagtaggttaggttgtcttttggtatcgtgaaggtctattgtgtgtgttgtaagggttcttaccatctcctttattcttcttaatataacgatatgcagctctcctgtttgttcgagaaaaacaattgaatttgacataaacat

SEQ ID NO: 37564 - DNA, 581 bp, Oryza sativa
tcctcatcattaaaggacacaccttaactgactcaaaaccactaacgcacactcgaaaatagcctcacgaaatccgtgatctcaagagatacacagtccaacacaagttcaaacatagcctcactaaacctgaagcaactcactagtctcactaaaatcgtaatataaacgtatccacgtgtacgtaatatttgtgagaactaaaatttaatccatgataccaccatcatatcgctggtactttatcatcacattactagtgcttctttatatttgggataagtttgattctctaccttttgttttctgtttatatttcaatttattggtagtaacaaaccttgaaaccttgagcataaaaccaaaaccttacggatttaattatttggtaagtgttggcttcaacctaaagacttgcgaatcctccaatcggttttagattcctttgttaacttttcgcctcattattcattttatctaaacaaattatacaaatacgaaaacgtaagtcatgcttacagtattaaagaagtatttttaatgataaactaaagcacaacaaaataaataaaaattgtgta

SEQ ID NO: 37565 - DNA, 576 bp, Oryza sativa
tggagattggattccggaaaagaagttgcaacttgttgatatgagtattctattaatcctattaagccctaggccgggatgttacacttaccgtgtttaccacaagcggagtgggtaactgcttgatctgaagtatagctcgaccctttcctaggcatcggtggcgagggtgggcgtgatgtagttgggtcggccgggatatccggttgtccagctgccggattcaccgcggtgcacgaggggattgctcactgccttttgaggggtgggggtgaaaccttagcgtggtgtggatggttaggggagggttatgcggagggtcttgcacgatttccccctttgtagtatcatggtgatacttcggggcatggtgacatgtgtggaatcgtgtcttgtgggtacagttgtacacctctgacaagagtaaaactattcgaatagtcgtgcccgcggttatgggcgatcaaccagattcaccatgattagtctcacccctagattagcttaatgaactggtgtagttcaggtggttggttgggcctattgcaacgtggtgtagcgtaggacagtgattgg

SEQ ID NO: 37566 - DNA, 540 bp, Oryza sativa
  unsure (1)..(540): unsure at all n locations
ttgggccacaactcagcccattcggctatatgttaaaatacatacaattcatttcatgaccagttctataaatttatgaaaatatacttatagccattatatattatatagtttagaactatgcgaaactatacatacatatcatttattaggcttgatattgtatttttttatcccttcatatttcgaaggaaaaagtccactttgactcccttaaatattggccgaatctaattcgtaccccttaaccagaaaaccggataagatggctccccgaactattgaaactgatgcaatttgactccctaggtggttttgcaagcggttttggctgatgtggcgcctatgtgacggtgttgacccggtcttcgtcccacgtgtcgtcgacatgtagctcatgtggaattagagtaaaaacaaaaaaacaaaaatttgtaggaccaacatatcatccacacacacaaaaaaaaaaaagtgggacccaccgacatgtgggccccacatgtcatnctncctctccttcccttcttcctcctccct

SEQ ID NO: 37567 - DNA, 593 bp, Oryza sativa
atttagctctagcttaattaaaacaatttcttcggacgatttaacttggaggcgtgacaccacccacccccctcgttgtgggcaccccaccaccaccacgtcggcatctacacctggacgagcagctccccatccccacgttgcacctgcgactgcaacacgatgcgctccagcatgctctgcagccgctccttcaccgttggctccacgcctacctcctgcggcgcctccttgatggtagcccaagtcaatatatactgtggtagtgtggttaactagcaaatgtcttgctagttaccatcaaggttgagccacgtgaaataccgttggctccatagctcctgttgagacatgttttctaagcagatgagggaggcggaacattaggagtttttctgaatgactccacactttgtagcaagacatcgcgctagggttaccatcaaggtcaggtattgaaaactttagtatttgaaaatgttgtttgaagttgtcataatttgaattttaaatttaaattattgaaacagagtcatatagtaaaatgaccaaaccaaaagttgtatatattgatgagttgtacaactttgttg

SEQ ID NO: 37568 - DNA, 519 bp, Oryza sativa
aggactcaagttgagtcactcaacccctggtctccatgttcaaagcgagctgcgctagccaactaaccatccaagcaactatattttacaacacatatatagggagcatatattttgtgaatcgtggttaaacggtctgaccaacggaccggtgaaccaagggatcgaccgggtcaccagtcggtctggtttttcatactatggcaagtacccgtgcgcgtaggtgctctcaatagagaatataaatagaagagagagttcactctgctatctatcccggagatgcgaggttaaccagcacgagagaaacttaatggctcttctgtaacggctctccgccaggtacgttaaaaaaacgtaacacctagaaggagagcaccagtctcgtcttggcgcgcgtgtggcaatcccaccaccacctcaaccgcccaacgggtgctcttaattagcaacctatttaagtcgaggtccctccacattgctttccaatatgatattaatcccttaacactaattatg

SEQ ID NO: 37569 - DNA, 521 bp, Oryza sativa
ccacccccacccccacccccatcctcgccgccgcaccaccacccgcgcccgccccacgcttcctcccgcgccgcagccacacgaacagacccagacccaacgccaccagcaccagcgctaccaccgccgccaccccggcgcccaccgccgagcccgcggcgtggcgccgcgcgccgtgagacccccgcaggccgtcgaccacggccttctcctccgcagccggcggcggggaggccgcggcggcgagcagccgccgcgacggcatctcggtctcggccctaacctgagagggagatgcgggaaaagacaagcagagggggagtgaggcgaaaagccaactcactttttcgccatttttttccctttctcctcagatgcgtcgtgtgtactacctgcccaccactggcgtgcggatcaggggaggagccaggaggagacagccctaccccactgaccaccggggcccacacgacacggtggcccacctggcagtgttctgatgacctgatgtgatccgttat

SEQ ID NO: 37570 - DNA, 560 bp, Oryza sativa
aactttttcaagttgtgtttccaacttccctgggcccggacaaaacttccggactatttagattgtagccaaaataaactttaccaaattttagcaatttaacaatattaccaagttttggtaggattacttatgtatttactagagtttggtagaaaactaaatagatgcatatatttaacaattttataaaaaaaatagtatgatttgaaatgacatcaatctaaacaaccccttcatgctccggtgacgcttcgtgcgctccccatcatgtatgtacgtactacagccagatcgagttaggcgcacattgctcctgatcgactatatgtgcttgttccaacaccttcatcggacactagttattttgttgctaaacacaatctaaaatcatctttttagagagctaaacaagtcttgacgtgaacgcaaatgtcttagatcacgcacagtacagcagtagcaaatgtcttagatcacgaacagtacagtacttgtcaaggcaatcgatcaagagattagcccttttgaacttctttattcaaacacgcggatcaatg

SEQ ID NO: 37571 - DNA, 631 bp, Oryza sativa
catggcaagcaatccaaagcatctgcacttacgtaaataacatctggaacacatacataaagttactttgctttgctagatgtgcatcacatttctaatcttcattttgttctttggcaatatgaaagtgctgctgaagaattttttcatcaccgcatgctacagccggatgcaatttcaagggaccgcagcaagctgccgggaccattgaattggcaagaacataaaaatacaagtcaatgtcaccagacacgtgtttgcacccgtctagcaatgcactactacaacttggaaaatgtgtgtactgatgttatcttggaccttaccttatgtgatttatctttgttattatattttacctcagatggtaatgtgtgtattagatataaggtagcttttggagatcatctgattagtattctgaagtattctgcttacttcatatatttgtaatcagtttgttaagattgagtcagttacctttttaattcattatattttctgttctttttttccttgtattgttcccttcctctcattttcagccagccaataaagcaaccaagggagtagccaaggatagccacatgtttatcttgaggcttgctgactaacaatgtctctggcacgt

SEQ ID NO: 37572 - DNA, 1639 bp, Oryza sativa
acgcgagtgatgattaattaattgtatagcttttgatgatggcaatatggcatggagctgtgcactatttatagcctaggcaacgtagaattaatccatacatgatactacatgtaagtaccgcagctggtgtgccttgtttgtggtgttgaattgaagctagcatacacgtacgtgctgcattttcgcctgtacttttgctagaccgccatacttcttctgaagctagcggagccgtgcatacgatagattatatatgtggagcaattaatatcactcaggttgatcgcctttgacaagtactgtactgtgcgtgaaccaagacttctacggcccgtataaatcccctagcaaaattatacatcctgtcacatcgaatatttggacacatgcatggagtatcaaatataaaaaaaaactaattacacagattgcgtgtaaattgagaaacaaatcttttaagcctaattgtgccatgatttgacaataatgtggtactacagtaaacatttgctaatgacggattaattaggcttaataaattcgtctcgcgatttacagacggattctgtaatttgttttgttattagactacgttttaatacttcatatgtgtgtccgtatattcgacgtgacacacaaaaaatttacacccctgaatctaaacacaacctacgtcgtccacgccaatagactttggctcttttagatcccatcctaaaatttttcaccctgccacactgaagtttgaacacttacatgaagtattaaatataggctaaaaaaattatgcacatattatgactaatttgcgatacgaattttttaagcctaattgctatatgatttgacaatgtggtgctataataaatatttgctaataatggattaattaggcttaataaattcgtctcgcggtttactaatggattctttaattagttttttttattagtgcccaaacaccccatatgataccctatataatatccgatatgacacgccaaaactttaagctcctagatctgaacacccctttgttagcttagctacagctagtagctgcacccctatgaacaacatgctgctcaatcgtgtgggaaaaaaaaaccccgtagtgtcgctgccgcctgggcgctccagtgggaaggttggaaatatatcttgaaaaattgagcacatgtgaacggtaatcatgggctagtaaaaatgggggcaccgtgacatcctgaccgaattaatttgaatttagtttgtatggacaataaatactgtgtacgcatatttagtatcacatgccatttaaataagagcgaaatcaacttataaggacttttctctccaaccatattaagtagtgtagtatgtgtgagtggatccgcccatcggatgagcatatagagaaggtgacgacaacggtcctccagcaagccccctcctctaccgtcaacttccaggttagttctttctcccgcaccctcaccgtgccactgcccgatctcaccggcgtcggaaggtgtcaacgtgccgacgcgaccccacccagctgacctccttcccctccctccaccacactttgttcctgccaccaacattggcaccacccccccttgtgtctcaccacccacccttgaccatc

SEQ ID NO: 37573 - DNA, 1072 bp, Oryza sativa
ccggatcggctccgtgagaaacgcagccgccaaacggccacaagcgcacgttctctcttcacgtgagaaccaagtcttcagtgattgactcgatcagcagaggttgttgtatgcaagcatcttttcatcaacacatgctgatcgtgcggctaagcattaggcatttaaattgatgaaatgatcaatgtctccaagcatgttatttccatcacaacctgctgagtcagcacgcagggcccatatgtcagtgacttctctctttctcctcccctctctcctccctcaattctctctccacctcatctcctcctgcagttcccctcttttccatgacatggcggcagccgagtaggccacggggcggtgagctttggggtaggaccgtaggagagaggggaaccaagcagcaaggccgataaatttctgctactgatgcttcgtcggtgcctcttctctcttctagagctccagggccctttctccccattgtgttgctgcgagatagtcgtgtacacaatgacgactttgaaaagatgtgcattcaaaagtagaagaataaattaacaaaagaaaattgtttagtagttagcaatttaataagatttttttagatgacttgaatattttgatatcacgctaactcgcgaacacaccagattaatattcttttttatgaaacacatcaaagatttgtatattcatatgtatgcatccatccacttttaataagttttgggattatttctgctcagaactaaagcaagcgagcacgcgaatgaaaaaaatgggaacgagatacaatgtcagccatgttgtgtttagtgtgttaccaaaaagaaaaaaaaaagaaaaggttggcccacaaacagtgacacagtggctacatcggacatgaaagctctctaaatatgggcggaaaagaaaatctcacgctcgtaagctcaaacaagacaagcccagctttcttcccaacttgttttcgaaatgagttgagcccaagctggctcgcgagccattcgtttggctcgtttagctcgcatatctagcctagccagcatagcccattttgtag

SEQ ID NO: 37574 - DNA, 2012 bp, Oryza sativa
agttccttcctcaattctccatacccatctcaccaaaattcccatgtctcccaatcaaacaaaacaattaataacctcatccctctaaactccaaatccctcctaaaaactccctccaaccaaacgggctgtgagagttcacacagaatccagaatccagctaaggctgtgtttagatccaaacttccaactttttccatcacatcaacctgtcatacacacacaattttcagtcacatcgtaccaattttaacccaaacttccaactttggaaggaataaacacagcctaatctgcataagctcctacttactgtatctgcataagctgcaccgtacacctctgtacttgtctactgtaacctgacacacttctaacagtagtaacatggatcgatctctgtccatactcctgcaaattatcctaacaccataatctaatcaatcacccacgaccctgtgtccccccatcagatcagatcatactaattctctgaaagtttctcccattatgcatgcacattgcactgacagtgagtgacgaatgctactacagcattcatggctcgctagtacagtacagctgctgagctgcatctgcaggtgcatctcccctaaaaagaaaaatcatctgctactaataataatcagattcagacgccgactgaaatcccactgttcgcgctagcgtccattcggtgcagagacaccggcatgtgctccccaagaatccgctccattttcttttcctctcttttctctggaactcagctgattgttttattctgaattctgatcagaaaaagggccagagcatcgtgtgatgattgagctgtaaatgagatcaagctggatcgtattcagacagcagattggcgactctgatctgatcacgcttgctatagctagcttgtgatgattgatgattgatgattgattgattgattgcccggtcccagagcctgcatttgcatcagccagctttctttgctcgtcatggacagtggcagcagcagctgcagcagacagcccacgcctgggtgctcatgtgggaggtcgctgcatatctagcagaatcgcaatccacatttcctcctgcggatatctctccctgtctccctccctccccctcccaaatccaatcagtcagctcctgcatcacattgctgaatttattattaatgcttgcttgcttgcagcactagcattctactggtatttgttcttcagttcttcatgtctctctgaacttctgaagctgaagtgagactgtgcagccatttcttgtgccaaactgtcactcttcagtttcttcttcgctggtctcctcttgtatttatgggtttggaggtttcttggttttggctcggctgctgcgcgtgaatcgattggtgagttggagccaagaacctgaaatcttcccatttctccattcttcgcttcgatttcagtatttgttttcacctgtcatattcttccctgttcttaatctgttccattgcctttcccctctcgtgattaacgactccgggttcatcgccgctcgcagttcggatttctacacatcaaggagaaacaaatctttggtgattcagctagggtttaatagtcctcccaagaattgcggcgctggaggttatcgaggattgcccaagatgaagatggagtctttcgcttggttgctgttgattcttgttctattctcgattttggaggatgtgcgaggatcaaaatccaagccgatcttgatcaactgcggctcagattccaccaccgatgttgatggcaggagatggattggggattcttctcccaagaacttcacactcagcttaccaggaacagttgccacagctccagattctgatgggaaagagacatatggagatttgtacaagaatgcccggatcttcaatgcatcctcaagctacaagttcatcgtcgccgctgccgggagctactttctccggctccatttcagtcagctacccactaatttcagcaccaaagaat

SEQ ID NO: 37575 - DNA, 827 bp, Oryza sativa
ctcatgatcacaaaatggaaaactcaaacaaagtatacacaactattcatgaccacagaacaaagagaggatcttaaaatttctctcttctgtatatatgacaagaatctcacacatgagttgatatcggaactaaactaaacggtggtagtataacttaggtatcactactacagaaacaacgatggatgtcggttgggaaacccccaccataggctttgaggttacagtaataaaaaaagtcggcttgtgcatcagctcgattcgagcagctccccatgcattccacatccatgtatcaccatccatccatcacgaatccatcacctgcacaactcacacaacaccacaaatcaaaacatccatacaaatcacccagcaccacaaaaaatcaaagcaattgattcacatagcacaacaaatcaaagaatttgattaataaatcacacaacaccacaaattaaaacatccatctgccacttgcgccacctcttcccgctcccccctccccctcctctccaatgaggtaggggaggtggctggggctgaagtcggagaggggagggggggtgccggacaggagtggaggccgaaggagcagcgctggagagggaggtgttggattcgattgcccccgagcgactggtggggaggggcggttacggatccgactggccccagcgactagtggggagggacagaaaggagggaagtggcgccggatctgatcctccatgagtggctggtgggaaggggcaaggaggtgaggaggtgcggtgggaggggagggggagaggcgtagtggagaggaaagtgaaagtgggaaa

SEQ ID NO: 37576 - DNA, 1155 bp, Oryza sativa
gtctactatgacaggaaatcctaagaacatatatgtaataattgaaagcacaacataaagatacctaggaacgattgtgtcaaagagcagcgagccagccactaaggcctcctttaatttataggaataacaggaaaatttggtggattttaattctaaagaaaaaaatcttatgaaagcctttgaaataaaagagttgaattctaccattttatttaaatttcatatggaatgggtattcctgtagagattttatttaaattacttttgagtatatctctcatatcaattcctgtgtttttcctacggctaaatcaaacgaccattcacccaatttttatgtttttcctatggctaaatcaaacgaccattcacgtatttttcttgtgtttttttatgatttattggcttttaatcatgtgttttaaaggagtcctaagtaattatgataaataattcctaaaaattctcactctttggtattgttcaagtcttcaagaatctctatccttacgtgagtcgatcctgacatgttttgtgctatgcccttaggtatgtgcagcagccccacaagtacttgccctgtccaaaaaataattaaagcacccatatttttttaaaaaatcaatatttttttatttatgatcttaatttttagtaattgataatatacttaaaaaattgatgattaaagttttacacggtgtataaaaacttgtaggctttatattttcaacgggtaacagagggagaagtacgtacatgttccattaattatttcgtgtacactctcagaccataaatttcgtactatatatagagttttatttgttttggtacaatttgaaaagaaaaggaaaaaaacaaagtttaatttgtcctttttttctcaatctatagataatcatgttcctaatagcccgtgcatatgagatgtttgaaaatagtaatagataaacaccaataacaaacacatatgtacaagtatatatatattgatcgattactgcaggttgatacttataggtgtgccatctagctaggtatgcatgactgcaagctggaagaacatcgtaccagatgcaaggcatgacatcctagctattataataataataataataataataataataataataataataataataa

SEQ ID NO: 37577 - DNA, 2255 bp, Oryza sativa
gtgacaaataattatattagcaataagcagagagagcacacattatattacaggctagctcctatcataatacctactatactataccacctactatactataccaaattgtctcggaatgaaatgccgaccgcctaattgtgggctcgattgcgatatgctaatcgcaaaacaacatatgtatgaaccccccctctctctctctctctctctctctatatatatatatatatatatatatatatgtataggggtaattgtgttcttgtccctatttacaactgcaattgtgattttacctttgtatttttaactttgtgattttaccctcactattttgaactgaagctcaggtatgcccctgttccgttagcaggacttaatggtgctaactgacaggtaaaaggacatctatgcccttgcagatttggcttgtgaggactttgtgttttggctgtgtttcacgattacagtagaaaacggaggtatgaacttgccctgcatgcttaattattttaacaacaaaatccaactttgtaattacacaagaaatgcgattctccagcatatgtttaaaaaaaatcaagggatttattaattaagaaacgctatggactgaggtatgaattcaatgcctcaatgcctgacgtatgaacttgccctgcatgtttaatcattttaacaatcaagggatttatgaatatgcaaacaagaaacactactctcatctctttctttcaacaacagaatagctttgttggccctatccagtttaggaaccaaccaatagtccaaggcagtaagaaaaataaaaactaaagggggagtgacaaagaagaaaaagtaaaagacaataaaactcaaatgttcctctccttgctgttcttctcctccttgtcaccatcatgcctcaggcgagctcctcgcggccatgctaatggaggcaaggcagcctagctagctacgcatatgcagcagtacgtatgtactcgatcatctgctgtgcagcggttcgggcactatagccgaggccgatgccgacgagcccagtgcccaccacggcggacggcgacgggctagctcagcttgacatcgccatttcgcgccggcccagcctgcttcaccccgcgctcctccgcgacgaccgcgcgctcctcgctctcgctagcccgcgtgtgccgccaccgctcgcgagggttaggaatcggggacggaggtcggaatggggtatggggatcgggaggagtcagcagtggcttaggttgaaaggtttgggatagagatgtctttttacattttgcaagtcaatttcttattttcttaaactcatttaatctgagtccacctaacagacgttaaacaggggcaaacagaccattcaacatcaaaaagtaaaggcaaaatcacaaagtttaaaaagtaagggtaaaatcataattgcaaatgaaagtaggggcaagaatacaattgccccccatatgtatatatacatacatatatgtatatgtatatatgtatatatacatatgtatacatatacatataatacatatacgtatatgtatatatacatatatacatatatatatatatatacatgtatacatatacatatatatatatcgatcgaccagggagtaaatgttagacgtaaacagggaacctagctttgatcgatccgataaattctgaaagcaaaaaccataaactccaattaagtactccctccgtcccggaaaatactgattgctagcatcccaatgcaagtttaggattcaagtgaaaataccaaagtgaccttattaactactactactgcatcaattcatcagcatcgttctttgtacccactcattagtagtagtactacagtacatccagagaccatccagtagagtaagaatcaatgtgaacgtgaggggagagagagaggacttgtccttctcgatcacaccaatgcagcagacgttcattgcttctcggttttttagggaatttaactatttgtcacttttagatttgtcaattatctaaatatctcttttaggtttgcacttaataatttgccactggagagaggtaatttcttaactatttaccacttttgcctacgtggcgtgccaccgtgcgtgccaacgtggaaaggaccccacccgtcagccctctcttcaccttcttctctacctccggtcgccgcccacctcccgcatccctgcgccatcgtcggccgccggccccactcagtctcatgcgat

SEQ ID NO: 37578 - DNA, 3862 bp, Oryza sativa
acattttgataaggtataagctatagtgcaatcagcacaatgtcaacacaaacatgagcttagacttatttagggtgtatggctcttgcatacttgccaaataaattaacaaatatctccctagatatatcgccgtcttttgttgtttgctttattttaccaaatattttcatagtgttggcacgggcatatatttttaaaagtaaaagtagtctcacatctgtgtgaaacattatcaatgagattgagtgaaagttattcaagctacattatttcatttactccttcctacaatcaacatgaatacagattcatgtgtgtgagaccagctgccagatggtgtcaaccgtcaagagatcatatatatgttccatgacttccatgaaatcaatggtgaaaacaacatgatcttttgataatcgtcaatgagtcatgcgtctgatattgtgtgaaggttgtccttatcaaggtagtaagagctgttagcattatttcatcttctatgcaactctgctaaagcagtaaaaatatttttcttcaatgtaagcccacgactatggtggctcaaatttggtatatgaggataaacatgttattaaatgaaaccctttttacttccaaaagatttgattgcgggaacggatccatattatgggaaaaactaaggacatatttgtttttctccaaaatcaactcgtgattgaaattatgctggtattgatcgtattgttgttttcatgtcgttggttggcaaattcgcagaaaaattatctgcttttcttaattgatcatggctgcttcaaataaaattatgtcggctcatgtattttttttacatgaggtccaagtaaataatcctaaatataagccgatgctacaagtcaactaaaaagaatttgatgtgtaatattgtctgttgaatttgtgtttatacaataatttcttaaatatatcgggtattattaggatttagatgatttctaaatatacaaaagttggaatgttattttacacacatggctatgcaattattagttaagataactctatgtgttctttccatgtgaatcttaatataacattatatacttcattgtcaaaatataactaaatattaccgtagtgttagcgcgggcaaattaatagtaccctatactaatccaccaactgcgtcttacatcttattcctcattgattggttaggatcggatccaacgactcaggttgcttccaccttctccccctaatccatgatctctctccctaatctttcccctaacggcaccccgccgcattgcctgcctccgtcctctccgcatgtccctaaccctaatcgtcgcccaccgccgctgctcattctcgtccgctctgtcgcccgtgccgatctcgcccacccacatcgccagcgacgtctgcctcgccggtctcagcgcctccgccggaacacccatgctcgcgctgcgccaccaccgatcgaatccccgccgccaccgatctcgctcgttcccgttttccaattctccaggtctgttggtctctctcaaaaaatttccatggatacttttggaaaattgaatggagggttgccaaaaaaaaaatgaattgagtggtatctgtgttactactatctttcatctggattatttttacatggcattgtgcatataaaatacaaattgtttcttcaatgaggcactttcatgtcagcaaatttctaatggagatttctgtgatctgtaataatggtcgtcatctgaataaaattcatgtcgttcttttttttttttgacgcaacatgtcgttctttactaatttgcagtttatattcttggttatataagcagttacattgtgaatttttgtttgtgtagacctgggcatatttggcttactttcagcaacagaaatagagcagatcaatgatggaattgcattctactgctgtcccaaaaggtttttgatcaacatcttccagttcgatcagatactggcttttgttatgcctaaggggctataccatgcatggtgtcatcattatcatattttccaagttcttgacaaaaattgagcaaaatgagatgtgacaacgagaagacagaaagtgccattgcataccaggtgctcaagaaatatgatgatgcctcacaacaagatgatctttgaggcatgagaggtacaattttctaccttattttttctgcactaaaatgaatgttctgcttaatattgtcttctttgtttggtaacggaggtggcttatagctatgttagttttatgcatgttttggaatagttcacgatagcatttctgttagtaagatattctttgcataatattgatgcaaagtgagcactgcagtctgcaattcaacaaatgaatgattttgtaccttcatttgcatcggaacgaggttaaaagaacgaagtttgcctcattgtcaaattctccggaaataaagttcaggataaaaaactgaaatagaaggacatttgcctaattttcgcggatttaggtgcttaaaatattttactgtgtaatgtctgaaatttctattgatgaccagctgagctccattagatgtttcacatgggcatttatgttgaaattgctgttaagttcacctataaaccgtttagctaagtgcgatggtggcttacactgtattttccggttagaaattatagaggacagaaaaggcagttatgtttattatgcacctgtattttactaaaagttttgcagtctcaactgattgggacacttggagctactttagctgtttagcagtgttttaatttgggtacaagattacagattctaactggtcacgtgctcaattttctgttattaatgaactgcggttgacaatgagtgatagtctttcttagttttcatatctgaaattaaaatgagaaaacactgtacactccacatagttttttctgttgaaaaaagtcaattgtataatggtaagcatttaaaataacttgatactggtatattagcgaagtgtattaatttgtgttgctgccaattttaatacaattctcctttgcacacagtttaaatcatgttaagaatctgcagccagatgcttatggaactttttttaatgcagggtatttttggaactaaacattcccagtaatgcttttttttctctttcaagctttgatgcgataaaagatctccataaatatgctaagctaagtatgttttccttacgaaattgcatatcgttgcttctttaatctttactatgcccttaattcagatagcccttaattctttaatatgcccaaaattccttacagatagtgtattttgctctatactcttttgccttttcaatgattaaaaggtttatttttcacactctttcaaattcagaaattgctgggtgatcttgagggtacgtatatcttcctataagtggaagcctgaaattgggtgggcttataataactagaggtaatttctactctgatcttgaaatggactgcaagaacaaaacatgagcacctgctatggttggaggaaggacactgtatatatcagattgcttcataacatcacaagaagaaaatgtccatgtttaattttgagtaaatttcacaaaactacaggtattttgcacaatttatcacaaaactacagatttaagagcttatttcacaaaactacagatttagtgtcttcatttatcacaaaactacagttacattgttcaatctatcacaaaactacagatttaagaactgtttcacaaaaatataaatttagtgtattcgtttatcacagtgctacacatttagtgtcttcatttatcacaaaactacagatttagtgtctccattctca

SEQ ID NO: 37579 - DNA, 501 bp, Oryza sativa
ttcctgcagccctatagcaagagaaaaatacaaatctatagtcctgaaagactatagatagaaaaaaaaatacaaccaaaccgtgcgcgtctacaacaacacccgctgcgatagcgaaataagagatcttcgagacgacacctctaagaaaggaatgacatcaagaatgccgttgtcacctgtcccggggagtcaagacaaggttttcatctgaagaaagtaaatgaggaagaccagaaaaagcagcaacaccccaagaggaaagcggcacccgcagacgtcgttgttgccggcccgaaggcagagctttcgcccaaattctcgtccctccaaagaactaagctcatgcatactctgctactgccatcatcgaaaaccttcgacgcacattcgacgcacaggcacctcgtcggtgccacaccgctggccgactgtcaagggggagctcgaccctcgacacgtgcccgctccatccacgcagttgggttagatggggagagg

SEQ ID NO: 37580 - DNA, 1159 bp, Oryza sativa
taagaagtaatttaatgaaatctaaaagtaatttagatataatatataagtaatttgaatttttttcataaaaatatagttatgtgagatctttttataaagatttaattgttatgaacacaatggtgtaatcggatcgtaaatcggatgagtaaatctaagagaaaatttcataacaagaaaaaaacatacacttttgagtatactagatataaaattgaggtagctagttatgaacatacagagaacggtttagttgtagacacgtccattaataaacaattaccttctaagtacggaaactcgacctaccatacacagccttagctaggtggataacgactattcgcgcatgcataataaccagcaagcatatatatatatatatatatatatatatatatatatatatatatatatatatatatatatatatatatcacacatgctggaggctgccattattatacttaaccatggctagtaccagcgttttaaatctcccgctatagctgccgctatctaccgctataactatttgagaagggttctagctatttgctctcatatacaatttaacagctatagcttcatttagcccgctatagctgccgctatagctgtttaagaagctaatcgctaaatggtttagcccgctatttaaaacattggctagtaccaccaaccaacctactcttttggggccagtgccattgccgttcaacgacgccatcgccgccggcgacacgccggcggtggatcccggcctgatggaagagtacgggtggctccctagcaaccccaagatgcacctgaattgctaccaaggtgcgtgggtgcagaggacgtgggtgcccgggatcatcgccatccagcgcggcggcgacatcgtcctcgcgacactggtggagaaaccatctttgcttggtcacccaaaattcacaatagtcccggttcgaatagaaaccgggactaaagatgatttttagtcccagttaaaaactttttgacctttagtcccggttggtaacattaaccaggactaaagatcatttttagtcccggttcaaaaagttgtcgggtcgagttaggtcccagctcatgtttagtctcggttggtataaacaaccgggactaaacatagatctttagtcccggt

SEQ ID NO: 37581 - DNA, 603 bp, Oryza sativa
ttacttgctatgccatcataaatattgtagagacatgtaaatggttgagttaaggtggtgtcctaaaaggccaccataaccaatgtaactaaaatgacatacttaccaatgcaatcatttgtgagtgtgccaatagtgaattgagtgttaaaattgtactttaagatggtctttaggggcacagttacatcgatgcgaaacccgtgtttcaaggcattatgtaagaaagccttagttggctgctacggtcgacttcatctgttagaaaatcattcatgaatatttttaacggtgttatcgtattatctggtagatatgatatttttagacaatttatacatagatgtgaaaataagttatgcacactgggttatgcagtgtagatgatatttttagcgtataaataatgtatcatttattttagtggtacaaatacagtttcttttattaaaagtgcacctaactttcaaaaacaatgatagtaagtagtggtgacaaaagacgagtttatatatgaccaggacaaagggatttttacttaaatctaataaacattctatcacatttagtaatctataccatctattttacggcaaatatatt

SEQ ID NO: 37582 - DNA, 3085 bp, Oryza sativa
tgcgcttattttgagacggagggagtatttttaacacacgatgtttcatttcaaatgtcagatgttccgattggtatgaccatgttgctcatagtgtcaaatattgctgtaaaaatgtatatttgccaaggtctgagtttccagattttttggaggagtttgaggagagaaaaacaaagggggttcaggtttatttttttctagctgaatcatttgaatttgggaaaattctggaggggaaaggggagtgaaatgaatttaaatttgaattttaaactttgtatcggatggaaaatatgtgggaattgttttgggtaggattggatggaatgaattgatatgtttatgttacaaacaaatgaacaactcttgaaaataaaaaatttcaaaagtagacaaccccataaggtaaaacaaaatccactctggcaaatattttcaaacgacttgagaaattaaacaataaattaattaaggtatttccccacttgttttctttggatacaaatgtcatgaaaaattatgctgctctttatcaaattccttctcctgttacgataatttttttttgtaattctttcgatagaaatttaagtaattaagaattacattaactataaaatgattttccttttttggatggataaagcctcatgacagataaacctctttaactactttgttctttagatattaaatcttttaatatcaaatcttttcttagaaatctgagtaattatgtagtacgttagttatataattgtttttagctggcatgttatcaattcattatataaaatatttcatagaaatacgagtaattaggaagtaaatcaattacatattttcttcttctgttttggctggatacaaccttatgataaataaacaacattaagtacttccatcttgggacatgaatcacttggccatcagcaggcatgttattaattcattcatatctaatctttttacataaatctgaccaattaataagtacattaattctagattttcactgcaatacttggatgctacataattatggtatccttttccgcatacgaacatatatattcaacaacttctcttgctgaggacttttttttgctggtcacatattttccaccaaagcttgcaaccttcaagcttgacggaagctcttctgctgctctgattgaaaatcgcaaaaggttgctctagattaaccacataaggtactaccaaaatcccctctagcatgaatccactgccagaattgatcaaacttttgttcttatttttatgatatatggacaaaaatggatataagtgatgaactaatcttcaccactactttttctttttgcttccaatgtttgttttgcatttcttctcgtagttgacagactccatgagtgaaaataatttaaatttgagttttaaaatttgcaagtagactatatgtgggcaaatttgtttcgggtaagatcagagggaatgaattcatatattacaaacaattggtcaactatataaatcaaaatgtttgaaacttgacaaccccgtaaggtataaaacaaaatctgctgaggcaaatattttcttgtgacttggaggaattaaacaacaaatttacagtgatatttgtcgcctgttttctttggacatgactaatttattacttttccaaatctttagacaaatcatataattaagtattataagtaattatacagagtcattgtagataaaattatttaaccacttctttcttcagatatgatttagttagcacgtaacaaggcaagctattatgtattttaagaatcaaatcttttcatagcaatctgaaaatttaagcagtacattagtagtatattttttctttagatggcattttattaattcatttgtaacaaatatattcatagaaatctaggtaattaagcagtacatttattatagatttatttcctcctgttttggctggatatagcctcacgataagtacttccttcttgagatatgaatcagatgggcattagctggcaagctattaattcatttatatcaaatatttttagataactatgaccaattaagaaatacattaattctagattttcactgctatgtttgcatgctacatcgtaaatggtatccttttcccccgatatgaacatatatattcaacaactcctcttactaaggactcatttttactgaccgcgcatattttgcaccaaagctcaaccttcaatcctgatagaagcttttctggtgccctgattgaaaatcgcaaaaggtcgctcagattaacctcagaaagtactaccaaatcccctccggcttgaatccattgccagaattcatcaaacttttgttcttatttttatgatatatggacaaaaaaggatggaggtgatgaactaatattcactactactcttttttgcttccaaagtttgtttcgcatttcttctggccgttaactgactccatgagtgaaaaaaaaaattaaatttgagttttaaaatttgtaagttgactataatgggggggggggaatttgttttgggtaggatcagatggaatgaattcatatatttttgttacaaacaattggtcaactatataaatcaaaatgtttgaaactttacaaccccgtaaggtataaaaaaaatatattgtggcaaatattttcttgtgacttggaggaatcaaacaaattactgtgatatttcctacttgttttgtttggatacaacatcatgaaagattgtacgcctctttatcaaattccttctcctgatatgactaatttattattttttcaaacctttagataaatcatataactaaggattataagtaattatacagagtcatgatagataaacttctttgattacttctttcttcagatatgatttagttagcatgtaacgaggcaagctattaagtattttaagtatcaaatcttttcatagcaatctaagtatttaagcagtacattagttgtacgtttgtctttagatggcatgttactaattcatttgtatcaaatatttttatagaaatctgggtaattaaacaatacatt

SEQ ID NO: 37583 - DNA, 3419 bp, Oryza sativa
atctagcaagataatttagccgatactagcataaaccctataacaaatctcagccgatacaagtaaattacaatgctaaactagattgactaagatatatgataaataggttggcaaatatgtcaaccgaatcagagcaatccaagaggttgaagcgatgcagccttgaacaacgccaatgtagccaatacaattgccatggccggtggaacgtaagacttaccctttccccggagatcgaaagccgatgcaaccccgcgtcaggtgccaagttccgctgtgataagtaaaaacctcggaaaagaaagtggcgatgcgccgagagtagttgtattaatctgtggagatagtttacaatgaccccgggtgtacatatttatagccatgggtagatactagttcttgttggacaagaaaggaactttcctaaaaataaaaggaaaacataaagtccttatcggacactaaacacactatcctaaagataaaacgaaactaatagactattcctaattaatagataaactgtcatgccgcatcctccttgaactcggtcacttctggataaactttctttagcagattaatttccttaaccaaatctactaagaatccaactattggcaacttgataattcccatcggccgatttcaagactctgaagccgatactgactctaggccgatgatgacttcggggcttaccaaatttcactgttaacaatactataagtgtcggttgtatcttataaccggtacctataaactagaattgatgttggttttagtttaaccggcacctatgaaccaatatctatgagagattctgtagtagtgtaaaaagtgttggttgatttttcggatgagcccacaatccgaactaatttgagataagagataaggttgttttgtaatcggttaaaacaacttttaacacctaattcgagataagctcccgggccccaccagtgctatataagagaagtaatcgcaggaggagaggatgctcaattcttgctatctaatctaaaaccctaattcgccaccgatcggcttaagcgctggaaggggttcgttcggctgtctcagggcagtgctggtggagacccgaaggccggcgtgatctagcgagaagaaaagagaaagagaaagaagaagaaaagcaagaggaaccaatggcttcaaatgcgacaggtcagagaagttaattttgtaattaagagtgattgctttataggctaaagttaagatcttgtaatttagaactccaacaaaaagaaactatgcatgtgtagtaagtatattcggaccattttcccaatgtcaccgaacagaaatgccatcactactgtaccagtggtgatagctattcaagattcagtatccagttatttgcatcgaccgtcttgacggtacctggaaacacgaccatttagagttcagagtgcacttaggtttgtggaatttctgagaaatgatagatgactgaagtcatcatgggttcaggtaagctctgctgcaaaatgaacctcacatcccaatttcagacttgttcctgcatgattcgagtgtacaattaaccatcaatttattagagtgttagcttgttggagtgctccatcaaccgatttcatatgagaaaattcatacagatacttacacagtttgtcgagatacttagtgagggaggatgcacgttctgaacccaacatcacttaatgcagaatgcgcatctcttccatcaggagttgttacatccacagccttgcagtgaagagagtggtacaaacaagctttagaaaagggaaattctttcggtcagattgcgtgagcttctgttcacaaaataaattcagaacagagactataatttcatagtaaaatcattctgttaaaataaagggacttctctaccctgtcccagtcttttttttgcgaaagaaaggtgcaagagatcttctacttcgataaataaaatatacaagagcaggctatacaatggattccctaacaaaatttcttattgagtactaactctatttattcgaaaatcctattttatcacaacctagttcattagcctctagttaaaaacgacagaatacagttgttgatagtgtaaatatgtttcttttttttttttaccttctgtttggttgtcatcgctggtgtccttttctttacaatagactgtgttgttgattgcggtgggaatggctgctgttatttgggccatttagaaaactcgaaataaagcatgctttgagaaaaggtatccacaagatcccactgatttggtcaaagaaatctggagcaagtcaaagaagactgcaattgggggctaggctcataaggcaggtagcaaatgaaatctacagctcaagacatggatggagggcttgtgccagaagaattgagggatgatctgctgaatctttctcagtttatgttgtttgctcttcagtccagcgatgtatgttaacctgcagtgcttttgtaataggcatagttcctgttatctcagttcagtcctagacctgatggactgccttctcttttatttccagactctgtatgtgtgatcatttctaaaaaaagaaatgggggtattcttgcccttggtaaaaaagaaaaagttcttgctaacagagcttgtggtttttcagtcaagaccattgtcactgtagtgggtttgtatggaagatgcaggatgtttgattcatttccactcaggatccatttttttcagatatgttggcaaagaccctttcaatcagaagcttttctttcatttgcttaatgaaatccccatcatccaaaaatttagaggctttaaaggcaactttaatatgctccccacatctgagattgaaggagggtgcaaaacaaattgaatcttatctcgtatatagtttataatattgtatcagttgtaacaaacagataaaatggctatcctgtgatcaatttgaccaatactactattcatgcacggcaatataaatagccatgcactattcatgtcctgcttcaaaaacttctctccaaaattgattcttgtctctctctttttttttttttgacagagtacatgtcacatgaactgtacaggttaaagtatgtggctttgtgctacactgctactaactgccagtccttttctgcgtggaatatcacaattctcaccaaactgattcatagcctgcactaaagcacaacagagtgcagttagcaaaatgaataaaagagttgcatttaatcttcagactttcagggtgcatgtgacgtggagtattggactgtatatgtgcaataaccacaaatttcctaaaactattttttttgccatcaattaaccacgacacagtacttttgttgataatgaaactctgtcctctttttttccttttttaatttga

SEQ ID NO: 37584 - DNA, 674 bp, Oryza sativa
ctattatttaaaaataataacttcctcatatattatataacatagaaacgttaatataacatagaaacgttactgttcagccatagagtttatatacgatacagaacgttacgtacgtattgaaaataaaacaataaaactttcccaatgttacggtatttatttaaaatatgattttctacagtataaagataaaatatatttacttcacaaatataaatatatttagtcaaattaagatctattataaatatccaatcaatgttctttaaaacatcttataaatctatctattatctatcaactatatatatactaaaagtacgttaaacatacgacgaatgcatttacgctgctacgtgtctctctaataaattagagaaatcctagaaatttatttatatactaaaagtgcattaaacatcctgcaaaaactattacgccgtcacgccgtgctataataaattagagaaatcctagaaattcagagaaaaaagaaaggcatatgatcctttaatttttacttaaattggaggaccccgtatttaaaatattagtttagatctattaaaaatccatgctgctaatctctatctgaaaaaaaacataatgtgcgtacgtcgtacgatcgtcttcattcttaaaaaataaaacttaatacctacaccatatac

SEQ ID NO: 37585 - DNA, 556 bp, Oryza sativa
tggtgtggggaggtttggagatgaacgggggcttttataggactttgggggcaaatggtcggcctaatgatgatgtgacggcggtgcacgggctcggaacgacggcgacgcgcgcggcgcgaggcaacgcgacggcggcgcggcgcggcagcggcgatgttgacggcgcgcggcaacgcgatggcgcgacacgacggcgacgggttcggcgcggcagcggcgacaagacgcgacggcgacggttcgcggcgcggcagcggcgacgcgacggaggcggcgcggcgtgggacgcaaggcgacgacgcgacggctgcgcggcgcgctggtgcgggacgcgaggcgacgcgacagcgacggcgacggctctgcagcggcaacgcgacggcgcgcggcgcggcgcggggcgcgaggcaacgacggcgacggctcgacagtggcgacgcgacggcgcgcggcgcgccgcggggcgcgaggcagcgacggcgacagcgtggcagtggcggcaccgggctcgggacggccacgcgcgggaccggaggatgggttttagggctag

SEQ ID NO: 37586 - DNA, 600 bp, Oryza sativa
tccaaaaagtccaaaggtttctcaaaggacggtaagatgggcccttccttccccaagtgagcaactcaaacttccctctcccttaagtgataccagtgcaagtttgatatcagatcttgtatattagctgagaagggagtcttatgagtgaagcatgaaacaatatggtaaggttgagtggaccgaccgagatctaaaatactatggttaggaacaacttgacttatctcaacaagtggtttaattagctcttctttcacaaaacacaaatccttttggtataaggctctatgagcttatcatttgtactcttatccatccattttaactccttttatcgactggagaagcatagcttccttacacgcgcatgacataggatacgtgaaaacagatatttgtactagcgatcagccgatcatcaggagaggaacctctacatcccacgtttcttcaaatgcattctacagtatatttagggaaactattggtcattgagagagaccacatttgtaccaatcaaatgcacctgtggtgcactaacattccgttttggtctcgtacactccatatgttaaaatgtcacctagacctccttag

SEQ ID NO: 37587 - DNA, 1660 bp, Oryza sativa
ccctcggcgaagaagctcagcaagtacttgcgccacacgatcttcacctccacgccgccgccataggggacgagcagcttctcgccgtcggggcagaccctttgcccctgccagagcccactaccctcgacggtgcgcttctggcggctccccttgccgttcttggaccgagcctcggcgaaaaagaagccctcgtcgccccggccgtgctccgccagcagcttccatggcggcacgctgagggggtcggcctcgaggatgacgccattgagcgggaggggcttaccctgaaggcgccggagcaggaatcgggagacgagctcgccgtcggtcggatcgaacctgaggcccggagggagcccatcagcgccaccaccacccgccgccatcgcgatcttgatttctagggtttctagggttttggggaagaggaggcgggagagggtgagaattgaagcgtggggggatgagaaagccgtttcttgatttgaatttatccagtgggggagcccaatgtcggtgcgatacggctaccgcgcgcgatcggctcagatcgctggtgggtgtgtttttttttgtgtggatatttttcgcttttttttttttttgggggggggggggaaggtttgataaaccaaatcctagcaatttatttggaacctattttgaatagaaatttgaacaattgctcaggtcctcaggttatatatctcattgtgacaaagaaaacgttgtttacagattctgaacatctgaaggattttactagcgaggtacttacatccaattcaaacatgggtacttctgaagtgagagggggttggggggggggggcagagttgtgtggtaatttatcagattcacatcaatctatctcttgagtaatgggtctgaattcctgatgtttagtgtgtgttcatccagaagggggaagtcttctgctgttctacccttctctgatctctgaatcctttcttattctgatgatcaggttatgaacataattgcgctgaaaattatgagaacctgcaatatctgctactaatggtgttccctgatccgcagttgcacaaacttcacaagataatcaaattaaaaaaggaaaaaaagaggacagagtttcattatcaacaaaagtactgtgtcgtggttaattgatggcaaaaaaaatagttttaggaaatttgtggttattgcacatatacagtccaatactccacgtcacatgcaccctgaaagtctgaagattaaatgcaactcttttattcattttgctaactgcactctgttgtgctttagtgcaggctatgaatcagtttggtgagaattgtgatattccacgcagaaaaggactggcagttagtagcagtgtagcacaaagccacatactttaacctgtacagttcatgtgacatgtactctgtcaaaaaaaaaaaaagagagagacaagaatcaattttggagagaagtttttgaagcaggacatgaatagtgcatggcaatttatattgccgtgcatgaatagtagtattggtcaaattgatcacaggatagccattttatctgtttgttacaactgatacaatattataaactatatacgagataagattcaatttgttttgcaccctccttcaatctcagatgtggggagcatatt

SEQ ID NO: 37588 - DNA, 582 bp, Oryza sativa
ccccaatgtaactaaaatgacatacttaccaatgcaatcatttgtgagtgtgccaatagtgaattgagtgttaaaattgtactttaagatggtctttaggggcacagttacatcgatgcgaaacccgtgtttcaaggcattatgtaagaaagccttagttggctgctacggtcgacttcatctgttagaaaatcattcatgaatatttttaacggtgttatcgtattatctggtagatatgatatttttagacaatttatacatagatgtgaaaataagttatgcacactgggttatgcagtgtagatgatatttttagcgtataaataatgtatcatttattttagtggtacaaatacagtttcttttattaaaagtgcacctaactttcaaaaacaatgatagtaagtagtggtgacaaaagacgagtttatatatgaccaggacaaagggatttttacttaaatctaataaacattctatcacatttagtaatctataccatctattttacggcaaatatatttgttttttttatttagggtaatctatattcccttacagatatatgtattaatgtat

SEQ ID NO: 37589 - DNA, 622 bp, Oryza sativa
catgagaattatgattatccatgtatgttttttctttgccaagtagtattggcaaacatgaacaatccagtaaaacacgtataaaactataaattctatatactgagtataattgatggacgaatgttatacacctctgaacccaattttgtcaattctttacctcaaatcaactcaaaacttaaaaataatactgtttttgccacctcttcctttctgtatatatctgtccttcaatgttgggtgtattacttgctatgccatcataaatattgtagagacatgtaaatggttgagttaaggtggtgtcctaaaaggccaccataaccaatgtaactaaaatgacatacttaccaatgcaatcatttgtgagtgtgccaatagtgaattgagtgttaaaattgtactttaagatggtctttaggggcacagttacatcgatgcgaaacccgtgtttcaaggcattatgtaagaaagccttagttggctgctacggtcgacttcatctgttagaaaatcattcatgaatatttttaacggtgttatcgtattatctggtagatatgatatttttagacaatttatacatagatgtgaaaataagttatgcacactgggttat

SEQ ID NO: 37590 - DNA, 544 bp, Oryza sativa
accagatcctactgcgctagctgcatacgtgatgccagtctcaagcaatgggtagcgggaagggccatcctttaaactagtggataccccacgcgctgctgtgggtatctcagaattaattacaagaaagctcaaataaaacaatttagaaataatgttaaaaggatggcccacagtttaggcaatttaggtagaatttcagttatacatgacgcatgtatggttataatcaagcgtgagagaaatgtaatgggcattatttttctaagttgatgtggctcattaatgttaagctttatgataataattacactaagtaggttgtaaatgaatatgatatatggatgatggttatgatgaaagcgctataaggattcaaaggatattattttctagtggcttaatgtatgtttagtgtttggttccaactatataggatgtatagataagttgtgtatctattaataatctctgcaattaaatatacattgctgggatggaattggatcagaactgttgtctttctcatgtgatttaactacat

SEQ ID NO: 37591 - DNA, 649 bp, Oryza sativa
aaaaaccaacttgcatagtaagccttgataattggggaaaatccaaataactggcctttatactcccctcttcaactcactgttgcgaaaaaggtccccacaatttcaatttctcttccatcttcgctagttttttttttgccgggtcggccgaaagattggccgaccaaattttattaagatttagggagtttattacatggttcattcacgacattagattgtcgagtttggggtggctgaacaccctaaaaaaaccaatacaaggaactaaacaaagagagagaggctactcctcgcgcgcttgaaaaatgcctgctgacttccaaatggagatttcttccttcacattaccaaccagctactctgctactttgaatttgtgctaaaaaaactcttccattccgttctttccaaatgaactaacaaaccataagaagactgtatcaaccgccttccggtaactcacccggaaaaaggcgcgtgcatgctgccaccactccgctagcaaaaggttatcatggtttggcggatgaaagaacaaatttatccagtcccgtagcaaggaccacactctattggtgtagaagcatttggtaaaaagatggttgcagtcctcaaattcagcatgatatagcgagcaggtcgg

SEQ ID NO: 37592 - DNA, 651 bp, Oryza sativa
ccctcttatttgaattttctttgaaaaaacttaagtctcgcataaagtattattcatgtttataatctaataaaaataaaaatactaatcataaaaaatttcaaataagacgaacggtcgaagttggacacggaaactcatggctgcgcttattttgagacggaggtagtactagattggaccttctaggtcatatgtttttgtttgaaacggagagttcaagacaaaaatcgaaatgtctgatgttcaatcggaaaccaaaactcggggctaatttatgtgtcgcaaactgaggactccacttgtgggaaaaatcaaaacttctgacagaccgcacaaaccacacaaaagactccccataaatttaatttttcattttcaatttctcacctgccactaattttttagtgatttatcactgctagctcagtttctcatgttgtgtaagtggccaacgtgaagaagtggagttaccccatgccatcttatcaagggtgagttcctccttttgtcttacgccttccgtgcatgggacataggttgcagcaaacctcgacgcaaaatagaacaacgccggccaaaacatctacaaccagtgtgatccttggtttgaaggaagtacgtgtccttgtcgaggtgatatgggataac

SEQ ID NO: 37593 - DNA, 544 bp, Oryza sativa
aaggaagtactatcgtgaggctatatccagccaaaacaggaggaaataaatctataataaatgtactgcttaattacctagatttctatgaatatatttgttacaaatgaattaataaaatgccatctaaagaaaaaatatactactaatgtactgcttaaattttcagattgctatgaaaagatttgattcttaaaatacataatagcttgccttgttacgtgctaactaaatcatatctgaagaaagaagtggttaaataattttatctacaatgactctgtataattacttataatacttaattatatgatttgtctaaagatttggaaaagtaataaattagtcatgtccaaagaaaacaggcgacaaatatcactgtaaatttggtggttaattcctccaagtcacaagaaaatatttgcctcagcagattttgtttttataccttacggggttgtcaagtttcaaacattttgatttatatagttgaccaattgtttgtaatatatgaattcattccctctgatcttacccgaaacaa

SEQ ID NO: 37594 - DNA, 729 bp, Oryza sativa
tgaattctatatcggctattttattcccgaagtggaattttttctcctcctaagatgtttggcgtttcctaagaaattttgtgatttaaaattatgtcctagacttcatctaattattaagttcttaattatatctaaagtactaccggcaaattgattccttatggagatgactaagaattaatctataacaatctataagaattcatctaattatattttcattaatcctataattaaatgctaatatttttaaatattttaaatctccccctaatttttcctttcttttctctccctctctcttttcttttcttttcttttcctctcctttctttcttttcctctttttcttttctttccctcccagcccctttctccctcggctccttctccctctctccctttttctgcctaccgagaccggctggggaaagggaaaaaggcggcggcggcacggtttaccggcggcaacggcaacggcggcggcgcacggcggctgcgacggcggcggggaacgcggcacggcctaaaagggtgacggtggcgcggttgagatggggaggggggggggaaaattggggaaatggtgtggggaggtttggagatgaaggggggcttttataggactttgggggcaaatggccggcctaatatgatgtaaacggcggtgcacgggctcggaacgacggcgacgcgcgcggcgcgaggcaacgcgacgacggcgcg

SEQ ID NO: 37595 - DNA, 581 bp, Oryza sativa
actcccgtatgtacttcagcagaccagcatggaagcttgacaaataccgcctgtttcatatttcttgaccttttttatagctaacatggtctctaaaaatatatcttttattttaacacataaaagacaagtaaatatttaattttattgagacagtgttttcaaactagagttattagttattgatagtcaaagtttaattgttcgatctcaaccttatttcaaaggttaagaattatgaaatcgaaggaaatactttgatcccaatccgtcccatgatataaggtgtttgaagtccacaatataagacatgatcaaacttggcatattctacaaaactaatctttgacttttagattctgattatacgataatgtttagcaactaagttcacatgaaagtaaattcaaatgctaatttaattatatgagtaaagtgcatatagggagtagataatttggctatttctagctaacttgaaataaaaatgtttgtaccaacaatagcatatggttctatatatgactacctctacacacatggcatgcaagatctgtaaggtcaaaatgatatggaaaaat

SEQ ID NO: 37596 - DNA, 628 bp, Oryza sativa
atgtcacccaaaataaacataaatgatccacttaaaccaaagctaattctgtagttttattatcgcaaaaccactgtctaaaatttatttaatttttctcatctatcaattatgtgtgcttctcactcatcaaataagaataaaaaagttttgaacaaatccaaatattttgagaatctgatctccaaaattaaataacccaaaacagatgtacttaaaacacaatgttaggttttgtcagacggttgctttgacattttatctatcagagattaagtttaatgtgcatatctgtgtagtgttatttttaataaaataatagtttaaaggatgttgcaacacatcagtgtgatttttcacgattagtatttctttccgattctatgtacgtgtgcatgttttcttttatttatttggctttatctgttttatttatcgtatatggtgtaggtatttaagttttatttttttaggatggagacgatcgtacgacgtacgcacattatgttttttttccagatagagattagcagcatgggatttttaatagatctaaactaatattttaaataacgggtcctccaatttaagtaaaaattaaaggatcatatgccttccttttttctct

SEQ ID NO: 37597 - DNA, 548 bp, Oryza sativa
attcaagttggtttcattattactgtccctgatgctacaagtgtagaagaaaactgtgcacagtgaaattacactcttagaaccaaagccaagtatcttttattttactttcgataacatagttcctatagattttaacaaagttcatttatattatcgtgtagaatattttctatttcgtattttagttggataccataaaaaaagtggtggagacttgtgccatacatcaattcttttatttatcattttagactgtccataggtggaagatgttataaataaaagaaaagcagtggcgagcagattgcctgaagccttaaaactgagtataagcacattgcgcttcaaacaagagtttacaaaaataaatttcagaagactcgggtacatctaaggtgcaaaagactataggtattttagcatgtgccatataatcccgaggattataatactagtgttttataaaaaccacataatttacgtgtactgtgtgacataacttattggttattttatatatcttagatcataatattgatggtttt

SEQ ID NO: 37598 - DNA, 1443 bp, Oryza sativa
acctattggatgctgaagctatcactggaatacttaaggtggagcaactctgtttgcaagctctctgtatgaaggaatacctgggggcacccatcattgatgttcctgtcgacattaattttcccattaaagatctggaaattggtcgactgaacagaaagggacctagcacacctgtggcctccaaatcaatttcaggctctgacttgccagaatttgtaagttgatggtatgcaatgaaatgacaattttcttataaactcttatttcaagagttcctactaaatcatgctgttatgcaggtaaaaattatttcatcatgcccttatgggataggcaaattggtggagtcattgcgtgtgcaatttccttgtgtccctaagttgcaactgaagaacaaaatttgggagatagctgactttaccaataaccgttggcaggtctttaacattccgctcattattttaattgatgtgtagttatgcctatattacataataatggtattttcgagcaggttaagaaagatatcttggactggtgtggtctatctcttccaccaggtactaagccatcttatagtgcctttgctgcatttgaacatgaagtgttacttgtaactgagaacagtgatgtgatgttgctaaaagaacatctcagaagctactaatggagtttttttttctttactttaaatagaatcgatattgcatgcttttaatcaagtatgtgttgcggatgctgaattgatgaatgtggattgattaaaaaagtgcatctaactgtctaattgattatgccgtgtatttcttagattctgtgttatctgcaattctggtttgctttcttctatagataaaggtatacagtaatacactgctttcctggtacagatagaggtatccaacagatgcagcctgatgaatcgggagattcagttcaaccctctcctcagcctggcgctaaattggaaatacacaaacaccaaattgatgcctaaggatcaggttgcagcacatctcccttctggcccttgagaatcgagacacactgcttaaaacaacaccatagactatacaccagtgtatatacttagcttattaggttgtacagaatagagagttttaagattcagtcgttcagagactacaagtattgggcttcagttgtatagtgtaatgcagcaagtcccttgtagaaatggtggtcatgggatgagtctcatacgtagtactgccctctgtctgggttactagcatgtgggcctgctgaatgtggggctcatatatcagattatcagtccctcgaagtcagatggcagtactgtagaggatctgttgccgtggtcatgtaaactgtcttgaggcagaaataggctttttacacctcgtgtcatcttcgaaacaaactatggtgctccatgtgcttgtttaatgcgttaag

SEQ ID NO: 37599 - DNA, 613 bp, Oryza sativa
tagaggccctcggcattgatgacgcgcgcacaatgcttgccgcctcgccccttagcgcacgccgggtagccaagcgaggaagctgggccacgccgccgcacgcgcatgttgaagggagacgggtcacgccgctgcagtgtaggtggaggagaggcgaggtgggaggaccgtggtggtcgccggtggcgagcggaggtgctattgcggctggagtgtgagagggagtgagatgtgggggaagaatatgacaagtcgacccggggcatttttgacctttcatgttgtttatctctcctattcaatcggaatttaatattttagtgtatgcggtgcccatcaacaaataaccacattttgagagtgtcttcccctaaagatcgacttttgacgtgtcctagagttaaaaccacaaattgtagtgtcctacaacaataattgtcttttctttttgtaaaattggtttcacgtcattgaaagttttcgaatgttggtttgcaccatcgaaaggttccgttgcactttaatacttggaaactttcgatgccgtggaacctattttacctattttttatttattgattcccaaagctattcacataacgacatgcagtgg

SEQ ID NO: 37600 - DNA, 608 bp, Oryza sativa
  unsure (1)..(608): unsure at all n locations
tttagaaaaatcagcacctatatgcatggaggtgtaggcaccggttcttatgacagaaccatcatttataagtgggccccactaacggtccaccaatactttcggaaggtgggcccacttataggtgctgatttttgcttgggggtattgggtctgtttttaacatagaaccagtacctataatagaaaataggtaccggttttgtcctaagaaccagcacctattgtgtgcagtataaatacctcctacttacctcaagctggccaggagtagacagagctagtggcgcctctattctactcgtctagctagaggaggggaggttttgccttaaattttttatttaaggttaatttctctatattctatctccgnttcttttattgatgcatgtgttttcactagttgctagattttagcattttggatgtagattttagcactttggtagaaattcttgcaagtgcattattaattaattttatagtaaaataatagtggaaatctaaataatcttgtggacgataggagtatcccatgcgggtccgtattggtgccgccaaaatggtaccgacttgaaaccaagatcccaacccgtacccataag

SEQ ID NO: 37601 - DNA, 671 bp, Oryza sativa
ctccgattataaaatatgggttaggatatggaagggtaaggtctcacggaactcgcccggttttcactcttagatggtggttatgcatatgcataaagtggcttaatatggtggtttgacatatgttttgaaagcttaaccgaacttctttcaatatctaatagaacatatctgcttatcatcagttataagttatcaatttatccttatatagtgagataacactattaagatgttggtactcatttgtaatcagttataacgtatcaattgatcctactatagtgagatgattctattatgatattggtacttatttgtaagtgaaatctaatagagtaaaagatacatttaagtcgaaattttaatatatatgtctaacgagtgggtcatgtgcgtcaaacccatctaactaacatacatattttcataactactgtaggggtataatcggcattgcaaagtttaggggttgaatatccggtttcaaagttcagggtgctatacggatttctatccaaagtttacggggttatttggatttttttccttgtttttaatgtaaatcaaccacttatatgtcatcaaagagacgacaccacaatgtccataatcttttgcagctcttagccggtcgatcgcttattcataatacatattaacatatgtaa

SEQ ID NO: 37602 - DNA, 584 bp, Oryza sativa
tgagtagatggctaattcgctatggagcaaaataatactggaagactggaggttaccttttgttgtttgcatgtaatgatatatgtgacacagaagacctcaagaaaagtttctatgtacggataagggctatggcttataaacatgttcatgttttttttccggtttgcaaattggtattctaacctggaccaggaacctaccatgagttttaatattaacataattgttttgcattggaataatgaatgttatgcaaacattatgcagtctcctgaaatgaatcatccgataataccaaagtaaatgaagcagcaccgcatttatagagaaaaaaatgttttccctaagtagtcctacacttccagttgtaagaaggattcaaactaaagaaaaaccacccttccatttgtattcatgctttaaaattgtaaaattttatcttatattcttttctttttaccaatgctttcatacagtttggggatagacggtggagatgagacgaacatgggttgggagacgccgcagcaatgtggtggtggcggtgcgtgtggcagccgccgagggtagtggccacggag

SEQ ID NO: 37603 - DNA, 524 bp, Oryza sativa
atatcttgtattccagataatttttcttgatggagattgttgtatttagtagatatatgttattctgtcttgatggagattgtcaactttcatagacatgttattctgttttgatggagattgtcaacattaatagacatgttattatgtctagatggttattattaactttaatatacatgttatttagtgtaggcattttttttaatatttatttttgttttctctgttttcttaggttactctacaatctacatgtctaacagccattgataatttatattgtcattgtgttttaattaaattgatattttgtggtattgtgttttgtagtggttaatctttaattgttaattcatttctttcttcatctctgatctagtatgaattatcaatggtgtaagcaagatttgtgctgtaagcctaattgattttttccttaacaccagacttaactaagatattagctttatatttttcaatgcgattcgtgtttttgctctatatcttaactaatatagatg

SEQ ID NO: 37604 - DNA, 536 bp, Oryza sativa
ccaatttttgttggagaaaagaacatggcctttactccattacttgaattttcatctaatatcaatatggcgtaaagtattcaaaaatccctggagaatggatgagcatttggtatctgtacaatcgcctctgagtctactatgacctgcaccatacccggcctacctcaccttcgcctttctagagagcactggccgtcggcttaactaactccagatcgagtcccatactcccatgggccatggcccatccgtgccacgtgtcgcatgctcctaccggcgaggcgggcccaccaagcttggtcaaccctccagtccgccgtagaccgtagcgctatacggacgtagtacgagtacaaatacgtcacaggcttgtactcctataccggctctgcctggtgcaggcgcttacctgcgggtggcccaaccgcgacgcaccacgcgttcacacggacacgtcagcctactacgcctgtctccgcgtataaatagccgccgcccccgatttcgccggtgctgctaacctcggcccactt

SEQ ID NO: 37605 - DNA, 680 bp, Oryza sativa
  unsure (1)..(680): unsure at all n locations
tcatccactataagctaaatatcactttgaaatgctggcaagtagagctgaaaatgaagcatcatgtttcaactgaacgaatccaacggtcgaagcattcgtacgtgttacaggtatcacatgtgcatattttaactgccaacggcattgcacatatgcagtaggatacaaagctctgtcgcaaaagagaattattcaagctctcaaaaccaaatcatccataatccatgttctatccacattccactgaaggcgaagatagttaaagaaagccnaaattctgatgatctaattaatcttaacgggttcactgtacaacgaatatagggccagtgccacatacaagtatacagcaaggcctttgccgctccagaagacccatgtggtgtattttgctgcagcccacaggtacagctctcgcctccggtacaactgatgtgtcaatgataggagcatctttctgaagagaatgtcaatacgaagcattggtaatatatgattctcgagctataagcattagtatagactctcacggacccatgactaaattgccggcggtactgtagcataagttagccgaatggtccatcggtgtggctttgaaagtaaaaccttcattaggtttttcttctctcgaaccatatatattgctagctgcattgccagccatagtcggcttg

SEQ ID NO: 37606 - DNA, 666 bp, Oryza sativa
ccctcttagcttgtagcttcttaattacttatttgccacttttgcccatgtggcatgccaacgtggcagcgcggtgcaaaatatccgtgggacccactagcgaatacacaactgtcccctaacaccctgtgttagatcagaccagccgtccccttgattgacggagaacctcagttacctgacgggtggaaaagaattcttttcgagggagcagatgggacaaatacgctagcatacaacgggggaaaacccagaggcgaaagaaagatgcaaaggaaaactacctaacacacaagatgcactggacagttgaaaacaagcatagacctctataatgcaggagtaaacctacagatcaacaaacccgtgcgtcatctataacgcaagagagggtaactcctaatgcaagagaaacacctgcaggaaccggatgaggggcgaagtataacggatgacggaataatgagtgattgaaataccctttaaaaagagaagatatgttctagcgtggttaacaactccaagaggaatacgactctgatgagtaaaggagaccaaaaaacgatttctggagcaacaatggacagaaggaaatggcacttaaaaaacatcgttgtaacgtaacagggcctgctgttaaaaaagtcggaacaatcacagaataat

SEQ ID NO: 37607 - DNA, 640 bp, Oryza sativa
tgctgtaatgccagcgcacactacctgcacctaaaacataccaccgagcttgtggactgtaaagctgcgtgctgatgtgaagcacctgcaccactgcataagctggagaaggtgacgatctcggcaccgtaagctcctatgggtgagtcagagactgatctctgctgaatacgtgctaaaggtcaataatttggatgtgagctggttcacgcctatgacgatatgtctgacattgtctttggtcgagcgtgagaatactaagggcagatctactgattggtacaggctcgaatgggacgacctatagaataatgctgaccatgcagaaggatgcaggataccaaaactacaggtcaaccacatggatctacacgtgtgtatttgactcccaaagtagggtgctacatcactatagtagagctgcctcgcactgagtggatgcaggaacatttaagactatgcacaatatttttatgaaccggtgtataggaagtttgctgaatttacaaagcagggcaaagctctagggactaatgcacttaccttcatgggttttggctaacaacaagaattttgacgctagaatcgtaaacaagaaatttaatggccggaaactagcactaaaatttttatggaatgc

SEQ ID NO: 37608 - DNA, 504 bp, Oryza sativa
  unsure (1)..(504): unsure at all n locations
gcgctcaagcgcatcagggaccccgagctccgcgccttcatcgagcgctgcatcggccagccccggaaccggcccttcgccgncgagctcctccgcgaccccttcttcgccggcatcgacgacgacgatagcaccggcacgctcggctagcctgttaaccagctgggtagtactagaaattattgtatgtgaattcgattggaaacaaataaacgttctaaacgaattaagctccagcgagtagcaaatgtttataggttcatgtctcaccggcgctcgagcttgtacctgtagctttggatgtggttaattagtggctagtactggagtatttattgtactgtttgttctttggtttgcactgattngattcatgagcttcaaagaaatgcaagatgacgagctgtatttggcttttgctttgcgtgtcaaatgtgtcacaatcctttcaaaggatggntgtaaattaaaggtgtgagatttccatgagctggatgctggagt

SEQ ID NO: 37609 - DNA, 680 bp, Oryza sativa
tctctcctatgcgggcttgtatttatatccataggtgtccccttgtccaagtcgaagggggaaaatcagtgtggatacaatccgaatattcctgtcgttttcatataaaactttagatatctttccttatgcggaactccccctatatccgaaggttgtttacgtattagacatggtatgttgtgggccctgccgagatttagtcaactactattaagtatgtggcatccataaccccgacaataacttattacgcatataggctaaaaaaattactaattacacatattgcgactaatttgcgagacgaatgttttaaacctaattgattcatgatttgacaatgtagtgctatagtaaacatttgctaatgacggattaattatgcgtaataaatacgcttcggaatttacatacggattatcgaatttgtgtcattattatactacctttaatatttcaaatgggtgtccccatattcaatgtgacacaccacaattttacagccctcaatctaaataccctgtagtatgagtattacttaaaagcctccaaagtttatttttcaaagaaaacagggcgccctataattttgggctgcgggagtagtaacagctatttgtttttacacttcaaaccgttcgtgtatgagcgcgtagatcgcctgctctaacgtaata

SEQ ID NO: 37610 - DNA, 663 bp, Oryza sativa
aactaagtatctatgtctatgaacaacgcataactgtctgcacatgtctaaacatctccaaagaacaatagtatctggttatttaagatttacacatttcagaagtcaaaccttaaaattcgattttcactggcaatgacagaatatttaagatgatgcaccatctatgtcaattatcagtataggagagattcattccttgattaatgaaatcaccatcaccatgcatatgttaggacaatccaattggttctggattcttggcagaattggtcaagatgaacttatgacttcagtaagcttttgacttattcttgaccaagatggttcatttttaagcaaaagggcattaagcttaatgaaacatggcaccaccgaatttttctcaggatttcctattttggtggttaggaatagggattatggatacaacatcctgcaacctcacctcgggggccacaccggcgccgcgaagcccacctcgacatctccgtgccgccaccgaccgtggaggacaacaccagtgacaccacgccgatcttctccgtgggcactacccaacggggcttgcacacgcaccggcaccaacacatgttggcgggttttccacccatgttgtcttattttcaccgtctattcccaactgttgaaggcattggtaaa

SEQ ID NO: 37611 - DNA, 653 bp, Oryza sativa
ctgtagatcatacacagcgtatcggttacacgggtcaacaaatatagggccgaggtgacatacaggcttacatcatggcctgcgccgatccatatgacccatagatgagtattgtgcttcttaccacaagctcagttatacactgccgtttaattgatgagcgaatgatacgacacatgtgactgaagagtatgtccctacgcatcataagatagatatgattctcgagctataagcattagtatcgtctctcactgacccatttataaattgtcagtatgactgcaccataatgtaactctacatttcatacatgtggctcatatagtaagactctgaactagtatttgttaccacaagacgtatctattgctggatagggtcatagccaaatttaatatcgtcgttgctgaatgacgcacattactgtatactgtaaaccatagggtgaattatattctggatctggacagatactatcgactgtattaggctcggggcttcaatgaggtgtggactgtttgcatctccgaatatctagctgttggtgtgactttaacccgcctgtaaattttggatcgacatttgtactaggttatatgcttttataatgccagctaatacattttaggtaccgatcatcgtatgctacc

SEQ ID NO: 37612 - DNA, 613 bp, Oryza sativa
agagaaaatattctttttagtctctgtagtagtcaaattttaaattttaaataacttaaattctctactaagcatctcatttaggggtgacaacggggcacatcaaggaaaaccaggccccatccctaaccccgatgggtcctgggaacccggtcggggacccaagtgaaggagagggggcatacatgtagggaaataaggtcggaactcgttgacaacgagttagggagtgtgagacagtggtaggccggcctgttgagagaaggagacgcaactgagcataacagagctgcgaagccgaggcagtgaagctcaatagaggtgggcgagctaggaggcgcacttcttcgacaagctagaagcagtgaggaaggtgatgctcggtgtgttgtactaatgtgcgagtagcgagctgggaggcagagaattgcgcatccaggaggatgggtggaatcacgtgatgtcatgagtgaccaattcgcgagcttcggggagctcaaattttgactttttgagaagcatatggtgaaaatgtagaagagctgcatttctcaacttctgttcttctgttaattttttgtgtactctattactactatatattattagaatc

SEQ ID NO: 37613 - DNA, 1082 bp, Oryza sativa
gagcgtcgtcgtggtcgaaccggccaaaggcacggcaaggcttttgccagcgtcttcacattactcagacaagcaccccacgtcgacgaccatggaatagaccgtgacgtctcacaagcaatcatacctcgacgtgaccaaacacgtcagcgcatccacatccacacatcgcgagcaggaggctcaccaccagcgagcaaccctgctggagcccgcctcgactccgcatagccaccgagctcgccggagccctcccgagccatgcaacaccgctacacgcaaccgccgcccacgccacgcccgctcccggtctcctcctttcctgccgcccaactccttccccgccttcatatgctgccgctggcgtcgacgcgtcgtctgctgcacggcgccaccatcgccagccatcaccaccacggccgtcagccgccgtggtccgccggtcatctccacgccaccatcaccagccgccgccgccagccgccactatcaccggtcgccgctagcagccgccgcccatccagatccggccggggtggcgcgggtccgggggacggagcgcgccactcagcaccaggctggagcgagacaaccatgacggcacggcagaggtccctgttgtggtggtgtaacaccctgaaaattcgaccgacaaaatcaaaactctaaaaatacggattttcaaaaactttttaaattaattgcatcatgccgatcttattcgtctattttatctggatttgatctcgaagattattaatcgtgagtaaagaatagttaattaggaataaaccttaaaaacaaattggtaaaataaatacaaattaaaataaagattaggtgtggatagaaataaataaaatattatcgcgaccatatttggatcaattaaatttaaatacgatggaataagaattaaccctaattaaaactcaaataaattatataaaaataaaatatgagtaatattaatctagggtgaattcattagttaagataagacaaatattgagtaaaatgcatatatgcaaaattaggaattgtggaatcaaatttatatggaaaatacactaaaatcggga

SEQ ID NO: 37614 - DNA, 596 bp, Oryza sativa
acatttcttcacaaaatgctgcgcgatttttttaaatttctgccccttctgggactgaatgcaaaatctttttctatggtttcttttgtgcaaccaaacataagtgtgccttatactacatggcatctgcattataccaaaagtggccttaccatatggactctatgcaaaatataacttccaacttctaagaagcagcttttatggactgtaaagaaaaaaacaatgtagcgggctttattatttctatttgcgcgttgggaagttgttctgttatcctatccactataagaatacatcatgtcattaacatccattttccattagtttgtgcctgatagaattaaaatttacattccaaatgcatattttaggatcagaaaaattattttgcttgatatacaatagtaatgaatggtaacgttcttatttcaatagagaaaacgaggctcctccacagactccattggcatgtatgcagttcaatgttgtgagtgtcacaaatggcgcaaggttccgacgaaagatgaatttgagacaattcgtgagaatttcactgaggagccatggcactgcaataaaaaaccttactgctc

SEQ ID NO: 37615 - DNA, 763 bp, Oryza sativa
gcattgacctaaatcatcggaccgagcggtccggaatacatccaaaagcagaaatagataaggcagcggaattcatgcagcggcatgccattgccacaggcaacgaccgtactaagacctactgagcgccatcgtcttcatctccctcctggtagtaggcatagggatcctctgaagcttcatctcccgcttctgattaattttatatttgcaagggtgagtaccaaccgtactcagcaagccatcacagcaacaatgcacatgataggtgtatttaaaggatggctatggttcctttgcacaaagccagttttgtaattcttttcacaagcctaagatctagcacagactgatcaaattttagtaccagtgttcatattaaacaatgacggttctgtccaccatccattgtgatcccaagaatagcttcccgccattgagtcgttatggttttctgaggacgtccacattcccgcctctcaggaagtggctccatcagcataaaaaaaatcatcatgcaatatcccatcccacacaagttaaagaatttaaagtctagccaagtgtaatacatgtcccggtgctcaataaccgcgagcacgactattcgaatagatttggtttactcacactgcagtggatgcacactttacccgcactccgcgactgcccaacacatgagcctcgtcccaacacatgagacgcgtcacggcaaagcttttcgataacctcgcattggcagtacccgctccatgaacttaaa

SEQ ID NO: 37616 - DNA, 1314 bp, Oryza sativa
aaaaagaaaaggaaaagagggaaaaagagaaaaaggaaagaaaaagaaaggaaagaaaaaggaaaaggaaataaatagggaattaaagggagattagggaagtttagaaaatttaaaataattagaatttagttatagattagttatagtcgtagaattgcgaaatttaatataaattatggattattcttggtaatttctataagaaatcaattcgcggtagtaatttagatgtaattaataactaaacaaatagaggaattcttatagattattatagattatttttgggtaatccctataagtaatcgattcacggtagaaattcggatttaattactagggattttagccgtgtattatatttaatcatttagtcatagactaaattaaatcatataatatttctaggatttcgtccgatatttagctcgcgatagaaatctctaacctattatatggatataatgctcgggtagattaaattaaaaacttatgagaacaaaacatttatacctgcaaaatagtttgaatcgaaattgggtttgccctagtacgcgaatagtaaagttaatacaaaagaatcgactttcgcgttcgacttccatttggatttatttggatttttatttgaattctaatcgaatccaaatcaattttcgcacgtaactatagagcccgagggagttgcggatccaagtgaaggccaagacccccaagactttgagcaaggcaagtcatcactattccttgaatatgttgatcccaattgcgaaattgttttgtttacaaataaaattgcatgcaatgatgaacatcctacttgtgattatgccatgccttgattattgtttacccttaaatctttgtaaccatgtttacgtatgagtccctagtcaactatgacaattgcttagaaatgctattctagaatcatgcatactcatatttatcaaatgctatatgcttgggcaattacctttgggaaggtaattgagatgcggcatgtggagacatgagcgccacattgccatgatgttgatgacataatttgtgaaaggagaaataaaattaaacaactgttttcgactggggcggacggaggatttgggtggtatctggaaaaggctagtatcgtccccggtcaattaaggactgagccatgaagttaagcatgaaacgacccccgtacaaccgcacttctcgtatgggtatagacctagcggattagatagccgagcggaggcagtatccctgcatagatggttcacccctgagtgaggcaggtgcgctacggtgggacagccgttgagg

SEQ ID NO: 37617 - DNA, 563 bp, Oryza sativa
atcaaaacatgaattactactgtgtgaataagtgaataatgcatttaccactcaaatatccagtgaaaacgcacgcataacatgtatcactgcttataagaaaaagttaagaaccaccgttgaaaatgaggctagaaactttaacagttatcttacttttaggaatataagtttcaacaatcattacagcaatactacaagcgtgaagaaacaagactaactttcctcccaagttaacggaaaagcaatatgtataagatccatattgaagctaaacttacatgtggtttggagatcaataaagcttcgaatactcagatggcatgtaacagttcagactattgatataccaagtaccaatggtatgccatcaactctaaccaaatggatactcatttcaggacctaaaacttccactgagcatcattatggacacttacaaacttcaaataagttcgccacagaactttataagttctaatgcctcatgagaacattacaaagggctcctttgattaaaaaaaaacttgtttttctataaaataaattaatggagtcctagc

SEQ ID NO: 37618 - DNA, 686 bp, Oryza sativa
cccaaagagaggagggaggattttatttgttttctttttattttaattggttaaatgatcttcgtgactttaaaactatttctcgagctccgaaaattcacggaaaattccggagagtacattagggcacaaagaatattaaaaaatattcccggccaatgacttttaagggaaaattttaattctcccattatttcacttgattaaattgctttaacttttatttaatttccagaaaatgcattatttaatgatttaaaacccgaacgaaaatcggggcgttacatcggattatctcatagatcaaactagtcttgttttggggttttcttcttcccatgtgctagctcatggaagtgatgaaggttgtaggaggtggtggcttcatttgtcagaggtggcaaaatggaaggtttcgagagaagaacccacaaccgacatcttggctggaggtggagatgtaggcccttccttccggcttggaagccgactgccaaagctgcttttgcggcagtcaggaagaatcaacttaggggagttgttgctcctagttgaagacctcgacgatggtggttgtttggtgcagtggttttgtgcttggctccagatctgcagggaagatgttgaccggagtattggggagggggggggggacaagctttgcgctatgacatcgcccgggacac

SEQ ID NO: 37619 - DNA, 1068 bp, Oryza sativa
tctcccaattaagcgcgaagcttccgtgctttactcacccaagatcgcgatcgagaggcgcggctcggctcgggtcgctatcggagatccatcgccgtcgacccccggatgccgtggcgcgaggctcgcccaagcgttttttttccgctcgagcgttcgagggttcgagctctagctgacacggcgtgagcgccataaattctcctgcgctatagctctcgccatcggcgtcacggagagaacagaggcagctggaagctgacacggcgcgggagcgcacgcacaggaagccgtttttttccgcgccacggacgcgagtgagcgctgcaggaaagcggcatgtagcagttgcttgaagggaacggaggatcagttcgagatgccatacggacgatcggacaggagtcacaggacaagcgagttacgtagggaagcgcacggctggcaggaagagaagataccgccagataatttgttgtagcgttaaaatctcgcctttttttatcgatcacgaaagacatacacgaaaacctgcgaccatataggcatcttcttcatgctacctcggtttgatcaactcacgctttttaaacagctaaataatatatttcgcggaaaatttttttatatatgtagaagttactgtaaaatattgaataaaactattcgttaagtttataacaattaaaactcaactaattatacgttaatggttttcttatttttggtgttctaacttctttatttttatcttaagtagaaacgaacattaccttatatttacataccaacgagcacatacattttaaggtgtacgtttaacatgcgtttaacagtaatatatcatccatatcctcgttgtgtatttatttattagtgtttatgcaactactataacgtaaaactgaaaaaattctcagctcagcaaatttaatttgtccattcctgtcatccacttgatagtactagttgatagtacaactgcgagagaggtttttcgctgatgaatgcagtgacatttggtcgtgcactcttgcaaccttgtgagttgtgacacagaatttgagg

SEQ ID NO: 37620 - DNA, 542 bp, Oryza sativa
cgatgcagacgtgcaaggggaacacaaggacggtttgtggctatttgcataaaggcggttgtaaaacattttattgagcaaaacagtaaaactgttgagtaattaaagtaacattaaatctgcactgatcaacgctataccacgttgaacaggcccaaccaacccacctgaactacagtgcattgggtcgatttattaaggtgggactaatcacggtgaatctggtcgaccgcccataaccgcgggcacggctattcgaatagttttactctgatcagaggtgtacaactgtacccacaagacacagccccacgacacgtttccgtgcgccgacatgccaccacgacataccggaaagaggccgtgacaggacccttcgcataaccccctctagccaagcacaccacacctcaggtttcacccccactcctcgcaaggcagcgggcagtcccctctcgtgcctaggtgaatccggaagccgcataggccgtcgcagggcccatccaaactccatcacgcccacccttgcctggatgcgtcgg

SEQ ID NO: 37621 - DNA, 871 bp, Oryza sativa
ccccccccctcccaccccctaaaagaaaactgtttgtaacatcagaaacacatagtctatactagtatatagttaatcagctcttgccatttagtatttaaacatgatccttttcttatcttctcatcgtttagcttccataattataaattagattttaaaacttaatttttaagttgattgagtttcttttatcatacttcatttttcagcattgttttataaacctctaataaacataaatataaaagttttacccctaaactattttttattttttccactgcccaatgtatcgtgaggagttccgccggttcccaactcccttccttaattagaacgtgccaatagctgctttaggaaaaatccaagctactatcgattatactgtcatcacttcagaggttcgacttgaggaatttggagtgtgatgcccctgcaattgcaacgacctaaacctatttgtatggtccaccgtgatttttccaggatagttgtgtcttcattttgatggtacttgtcgttttaacaagaacataataaaaagtaatgtttgaccactattttctattataatacatataaaaatattaataaatatactattttattagagtaattttaaaaattaaactatacatatggatattttagaaataatttataattaaagattttaaaatttcacattagacttgttcaaaacgatcgataagtattacgaacatgaaaagagtattacattgcacatcctaattaaaaatttttagcactgtaccctccgtcccaaaagaaattaacttctatggataaattttttgccgagatacgtccagaagttgttcattttaagagccagtttaagtttaat

SEQ ID NO: 37622 - DNA, 576 bp, Oryza sativa
aaaaacaatgtgacaccggtacttaatttatcattttgtccacaatctcagatatcttaatatacataagcagccaattgtttaaatggataaaaaagattcatttaactcttttaacacaatatggaaaaaaaaaagatgatgaagctttccttcaaggttaaagtaactagacgccaccaacatgaaaaaggtcgatcaaataaagaacacatgcacacaaaatcatatatccatatgtattttagttaaccaaaagcaactctttaatgaatgaaaggcgaaacaatcatttcaagcaagatgatgatctagcccacttcacctaataaggtcagatgcaccgaatgaacaatcacctaatcgagcccctgaatttcattcagaacactaccaaattcaactctaaactgaccaatttccatccaaaaaaacaaactgaacttgcaggatagtactagtagtactactacccagtaaccatgtcatccaagatccaagattggtgttgctacaacgatgcatttatcaaatgaaacaaaatttactgctcatcacaatcaaagagaggagggt

SEQ ID NO: 37623 - DNA, 504 bp, Oryza sativa
agcatgagatttggatatgaactaatactgctctttttcttatgaatggtacacgccgatgctgtactaatgaactacattgccattgttcttctggagatatacatacggtattattttttttgacaagttcagcgatatggattgtattcgttctctgccaagtccgttcgaccgctgtgttttcttttactttcccaactcaactcacgcacgttttttaaactattaaacattatttttttaatatatatatatataaagaaaatttgttttttaaattcatattaatcattttacaaacaatattaacttaattaattatacgttaatgagttcttaattcattttttttgaaaaaaaaaatagcctcctctgattcgctcgagcatttcgtcgaacacccatggcgccctcccacgaaaccaagctcgaaggaatcctttctccaatcgctccagctcgctgcatccgcaactgcaactgatctccttctcctcctgc

SEQ ID NO: 37624 - DNA, 618 bp, Oryza sativa
gtgcctgcaggtcgactctagaggatccccaggcttcccagatagtatcaaggaagtgaaacttaccagatcatggcatctagagaatgggatgccagagtcctcacccatcatgactgcttaaataagcaccagctttctgttggtgaactcctcttccctacctctccctaattcctgtttccccgcacatggttacatttcttccctgctttagaaacccctaatggtagtcagttagggaagtgaatttgagactgatctcccatatcctcaacagcagcacctgattaaagccttcttccctggcaatacttgttgtctcagtgattggctttctgtggagtgaacagcaggacttagaccaaacctctggcattttggtaataaaatgatgctgtgcaactttcaaggatagatcacaaaaaatgatgcaacttctacgtggatccctgaaactctggactgcatgtgagaagccccactctcctgaggctgccctgctgtggaggaagccaggtcacacagagggggcacatggaggcaatccagcctacagacctgctcaggtcctagctgacagccaacatcaccctctaaccatgctgatgaacatgc

SEQ ID NO: 37625 - DNA, 742 bp, Oryza sativa
tctgcagctttgttgctggataatcattgatctcgcattgttttatatctgactgcttgcttgctggagccgtaagtagatgtaactggagatggaatttttgcagcaattggtcttgccaccgccgtcgcacgcgctgcccccaccaagtctcccccgaggccggccgcacgaatcacgctatgccgcattgccacgggctgccgccggcaatccatgtgcgctgatgtgcagacagaggtgcaggaggaggggaaagcgcggcggggagaagttgtcgtatatgatggtggtacgggcggcgctgctcctcctcgtggcgctcagcacactctcgctgctcgccgcggggtctcgggacgaccgccatgccggcctcggtctcgccgcgcttctgcccatccacagttgtccccggcaagcctctccccgcagcatcgtcgcggtggctaggcaccgtgatggcggcgagctcctagccgtcgggatcggccggaggagcgagagaagaagagaagtgtggttgatagtgggccccaccatttttcttttatccttgccactgacaggtgggtcccacctgctgactcagcaagtcaacagggtcaaagatgccacgtaggacaaaaccgcctccaaaaccacccggggagttgatttgcaacggttttcggagttgggggacgggttatacctggttttgtggttgagggatggtattcatacacggccatgttgaggg

SEQ ID NO: 37626 - DNA, 752 bp, Oryza sativa
ccttaattctcctttggattcttccctttgcttgctatgcttttgcttctcttctccgcgtctcgttttctgatcatcctgtcatgttgttgctgctttatttcgatcttcttttctttctttcttcttccaagcagttattgtcccctatctccttaaccgcattctagcttacttctccttaatttctgaggctacagagtagtatttatgatatgcaactgtcgattgactatctgaatgatgcagacttcgagtatatgatcttggttcttgtccatgaaaaaggtagtatcagagtacacatgcatgcagagaaagtataatgcctgcttggtcactggctgtttgaccgtattaaccaaaactatacgcaacttacgtagaatgtatcgtgtgctcgtgcagattacgagacgacgacgaaaagagattggcacgccacacgtgcaaacggttgcacgagcaacgggacttatggagactcattcatcatccatcccaatgggagtttttttttttctttcttctcctctcattcagctactacaagtttacaagataggtgagatcacaagaatggagatccatcaatgacaacgtacccatgtacatagccagccagctgcccagctatatcatcaaagtataaatcgcattcttgccatcaaaattccaagcaattgcatcatccgtatatgtcacatactcacaacccatgctgatgtacacaacatctcaaaatgaatgcc

SEQ ID NO: 37627 - DNA, 2142 bp, Oryza sativa
cattaagaatttaaagtctagatctgtcgtagtacaacgtgagtattttcataggcacgccccagtgttgacataacagacttggatagatatcttcaatccaacaaaggactttggcaatttagcttctcgacaccattttactagaagctcacccatataccctctagcaatcatcctagagaccatgtcattcttatgccagttcatccccacctcccatgaactcatctcgacaaccaagtcagtgttttgccggttggtctctcatctccccctcacatcctttgctccactacttcgctgcgttgccctctaccgagctcaatttaaccaatcgagtcccttttccccgctaccaaccctatccactcctctatcctaacgagcgttcagtgatgccaccatgtcctcgccatcactgctgagaccaattgctacccattgcctacaaccggccagctactccctacccctccaagcctaggcaatccggcctctaatttcctccctcagtggccctccctcccacccatccatccacctctctctcggaaccctaatccaacggtgagtggacacgtcgcacaactaccggttgaaacctgtttgcagggatgacgttgtcgcaaacgttcgcccgttagcatttccgtgtacatgcgcatgcatatatatcatgtatagtgatttactattgacatgattaactgagtgtaccatgggtagtacccttgagaacagtgagagattaggacagggcgatcgatgatcgagcattgctatataggagtatgacgaaaagatatcacaacgtttggatcgagcgatatccaccacacatagcgtaaggtataacgcaaagacaggtaagtacagtgcatgaattggacagggtccaccttaaactgaagtctgaacctagcgctgttcgatcgtacgtacgagagccctagctgtgaccacatctcatgcatttcatcatgcactagcactgtacgtacactgtcagctagctgctagtagagctacttgaattattaatttctgctgtatatatatacattctttgtccaaaagaaagtcaatttttaacttcaaatttacccccagaagttagttacgtttctttctataacgtagcgtattcctcccttcatattcagatttatggtcatagaatatgtcacatccatctaatatcttttatattttgagcccgaaggagtatctagtagcgaattacgactaattatttatacatttattgtgtcggcatatatggatatataggcatgagtttctcatctcagcacctcagcagccttcatctgaagcagaagcatgcgcatgcatatattgaagtagtaactgatgatctgtacatatgaggagatcgataaatgatcagacactcaaacacacacatgaattaatatacgtcagatgagatatgatcattgcaactttcatcagatttcaatcgatccatgcatgcatatgaattgatcgatcttattagctagctgctgactgaagccctgaagtttcaatcagctgcagggcatgcattgcatagtgcagcatgcatgcatgcagcagcagaagccgctcgcattcaacatctatctgaatgtcgtctgatgatctgaaagctagagagagcatgcattgtcgtcagcaagtcagcaactaattaagctcatcagcagctctagctcgtcgtattgggcgcccacattggcgttattcagttaaatttgcagccttgcagttgcagtactgaagcatgaatgactgcaggccgacatatgtgtacatacacttgcatgctagcctagttgcagctgttacttactgcccggcactgaaatagttactcctcctactgatcctaactccattgcagtagtaaaactcaatcgatacagggctaactacagcaacagcactagttcatgactttcatgtgctagtagtactattaattaatcataccagagtggagtgtacttcttaatcaagaggaggaacatatatgtgtgctagctcacagtaatatgtacgtatactgatctgaaatgcaatatgtagcatcgtactacagatcaattaggactgcaatagctgattaactagtag

SEQ ID NO: 37628 - DNA, 626 bp, Oryza sativa
ccgcgcgatggcggcgtggtggcagtggccgagggcggcgaggcgggcggccacgtgcgcctggtcccgccggagcgggcgccggaacaccgccgcggagtgcccgcggagggagcagcggaaggaggtggaattgggggcgagccggtgggaggaggagaagttggcggtggcggcggcgagctcgtggaaggtgaggaggagggggaggtcggggagagaatcgcggaagagcctggagcaaggcggcggtggaggagaaggtggcggtggcggtggatggcgcggaggaggagaaggtggtggagtactgggttgccgtggcgcgaggcgaccgctgatgctgatgctgatgctttcttggggtggtgccggtggaggcggaggcggccatggaggcggtggcgacggagctcttggtcttgcacatccgatgatccttctcctcctccttctccttctcctccggctccggattgggcttgggtttccgcttccagagggtaaccatgggcgaggcgacgagctccgagctcgcttgcttggttgcttgattggttgagctagtggccgcccagatcgggaggcggctgctgctgtggagagttgaattgcggccagctaat

SEQ ID NO: 37629 - DNA, 4193 bp, Oryza sativa
atagtctacgtgactagccaccatttaatcatacaagaggtttattttttttgagtgccgaatccaaaccgtgagcaagcctgctatgtggtcgcagatgttttgacaaaacaaaaaagttagcaagctaataagtggctagctcacttatagattcataattttaatggagagtgcaaaactatgttaaaagtggtctactacgttcgagagatgtatggctatgaaaattaatcatttttgtgatggaagcaaaggtgagttgagtcagtgatggatggatgggtggtggtgggtcccgggtgcctgtgatgtgggcaacaacctagtaccgatcccattgagcccaatgcaagtgggcccccaccacccagactttcacgagctatagtcacagtcttcgtctacctctgctgatcagcttgctgctccaatcaaaccgcccaaccaatctcttgctccattgctgctgctgttcttgcagatgttgctttgctactagtatgaagtatctctgttcagagttcaggctagtagtgacaaagaattaaggcagctgcctgaatctgaatatatatattgatttatcgtctgaactaatgttcgtgacgacgatggcgtacaattaatggcaattgattaattaattaatccatgttgcgaaaaatgaagaactggtcctgcatagtaaatgatctgtagctcatagttttcattggtgtacatgtaatcgatcgcacactcctattcctagctaattcatgtcggatcgatcgttcgatcatttcactgatcaccaatggcgatcgacatggatagtacaagtgctgtattttacactgttcgatcttagggagaaaataaaaagggacaaagacatgtgcaatattattgtacgtatatgtacgcatggatgtgatgttagatttgttctatgtttcatggatgatgcagtgacagttgatatgcacatttatatgtttcatggagtatgttctattttttgcatgttcttctgttgttgtttttgtgtatgcgtttacgaaagaactatagtaatacatatcacttagatactatccttctataataattgagacaacaagagctcttaaccattaatacattaaaataatatttttattacttttattttcttttcttcactcctactatacaataaaatttctttaataaatactaggagttactttgagccggtgtgtagcaatgatgtttctttttttctccatcaccaaatttacttacttacatagtaacatatagagcttgtaaatcaataaacaatgtgggacatgtctctttggtgtgtgactccatcgtttgattgatagtggggtggggtaaatttattgtcaactactataaacttagagcaagttttatagtggaggtgaatatcacctctaatttaaaacatatcatctactcattaattaagaggtgacaagtataacatatcgcatctaactcaaaaatttcaatattagttcactctcacaccactttacacttttcttaaagattaagcgaaggttgctccttgaatgaggggtgactgattttctctcctatattttatcacctaattctatatatatgataaatttagaggtaacgtgtagaggtttatagtgcttgctcttagttcttcagtttgctttttgtgtgattggttgaggactagtttttgtacgcatgtcggcatgtgtaaccgtgtgtgactggatcgattgcgggtacatgggtaaattaattgccaactactataaaattagttgaattgtacgttttgtatacctgggtaacggccatacattttgatccagctgctagccacatcataccaattaattacatgtttggtggatccaatgttgactattcaaacttgatactgtgagtaatgtgacctgtacttggtacctaattagccttaaagatttattattgtcagtatatatatgacaacgaccaatggtacccaaaatgtggtagcaaacgacaatagtacaatattattagtgttaatccataaacattctatccttttccaagttttttcaaggacctcggtgcaatttctttatctttcctgggttgcacttataaacctaggagtagtagtgcagtcgagatcctagtacttcatccattccaatttaatcatcacccatgcatatcggtagaaatcaataatacatctatcctttttcttaatatgctaaatcaattgttcttttttctttgtgggggctaaatcaattgttcaatttgattgctaaatcaaaatcgattttgctatacatgtgtcaccacattttatcattggaattggttgaatttttggtcggtttatccgcattgagatttgttcctggatctccacgtcttgactactaccacggagtagcttttgctccctatctagttccacatataaaagggcttgttcagataattcccataaaaaaatcgagaaaattaggaccatatataatccactccaaatcagcttgattgatggattatcccaaacaagaccttataagtaaccttccgatcccttcttcgtggtaaccaaaggactttctagctattttcacattatttttcgttgaagttacatcctataaacaattgtaactttttggtcaactgtagtttttcttttcaatatatgtaacttttgttttaattattcaatgcaaaggtactccgtattgtttttagtcatttttacagtcttttttttattgaagttgcatactatataagattgtagcttttgttgtttcagtgtttttagtcatttctacagtctctttgtattgaagttacatactaccccctccgtcatattttaaatataatgcaaccataattttccgtgcctaactttgattgtccattttatttgaaatttttttataatagtatttttattgttatgagatgataaaacatgaataggactttatgcgtgacttatgtttcaaaaaaattcaaatcattttcaaataagactgacgatcaaaattgtacatggaaaatcatggctgcacttaaaatgggatggatggagtatataagattgtagcatatgtatgatctgatatttttttagtgttgtcaaagttgctagttatttgttagcgatctttttgagagagaaaatatatatcaactaatatatactccttcataaaaaagttaagcttattttattttctggttttttaaatgagatatacatatttataatcactagtcccggccaagcatctaagacttgaaaaaatggcttgtcttttagttttgtagtgctaaattaaattgttgaccgaaacctaagctggcatttaatactaattgatttcttgtatgcatatagttacttggtttttgttacatgtaggatgagttaatttctccttggttttgataatctctactattataaaaattaaagatgtttccgcggtccatcatccgtgtttgagttggttataaaaattgaaaatgtttccgcggttcgtaatccgtgtttgagtcagttttaattttatgttttggttttaatctatatctcttctctatctctactattataaaaattgaagatgtttggtacgtcatccatgtatgagtcggtttttaagttcgtttgcttttacatatctgtatttgagtcaatttttaagatcgtttacttttggtaatacagaaggaatcatataagaaatatgtttaaaaaactcacatgctaacttgagacgatcagactcctaactgcatctcatgattttctgaaaatatatatatccaagcgaactcccacaatgaatttcatcttaactaaaccatataacaataataagattaaaatagacttcacccgttgcaacgcacgtccatttttttctagtaaaagaaaaaaaaagagatctcccttagcctgtgttgtttaggcccaataaatattggcccagttggtgtcgcactccgtatgaaagcccacataagattcggcccattaaggctcaatagggagtaaaaggggaggcaaaggttgaagaagaagtgaggccggagagctcggagaagggcccgacgaagcgcaggtggggatcacctcgccggcgatggcgcggaggaggggaagcgcggcg

SEQ ID NO: 37630 - DNA, 8506 bp, Oryza sativa
atcgacttagatcgatcgatatgatgtgatttagacagagatgatccacatcaatgtgtatgcaagaatgcaagaaactgttcttgattcgagaactcatgcccaatcgaccatggctgcctgcctgtccctagctagctaccacatcctttgcctctacacagtacacacactacatgagctagatatatagatcaaaagatttactgcctccattctaaaagttgatcgattcatgtaaaaaatttgatttattttgggacaaaaggagttcatttgtaagatcagacatatgcatatatatgttgtctgatccttccagttcatatatatcaaaagagacatgtacacctacttctttcttgaagatggcacagtagtctataccacatctgttactatatgatgatgttttaatttagctttgacatgcatgctcaaagagaagaatggagcaggagaagctgaaagtatgcagtggcaagcaaacatacacatatggagtacttaattgttaactaagctggccttccattaatgaaagcaagaatgttgtttggatatatatatagcccaattcagggtgtatagtggtgtactacatgtgttgctttgatgatgtactacactatataacaacagagaatatatgcagcatatatatatcagttaactggagtggcacagcacatcatatcccaactaatgatgataggaatatttacatcgatcgagcatattatctgcagcgtcaaccagatactagcagccagtgctgtataagaaataaagtatgcatatatctgcatgattgattaaggaatacttgtgtacttaattaatcaactagctaactgagtactgcccagtgtatagtacttataaaagcagctaactggaagaattaattgagcttgcaggtgattagtgaaacataattaaggaacaagagtacgtgtctgaatgggagaggatgaagctagctaactgaaatgtaagtcagtgtgcacgtatacgtgcagatgatagataaagctgatcgatgatgttgagcatctgggacagcttagttagtcaattagtctctaattaatatataccttgaaattaagcttctatatatagaacaagtgtacagatgatgccaagggaactgacgttgagctagctctcctgcatcacgagagagggaagaagagctagctaacttccaatcgaaatgatatttatgtcataaaatcatggtgtacctgaataatcatcatgtttcttggtccattaattcctgcctgtgtaccagaaaagacgaaaccacatgcatactggaagactgggaacattcataggacaagatgaggagagcatgaacaataaattaaattaaccaaacaacgacctaattaaaacaatggtagatcatcaccttgttttgactagctcccaccatgactttattatgagaaaatttaaacgaaaactcaaaaatatattaattcttaaatactccgtaaaggagtagtgctaattgaggattccacatatatatatttgaagaagaaagaaaagaaaatgtgcttagaagaaaggagtttaagctgaaacaattagccaagctcaaatatataggaaggggaaagctagctataggaactgtacctgaagattaatttctagtctccaataatcaaagcaggccatggatcgagacgagtagtcgagcgtttgctgatgcagcatcatcaagattctcatcacatatagtcagccaacctcgatctcgtttagggatgaactcgatgtgaatcttgatggtgctgcacctgcaagcaccgactgtttgctactagctccatatatgcatcgatccatgcctctcatcctcgccaatttgtgccaatttgtgagatcgatgcatatatatggtgcatacactaccagaagaatggatagtatatatggagaatggagctagagggagatcgattaggaaagggattaattcttcctcatctatgaatggataatgagatatagtatggatcaatcatatcaagatcgatcgaagaggatatatatatattatctgtggaaacaacagattaatttggtccctacttaaagtaacaacaagaaaagaaccacatacgccaaacagatatccatgaggaaaagagagagagagaaattaaaagaatcaagaaccagtagcagagactaaacgatccatccgatggatcgccgccgcagctcgccggaccagaaacgaagacctcaccggagatattatctccggatcgatcgatgtatggatggaggaggtggaggaggaagaagaagaataagaggaagaaggtaaggagagattggggttggcatgggtggccacacacctctcacaacatagtgagtgagaaagatgacctcctaggtaggtagcaagctagctatatataagcttagctagctagagccagctagtagctagctacaagaggaggaggatgggggaagcaaaaaccctagctaatagtgatgcatcttgagaagagatggcatagctctagctctagcccccaaataattaaggttttttagcttcttggagctagctatggtagcagctgcatgcttttctctcaagctccatggaaagctagccagatgatgagagtgagagagagagagagagagagagatgatgaggtttagaggcactgaaagggtgattaataagaaattaactagttaatggaaaggaaggagatggaaggaagaggccggccggagcagttgctggttgagctgagaccaagcaattcatcgcggggctagctgctgctgctgctgacatgtaatgccacttttgcttctgattggtccactccatcgttttcacaggtgtacatgacagcgccacccccacgcaattactactaattaattagttaacaactattaatctccgatccatctcttgttcttaactaactttgcaaattcacttgaattgatattttctttctttctttctatgtgcatgttagctgatccttaggcaatacgcgccggctaactcatatatttttttcgagaacggttggatgattaactggcatctctctcttacaatacagacaatctttgatacgaatctacgtggtgacgactcggactagacggtctttttattaaacaaattaatttaatatctctaggtctaattaagtttttggcatgagcagccatgtgagagcatctggccggttggtagaagagccatatcttttacatatgaaacaatttcatgagaaaaaccacaccaacccctggtttggtcatataagaatatggttgggatgttcttaagctaccaacaacataactaatgtatatgtactccaacgaaattaacttagatgtctcaactattttgtagttgtgaattttaatttgttcatggataaataaagtaataaaaaggacaaataatttgctgagcccactaataataaatgagtaataaaactgtacccctacccctggtactgactgtctaattcctcatcacacacactgacttgttgggagggtgccaatgtgcatgggtgggacatactccatagtactagcagtagatgatggtggccaacaatttgcaagggaaaatggctaatgagctagtccatcagtcacaacaggagagactgggacaggcaggggccagtctgtgtctaaagctcaaggcccacccctgaaaaaattttcccactgacgtgatggtgtgacatggagatgtgtgtgtcatactgccaatctgtcatacacacactcacaaagatcataagccattgttttgcccgtaatgagttcagatcatgctaatagctgcatttctcagcaggagacctttggatcttgtttggggagtttttagcggctgcaagcttctccttgaatctcaatctcttctaaagacccaaacggttcagattttaagaacatatgtctataaattatagaaaatgaactagaaatcagtaggtatgagactaagatttttcagatccgcagaaactagctatcaatcatttgttttttaaaggcttatcaaatatgactcttgattaaccaattaatatatcattagtacactagtacagctactaattaatccagctagctcaagctatacactgtgtgtgagagagtgagtgatagagagagagatgagatttggaaaaggtggtgagtggtggagaaaagagagagggggcaactgcaagagcctgctgcatcagcaaggcagctcattgggtggcggcagagcagcctgagctgtttgttcggtggcactgtactgtactgctgccatggccaccatggatggtcccctgaaacaacatgcccctacggtaacactagttacatagtatacactcactagctagctctaagtaaggtcattaagcaatataattgccccttgcaagctagctaaccgctccactctaactaattgttactattgatcaaccatcaatcatgtaatcctaactcctaactcctaaatgtcttgtttatcgagcgggagattctaatatgtaagtagtcagctgatcagaataaaaaagttgggcttcccagtttctaacttctactttattttgtagattttattgctactgattctcataatctaaatgaaaatctagttgctagaaattgtagagttatcattttttagaccgtttgtagagttgaagattttaggaagaattgtagttgccataagcttccttaaacatgactaagtttctaaccaatggatcaatgattaatttcttctcaaacttcttctaatgttaattaggatttcttcaggaacttctatacattctaaacttacatgctgcccaaagtaatttcatcagaattctttatgccttcggcatggactgtggaaattcatgagctcgaatctcgatgtaggcagtacacagctggctgtcgactcagtatggactggtgtaattaactagtgttattagtagattaagcatgatacttagggttaaataaaacatgcactagtatctgcgtgcgtatctgttattttgttagtaagcaacgctcctggtttctgccattgatgtcggcatccacctcacactccttaagtcaactcatcttcctgctctgtcagttcagaaaaaaaagaatttaaacattaatcatgtgtatataactgttataaagtctaccattgcatctacttagtactaacctaactacttcttccacgaaccattgaccactgaaacttgtcatttttaatggagatattacacagtaagtgtgtttaatttgcaggcagttttagctgtaattttgtgttctgagataaatatgagacaaggatctatatatgtttttttttcatgaataatgttactcattcagtaggacagctagctgaaagtttagaattgatggtgtgatcagaaacaaggcctatgcatgcatgctaacgattaatatgatcaagaatctatagtttctgaactcatcattatcaaatgagccatctttatccactaaaaaatgtttattaaaagtcacctgaataaggttacctcgaaataatgtaaagtgaactagctaccttgaacagtctttaaattttctccaccttaatttcccctcaaattaaaaagagagaactcctactttaatagttgcaggtttggcggtgtactagctactacagtgcatatggatgacataaaaagttaattaacttaatactctcatacaaggatagatgcagagattggacatcaaacatgcatagattaattaattatgcaaagggcatgtacggatcgaatacgatttgattttttgcaggttattggtcgattgtgagtgcagtgatgagattagtttaatcatccacgacgaaaaatataaatatagcatctgatgtacctcccctcccgaaagattcctggtctcgatctcaggcaggttgtttctacaaaatgttttttttttgttattagtattcattgagtttctaaaaaaaatactgatcgaaatcatcctatatgtaagtatatatgtgcagcaagcagttaagaaaaaatagattctctcaccttggagaggtatataagtataactccccatatttgagatatacctcgatctccataaaaggagataccaaaaattactcttataggttagtatatgggttgaaacctatctttataaatatttgaaatagaaggtaccaaaattcagtttacattacaatttttagaggtatgatatttgtgctaattaagaggtatatgtgcctccaccctagaggtatatatctccgaactaacactataaagtatatatatacctacctcacatgcaacgactagaaaggtcttaccggtgctaatcataaacttgttttctattcagttaaactgtctattttttacctattaaattgtgaggaggtatatacctctctaaagatgggagaaattatctcaaagtcgagccaggatagaatttctttgaagtaagaagattgaaatttataaaaaccatgcatgttttatagacaatgttgtggaactacagtactcgttatagtttgtggcaaattaataactcaattatcatggtttcaaggtttcacaaaaatgaaaaatccgttaaactccaaacaatgtaatataacacttatttactttagagtaaattttataaaaccccacctattatggtctaaattgtacaaaaccacatggattttagcaagtgtcacataaccccatctattatagtcctaaagtttcacaaaaccacactattgatcattttgaatttgacacaccacacttttgagttctatagtcacatctcaaatttatgaggattttatccatcatataaatgttacatgtgttttttttattttactataggagtatgtaaaaatggttaatggtgcggttttgtgaaactttaggatcatatataatacccgagattatgtaccacgtgccaaaatcattgtggttttgtgcaacttaaaccataatagatggaattttatgaaatttactcttttttattttatctaagtgtcgttaaattaattgcatgatcaagttgataaattaaattagttaatgttcaaacaacattattatataaaagatgatgaatttaagtcagattttactagaagtggggtcttatgaaatcttatcccaaatgctacaactcaaaataccatatttcgaaaatttcaaccaaataacttaaggctttttttctaaaacttactccagtaaatttaatataactaaagtgcaatgtgtgcatatatactactacatccgtttcaggttataagactttctagcattgcccatattcatatagatgttaatgaatctaggcatacatatatgtctagatatatattaatgtgagcaatactgaaaagttttataatataaaatggaggaagtagtaaactcccatttatgtatttcataaaagtacggctgatcgtttggcctatgaccgataagtcgtaaaatgacatgcaagaaaaaaatatacgtaaattttatatttatttgaaaattcatctttttttggcagcggcttattattgtgcgggtggtagcagataattaaccatacataagctacgtacgaatagtcaataagactagctagctggatatatagctccaaattaataaggtatacttgattgcgctggaagatgcataggtacttgattcctggttagctagcatacatacattaattaagaaccttttcttttggaattgcctccaagactagtacacatgcatatatattatatatatatatatatatatatatatatgtttatgttatcctaatggaaagcaatgggagagctccacctgaaaggtaagcttgcattctgaaaatgcagagattcttcctccaaacatagtcaattggctggctggggacacatcacatagacaaggaataaaggagccatgtaatttagctagctcaagctatagcttttgttggcaagttaattaaaattaacaacaaatgaaagcaagttcctaagcatgcaacaaacgaaaataattaatggtacctcccgttcaaagaaaaagagtaacctcgggccctttcgtggtgcacacttcatcatgcatcgatttttcttttgagcaccaataattcgacatggaaattaaatacccaacagaaaaaaataaatgcaattacaatttatactttactcgtgtgtaaaacttcaagctaaaaaaaatcaaggaaacactacgtacataaatcaaggtactatatatccgtaggacatttatcactcgtttttaatttgatttgtataacaaaattttgattttacacctaattaataaaagaactctagaacacaatatatattatt

SEQ ID NO: 37631 - DNA, 583 bp, Oryza sativa
tcaaagacttttctcatagctacttgtatataccagccaactatggaaaacagaaaaaaaaaagagtagcatggtcactttttagtttttatccactcctcgtctcaaaatttttggaactaatatttaacaaaatgttttcctatagggacagtctattcccacttcctgaaaaaaaaggtcaattttttgtacatccaggattgtcttgagatttgttcatgaacagttaatcttatcttctcctctcgttttcccatcccaagcacgaccgcactaatgggcgctcacgggcgccatcctcccctagcccgactgagccgccgccgccgccttgatctgaacagttggctgaaggccatcaatagtgccagcacgttccgaccaactaaccgcctcctgctgcccccctccctctctttcctcctcccaaatccggcggctgcaccattcccctgtgctggtgtcttcaccagctcgcaccgccatcaatcaccatctccataccctcccccctcccaccggaacccacgcccccgctgccaactatcaccctccggctaagccccggggaataacaacc

SEQ ID NO: 37632 - DNA, 745 bp, Oryza sativa
taatcttggcagtgatttttttcaatcatagttatcaatatctttggtttttatttcgttcgtacatacgtatagcttttgcctttttttttttcccggatgaattgtacgcaaggattttctcttgtatgtgaataggatattgggagtgagagattatttttttagatttaataatttaataatttaattgtctaaaataatggtctcttagctttaagtgaaaatcgaggattaaatgttttattttctctaagaacttctatgattttctttaatttattatagcgctacttagcaacgtagaagcatttgtagagtgacacatggtgacgtgagagcgtttgtaggaaatttaatggacagagtataacaaaataaatgataattacatatttctttagtaaataaacatatgttcaaacaccaataatattatggatgtatattaggtaaagcaaaataataaaagaaggtgtataagaaaaggaaaaaagtctagggggtatgttacgttcgtacttgtacgtacgtacttgcaggtggtgagggaggcatacgtataagggtctatttttaatctaatctaatagtgcaaaattatggacccaccaatttaaatgaaaatcgagggtcagatgtttctaatatattaaaacgtcacatggcgacttaggagcatttatagaattgtcacgtggcggcttaggagcgtttgtaggaagtttaatggacttttagtata

SEQ ID NO: 37633 - DNA, 652 bp, Oryza sativa
cacatgttattaaaatattaaccgcttaatatatatgtatggggcacatggtaatatttgttccagcttcctgcatgtttatatgcatgtagcttaatatatatgtatggggcacatggtaatatttgttccagcttcctgcatgtttatatgcatgtagagagaaattaattgtgtggctagcaagccattagatgtctaattaatagcaattaattttgatacctatttacagttgtttatagtagctcttacatattcatcttacgactttgattatccgttgattcccaatttacagattaccatcactcgcatgaaaaaaaaatacgtactatttaaggtttaggacagctgaaattgatgaattatctgatttatgttgtagctatttgagggtataaacaaataaattgacttctaaaaagttaaaatgtggtttaaaaaaggcacccatttaaaacctggaaagcgtgcaaacaaaaattcaactatgtaatctagaaaaaaagaaggtcttaaacttccttataacacccttgcttttgtaagagtcctcttgatatcggtaatatagcgctcagaattataatataatgattctctttacctatatgaataaataggccaaaatccaaatccgacataacac

SEQ ID NO: 37634 - DNA, 560 bp, Oryza sativa
aatactatggttcaattttagtttatgagttctaaaatttagaaaagataaataaaaattaatttttactactttataaatttcaaacctgttagtaactgatatgaactgtactatatgtcaaagccactggaaaataacagcacactttaaaatttcaatatttacaatattaaaaataattacttgttaaaataaaagaaaaaataattacagaagcaaatattttttagtttttacatttttatgattttagacttcaaatcgattacaatttgatatttattgattataatatttcgaactaaatcatgaacaaatcactttgaaaatatttaaatgtcaataacagaagtcgtgcaatgcacgggttggccactagtgtgactaatcaatataaaaggagggaactgtttacattttttagtaggatagatttataaaagctaacaagtgctttttaagatgacaaaaatcaaaacctatttttatatgtataaactaagtatttaaaaataattggatatttaaaagtttgacagagagtaaaatgttataaa

SEQ ID NO: 37635 - DNA, 677 bp, Oryza sativa
aaatgaagaaagagaaggaaaccatgtcttgcatgagacatggtttctacacaacatccaagacatcatgtgagataagtagcattaaattgaagtatggaatagtggtgtttgcattgaagaatagtgtctagtactagtttcttaatgatgtggagtttatagaaaccatgtctagtgttataggttgggactgcccttataatatttcactatgtatggatcaaatgttgcagtgaactttaaaataatttttttttttctcgctatttgctgaaacattgtttttatataaggtgaaacaacacccgatttaaacgagttaaatattttcgatctacttagtgaaacaattccgatattcctagtggagcagggtgcaacatttaaaaataattcaataacaagctaaaaaaaattcgtcggaatatatccatgtatggtcttgttttgaagatttaattgcaacgaatttaatagtgcaatcggatcatgatttggataagtaatttaagagaaaattcaatttaaagtagttttgcacgtaaatcgggctgacgtcagcgcctgatttttctccaaaccgatcgggcgcccgaaccgtaaactcgtccgaataaaaggagtcgataaaattcctatggaatgtactatgaaggagaacctcatggaacttt

SEQ ID NO: 37636 - DNA, 541 bp, Oryza sativa
actcggtagctcttgactaataatcatactaactatatcaatactaagtattatgcatgttatctcactagatttatatttcgaagtactttcatgtgatgctaatttcatatttgttgcaatcatagaatgaaataaaatactagttaaagtatgttattgaagaatgtgtaaaaaatataggtcttataatttgggacagagggagtatactagtagatgtaaactgcttcctccgtttcgaaatgtcagactttctagcattgcccacattcatatagatgttgatgaacctaaacatatatatgtgtctagattcattaacatctatatgaatattggttatgctagaaagtcttacaatatgaaacggagggagtagaattgagtgtatattggaggtatcggaattgtttgcttttctatttcttcttccacatagcttaggattaattattgtgagaatcagagttcttctgctgtgtcactctacccatatatttgaattaacccctacctagactttgattatacacgtgat

SEQ ID NO: 37637 - DNA, 1002 bp, Oryza sativa
gccccctcccccctcacctcctcctccaccgccgcccctccctctccctctctgctccctctcccaaccggcgagcagtgtcgcccacgtcgggcggcctccccacgagcgattctccctctccgtcaacctcccaccggcggcatgtgtcacgaccggaaaaataccttttcccaatcgctagtccattgatccccgtcccaggaaaagtcaggtacacataaaaaatcatgatacaaaagacatctttaaagcgataatatttacatatgcttgattggttactaaacagccaccaagtatgatagcatcaagattggtgtcccttagaattttgttggccgcttgcatggttagccgatgcttccatttataatcattatgggtatcttccttactcactgttacatcctttataggacgcatatgtcctttcatggttaagataggtgtagtcactaggactgaaagtcttgcaacttgttcaatgtctttaaccagagataggctagttgattaacttctctaccaacatctaggtcattaagttcaagttgactatgattcatcataaatgaaactctaaatctgttttggttattatcagttgtagagattgttgtacatttgtatcctcaacatgaatcattcataaacatagcaaactcattctttatatatataaataaactcattctttaggttgatataggatactgagaaactggacccgaatcagccaaggaaggcttatgacaacaatcgacccaacgacggtcatcttgtctataaagaaggagaagttgcaacaaagcaagatggtcatacggaaaagtgtttcagtaaagacaaggattgaaattattagacttgaccgggaagtcaagatgggtaacatgaatagtggtaatccaaagctcgatcgaacttttggcttgtatcagatgctacacagaataaaaacacttgcactagttactgctcaatgtgctttcctcacaa

SEQ ID NO: 37638 - DNA, 628 bp, Oryza sativa
caaagaaaagcaaacacaaaggcgagtacatctttgaacatcaaaacatccaaagctgccccttcaagaaatcaagaaaagaaacaatttaactgcaaacacatgtgtaaagcaagatctggatatcaaaacacccaaatctgcccatcttgcagtatgtacgaaacttcaaagaaacctaaattcactgctaaacccaatacttcatcaatcctctaatagcgtggtcatctaacggggggagaagaagaggcggcggcgcttactgagagcacggtaaaaaagaaccagagcatatggcctcatacctagcaggagcaacatcagacatgacatctacgggcagcaagggcgcaggacaggggatgaagggaactagggaagagttactttcgtcggactccgacgactgggcggcatcgctggcgtgtggccggccggtggactggagcctggcagcctgcctgcttttggagggatcgctggtgccgcggcgtggtcggctggccgcgcagggcgcgtgccgctggcggctgccgagccgggcgggcggcgcgcgtgtgactgcgtggaggacctgactggggcggcggggcgatggaaaaacgggcacggcggcgacgggtgg

SEQ ID NO: 37639 - DNA, 607 bp, Oryza sativa
cccttcatttctgttgtggtatgtatatcaatctctacaaacatactattaggtgtagcgtcacaaacattataaaaaagatgccccctttttaactagctagggaaataagatgtgaatgtttaaagaaggggtgatatatatagaagggtaagtcgatatggaggagagccgtattgctttgtgcactgcagtactataggatcactctttaaatctcattatctctagacttcaattatttagtgcggtcagcaatgcgcgcggtggcatcaccaccagagctgcagcaaggagcaaaccggggacaaatgggaggggggatgtagaggaggccagccaggccgggtgccgcaccgagacgttgatgccttttgatgctggcgaggtcgggaggcggcatggtgaggatggatgaggcgggggactgcatagtgtgaattgcaaagggtgctacttcctgcacataaacataaaacaaaacaaaataaatagggaggcgggggactgcatagtgtgacttgcaaagggtgctacttcctgcacatgcataccaatgtcacaaaacataaaacaaaacaaaataaattggaatactgaacgaata

SEQ ID NO: 37640 - DNA, 646 bp, Oryza sativa
attattctgacaaaaataacaattttgtttaccatgttagttatgtttagctagattatcctagttaaaacaactccctgtcgtaaatatcaaaggaaaatctttactttaagatatacttttaaattccagagacatatatttaaattaggcacatcactatggagtagtgctagacaatagtatttcatcgtgaactccccattagtagtcgagctccatttaaaattatcttgcccctgttttagttatacagtagcaaggagtcataataaactattctaggccactaatttcaaaccaattatgttccttctccatgaaaaaattggagggtcacttttcctgcaacatgtaaaaaatactatatcgaattaatgtaatactttgatctaagtggttcattccagatctaacggttaaaaatgccagaaaatgcacaatactatttatctttgccatagcaatcagggaaagacccttcttatattgaacactctttactttgggtacctcaactacgacgtaagggctatctatatttgacactcttattgtttctactctagccctagcattgacaatgctgatgattggatagtggggaatgttagaccgtattgttgttaagaagatttcaggatat

SEQ ID NO: 37641 - DNA, 638 bp, Oryza sativa
atttaatattttagtcagtactaaaaaaaatgttttttcatggcaccacaccttttattttctggcgattggctcccgcctatgaaaatgaattggacaaagattattgtagattcttctttatccttatatatatgcatcagctcatctttggaccaatgaaaactacatgtaaaaaagagagaataaatgtcactcatcagattgtattggtagaagcaaactaggaaagcccatagaaggaattaaaaataactaggaaagaagcccgcgcagatgtgcgggcattttgtttaatgtttatatcaaaagcgtttcctagattcaaacataaatcactatgtcccggttatatataaatttgcctaatatcgccactacttattattattattattttattttattatggatacttattatcgttcttttgaaacctgagtgattatttaatagatgaaattgtatttgtaacatcaaaataagaacaatacatcgttaatcgactaaaaaattatctccactactaacctaactgttcatgtcgatctgacttatttccaaatctatgcataaatattccaataatattttatcaaaaaaatatattataacaatatcacttctatgagttaata

SEQ ID NO: 37642 - DNA, 571 bp, Oryza sativa
ccgacatcatcgcgtgcagtcggattaaatggcctgcacaggataatgcatcttctcgtgcgggcgccggcccggcgccggtcctcgagtttttttcacgcggcgctagttacggccctcctagaaccaaacagggccggcgtttaggaaaatgatttgtgtagtgttacctactctgcctattgtgtattgtgtagtactccgtccattccaaaatttaagactacaaagctatatttggagagagcgagagagtagcgattaattgattgtttttttattaaaaatgaaccagcggtgttgctcacgcccgaccggcagtgataagccagcagtagcccattacgtggtagcagtagtgattgaattattttttcagcaaaatttttaacaaacatctaactatatcaggccagtaatatactagctacatgctggtaaggcagaagatatggctttaatataccagtacgttcacctcatgtgcagctaaaatatttcagaaatcggaacttgcagtctacagaacaccgtacatgctcgatccacatgggcagatactacgtaccac

SEQ ID NO: 37643 - DNA, 2674 bp, Oryza sativa
gtaccaaccgggactaaagatcctcggccccctgacatacgtctgacaggggatgaaccgggagtaaagatcatctttagtcccggttggtgttaccaaccgggactaaagatcaaaatttttataaccgggacttaaaaacaatctttactcccggttctttttgaatccgggactattgtgaatttgtcggaccgaccaaagaaggtatctccaccagtgtgggttatcctattttttaaacaaagtttgccgaatagcaaaaattctggcaaataagcttttcactcataattcggtaaaccgtcgtgctcgttagcaatatcatacaccgcgtatgtatgtttgtaaaccatagttattgctgtttcatgacgcctcttattcgtatcatattaagatgtacatacagcgaaattacgtgggcatgatgaagacgtcataattgcatgtaatgcatgaactgtaattagtgtttgtttgaggagcgattctcgatcttctgctctctactgatagtatcatgacaaaatttggtacaagacatttaaaaattgtgtaattagctggtagaaaaatctggattgtttattattaagaataaatttgtaatttgttaatagagtaatgagggtaacttagttcttttttttgtttttttttgggtatgggtcactaacgtcaggcccatttgcatcgtgccaccggtgggctgttttgattgttacactggctgtggctggtatcggcggcacatcgtcaatatttcaccagaaaaattggatcgcaactccttcgcccggaggcgcttttgggtggcaagtggtgagtcctctggcagggaggcgcgtgtggatcctgccggcggtgacacatcgatcccccataatccgtttctctgcatcccgccggtggcacgcgtagatcttgtcggcggcgacatatatataccggctacccgtttctctctctagccttttaaagcagaagtactatatattttagggcaaaatatattacgtcccgaattcatccggtctgtccggatcgatggataaaaaccatgttttttcgatcgtgcaaacataaattgaagcaaaactactattttagatcgttctaatcaggacggtctagatcgggttgacaatgaaaatacacgtggtttttcagtggtgcacacataacttaaagaactactattttaagataaaatatattacgtcttgattttatccgaatagttcggatcaggtcatcaacgaaaaaacaaatggtttttcggtcgtacacataaattaaaccagaactattttagtacaaaatatgttacgacctccggattttatctagtctcttcggaccgggtcgataatgaaaaaacacgtggttttttttgatacacacataaattaaaccacaactattattttaggacaaaaaaatatgttacatccggatttgatctgctctgttcggactgtgtcgacaacaaaaaagcatgcgggttttttggtagtacacacataaattaaaccaaaactattattttaggataaaatatgttacgactgaactgaatttcatccggtccgttcggacctaatcgacaatgaaaaagcacgtagtttttttttgttgtacacacataagttaaaccaccagaagtactatttttgtacaaaatatgttacggctggatttcatcttatctgtccagaccgggtagataaaaaacacgtggttttccgatggtgcaaacataaattgaagaactattattttagaataaaatatgttatgttttcatacagacggtccggatcgggtcgacaacaaaaacacatgttatctctagtttttcctttttcagtccgtacgtgaatacgtgatcctaatttcccattccaagttcgttttcgttttcctatttttctactttccgatcgacgcaggttctgttttacgtaccgagattcacctttcttcaccgtgatttatttactaatttttcataataccccttcttgatcaattctactaccgttaagtgagaagatagtaaaaataaatctaaaccctttaattaaatgagattaatagttcaaattgcttgatactacgagtacggaccatcggagtgagactcttgttcgagacatcagagccatgcacaaatgatcgacaagaaggcctcgttccctagatagcagatagcatgtacaactacgaacaaggccgtcataggcgatgcaaaagccttaccgaaggttggtatgggaaccatgtcttctcttgtgtgaatgatattctggataaatccaagccgacattcaccttttccctcatgcctcatattcccaaaactctttgatatcctctccgcatctttcttcttgttttgtgacttacctcattaatgttgctatgtctttatacagtgatctgttttttatatatggagtgaattgttgcatgctcaaagacgtgatataaaaagagttggagaagaaaactacaaggaggttttttaccgtaattgaggttgagggcatgcaataccatatcctagctgtcgatctgggaggatccaacgactgaaattggttggtacctcatggtaccgtgtctctatgaggggcggtaccaattgtgataaggtggtgaaagggta

SEQ ID NO: 37644 - DNA, 1283 bp, Oryza sativa
cgttcttcgacaaactacaggttgtgccaacacagacgttgcccattagaatggtgctgttgtggtcatgctggtggttaaggttaccctcatcgatgtcctcttaagttttttttttcttgtgatcaagaaactttaaggagttgggtatatgcgtagttgcagttgatttcgtacaacttggctggtagtatagtcatcattttcttaatgccccttgttcacatcacattcttggaacatataactaagctctatggaattattggctactctgttaattaatcctagcaggaaagacttgcatccctttagggatgtcctctcatttttgcatcctatccaaattaacttgtatagaagggctgcgtttgacaaagtaagctagagtgacatactgtgtctatttttagcagtaaagtatccatcgtttgtttgcactctcagcatcatatacttaaaagtaatgacagatggtctaagatatttttcacacattaaatgtacattattaaacagcaggacagacaaagatttgtcacaaggaaggaaagaacaaggacatccaatttgaactttgttttccacgacacatgaaaacagaaactaaaaacaagtgatgacttgcaacaattgggatatggatcctatattcccaaggaaagatgatatatcctaggtagtgcaacatacttatttatagtataatatactattgtctggacctcaacctgtcgttccgtatgtaaatacactgtaaacaagtactatatctagtaatctgcagcagtgacatagctagaaaaatcttaaagcccgggcaaatattactatgttgaatattttctatataatttatattgtcaattcctatcttatataatatcaaatttctacagcatgttcatcgacaagccagccactgatagaatttcgtttgaaaatcctagattccaaacagggcctacatggaccagccagtatgttagtcccagttttggcagttgcaagaagtgtatgcaagaaattttctgttacttggaaaacttatgttccatgtatagacattggttgctgctagaaagcccctacattatcttgaaaaggtaaaaagctataaatttagcacatctattttctattatatttatatactaaaagtcgattaaacctcctacaaacgctcataagacgcatgtggcatcttacaaacgcccctaagacttcccagtatacacctaggaagcctagcaggttaacgcacaagttcttagtgaggtgca

SEQ ID NO: 37645 - DNA, 541 bp, Oryza sativa
agaagacatataaccattacaatcacaatgataaacgcatgcattccttttgttttgatagtatgaaattctagttgtcttgactttttatgcagctcacttgatttgcatagcctagaatctagcaacttttatatgcctcactgactgttaatggggctgcacgcaatatcactttcactagtacacaaacagctataggtgccagttgagaactggcaataggtgacagtttcccagtcggcaccaatgacaccggtcatagaaccggcacctttgtgctatcccagattcaaaaaaaaaagctggctcaagctgagccgatgcttttacatatcacaaatcaaatccatcactaatcatcatcaacaacaataataatccttaatccaatccatcaccaatcacagatgaacaacaatcagatgcactaactccctagttccagcctgtcgtcaatctgccagggtccctctctgcgcgaggtcaccgcctgccgccgggtccctctccacgccgatgtcgctgctagggtccctct

SEQ ID NO: 37646 - DNA, 837 bp, Oryza sativa
gcacttgtggtcttttctagaagaaattttaagttggatcttggtggtcactcaattctagaaaatgacctagaagtgttgagttgaaggttgtggatctcttctgggatctttgcataagtgagccaaggggttaatcgagacccggctctttggagcacctcaacggagagtaggattcgtgtgatccgatcttcgggaaaaaatcgtctttgtctctcttgtgcatgatctttgtgtgaatctgctgatattctgcgatctttatcttgttcccctatgtgcctaaacttctcttgctaggacctgtttttcatctcagtttaatttatctctgctgcccggaagttcctggctcaagaactccggaagttctgggctactcatgctgcccggaagttccggtgttcatcaccaggaggttccgggccctgtcaattgaaccgatgcaattgttgagaaaatttcaggaaagcctattcacccccccccctctaggctacatctctgcacgttcaattggtatcagagcctggtgctcttgattcaagcttcacacctttgagtgatccacgatgtcggacttagggggaaagaacggggaaaatgaaatgaagatgaagcgagtagcaagggaactccaccacccaagggagctactataccttttgattacagcaaacttaccattccctctcacaacttcgtctccgtgccttcagggcgtgctcctcaatttgatcagacatattatgctgcttggaagcacaagatgaagggcatctaatctctttgcatccaagtatttggaatgatgtttgtacaggtattgatata

SEQ ID NO: 37647 - DNA, 609 bp, Oryza sativa
tgagccattctacgggtaatgcaagacatgcggcagcttgactatggcaacaacatataattcccggagctatcattccagggggggaaagacacaacaggtctatccatcgactactacggctgtacggctctggcacgtactaaactacaccccaaggaagagccatgagctctcactaatcctggcgcgcaggtcaactatgtgaacgacccgattaactagcggatggacattactgttccgcgtacgcaacacaagtgtgacattgatatcactaaggacgcgtctaactacaaacaatgcgacgacaatccattattcacagatctacctaaccggatcaagcgagtttggacaaccatcgacgaacagacactattgcctagtggaatgatgggtgcggcaaaatgcaaaacattcgtgcatatgaacatatgggtatacactcatatgtatatgaatatacatatatatgctgactggcgggcggaccgcactagatgaatgaatataccgagcggtcgagataaatagaccgtacgggataattaggtatcccgtgcggtcctaatatattgacctcacgagataatggataatcccagt

SEQ ID NO: 37648 - DNA, 782 bp, Oryza sativa
catcaatatgaatatggggaatgctagaataacttacattgtgaaacggagggagtatgatttttaagcaacttttgtaagatttaacagtttagcaggttgtgaaacgtgcgcgtgaaaaatgtgagagtggaagttgggaactcaccaagtacgaacacagtttaactggtacttcctctgtttcatattgtaagaatttccagtattcttcacattcatatagatattatgaatctagacatatatgtgtatagattcattaacattgatataaatgtggataatgctagaaagccatatgacatgaaacgcatggagtatttagtaacattaggtgcaagtagcagtttcactgccgattatgcacccgaagatcctaaagcaggcagcaaatagagtgatgtaacatgctctgcctattgtgtagtactccgtccattccaaaatttaaaactacaaagctatatttggagagtagcgattaattaattgcttttttattaaaaatgaacgagctgtgttgctcacgcccgaccggcagtgataggacagcagtagcccattacgtggtagcagtagtgattgaattaatttttcagcaaaatttttaacaatcatctaactattgcaggccagtaatactagctataagctgataaggctgaagatggcttcaatagttcaatataccactacgttcacctcatgggcagctaaaatatttcagaaaacggaacttgcagtctacagaacacatacacactcgatccacgtgggca

SEQ ID NO: 37649 - DNA, 515 bp, Oryza sativa
atttggcagcaggagagcttcttgaggttgcaactcctggaaaaggtttgcttcttatttgacatattggatatttataaggaccatgcccatatatattttcctcatggctgtattttttgtgtagttacacaagaacagcttgatcgagctaaacaggcaaccaagtctgcagttttgatgaacttggaatccagagtatgcatttctaaccactacttgaatcctttgtgcttatcttttgtttcctgttgtatccttgacactttgttttcttcactgcaggtcgtagcatctgaagacatagggaggcagattttgacgtatggggaaaggtatggttgcaccagcattggtaacatagcaacaaaagtcacctcacatggttcttaaacctttatgtgcactagccatgcattcactatcatttatgagctatgattgtgcaatcatgctgtgtcctgacaattttaagaacgggaactttagcatgtcattaaaatcatagtgaaacc

SEQ ID NO: 37650 - DNA, 636 bp, Oryza sativa
gcgaattcgagctcggtacccggagacgacgacgagccattattcacagatctacctaaccagatcaagcgaattgagacaacccttgacgaagagaagttttcgtccgtgtggaaggatggtgttgcgaaaattgtaaaacattagtatatatatatatatgtatatatatatatatgtatatgtctatatatatatatatggatatgtatatatatatatatatatgtatatatatagatctacgtatagatataggctgaggtagagcatccgataggtgagtgagacactcctatctataggagacgcctatacagatgattatgctatcaaaattcacaatcactatatagacgatctgtactctggattgtttgtttagagaccaaaccacttacactagtgcaaaataaacttttcccggcggacaaaatacattatctccctgcagaggacctgcccgtgtacacccaggtatctacgaaaattcatatttttgcgttcggacgggcggaccgcacgtgataattgattatcccgtgcggtcgtgttaagtagaccgtacgggataattagttatcccgcgcggtcctattatattgacctcacgagaaaatggataatcccagtcgg

SEQ ID NO: 37651 - DNA, 535 bp, Oryza sativa
gacaaaaaagtcagttcttgaagtagaagctttaaccttcccggaatacttattatcggtaacgggtcttactatgacccgtcataaatgagttggggtctttatttaggccaaataagaatgacggtcgtccgtgatggtggctgacccgacacatatacctttccacattaataacctttggttcgtgacagtacccctcgcagacacagataaggcttccagcctattacagatgagctatcctgagctagtgaaccaatctgaactgttgtgactactacaaaaaatagttttcgctggcggccagctggccagaggtgctgccagtgagttgtcacgcccggaatttcaatccaaaattctaaacgcttacatgtatgtaaaccctcgtccaggaatcagccgaggcacgcaataacaaattgataatagagtacaattattactctaattaataagcgaataaaatgtcattacataggtagatagttcctctcaatcaataaaattctgagcagcggaaaataaaaga

SEQ ID NO: 37652 - DNA, 619 bp, Oryza sativa
tgcttaaatgatgatgcggaagagagaagagaagagagaggagaagccacccctcacgcaaggggcaacctccacacaaacttcaagaacaagagaaaattagaggagttgattggtggcaagtgtactgggactagggtattaaatgcaatacatctatataggctagggatggataattggataaaattggaggtgaccaccacatcttttataaaacttgcccttagttctgaggagacgtactacggtacatataacttcaagtcatataaaagtttcaaaaccttaccttcattatttctagctctccaagggtgagtaattaatggtacaaaaagtctatgtagaaatcatagcacatttattttcactatttaattcagatcaacccaagaagttgatgatactatatgagagaaatttaattatgaccaccttgtatatataacatagaagggcaataaccgcatcatatttcctggtccttctatataccaccccttctttcagtattcagttcactatgcatcacaaattcacttcctgtcaaatgtcaatagacataataggtaagtactgtagcaagtgaaaagcaagacagtatgtggtaagagga

SEQ ID NO: 37653 - DNA, 552 bp, Oryza sativa
tgaacgcatcattagatctacacatgtaaactacacagtataacatgaacagatcaaatatgcgcaacatattgaacacgtaccgaggtgacgaaaagaccggctgcttggtcgaaacttttcgcaggtgtctacgaaggcacgaaacacgcgagcgaagaggaaggcgagccgtcgcgaacgaacagggagcagtcgcgcgaagcgcttcccaaaaaccttattgccgccttctcccggtgcaggacgtcaaaggcagaggttccggagacctgctctcccgatcgctggtgcacgccggcgagcgggatggagtagtctacgagcgacggcgcagtacagagtagaaggcaaaccctagattgattttgcgtatatactgcgtgaagacggcgggtcggtttatatagagaagggtcgcttgatcagggcgcccgcacgatctctactgcgcgtaaccgaaccggataagtcgcgcgtaacttatccggactccatgccgtttgcacgcaccggatttttcggaacgtttccaaaacaaaaacgaatccg

SEQ ID NO: 37654 - DNA, 527 bp, Oryza sativa
tttgaaagtctacatgtactacttttgttgctacccttcacacaaaagatatgctgctgatagaatgtaaaaagaaactatgcccatttccttgtttccaacacaatcttctagaaaacatagcaatataaaatgggggcaccaggagtagggagaaaaagaaagtatgtttacctcacattagtattccttagcctttcacccatcctttgctggtgtcatccactaatccctatgcatgtctgtagtaacagcaacattttttttgtgaaagctaccattgtttatcacttactgcaaataatagtggaaataattcatcttacctcgtataagcaggcagcatcctgttctcttgaaacaaaaagcatctactggcagaaaaaactgggggtttgttcagctagcataaaaaattgggggctctgtgggtatatccttgagcaggaaaacttaccagtagatctagggtgcatccactgaaaatcgaaaaggaaaatcaagaacagtgaagaatgttgtggatt

SEQ ID NO: 37655 - DNA, 670 bp, Oryza sativa
tttcgctccactctaaagatgcgtgtttgtttattcctgactaaccatcacatcatcgaaagaaggcttcaatgatggggctttcttctgtcattgagccggactgcctgaggcttgcgtggcctattaccggtccttgaatttctgaatgtcattactgtgagctagtggaagtaaaattgtgtgtgaagctgaatatccttttggtgttcaggcctaagcttcgggggccaaatcacctgtagtgtctgcagatcaaggtttttgcttgtgattgtacatgtgtgctccctggaaattttatcgtactagatgcatatgctagtttgtccaccattttcctgatgcttcttattcataccactcttggatacacagtggaactcaatctattgttcacgccttctgtaatcgtattcagctccatcctttttctgttgcatggcttgcaattttgtgatggatactaagtgagcagtgacattgtctttcaatggtaaagttacactcatcgatcaaaagatgggatgatggatatacataaggatattatccatttcacaaccatgtctttttccacattccgagatcaaccccaaacaacaaaatagacatgcgtgttacagtaacaacttcgacttcaaaacgttactttattacttgcacatca

SEQ ID NO: 37656 - DNA, 537 bp, Oryza sativa
ttggtggcaagtgtactgggactagggtattaaatgcaatacatctatataggctagggatggataattggataaaattggaggtgaccaccacatcttttataaaacttgcccttagttctgaggagacgtactacggtacatataacttcaagtcatataaaagtttcaaaaccttaccttcattatttctagctctccaagggtgagtaattaatggtacaaaaagtctatgtagaaatcatagcacatttattttcactatttaattcagatcaacccaagaagttgatgatactatatgagagaaatttaattatgaccaccttgtatatataacataaaagggcaataaccgcatcatatttcctggcccttctatataccaccccttctttcagtattcagttcactatgcatcacaaatccacttccttgcaaatgtcaatagacataataagtaagtactgtagcaagtgaaaaagcaagaaagtatgtggtcagaggaggaggattaaagaaatcaatagagatcga

SEQ ID NO: 37657 - DNA, 1217 bp, Oryza sativa
acacctatagtacttaaaggtgccggtactatatttttttcatggtgtggatgtgggaaaaaggttatgtcggttttaaatgaaccgccacctatatggctggtctctatgagggttttttttagtagtgcattaaggtaatttagtgaatcattgtgctctcaccagaaaatttatgcagcttagcccacaagctagctgctaccagtcgcagtctcgcaggattagggcatatatcaaggtagagacaggtataagctctatgctatctaaagactaatgtcatgcaacagttgtagataatatggtctttaccattaatgtattaaaatattttttttcttagtcttctttcctttctttcaccaccgtgcaataaaattcgatctaatagctaagagttgactctgaaccgttgtcatgcataacaaccatatttctatttccgtttttctttttcttcattagtcatcaaatttacatacatggtaataaagagaccacttataaagaccattgtacatgcgcttaggaaccagccgcagacgcctcttggcctaccgatcgactacggaggctgcagcatgccaactcgccgttgggcccgtactgctccagtacgcagaacatgatgtcaggctggttgctctcgccgattggaggccctgtgcgggcactaacctcgcacaccgcccttgatggccctgtgcggaggctagcatgttttctgttttcatgatgcctctcatttgtatcacacagcgatacatataaaagtttcccccttttcaccacattttaccattttcttcaggtccaacctatgtttttccattgttgcatccaaacactgccttttcatttttatgttttacgcatttttttttacttatgtcagattgaggaatccgtaatacccgattgtatgcaattttttctattctcgtgtttaagatataaggccttaacatgtgcacatgcatgactatacaggacagggagaggtgcaagcaaattaaaaggaaaagtaatgggacagcacttgcgaaggtccagtaaaatgacagagatacataccaactggagaactcttgaaattattatatatgctcctttttttccgtttgcactctaggttgaaccattgttgttaattctgatatcacatcgaaaagtttgtatcctcccaatttaaagacaatttctacattttaggt

SEQ ID NO: 37658 - DNA, 548 bp, Oryza sativa
tatcaaatactcaaatgttggctaaatgctgcttttgcaaatgcaaccctattatgccatcctttgttatcttgtgcacttgcatatttgctgcgtggcttgctgagtatgtcatatactcaccttgcaatcattcatcagaggaagagttctacaatgaggctgatggtgtggaggattaggtgtagccttggtcaagctgcctgtggagtggagccgtctgcgccgtttatttaatttccgctgcttagaactttattgattgagaggaactatctacctctgtaatgacattttattcgcttattaattagagtaatatttgtactctattatcaatttgttattgtgtgcctcggctgattcctggacgagggttcacacacatgtaagcgtttggaattttggatagaaattccgggcgtgacaagttggtatcagagcctctttgaccctaggttatgccaaatggttacccatagaagccctctgaaaaatattggaaaagtagaactgttctcctccctttctcttttaattaaaccaaa

SEQ ID NO: 37659 - DNA, 555 bp, Oryza sativa
aaaaggctgtcctaacgatgccttcgagaaagaaaatgacactcaaacgtgctgccattgccatgaccgaacctgtaaaggccaaaacatatgtttctccttcattagagagcaaatctttgactctaggcagtgcttccaacagggaagggaaacaccattggcaggaacaaccagctaagggctgtcctaggaaaagatgatttgtagaggcatgatatattttcatatgcttataatatcttttcatattatcttttcattatgtgtcccatggagctccttatctaccgatttgcaaaataggctatattttatagatatttggttgttaaacctcgaggcattttgtggacctcagtttccgtttgaggtgtagccttatcagcctcaacctgcttcagttactttgaggcagagataatcttttgaggcagtgttctctgccacaatagacaatttggggcaagagtatctgagacatggggaggctatctcgtaatctcttttgagatagactttgaggctgatttggttgctttgttataaaaacgg

SEQ ID NO: 37660 - DNA, 647 bp, Oryza sativa
attcaaattcgacaaatttaatgttgttaagtagttcttgttttcactgaaatctctgaagttgttggaagaaatcagtggaccgaccaagattattactgtccgcatcacatctgatagatagtttcagcaaattctcggtaaaatgctttagcagtgcagcatgagtggtaagaagaaccacatctttttcgaatcatgatatttatgtgtttctatatattgttatggtcttagagctgttggttgctccaagtataatttttatatgctccacaaattattgccttcattgacaatgttttaatatacagcttattactctgagggatgagtggtggtatgatatgctgtatattttatctgtgcagggcactttttttctctgaatggaccataatatctgttgagatattgcattcttactcacctgttcataagataaattattgcatggaaccatggactgaatcatatatcgtgtgctctatgcagtatggacatttgctaaaatcctactcaatttatggtgtaatgtatatgtagctcctgtaagttcttcctagatgaattctgaatattaatgtttgcttcaaatgtaatatctgagagacgtggaacacgttgtggatgccaagcatgttgga

SEQ ID NO: 37661 - DNA, 898 bp, Oryza sativa
caccaccccacagtgccgaccttatccatccacccaccacccccacgcagcgccatccatctgtctgtctctcctccccccctctttctcacgggctggccaatttccctttacgcggcgggtgcgacggagtagcggtggtggtgacggagaatgatggcccggaggtcctcacccggcccgggggccctcccccttctctcctcctccagggcagcccgccagtggagaaggccggccggcgagggcacggacgcggctgaagtagcgcctgtggtgatggagaatgatggcgcggcggtcctcccccggctctggggccctcccccttctctcctcctccagggcggcgcgggtaaggtggagaacgacgcgacgaggtgacagtgccggtggtggtggtgaagcccgggatctcgccggcctcctttctcccggcgcggcgttgggtggcgcccgccggcacgaaggccggcgtggcgaggtgacggcacgaaggcgggcacggctaggttccggcgcggttgccgggcaaggtggtggtggacggcggtgaagaaggccggcagcaatgttggtgccatcttttttttaatagtatagatgctggttttaaagcagacaccaataagattaaggcaaagatgccagctgggaaactggcacttatagccagttcccaaccggcacctataggattgtagtgacagaaggtcatgatgggctgtttagaaactccatactcttgaggaacaataattatttaggatattgagtactccttccatctacctagctacatgacgtggcatacatgctaaggaaaacatattttatttgtactacgtacatatcaatggagttgtctcatcgataagttattaggaccacattgttt

SEQ ID NO: 37662 - DNA, 555 bp, Oryza sativa
ccgggagcaacaaaatctctgcttttgacagtgtagcaatacttatgcctctaatagtatttctcaaaaacattgcaatcaaaagctggcattgtcttgtttcacaaaaaaatgttcatcttttggaagtgttataatttttcaattcaaatatgtttgttaagttgagacaactgagctggtatcattgagtagactggtagattatgcaaccatgccaaacttggcatatcttcttttttttatcatggtacagtcggcatatcatttaacattttctcttgtggtgatctagcagaacatagggttttatcttgagaaattctagatttctatctataagttcaataatctttaccacaagtatggattgaactagatgcaaattaattaagctgtggttgcaaattgaattatgtgagtgcatactatcatttagcaatgtcaacagattaaattttgagatatttggatgtagtattgaagtatcaattagtaatatagacaggttggattttcagatgattatgtggcatatcatgcattaacgaaaaa

SEQ ID NO: 37663 - DNA, 546 bp, Oryza sativa
aaatcggtgccgccggccgccacagccggaagcaccgccggctgccgtcgcgacacctgaccatggccgccgcctaccgaagcccgcaccacggtattccaaaccgtagaggggagggggttggaatagccttgccatcgttatcgtggttgccgtcctcggcgcggtagacatcgttgtcattgtggcagccgccgccggatccacctccttcacggttgtgaaggacagcccgagcaacgccgccaccggatccgcacccaccctcctgtcaccgtcgctgccctccccgccggcctcccccattgtcgcggcggctgattcggcgtccacggtcactgcggcggctgatccggtctccccgtcgccgcggtggtggatctggccacccccatcgtcacggcggtggatccagcctcccccgttgtcgtggcggccagcagcgaaggaaggccggtgggagaccggggggggggggggagggagaggaggcgtgggccatcgcagtttgccggccgcctgtcaccgcgccgctgctgagccacc

SEQ ID NO: 37664 - DNA, 548 bp, Oryza sativa
gagaacatctttgccaatctcttttatcaatcatcttccggcttatctctaacaggtggtattctttgatgtggattgcggacgcttctggggacgatgaggtcctttggcttgctgcctttccgtgaaaccttgatgtggttcgtcaaagactagactgacgattgttgcctttgatccgaagagacacatctgaaactcttagtccaaacaaatgcctctttggttgatcacttgattttcttcgccatcaatcgctagactatttgattcctaacagattttgggtttacggaaatgagaccctaggtctccctaatcaacaacaaaatgtgcacaactcacagcacttgcactcttaacatggatccttcataagcttatcaaactcattcattatctcatgtttctctgttattacatgattgacggggaacaactataaaacaaaagtatttgaacactgatataagagtattatggttgcttctgactagcgctaggcttatcaggtactgtatttgctccagtgaccacttggcgattgg

SEQ ID NO: 37665 - DNA, 958 bp, Oryza sativa
accaacatctaggtcattaagttcaagttgactatgattcatcataaatgaaactctaaatctgttttggttattatcagttgtagagattgttgtacatttgtatcctcaacatgaatcattcataaacatagcaaactcattctttatatatataaataaactcattctttaggttgatataggatactgagaaactggacccgaatcagccaaggaaggcttatgacaacaatcgacccaacgacggtcatcttgtctataaagaaggagaagttgcaacaaagcaagatggtcatacggaaaagtgtttcagtaaagacaaggattgaaattattagacttgaccgggaagtcaagatgggtaacatgaatagtggtaatccaaagctcgatcgaacttttggcttgtatcagatgctacacagaataaaaacacttgcactagttactgctcaatgtgctttcctcacaaacgatccagtgggaaagaacacatcaaggttgaaggtgcaaaggaatatgcaggaagtcaaatgatgacaacacgaagagaaaaatggcaagtaaaacgaatgtaaagaaagtgaatataagatgtcttttcttgggagctcttcccaattacgagccaagtgatatgttcaaggataatctacggaggtcagaccaaaatcatatcaatgtttagatccaacaaggaagcttcatctttggtaggttaacaatcaaactaatataagccgctcgtaaagttacatgacaagttaccaaagtatgacaagttttataacctggttatcttgagaaacattgtatgatgagagagttgttgatcctaaagcgattattgacgtgtaccccaacttttcttgggacggggatcaatgcacaagcaattgggaaaaggtagttttctgatcgagacagcgcacatgtccggtcgcgtggagctcag

SEQ ID NO: 37666 - DNA, 965 bp, Oryza sativa
agaaattttgaaaaggctaaaaataaagatgctccaatcttatagaactcaaacaagaaccggatataaaacttgtcacaaaagattttctctaatattttaaaattttaaaattgaaatggttgaataggaagggaaagaaatacaaatgattaaaatagatgggggaaaaacaaataggactttagccccaaaatatttagcatggatttttgatggttcgataataggctaaaggagatttggatttttgaataaaggaattgaaaatgggtttcttagctcaagagcaatcactcaagtatttgtgataatattgttctttgtgccaaggatgtgatcaagccatatagattatataggtggtgtgatcaaaatagaaacttgaccacataatggatggtagcatattttggttgaaggggaagtgaagattttggggggaaatataggaattaatattttatgtactccagagatgtcggagaatgatatttcatgtgctctggagatagttgggtgagatcaaaagggtatttgtggatgttggagatgttagggaatggattcaaaggaaatataatttagagccaatgttagggatttaaataaaataaatggagaggttttgtaaaatttaaaagagaacaattaactttgcaaataaagttttagatccaagataaaagaaaaggttaaatgcaagattgctccaacgtaagaatcgacaaaagcatgacttaaaatatttcgcaaaaaaaaaatcctgaaattttgagtccgttacacgtacacatgggaaatatgtcatttttgacatatgtgaatgattaacctctccttttgcaaacatttgaactgtgacaactgacaatcaaatgtggagagtactagctttaacgtgttaatttggtttccatgttgacttaccaaagttttgatgaaatccacaagcacaaaaacat

SEQ ID NO: 37667 - DNA, 1238 bp, Oryza sativa
actcatttgctgctctgactcttgaaaatcttcagctgaatgatgatgcagctagatgcttttcgacgcatgaatattcagaagtcagcacatatacacatgtacatgttcgctagcggtatagatgaataagaatgtattgcagttagagtttagtccaacaacatatgtggagtggagctttaccacctgcatgaagcaatatttcttagagtgcatacatgaagcaaatttttctcctccattttcattctttgtcttttaaactattttggatcgcatttgtaatatttcggataatgacactatgtcttctccataaaggataaatatgtgatgacgttggtgcagacacatgcttcaccatatttgcacaaatgcgaggacttcctcaccgacacgaatttaaagcatttgaagagctagataatagatatccgtagaacgcattgcaatgaatcgcatcaagtttttgcaaccaaatatagaaacttgaaacggacaagcaataagaatggaggaacagaaaagagagaaaatcacagggtctcaggtggtctatcattcaggatcagtgacaatgtgatctgatagtcatatatagtccaaatttttgtgtttacggccttcattcatgattttcttatcaagtccctccgcgaaataatacagatgctgacctgattttttgacgcaacatgtttttgtgcttgtagatttcatcaaaactttggtaagtcaacatggaaaccaaattaacacgttaaagctagtactctccacatttgattgtcagttgtcacagttcaaatgtttgcaaaagggagaggttaatcattcacatatgtcaaaaatgacatatttcccatgtgtacgtgtaacggactcaaaatttcaggattttttttttgcgaaatattttaagtcatgcttttgtcgattcttacgttggagcaatcttgcatttaaccttttcttttatcttggatctaaaactttatttgcaaagttaattgttctcttttaaattttacaaaacctctccatttattttatttaaatccctaacattggctctaaattatatttcctttgaatccattccctaacatctccaacatccacaaatacccttttgatctcacccaactatctccagagcacatgaaatatcattctccgacatctctggagtacataaaatattaattcctatatttccccccaaaatcttcact

SEQ ID NO: 37668 - DNA, 673 bp, Oryza sativa
tccatacccgaaatgccgaggtgagcacatctctctctctctctctctctcagtctgaccctatatatccccagtgatgatgaacaaaatctccataaatgaactctcgtaatatcccactgtatcaaccggatttcgcgaggctcgcatgcacacgccgcattagccaaggagtgaattcgcgattgaaaaccaatctggcattaatgtgtccgatgttttgttgccaactgctaaatgaagtgccagcagagttgccccccttccaaatcattccttcgcgagtagtagaaactggtgttctcatttgttcgaaacacacaccaccaggcagaggcagattttttctcatttcctctttgctttttttcatttcccaactcgagttcgcttcgatgatgcagcagcttcatggctccgactccgtgcaagcgcagcgccgccgcccaaggtgttcgtcatatgcatatgtgttcgcacacaaaaaaaattcctttctctttttttcccctcaagaacacggagaaaaatatctcgttttccccttttgagaattatgatccttagatctgtcgttgtggacgtgtttgatggtgatctcttcgtgcgtgtgtgcttgttttgatgcaggaatggtgacgccgccgccaagaagcagccgtggtacaggcgg

SEQ ID NO: 37669 - DNA, 1008 bp, Oryza sativa
gcaattttgaaaatttcagcccgaaattatatgaatttttaaataaaatttgatacaaatttaaacaaaatgttactaaattcatgaaaagatgaaataaataaaaaatttcagccaaaataatatcatactgggagatccaatagaactgaaatttcgatccgaaattttgaaccgtggcagtacaatggctaaagtggtttctccgcagcggcgttgtacgagctctgcaagctagcggagaacatgcatcgcatcgtgtgtgcaagcggggcggcgcccgcgctcaccgactctgcccgcgtcgcggatgtgctcatcttcttcgccaagtccagtgagagccgccacgagctgtccactgtccggtatccctagcatcgtagtcctgctcgccgcagccaacattgtcagcagtggcaacacccgtgcaatcgagcgtgcgctcgccgtcttcgattggatttgtgccaagatcaacgaattggcattggcatgggaggcaataaatcttggtctaagagaaattcttttgaatcccaaatcatccaatctgaaatgctctatgatatttttctctgaaatggctcctgttaaattccaatgttctcaatgctgtcctgtttcgttcttgatgcttattcagatgcttgttcagagtgacaaggagcagcggtcttgatggatccaaaataaaggaggacatgtcattcccagaaacatttcatcatcttacagctcatgtataaactgaagtagaattcagaaatgaactgaacaccaaaaagctgaatcttaatcaaggaaatcgaggaaaattttgtatcttaatcaagttagtacggggccaaattcagctacaggatcacatgtcactatcagctgtgaaggaagaatatttttgttctgctttaattcaaaaaaacctgaaatggaagtaaagaaaacaccaattacaactgatgcaatatatattatgtacaaataaccagaaagaaataagattaa

SEQ ID NO: 37670 - DNA, 613 bp, Oryza sativa
tagaggcaaaaattgctatgaaaattaatcaatgcaggcctttgcctctaccagttgtagagcacgtcagcaaaaaagaataacgtgaaggtgtacagtcagggtttccaaggctgcaataattcaccctccatgtaatgcgatgaaaagctgatgtatcattaatataaagcggtggtgtccttatgaccccaacaggcaattccacactgtgtcctcttctggttggggagagagaggccaccaaagagaagcacagctggaagagatccatcagggaagagatagggtgtggtaccaagcagggaggggccagggccccatcacagcagctgtgatagagaggtgaccagagtggaccatgaagccagacagcctggcttcatgttccatctcctccacttactagtgacatgactcagttgtcccacctgttaaatgggaccaaaaatggtaggataagggtaggaaatgaaaatagctggtgggagaattaaagaagttcagtaagacacatatcaagtgcccaggagatgttagtggccagccacctgtaagaactggaagcattacgacatggtgagtctgtctgagtctgaattgcaaatcacat

SEQ ID NO: 37671 - DNA, 1176 bp, Oryza sativa
cagacagtccattcttatactacaaaaaaaacattagcaagtgctctaaagagaagtaaggacccaaaaactacagaactgagcttgcaggatgagattaccatcaattacatgaagcaatgtgatgatgatgaaaaattgctatcaagtattgatggcatacaacttacatatgaatttcttaggccacttgtcaatcccaaagactcacaaatcataagcaagtggttgaaaggcagtgtaagaaatacttaacttcttccatacaacgtaatattatcagtatctaaattttgttctttattctttcacaggtcatagatgcatacattatgttgattaaagacatgcaagtgaaagtccaagagagcatggtactgcatttctagaaagtacagcacattgccaggcctggaaaacaaatggtgaacaaattggaacccgcaacaagcaatatcgagacaagagagcaaaagttacagcaaaatatttgcaacatgatatggtatatcaatgtcctcaaatatccttcataataataactgcatgacttacatttcatttcctatgtagattttcctaccactcaatagaaactcaactcattggtacgtggctgttctcaatggtgctaaagaaaaaattcaaatactagactcgatgcgcatggaaaagagctactacgacaaagataaagacctcaataatacagtatgctacattgtgcctttagattcatcactattccttactaactttttacattagatatgtaatactctatttgataactcagataaaaggaattgaaaagtttatccagtatgcaaggctagaagatggcgttgaaaacaaatggaagaacaccaggattaccaattggccattctgcccaatgaaagtccctcagcaaagtgacaagtcaaacaaacagttaatttttgtcgcaaattatctataacgaattaccacttacaaagaacatgcttgcaacagctggtcatgtggcttgcacacattgaaattcatacagcattggaatggaaaagaactctcccctgagttcaatgaaatggtaattttaaattgcattcagtactctttgtaaataaaatgacattaattgatattttttcataacttgcttttcaggatccaaccaccactttcaaacat

SEQ ID NO: 37672 - DNA, 708 bp, Oryza sativa
aatagttcagaattctaacctcctgtgtcacttcgtaaaatgatttcaccagtcaccaaagttcccagacttaagaactccttgatcttaatgccgtggaaaagcagtcaccaccactgaaaaattagatgcaagacaaatgggtgataacaattgattctagggcactctgtaccacaaagccctctaattatgcaaccatatggtaacagagacactttaaagattttgtttcccctccaaaaacaggatttaatggtttcttcttgacatgatatgttgcagtacaggagagaggtttgcaagattttggaagctgcctgtgactatgtcctaaaagaagagtcaaacaaccaagccagtcatgaaattgaggcaatatctttaacatgaaaaactgtagttgtaaacccatgtgtagttccaccgacagatacttccagcacattgaagaagatggcagatgatccaaatgaacttcatctccacaatatatatgtacttactgcatgatacagaaaagatcaaacactgttacttcaaactaacaaaagaattcaagagaagctgacttttctaaaccttattttcttatcgtacatgaacaacacacagaagtatggtaaactgtaaggaggtgctaattattatttacagctactaaagtatgacgccctggttttttacagtaacactataatcacaaca

SEQ ID NO: 37673 - DNA, 723 bp, Oryza sativa
cttccactccagcaggcaagatctgcttcagaatatgatctacaggaaataaaagggatgaaaacccaacaaatgaaattcagcactacacatcaaaatagctttaacaatatggaatcctacattcctacacaaatgaagaagagaatattagtagcattcacaactagaaaactggaacttttgaaaagaagtccttgatttggaagaccaatttgccatctactactttgcacaagaaataacataaagaaaacatgattgaatgtgcctaagtaacacactgcaacaaaagaacagaaataagatcttagagaattagatggtaaaccgacctgcactccagtaagaataaccaagggtcaaactgtaaggtacaacatcaatgttgcaaatttgcttcagtgaatcgtaaaccttctcctcaatatcagacaggtctgtattccaaaaaccaggcgtaagcattctttcaacagaggcgaaacagattagaaacactaaaacagagaagttttctttcgatcaaaaggcgctaagcaagcatggtaaactatggtactcaagacatgagcaaccaaatggatctaactagactcaatcaagtattggtgacggcattcaaatatttacagcaactcacaatatttgcttagttctaattcacaattccagataagaacaggctaccaagaacaaacacagcctgaaaaacatacatac

SEQ ID NO: 37674 - DNA, 845 bp, Oryza sativa
gtcttcacaattcacaagaaaagaaaccttcccgcttcaacagtattccgccactgcatggtttatgaatgtctgctttctaagaaaatttcacctctatttgtgtggcttttcataggatggtcatttttgttacaaatttaaaattcaaagataattatttgtgcatgacagatcccatatgcttatgccctgctgtcacttgcctagtgcctacaattgcctatcattggttaatctaaatcattttagtattgcagaaatttattgcaaacagatgaaggatctgtggttaagttttggacttcattgagcaatcaaaatgtatctgtgaagaagattcagttctagtgtttttagcaaaagaacaaaaaggacaacactgctgtcttgagtatagaaatgttatcaatggtctactactaacatggcttgtgagcatgtcatgtaacccaacaaattgcccagcacataatgtgatcattagaatgtaacagaaaagcttgatggagaggataaaagtacaaaaacattaccaagaaactgcagagcagaagcaggtaattcattacgacatggtcaaagtgttcccatggcttgacaggtggtggtcctgagccttttactcttttgttgttcctcttctttgtatgactagcatcttcttggcagtacccatcacctataggagaggtaaaagtgtaactctactacaagtaacataataggtaaaatcttcatgcttatcacagttgttattaacttagtagattgacagacataggagttgcaagattcctaaagacataataaatgacgtaattacctccatttgagctttcttg

SEQ ID NO: 37675 - DNA, 1836 bp, Oryza sativa
agaaagctagagatattcagattccgtggttgctaaccgtaagggaatatcttcttggcggtcgaactaccaagcaaattaagaaagttgtgaactttcaaatgcgccaagaaatgtaaccttgtccctttagaccaacaaaaatatatctttccttggctgctgagaaactgccaaaaaaattcttactcttgaccgttagaaccgctaaggacattttttatccttgacggttagtaccaccaagaaagattatccttgtcagtcagggccaccaagaataacttattgatgtccaaaactgtgtctttccctggcggccctacctaccatggcaatcaagaatatatttggggtgtaatatgagtaatttccatggcggctagaaatgctagggccgccaagaaattatctttggggtacattatgcagatacagtccaaatattggtgacacacacactatatacacacatgcagtccaatgcaacacaacatagcgaaagtaatgtgaaagtcaatatagctggccattatgtgaaagtacgccgcgagaatcgccaacatttccaacaatggtaattttatcttacctaaaggtataatattttttagtgtaaaatttagtatctttacgtactatctatctaaagataaaaaaaaattagtgtaaaatttagctatctcaaggtgttttctcaagaattgtaaaatttatcttccaacgatgatctgatttcctctgatgattaccatgtgtgacgtgtttcttttgtataacgacgctctgtaagcctgctgatcagggagcaaaaatcccaattgaagtgtaaaaacaaacaattcaacagttccatgaaagaaaaatgctacaaaaatgtgtgaaatgacaccggagaaaaataaaggcatacataaaatagaggagtagaataagagtcggattctatactaaagggatatacctattgtagcaggatggcgacatggcgacttagcatagcgagagggagcggctgccagcgacgttcggccaagggttgctgtaactctgatatatacgctgtaatatgttggatcggggatgtgtacccgttatcagtgcctcggggatataagctacgactctcaatgacgtcattgtgtttggatctcctatgacatttttcgcatttggtttctaatgatgatcttgggccagttttataaggcttttacgtgtttgtgaataaaaaaaagatgaagatgaagacaacctccgggccatgtttgcaaagactctctatcagggggccaaaaaacctcaatcaagttgcgttgcatggcaaccatgaacaatcaacagaaacatgtttacaagggatctctactcctaccgagtcctcatcgatcaaccgatcgatcactgcgttctacatggcgaagatgcagctgacgaggtcctcgaagctgtaccccgtcagctcctgcaactccgtgctccagaccagcgcgtcgtgccggttcagcgaacacctcgcgacggagatcgacgcccgccggccgccgcctccatggacggcaggtatagtagccccgggcagccgtacgtagttcattagcgactggtcggcaacgtcgcgctccagccgctgcatgcacccgtagcttttcctctccccggctgttgtacacttgtaccgggtgaagtgctccacgaacgtgtccgcggttgggccatatgtagagacatcagagtaccaaaagctaataaatttgaatttgatgaattaatcacatatatttcaaccaaataacacgcgcaattttgagtttacagatcaatgtacaggcaaca

SEQ ID NO: 37676 - DNA, 1006 bp, Oryza sativa
tagatgatagaaacttgcataagttgatgtagtttatcataatttaaacagtatatagaatgatgacccaaatttaaaagtaatatgatgtggctttataagagaagaaaatgtgagagataattccaaccatagattaatcatttgagggatagaagcaattgaggtgatatggcttaatgagagaagagagaaataacattaactaaataagaataaattgtataggtatatagatattatacaaaatgatggagagatatattgaaatattttgagaattatgtggaatgatgatttaacatgcttggattttttaaagctataaaatttaagtgaggatgaactataggcatataggatattataaaaggtgatggagagatatattaaaatattatgtgaattatgtgggatgataatttaattcacatgcttgcattttaaagctctaaaaattaataaattagcatgcttgcatgagatttgagatgtagtaaatgttagtggatgatgttgcatctttacatattgagccttaggatgtagtaggctaactttatagaaagataggattttgtagctaaattttgctacacctatgaataatttgttgccacacttttgacaaattaacttgtggtaaagttagcgttcgaacaattagatcttaaatttatccttaaaattattatacctccttgagccccattggttaccctaataagccaaaaaaatatatcaaagtttgaatttttaaatttaattttgaagtggattttaagatattttcaacgtatttttttacattgacttttaagtgataataacacatatataaaagttttacctgtaaattaatttttattccctaattagtcatgttgacttattagagaatatgagcaaccaatgagaacttaaatctcacctaacctattttttgcctaattttgcataagtgcatactacctgtaacacacttggttataactggtacttttcg

SEQ ID NO: 37677 - DNA, 1038 bp, Oryza sativa
cgtacacgttcgtggagcacttcacgaggtactacggcgacggagaagaagagaagcagttgaaggaggcggcgcatcgggtcgccgacgggacgctgctgacgtacgggttccaccgctacctgccgtccatggtggcggcgtcgtcgatcttcctggcgaggctgcacgagctggggcatgagccgtggagcaatgatctcgcggagctgacaggttacaaggccatcgacttgatggggtgcgtgtgcgacatatacagtcaaattgcatgtcctcgctttgctcttttgcaagagtacttcttcgaggatccatagcccatgtataggaagaacaaaagagtctgtaaaagcacaagcatgcaaggcatgaatatgatggcttaaattttgcactgttgcctgtacattgatctgtaaactcaaaattgtgcgtgttatttggttgaaatatatgtgattcatcaattcaaatttataattactagcttttagtactctgatctctctacaattatggcccaaccgtggattcgtggagcacttcacccggtataacagccggggagaggaagagctacgggtgcagcggctggagcgcgacatcgccgaccagtcactgatgaactacggctgcccgcgggctacctgccgtccatggaggcggcggccggcggcgtcgatcttcatcgcgaggtgttcgctgaaccggcccgaccggtctggactctggagcacggagctgcaggagctgacgggtacagctccgaggacctcgttaactgcatcgatcctcgccatgtagaacgtagtgatcgatgaggacaccggtaggagcagagatctcttgtaaacatgttctgttgattgttcatggttgccatgcaatgcaacttgattgaggttttttttggccccctcagcaagatcctaactagagagtctttgtaaatatggcaaggaggttgtcttcatttttttttctcgaacacgtaaaagactttatgttcataaaaccggtccgagatcattatcg

SEQ ID NO: 37678 - DNA, 694 bp, Oryza sativa
cgccaaatcgatgtgctaggaatgcgtgtagtgtgtttgcttgctatgatacgaattgtgtcaaacaatatttttctttgtctcaatcatatggccagtcattcatatgtgcttgacaagaatatggctacagaaaatcttcagatgagactccaagctccaggactgatccaattttggggatcccagcttatctgtagcagtacgtgaaacatagacacttaagcagcacccaaaccaaagcatgcagaaatcaaaatacgggcatcaaagtatatatatggtgttacgtctgtttgtatgtgcgtgtgtgtgcatcttccgtgtaattgtaaagaaaaatttaaatctgaacatgtcggggtttttgaaaaatagaaaatccaagtagggatgaaaacggcgcgagtatttcctgaccgctggcctgacccgagacttgcaggaagaatatggagacaaaatgggatgctcgatattatcttagtgttgtatctgaattcgtaaaataatatgggttaggatataggaagagttgtatcttcccatatatcccatattatgaaatttgtataaaattctattataaattcacctataaacatgatgaaatattggttagtaactattttgcgagttcacgtataataatggacaatttgctcctggatatatctcggcttcttatattaaa

SEQ ID NO: 37679 - DNA, 734 bp, Oryza sativa
gtctatctatccaagtatccaagttggtagtaatagaaaatgtcttatccgattttaagttcttatattttagaacgaaaggactacaaccggttcaacatattgacgttgttaattaaagggataaggagttgtaagggattattattcgatctcgatctctccctccccgaaggaactcgatcatccacagccacaaacgctgaaacttactgaaagcaacttggcggccggcagggttgatgtcttgatgatgtgattagaggggctttttggcaggaaaagagggggcttttttcgtggtcacgagcgtgctttatatcttaacaagttgctgcttagagaacagatgcgtgatagctagccaagcaatggtccactgggaatttgtactagtgtacatgtacagttgcatgcagtaatactacagcgttgagttgcatacagtaatactacagcgttggagattagaaggatcgtgtccacaacctaacaatagcaactgtggtttgaggaacagatcactaacagtatcccatgtcggcaaagaatgcagaatagctgacaaactgatatactatacgcttacacaaaaataacaagacgaaaaagaaacaacctcataattttttcagcggaggcttaaaaaagccagaaacttgatcatttatcacgacagggacaccgccaatctgaccgataatccttgcaataatgacccagcaccaacctaa

SEQ ID NO: 37680 - DNA, 726 bp, Oryza sativa
ctagattcattagtatcaatattaatgtgaaaaatactagaatgaattacattgtgaaacggaggaagtacgtatttttttttagaaaaaagaaaaacttattaacacgttttagtagtagtaactttatgctattgctatatagggtcgacctttaaatttggcacctatttcttcttggcaggaattcaccggcaaaagctagccgaagttaacgcgacaaccgacaactagcagataacttggggttgttgtttggttggggccgtatgttgaggagcaggagattcctgctcacgaaatgcttgttgcactttcaaagttgacattagacatgcatgtagataagctgccataatagcacaaattaacagtaggaaagcaaagttaaccggccggtgaacgcaagttcaaataaaatagccttggctcagtgttcatttcgagcgcgaccggcgctctattctgaattcgagttgggccatttcgacattccctcttccatggcccatttgaatgcgctgaattttctgggctcgagttattgggccaattttttttttttttttacaaattctttcctctgataataactctagttctagctcgattgaacatgatagtgaattactccctccgtcccaaaatataagagattttaagtgaatgtgacatatcttaatacaatggtaaggaaacacatcagcttttacaatactacaacat

SEQ ID NO: 37681 - DNA, 609 bp, Oryza sativa
aaaatagatccagcatttagcgatggcccgcgaaaatgggcttttggcatcgtggtccacgaaattcagctcaaaaccaaaccttaaatcccccacactccctagtccccctactcgtgcgaggctcctctttagtctcaactccagaattgtgctctcccggtgatggtggctcctacccccagcagtggtgactggcggtggcagcggcggctcctactctcttgcccccaagcggcggcggcggcagctgctccaacgtagtcttgccccaagtggtgatggcggcaactccaacgtagtcttgccccaagtggtgatggcggcagctccagtggtcctgcccccaagtggctgcagtggcttctacggtccagcccccaagcggcgacggtggcggctcctacggcacctcgagcagcaacatgtgcaatcaaatagtgagtcacatgtcaaattttagcccaaattctataagtttttttatttttcccctaatattttttaaaactgctaaataccttagttgtagctataacccgctatagccgctcttagctgttggagagcacaaccgttaagaggcttagccggagatttagaacattg

SEQ ID NO: 37682 - DNA, 2385 bp, Oryza sativa
caaatgcatggtctgactttgggcgcgagattgttcagaacgaggaccggttcaaatgcgttgacgtccacgtacgtacgccggcatctgcacgttccggttggatggtggccgaaccgaaccgcgtccacttgtgtggactaaattgctcatgtgcgtgccggttggttcacttcctactggatatatttcgtaggcacgacgaactagtggatatgggcatctagaagtagaaacgtcagtcgcaggtgtttgctgcgcgcgacatagccatctacgttgaactttgccgacttcatgtgtgccgtgcgtgcgtacgcgatgcgaggatcggacgcgcacatgaggtgagctccgttgcagcgcgcggcgcggcggaagaaccgcgcgcgcgcgggagagggcaacccgttccgtgcagggcgaaaataggagggggatttttgtacgctcacggcattttttttgtcagcgaaaattcatgcaagttgatcacggcgacgaaattctccccttgtctcgatgagacgagagcaccatgtgcagaggaaaagaaaaattgcaaagccatcgattgctcttgctcttctggtttcatgagacgcgtgttgccattgctatgtccggttccagccctattactgtcagttcgcacagggtctccatcgggtttaaaaatgccatggtaaatccagaaaccaccttgtaaactcacaggtttcgaaagagtttaaactgaaattcaaatttccggcaaagtgcatccaaatcttaccagttttcatcgttaacgaccactcgggcgtggtattcgtttttggaaccctggtacatccatcgctccatctcattttcattgttcatctgtttgcatttaggccatctttggcaattggaataggtggcccataaaagacggcccgttattaaagcccatggtcctttgtcacgttggagaagacgcgccacggcccacgggctgtaaaaagtggggcccaaggtgaaggctcaccggtttcctaacgggtgcgacccatctaaaaatacaatgcatctcgattcttatcccttccgtcctccttcctcctcccccctccccggttcgacgcgcacatcgaaccccgacgaccaccaccgcccggccgtcgccgccgccgacgcggtcgtcctctccggtaatccctgttaccctcctcgtattatcgctccttcctctcctcgccggtcaatctccgcgtcgtgttttttcttcgcgcgccacgatccttgccggccccccaccagctcccgccgccccggcggcggaggcggtccgggcgtgctgctccggaatccctttacataccggaaactcctctcctggcccacccccacactgcccagcccgattcctaactccggacggtggtcgtcgtcgccgccgccgggaaggttcctgggtttgtgcctctttgtgggtaggatgcgttcgctcgttttggaattgtggggatagttttggaattgtggggatagcgagaggaaaagctagtttggtattccgattcgtcttctcctcgtcacccgccttcttggaaaccccgcctcgcccgtccaaccaccaaccccgcacccccgcctcgccgcctgccgtccaccgccatgaaccaccttacggaatacgtatccatcaccgttggtgttcgaggtaacctgcaccaattcaattcgttatttggcggtgctttcttggtggaggtagatgcttgccttgcgctgtggtttaccccctcagcttaagtttggttcttgagttggacttgcttgggaaaaaaaggtgtgattttccgtgtccggtgtccctctgtgtgaaatagcaagaaagacaggtgcattgtgccgtccattccaacatgttgaatgcatgtggtctggcattctgcttgtgatttgtggcatagttttggcaccaatgagttgatgggattatgtgattagtattgtagttttgtgtcctcatgtccagtaaccagagtttttctcatgacaacatttctattgtagagttctatttactcctataacagtcttattttcaataagacgtcacttattttatgtgatttccatattggatggttgggtacacaggttagttagtatttatgacttgcttgcaaatgtcacactggacaatctccttacctcattatatggaaggggatgtgtatgattagacagaagggttcaaattcatctgtttttttagaaagtctacattgcaatatttggtatatataagtagatattcatcgcttaatgctttatagagggagttggggagcccagcattcccttttttctattataaaattcactatgtttccactcgtgatgaactctgta

SEQ ID NO: 37683 - DNA, 1297 bp, Oryza sativa
cttgatggtgtcgtgatgaggaaaaggaacacattgacaggaagcgaaggacctcgccagaacttatggaggaagtggaggaccatgatagagcttgagaaggaagaggaacacattgatgatgagcttgtccatgcaagaaacaactatgacatatagctattgctgggaaagaaggggtcatggtaggctgagggtcaaggatggatgtttttcttatggtgaatcacaccttattttcatcactatacacgcacacatttgcagtactagttacggtcacttgacatagtgctacattatttctgtcctcaacaataaacaatgcacattttctcgttcggaagtgtcgggatcgaggtccaatctcacccacccaaaatgcttgaagtcagcagtccatactttgccgtttatatgacatatgctcaatctaaagacggataaatcattgaatacctgagcatcatgccagcccacctaaaatacttaaaatcgaccattttctccatgatgctagttgatgatttagcacttctaaatggagaatatgtcatcctaacccatacattacgaattcagagaagaatctcacatatcactatgaattcatgataaatgagaatctaaaaatgacaaatcatcatttttctcatgcagttcaggaaggaaaccacaaaagcggcatagacgttccccttgcgagccatatactatgcatgcgaaagattttattattttttaaagatttcataaaaccccatatttattgtcaaatttgtgcaaaaccgctgatattttgtcttgtgtctcataaccatatattttatggtctaaatgtttcataaaacaccatctttatttaaatttcagttgaattcaatatatctaaaacaatatattttaaaatggtaaatagttaaaccgacaacctcaatcaagcaatcaacaactaaatgtttcatatacacgttatatattttatgtttaaaatttttagtaaatacttgacaacaactccctccgaaaaaaaaggagataaactctaactatctgatacagcagctagagtttactttttttttctttaagaacggatggagtatatatatatatatataagggtggggggttttcaaaactttaaagtgttaggtgccgctggttataatacctgtggttttatatgcaacttgcatcataattcataatgagtggggtttatcgaaatttcgctctattttgaacgaaccgagcaaataattcgtgattcgagcaaatataaatagacagaaac

SEQ ID NO: 37684 - DNA, 1281 bp, Oryza sativa
tgttcaaaattttcaaatataccatgtttgttcatcgctacaattttttccaaacttgcttacagccacagttatcaggtaatgctattaaggcaaggatttgatgaaattaacaataagatagatgtgggcatcaaaagaagggcctccaaatggatgttggcaccttctttaatcaactgtgtatcaaacccgtctggattcatagacttgagtatgactacgtcatcatgatgcctgccgagtaggattgaggacatcagaccacattatgggtactcaacaggccaatactaacataaccagtcatctgttcagccttatcatctgcagatattggaattggtgcccctgcatcaggaagttacagttagatgcatgcccaaacatgatctaacagctgtaacaatggctgaagaaaactgaatggataactacattatattcatccttcgatgcaaacagaaactatttcattggtctccagtcactaattcagtaacagttgcagtggacatggttgacataataaaatcttgatagtgttaagcaagacaaaaaggacaccacattattcagtactcatgagccactaagttttaggctagattaagaatgatgtagtaacatgtatagcacatccaagcgactttacatttcctacaaggggggatttactgaaagatagtgttgctaagctaacaaagaatatatatctttttccattagattttcttatggagtggctcactgatgttcagattccaaagccctaaaaaattagataaaacctagcactaattccagattctacgcatgaagtatctaaagtggatagaccgaaatagcaaaatgccacatcatttggaattattccattgtgaaaatgatagatccacaatcccacaaggctgaaaaaagcctttgcaatcacacgttctaaaagaagtagaagattcaagtacatgaaagatagcatacaagtagaactaataattcagtgcaaaaggttgtctagcagaaaattacacatgtaaattaacaaaaaaaaaactcccttttactcataattgtctaactttggcaggcccttactaatataactgtggtggcctcaggttccgttgtgccaactttaggtggcaatccaaacatgcccttactctatcaaatcaaataaatgagcatgtacaccaagtatgtataccaagcacgaagggagatattatctttgagatcacaggcaagagaacgctccctttgagattgaagccttttatt

SEQ ID NO: 37685 - DNA, 1307 bp, Oryza sativa
agcattctgaagaaggatatgggccaggggagccggccacagttggaccgaacccccagctggcccaatccagcccaacttcggcatgatagttgtacttctcatcctatgacggttgtggccgttaataccggtggaaaccgtcatcaaaagagacacttggcaagagaaggatgaatatgctatttggattctatggagaatattccttagcatctccactctctcaagtcacctccacactataaatatccctctcctctccctcattcacacacactccaagcttgagctgaattataagaggctctattgtactactttgtatactagaattagaaagagagtagagtagaagaacttggaggaattccggagttctcggtaatcctctcctatttcttttattctgttaattactctattttcaatagaaatatcttcctgagtaatttagatttacttgcaagaattatctattggttagttcctaatcagcatacgagattattgttcactataatcaactaaattataataattgctttagtgagttataaacactagagtagatattaattgcttacatatggtgtttaggtaatttatatctagtaattgttgtgtatcccacaatgcgtaggtggtaacagccctcaagagcacttaagtccttcctgttcgggtacgtagtagagcgacatttgggaacaacgggttgccagtgcctgaagtattgcgctaggattaaaattaagctttccttggacactgtttctcactagaaaatcgtctctattattggctaactttagctttgtgtccttagatgaacatgataagaaagtaatacacattccttgtggaaatcgataactaaaaatactcccgggtgaagtgccacatcggtatcttccatgcgcttgcgaattttatttgaaacgttaagaaataccaacagttttcaccttcaaaaaccgcatgaccaactatgaagattctgctgaagggttttatatctttacagaaactactttcaccatatgataaaggatcactctacgcatgtccaagaggtaaaactgtggtgtttttttgtgcacaaacagatggaacacatgttgggcacaattctcttggggctcatagttcaattgatgatggagctacccaaatagtcagttctgggtagcatattttgatgaaggaatgaagctgataaacaatggttcaattgagtaattgccaccacgctcggattttgcgtactaccttttgtcaacttaactctgtagaaagaatgattg

SEQ ID NO: 37686 - DNA, 689 bp, Oryza sativa
ttcattaacatatatatgtatgtgggcaatgctagaaagtcttacattgtgaaatggagggagtagtatgtaagctgatcgttcttgtttactaactgctgaaatgcttctcttcagtgtgcaagccttgctcgcttgcctgttcagaatgccctctatgccgtacaagaatcgcagacaggataattaccttcacctaaagtgcatgttatcttaaaaggtaccaaaatctctccactggcatcttatttgctttttacttggtgcgctaacctctgaaatttctaaccaaataatgctgtgcgtatctgtcaggtaacttgaagcacccaatctcttcttgtaaaatcatcagtggtatatgattcttttttcccctagcaaagaaggtgcctttttatgttccttctgtgtttgtatcccaattctttttttttttggtttgctctatagctttcccagttcaacctgttctttgttgtacgagaagttacaagatataacttctctgcaaatatgtatagatatgcgactcgacagtataatacatttgcttttttttttctcctttggcttttgggaagtaaagcaaccaaagaacatgagatccaagagacagagactggtacactctgcctcttatccgttgccctttgcagcagtctactgccaaggcggcctgtacagca

SEQ ID NO: 37687 - DNA, 598 bp, Oryza sativa
gattcatcactccaacctctgcatccgtcctcacatagccttccgcctggatgtgtctcctccccttctcttctcttttaaggacgcttgtcatttggtttgggcccgtcctaatccaggttgatctcatcctgagatccttaacttaattacatctgcaaagacccctatccaaataagagcactgtcttagtccgcctgggctgctatcacacatgccgcagactgggtgtctaaaagaacaaagatttatttctcccagttctagaggctgcaagtcccacattaaggtggcagcatggtcagattctggagtgggcccttttccaggttgcaggctgctagctttacactgtattatcacagggtgaacagcaggatctccgatgagcagaatgaggctcagagagggtgggcgacttgcctatggtcacacagcaaacagctggaatttaagccctgctcaggagtagcccctgagctcaaactctctgtgactctgtgactccctggaagacccacccgttggagacccacttgtcttcactcagtgcattagatttagcttagctctttggtttttggttttttctctttt

SEQ ID NO: 37688 - DNA, 699 bp, Oryza sativa
atggtatacatcctcaaaattgggtcaagattgctaccctgaacttttgtgggaatgcagctttctggcttcagtctgttaggtctcaattggctggtgctacttggttcgaattgtgtgacagggtttgtggtaggtttgcccgagacaggaagcaggctctgatcaggcaatggatccatataacacaaacaagctctgtggctgactatgtggatagatttgattctattatgcatcaactgatggcatatggaggaagtaatgatcctgcttattttgtgacaaagttcgtggatggactcaaggaccacatcagggtagtagtgatggtgcagcgccctcaggatcttgattcagcctgtacagtggcactgttacaggaggaggcattggaaggagtacaatctgttagcaacaagaaaaatgagacaacaacttttctgaaaactaagccaagtcacaatctgacctcaccaactttccaagccaggagcattccttttacgaacattgaagataaaagaggagtagaattcagcaagggaagggatgataaggtttctgctctaaggtcttacaggagatcaaaaggcttatgttttgtgtgtggtgagaaatggggaagggaccacaaatgtgcaacaacggttcaacttcatgtggtggaggagttgatagatgctctgaagacagatc

SEQ ID NO: 37689 - DNA, 586 bp, Oryza sativa
agtatcacacgatacgtggtaaaaatcgtctgatacctgataagtatcacatgatacctcacgagtatcatacgatacgtggtagaaatcgtatgatactgtaacaccctaaaaaaaaaaggcaggcaagctagcagcagcagctgggccaggctcggtagcaggccggcccaagcggcagtagtagcaggtcgctacagtaccgtcgtggtactgtagcagccgattagtaccacctcgcctaactagcttgaggagcaccaagatataaggacgagagcctagaggctgttaactctgattctggaatttttgctttaaagcgaatttttgctttaaagcgaggatgaaaaacgtagtgagttgcagtattaggtgtggtccaactaaatgagccgttttcgggagcagactctcgcggttgcgcgtgcgggcatatagcgcatgtgggctccgtgtgaggcacatggcatatggcgccggcattggacggtacggtcgtgcgccaagagagggcggcgtgttcgacagttcgacggggtcgtcgaacccctgagggtgggtggaatgtaacaccctaaaaaaa

SEQ ID NO: 37690 - DNA, 535 bp, Oryza sativa
ggggggtaggcgaacgcggtggcggtgggagaagcaggcagggccggcggtggcaggtgagcgcggtgccggcgggcgaagtaggtaggggcgacaggcgagaacagcggcaacagcgggcgaagcaggcaagggcaatgggggagagcggcggcggccgcgcgtgctcaccgtggtcctccgtagtcgcgtcgttggccgcatcattgaggcggctgctcgtcgcggtggtcttgttcacgtggctcccgttgatgtgccatgtccaggactgcaggtacaccgacgccaccgcgttgaggcaaagcgtgccgtcgtatccgcgttgaggtctagtatccgccggagacgaggagaggaggccgggcggagttggggagatgaggccggtcggagagagggaaagaggtgacacctcgccgccgcgtcccccgcccctctgctttgtcggcgccaagagccgtcgctcgcccaccgcttgccatcgctgcagccgccgctccgcctgctctggccttgcgctaacaccgcccct

SEQ ID NO: 37691 - DNA, 779 bp, Oryza sativa
ccccctcgccgcccatttgcaggcggccccccgcacagtataaaatcgccctatcggagggcggcaagggggccacctgcaaatttcgttgacggccgtcgcccgagagcgaacggccggctgccatggcattttcgccgccctctaggagggcgattttttaaaaatcgccctcccagagggcggtaggcgactacttccgtcaattttcaaaatggaaaattatttttgtaaaacttttaataaaaaaaattataaataaaaaaaattcaaggaggagattttcgcgatttgggccggctaccaaaaactaggaaaaaaagtacacccaaggtccctcaacttgtcatcgagatacaaaatcgtcccctaatcgcaaaaccagataccaggcatcctcaagtaacaaaatcgttcgttttaagtccctcggtggttttgacccctgttttgtctgacgtagcggctgagccagcgtggaacccacgtgggccccacatgtcaggatgccatgtcatctatcccttcctcttgtctcagttttctcctcatctgggtaggcaggctagccggcaggttggggaggaagtcgacagggcgagccgggaaaggaggaggttcggcggcggtggccggcgatcttcgatgcggcagcggcgacgaccacgcaggagcaggctggtcggcggagcatgaaagcgacgggcggagcgacggcggcagctgcgcccaccgcaccgacctgccggagggccgggcaagtggtgggcgaagccggc

SEQ ID NO: 37692 - DNA, 4032 bp, Oryza sativa
  unsure (1)..(4032): unsure at all n locations
cgtatgcttttttttacaaacgatggaaatattttttttctcttaggactacgaaaaccttttttttctagcgcattttcttttgcgctttttcctgacattttttcctcactcgttctttttaaaccgtttttattttctcgcacattttttgtttttaatatacgatggaaacttctctttttaaatagttagattagattagattagagatagagaagagatatacacacactactaaaacaacgaatagaaattagactttttttgccgcgcttttttctgccctttttttctcgtgcgtttttctacgaacgctttttcgccactttcttatagagtcggacctttctttttggattttttttgttttcgctttataggaatcggattttttttccattgtgggaatcggatctacgtttctttttcttttttttgccagaaaacggatttttttttgttttttcccgttttaggtgggaatcgtatttttttaatctacgtttcttttttgttttttcgccaggtatcggatttttttttgtattttcccgttttaggtgggaatcggatcttttttttttgccagggaatcggattttttaggttgttttttcgctgtttttttttaattttgacgaacgacggaaacgtgttaaattttttaagtaaatagagaagagatatggtttagttaagatgaaatttactatgtgagttcatttggatatacatatatttttagaaaatcatgagctatagttaggagtctgattgtctcaagttagcatacgagtttttttaaacagatttcttatatgattccttctatattaccaaaagtgaacgatcttaaaaaccgcctcaaatacggatatgtatttcgaaaagcaatcgaatttaaaaactgactcatacacagataacgtaccaaaataccggcaaaaacatcttattatttttataataatagagatagagatgagtaaattcatggtaaaatttttatagtaaggcagtgtttagttccctgcaaacttccaaaaattccgtcacattaaatgtttggacacatgcatggaacattaaatatggacgaaaaaacaattgcacagtttacatgtaaattgcgagataaatattttgagcctaattacgctatgatttaataatgtgatgttacagtaaacatttgctaatgatggattaattaggcttaataaatttatatcacagtttataggtgaaatctgtaatttgttttattattagcatatgtttaatacttcaaatgtgcgtccgtatacttttaaaaaaaattgacacacatctaaacacggccctagatactagtatggctaggcccaaaaatctttccgtcactgcctggaatccacgcacaggatagcatacaggcgcctccaacttagcataacgaagtcaaaacgaggggtgggttgtcaaggttgggtgaaaacttaggctgtgtttagatctaaactttggatccaaagttttaactttttccatcacatcaacctgtcatacacacaaattttcagtcacatagtaccaatttcaacccaaacttccaactttaaaagaaactaaacacagccttaatagagagatggttgtgtgggggaaatagctgcaactagttgtactgatcaggccaagcccaatactatagacgtgcttatatttactataaacaaaatttaaacactattgagtactgtagttggtgaatcttgcagcaaacaatatatgaaccgtacggggggtgtgagagtgactgtgactgtgtgtgaacaggacgaggaatcgggctgaatggcctccccattactgaccggttggtgccaccggtggcgacgtactgcccacttttactacccccatttccaccggcgcagaggaccgtcgtcatctcgcctccacaccacattgatctccgtgcaggcggccgcagcgtccctccgtccgtccccgtgtacatgtggccggtgacgacgagtcatcccaatttatgggcgcgcaggtggtggcatttgcatagtctccgtctataataaggtgtgtttagttcacgttaaaattagaagttttattgaacttgaaacaatgtgacggaaaagttgaaagtttatgtgtgtaggaaagttttgatgtgatgaaaaagttggaagtttgaagaaaaattttagaactaaactcggccatagttgtcagtttgattttttttcttataatgtttgaccattcattttatttaaaaaattagtgcaaatataaaaaatataattcgtacttaaagtaattttgataataaagcaaatcataaataaaataaataataatttaaatattttataaataagacaaatgatcaaacattacaaataaaaactcaaagcgacaagtaatatgagagggaggtagtatatctgagggggtttagacctaggagtgtaaaattttagcgtatcatatcggatattatataggtgtcggatgggttgttcggacactaataaaaaaaactaattacagaatgtccgtaaaccgtgagatgaatttattaagcctaattaattcattattaacaaatgtttactgtatcaccatattgtcaaacatagagcaattagttttaaaagattcgtctagcaaattagtcgcaatctatgcaattagttatttttaaatatatatttaatacttcatgcaggtgtttaaacgtttgatgtgatatggtgtaaagttttacgatgggatctaaatagagcctgagtaaaaatttccatagcatttgcagtttcgcatagtcgaatctgggcagtaaaaaattactaaaaaattccacacacacgcaccacggctgctcgcggtcgcggggggaggcacggatctcgcggtgaaaagtcgtctccgggaaggacgactagtcgctggcagatgctgctgctgctgctgctgctggtgcgtcgtgcgcgcgcgcgtctcgggctcggaaaccccgcgtcgtttccgcgttaacaccgcgcgccgattgcccgaatcatttcgcaatcgattggccctgacctgacaacgatccgacgccgtaataatctcctcattctgttcacagaaacttgaacaatgctactcctatcctcctactactgcatcgtgagtgtactactgcaccgcacaggggggtaaaattaaagacgcagattaattgtaattagcctgaagaataaggaataatgcatgagtcatttcctttcttttcctgagtagaaacgtgcatgttgctcggagtngtcaatgtcaactcatctccgagagaaatggaaaaccagaaaccaagcggccggcgagactgtatctctccgaccgaacttgcaatcatgcattgcacgttatagatgcatactcctactacttcttagatagggataagtgacagagtcacagagagagaaaattttgaacccatacaaacttcactatagctatcatttgctatagaaatttcatcatcagatcattcaaaaatattaaaatttaacggagttttcaccggctggcctacgtgtctgtccgggctaaccggttagtggctctactcctaattggatgtgaacatttctactgtaacaaatctggataatcttttattcaaattcattgtattttttaggatgaagggagtagatgtaagatctctatgcttagcagctatgactacgagtaataaaaacaagggaaattttgctacaggacacttgttatgtgtgatttagccctaggacactgcctaaacttacttttggggaaaacactccataaacgtggttatttgccagtgggcaccgctccgattaaaataatactttccggttggggaggagagagaaatagcgtgaaatgtcaaaaatgctcttgggcccacatgtcagctctatctcctatctctcctcatctctctcttttctctctcagagagcgctcgcacggggtggcgtcggtcacggc

SEQ ID NO: 37693 - DNA, 676 bp, Oryza sativa
tatacacctcaagtttacacatataaagtttagagaccaaaagtttatatatccgattcaaatttgaattcaaatatttttttatatatagtatttctatacatataaagtttatagacctaaagtttatatatccgattcaaatttaaatttgaattcaaatttttttcatatatagtatttctatacatctaaagtttatatacccgattcaaatttgaatttgaattatatccgattcaaatttaaatttgaaatattttctatatatagtatttttatacatctaaagtttatacacctaaagtttatagacccaaaatttataggtcaaaagtttacatacccgattcaaatttgaatttgaattcaaattttttatacataattttttctaactttttgtttttttaaaaaaaatttgtggtgtcctgtaatagaaaaagaaggggaggaggaaggggagaagggagcgccggggggggggggggggggggcctcccaaattgttcagcgaattaaggcccatcctgccagattgagtgaggtttattaattaatctactaataataattatttttctttttttttttcaaaccacaataaaatactaacacctacggatttttttagcgattaaaattaatgaaaaagctttatttcctctcaacctgg

SEQ ID NO: 37694 - DNA, 2313 bp, Oryza sativa
taatcggcgcggtgtccactgtcaaattactacatttatggagtgtttttctttaaaagtgagtttgtgcagtgtcctaaagttaaaaccacacataacgaatgtcctgtagcaaaatttccctaaaaacaaactttcacgtagtgtagtgcccggttcggaaggaacacgtacacgcacagtgccgtgctttcagtgctttgcctacgtgaagctgcgagagagtgatggtcgatcgtggggccccacgggccacaagggaaaattgtccgtgcttgggtggtgctctcttcaaggatggggaagagaatcgaggtgagaaaattagggcacagccagcgctgaattgaattgaattcgagcttttatggctgctgcttcttgaatcggtgctgcaggtcatcaatgctgcttgctgactcctcttttttctcgcacacgaacatgtcgtacagctacgaccgtgtattcatattgaaattgaaagtttggttaaaattagaacgatatgacgaaaaagttataagtttatactatgtatgtgtagaaaagttttgatgtgatagaaaagttggaagtttgaataattattttgcaactaaacacagccgtactcgatactctctcacaactactcctacgagtatagacaatactttttttaataaaaaaggagtatacaggagtagtagtagaactctgaagggattgagtacaagtagagtagtggtacgatcagtatgggtatgcagcagcagctagcacacaccaggcaagaacgactgaacaactatacgtatttgctacatattccgcaggcgtgcgtacgtacagtcaaagaaacagttgccaaacgtcttcaggtttgttctattagtctggccggtctgcttaattaattgcttataagcttatcctccctccgtaattataaaggaagtcgtttagaacaatgtttaagttaaaccttaggaatataaattatgaataactcttaagttattgagtttgaaaatgcaaaaattatatgtatagatttatcttgaaaaatactttcataaaagtatacatatatcacttttcaatcaatatttttatagaaacaataaatcaaagttgtgttttggagactgtgtcgctgttctaaacgacttactttacgaatatggcgggagtagataattaagttaattagcacgctgtaattcatgcatccaattaacgtggtttatttttctcgttctatgtccgtagatgctgcatgcaccactatggcgaagcaacaatttgtcaatgttttagcaccaatgcaacatctcgctcctatcagggctcaatattctgggtcgtaataatttctgaaatttgcttacttcagccgacataatattgtgcaaattttaaagtaagcaaattttatttgattttaataaaaaaatgctcaatttttgttattcgggattcattttctgttggtcccccctataagtaatgtgcaaagcaatatataggtccccgggctcctatatataacaaccaaaatatctggataagaatgtgcccagatatataactagaatttactaatatattttaaaagatggtgatagtaataaacagcattgcaatgtgtgtgtgtgtgtgaccatgtaaatactgcagcactaggtagaaacataaccaatatattagcaaagatcattgttgttgcaaaatctgaatcattttaaaacatggtctcaggcggaggcgaggcatctcggtagctggcttgctttttaattttagctcagttggaccgaaggtcctgagccttgtttttcttacttgtaaagtttattctttctttattcaatgaaattggcagtttgccgatcgattcgttcaaaaagaaaatttgaatcatgtgtagcttcaagtagaaatataattacatgtgttgcagttaattttgatcataattatttttcaaacatactccttccgtcccaaaatataacaacttttagctatgaatctgaacacacagttgttcagattcatagctaaaaatgcttatattttggaacggaggtagtaggtttttggtacataaaaataatataggtaattaagtttatcctaacaaaagctttgatcacaacattatatttattcaaaagaattaaatagtcaaagtcctgtcccattgattttaaatggtacaaaattacttccttttgtgactagagggagtagtagtacaactcaatacaacaatctgatcaacaatggcgcattatcgatccgcggagtaagtacaacttaaaaaaa

SEQ ID NO: 37695 - DNA, 610 bp, Oryza sativa
aaaataagttatattttccaccatactattaatatagccgtaatcattgtggaacatctttatagtcatttaaaaggtatcaccatagggtgaatttatagtcttgtgatcctgattttgttgtaaccaattcatagcttatgtttcattatataagcatttattattatagaaaaaaaactacagccaattatgcaagcatgtattgtaacctcttggttaaaaatttcaaacccaattttattgatagaaaaccataatcctttacaagcgagattttttccttagtcgatattaatacaacaaattacattgtgcacattgcacccatgatgtgccatcatcaatccttctggtcgaccatcgtattgccctactctaatagcataaatgacatgcggtacttgtatctctatggagatttttacacacccacactgcaggggcctaatgttctcctgtgccattatttcacctgtctagttaaagatgtgatgctactgaaattaatgcttaaaacacgcaatccacatattgtcgtcccaattctcgaaataggcagtgttgatccttctgcatgtagaaacattattcaagtggcgaaccaagg

SEQ ID NO: 37696 - DNA, 867 bp, Oryza sativa
gtgattagctgagggttgtgaagcatcaagcaaccccatcaaacaattgttggacaagccagcaagatactgctagaagcaatgcaatgggctgcaacatgtttgatgtcttttggtcaggataaggtgacagagcaaagcaggcactcaccaggtgtgccttggcccagacttctgaggtgacttgtagaaagagggtgttcagctgtggccagccacaccacactctctctggccctggtctcactctcaagtctcaactgcatgttttgtggcaagcaatcacttgagtgaaagctttcatcactgattgggcttgccttagaagtggggtagtacttttatgtggctagttgggcatttcacattcgtgtggactccgagagtaataagcttatttttgtaatgcataattacagtccctccgttactttctataagacatagtgtaaatatattatactacctccgttttttaaatagatgacgccattgactttttctcatatgtttaaccattcatcttatttaaaaaatttacataattataatttattttcttatgagttgttttatcactcatagtactttaagtgtgatttatatattatacatttgcataaaattttttaataagacgaatggtcaaacatgtgagaaaaagtcaacggcgtcatctattaaaaaacggaggaagtatgtcttaggatatccaaaatttatcttcacaatatgtatatagtaaattggaactcacatttagaataatggttaggtggaatagagaatgagagagaagagagttttaatatttttaagtgcttgttaccatgtagtataactattgctggatgggctgcaggaatt

SEQ ID NO: 37697 - DNA, 767 bp, Oryza sativa
aataggtccaccatattaggtgaaatttgctaaaggaatatattactattatattttttggtgctgttttacaaactgaatgtgttttagctactattagtttattaaatgtaaatagaataacaacttattatgaagttctgtactatgataaaatctatatcattatatttttgcatgtaaaagtaaaaaaatataacccaaaaatgaatatttcttttaaagttgaaatatgatgaatatgggtcttaatttaaatgtaaatttaatcacaaataatttggttacatataaattagcgtatgacttagatgttatagttatttaattttttccatcaaaagttatgcttcctaactaaggccctgtttgtttcagcttaagattattgtaatctaaattattaaattagattactctaagctgacataaaataagctacgagttgtttgtttttctagattattagaggcatctaagggtagtgggtctttagccactcaataatctggaaaaagctcctctagaggagattattggattatagtaatctggcttatagattgtaataatctagcataataatctacttgtttatttcagcttactcataataatgcagattataataatcctaagctgaatcaaacagggcctaactaatatggcatggagagggaataggaagaggagaatgaggggtggtgtgtacgtacgtgcatcatccacgtacagtccgtttggggtggggccgtggggttgagagg

SEQ ID NO: 37698 - DNA, 1743 bp, Oryza sativa
gaaaaatagttgaaaataaacttaaaaagttaatacttaggaattatgataatttagctttgtaattattgattatttttatattaatttgttagttaaaagacatgggagaaaggaattgaatgggagaggaaaggaggggtgagctagaggcgatatggcacatgtgaaagagcgtttatgctcctagtgggttttggtttatttatgacaaatgattaagggactaatgcacttattgagtgtataagcaagtgattagtccaatgaaaaagctaggaaatggacttatagatggatgagaattaaagagaagatattgaaaatgcgggtatgaagtgactacctatggcaagacggtgaagcgcaagcgacgctcagctgcgatggaccatgtggtggtgaagggaaagcaaggggcttggcaccgacgaaccgaaaccggtggtgaagggcgagtgaaaattgtgtcgtgatgaaccttgcgaggccatttgaagccatggattatacgcatcaatcatttgagaaatggaagatgaaatgtcaaagatcaagaagatgagatcttcccgatgatcaaatgaccttgacgttggtaaccctccaagtgaagaaataatatggtgtgaaggtactcctattggtataactttgccttttaaatttgagtttaggatactgtactattaagagggataccacatgcatataattggttgaatactagtgctcaaaatgcttcatctttgtgtgagttgaaaaacctaagctaaaatttcaatcctgagttgtttcacttgtcacaacacttacactgggtttctttgcaagtttttcatattctcttgaaggttttggaccatattttatgttgggtttgatagcccacgaaactagctttccatagagtccaagatcttcaaaatcggagttcggagtaaaaagttattgcatttttacttgagcaacatcagactatccgatttgaaatcagactatccgatgtatcggactattcgatttttcacagaactttactctctgtctttgtttgaacaatcctttcgagtgagtttttctaagtgtcggagtatccgatgtttgaggatgaagtttttgcttctaaaatatcatatactccgatttaacataaaatagttcgatgtctcggaaagtccgaaatttcatgtaacttcgttctctgtttctcgttgccttggaggtttaaaatatcggactatccaatcttgtatcggactatccgacgtgggctgaaagattcccctccaacggtcacattttgggggatctatataaacccccaccaacccttttctagggttgcccaaactgatttcattccaatcttgctttgggtagagctttgtgctaagtgctttgaatttttgagctctctccctctctatctcaaatcccccttgttctttgtgactttgatctttgtgtgtggatttggagtttgggagcctagtgtgtgtttcttttgatcttgagcactaggatttgtccaagagttgtgtggtgtttattactcttggaggttaaggactcctagacggctaggtgtcgttcttgggccaccgatctacgtgtggttggccaagagaagtttgtgaaggccggatctcgcctccgcaaggaaagagatacccttagtggaaggaggagtgcatttgtgcaacctcacgagaatagggttgaaaaagggctgcaggaatt

SEQ ID NO: 37699 - DNA, 3777 bp, Oryza sativa
caaccccctcctccgaacacagcctaactcctatagaccttaaaatattactccctttgatcatcatattttcaaaaaacaaaaatccatatttagctgtcatattaggtggggttgtgacagaaatgtttcgtacgctacgttgcatgcatgccttgcagctccattggcagaaatttgatcaaacatttaatgcaatcacaactaaggcactgttctattctttaactttaaaatttaactttctcgtttttcgttagcacactttttaaactgataaatggtgtattattttaaaaatatttctatatagaagttgttttaaaaaataaataaatacatttttcaaagttataatatttaatgcttaattaatcaagtgctaatgatgttgcttgttttgtgtgccataaaaatttgtcttgagttggggagatcgaacggggcttaattgggcagtccattagccatgcaaggatatgaaatgttgatagtgctaattgatgtttatcttggtatcgttgtacaagccaaatatgacgataaaaaatgaacggatgggtattgttttagacattaagagtttatatatttttattactttattgtaagtattattaaatttcttatggcaatgcgtggatattcactattttacattgatataagaggtcatgttcgtttcaatgtttgggtcattaagctgtttgcctaccagagaaaacactaaatattaagtggagtattaactattaaaaagcttgaattttccttttagtttttaagaaacttcttcatagactttttttctaaaattatattagcggcttaaagatcatgctcgtaatgagtggggaaaagatggaattggtgacagatggaggtggaaaagaacaccgcgtggcagttatgggccataactgttctaagattggcgctagcctttttatggaaactagaaaaaagctcgcgcaaatgcgcgggcatcttatttattgttttgtttatagaaataatgctattagaattaagtcatatctcatcaaatagatttaaaaaattatagattttatctcataataacaaaaatctatattgtgaaatagatcataaactttaatataaatgataagaatgtctcttagatttaaaaaatcacttttatccgggttacatgtaaacttgcctattatcaccattatttattatcatttttcttaaaaggtatatatctttttaataaatggaacttaatttgtaccaccaaataaacttaatacgccattaatacataagacatttatttccactacatacctaaatatttatctcaacacttatttctaaacctattaataaatattctaaaactaccgcttttattaacctattggttaataggataacgtcattaagaaataggcatgaatgcccctctaatgggtggaaccatcaaagctttatttatccgctgccttcaagcatgagtcgacatagtcgtgcctctcacagttagtgtggagcataattttaattaatcatagttagttatcggcacccttaaaagaagattgcattgataagtaggaaagttgagcactcttatcaatggtggcctcctctgggcttgcttcaactcaaccatatgtgtgccccctgctatacttgtggtagcatagcaagttctgttattcatgctcggtgcccttcatggaaacaaagagaatatgatgtgatgaaaatagttcttcatttattcccataaaaaatagtttctttatgttttgtatgagacacctttactaattctaaatgtatttattttctcaaaattatttataataattaatttgttgaagtgcagttatagttacatcagtgggctgtttggcgtacatttatcaattatcacttatgctgaacatattataatttctcaagtgtaagaaaatatatcatgagtagttttatggacatgttataagattgttcatttgttaccaaacctatttggcaaaaaaaatgtaaatgaccatattttttgtgatggattaaggagttgtattgtagcatgatcattgcctgtgcatacctatcaaataattctgaaaaatccaaaaaaattaagaatcttaatctcacaaaaattaaaataaagtcagatataattgacaaaacataacgttgtttcattttcatgcatgtagatttcagttagtgttatataattatcaaatgatatttgaccataaaatataatgtgatattatttcaaacattatcatagaattaactattatatgtcacacaaattatttgaaaagtgttttgaattaaattattatatgtcggctccatgtgtggtaatgtatttagcactataatataactatgataagtcatcaacatttgaatacaccttattataagttgactatataattgaaaataatttttaaaaatgggtgtttaaatgcatttagtttgtttttatattaatatagtttaacctgcatatttatctttagagtaataaattttattttatagtatagaaaatcctattctgaagaacatctatatttttttttgaaggttgtaccaacttatatatgtattttttttgggatttatagctttattatcgtatgtacatatgtttctttgtgaatatccggtacacagtttctctcgtatatgcaggggattaagaggaagcgggctaatctaatgatttaaaataatgggtccattatttcaaatgaaagttgacagcaaaattataaagtgccatgtggcggtctaagagtgcttgtagaaacaccacatgatcatatttgtggagtaataaattttgtttttatagtatagaaaatcctagtttaaaaagaccgtctatttttttttctaccgacgtatatatattttttaagggtcttatagcttttcttttcacccctacataagtacgtaccttttttcaagtgaacaatatctaaagtttttttttgtttgatggttttttttatcgtacttacgtactcttatatatgtatttttttgggctttatagatttattatcatatgcacgtatatttctttctttgttttgtttcaatcgaacatcggtaaacaatttctctcgtatacccatgaaactaagactaataatctataaaataggtccatcattttaaataaaaattgacatctaaattataaagtgccatgtggcggtaagagtacatgtaggaacgccacgtgatcatatttgtggaataaattttatttttattgtacagaaaatcatattttaaaaagatcactgtctatttttttctacctatgtacataaatatgtgataataaatgaaaatattattaataggaaaacatcaataaacatattaaaaaaatattcaaaggctcttttctttttttggggtctatatatatatttatatttttttgttattttttcaagtgaacagtttcctttttctgttttatagttttttatcgtacgtaactactaagtacgttcgtttttttaaaggaacagcactaaacgtacctttagtttttttttccaaatacgtaccgacggtaattttttttcccggtataaaaggcatgcatctaagcaaatagatctaatttaatggtctaaaataataggtccaccaatttaaataaaaattaacggtgaaattataaaatgctacgtggcgatctataggagcgccacatggcggcttaggaggggctgcaggaat

SEQ ID NO: 37700 - DNA, 2121 bp, Oryza sativa
atatggagagagaattgccagaaatctcttccgaaacaaagggatcacgacaagtcatattttgataggaggataaagattcccccttttaatttgttagggtgtgtttgagaagaaggggattgaggagattgggaagatacgcaaaacgaggtgagctattagctcatgattaattgagtattaactattttaaattttaaaaatagattaatatgattttttaaagcaactttcctatagaaattttttgcaaaaagcgcaccgtttagtagtttgagaaacgtgcgcgcggaaaacgaaacatacaaactcactctctcaccctctcgaacgctgccagtacacatagaatgctatatatgcttaaagcccatcttttaatttgttagtacacatagaatgctatatatatgcttaaagcccatttaaaacataggactgaaaaaaatacaataatataaaaaatgtaatattccgattctatccaaatgcaactaaaacacatgattacaaaatatatgaaaaaatacagggcgaatggtcgaccgaggttggacatgatactaactttcctttaaaatatgcttgtgttaagccattccaaagcaattttataggactgttcgaatctcaattcttcgcttcaaagaaccgagtagaagacttttctattggatacaaatttaacggatctggatattctaaggactcctttcattcgtagaaaaaagtggaggaaaaaacatagaaacacgaatcctatacaacttggtactgtgtatcctttgatttgtagtaattgaacaaaggaaaagcaaggaaaaaattcctatgactataatttcaagtgaattcaatagaaaaaaataacatccaccttgagctcatttttcttttctatgcatagggtcaaggcaaagactatgggaagatatggtttaccctagcaaaacgtaccattcaaattctgaactagtattaacttaatacttaacattcctatgtttttctgtgcaccaatcaaacttttctaaaaatgaattgcacaagatagtgcgaggtctcatattgatatagaaaaaaagaacaagacgtgccacgccgcacgccaacaactaattgcctactgtgagagagacaaaacatggcatcccactgtactcaaccagtactgaaaatacatctttagtatcggttggtaacatcaatccggagtaaacatcgagacaatactaaatatacatttttagtacagattagtcacaccaattgggactaaagatattattagtagtaaagatacctgcagggttagttaaaaagaaagtatctctagccaaatcaaatgtgtatagtaggtaggatggtaacacgcgtgagggctaaggtgagagatcttgaattcgaatcccataatccacacttttttttgacttgttatgcctttttagtacttatcacggttgctataacagatgctagaggtgatttccgactggtgttaaaaatcgtttgttcaacacgtcgtacttctcttttgctctctctcatagtttcttttcttaaaaggtgtcaaaaaataggtttcttttcttaaaaggcaggagaagtgtagtgtacctcatcagcgaaagatcacgtgttcacatatgtgtcttccttctttctttaaaaaaaataaaaagataactaaaatcgactagagggtatatataggagtacaccttccgtcttaatataagtgaaaccagttaatatttcttatatattccttcgtacatgctgctctgccccacaaaatgaagttaaatttagaatatgacttataatctactctctctgtccttatgtaagtacgtacatttctaccattccatccttattctaaaataagtgaatttttaaagtgttttattttccatcaaccacttgctccttattcaaatttcaactttttcttaaagaaccaattacaccctatcttacccccaccaacctacacctcccacaatctcttatttaattagaggtgtataaattatttatattctctggtaatttttgctccatgtgctagaaatgtacttatttagggagggaggtattactagagcaaac

SEQ ID NO: 37701 - DNA, 650 bp, Oryza sativa
ccttttttaaaacatcctaagtataaatttatttatagtttatttgattgagaaatatgtattgatcacacaaaataagataatcggctgagaagcatctttggtgtgctaacttgtacgcgtgtaaagagtgttttttagtagaaactaagaatgtaacccgcgcattcatgcgggcatctattataagatgcatttgagaaagtcataagagtggaagaatatcaactggattacagcagccatccttgaaaagtactattactccacaaattttcttcattggaattacttaactaattttttcagctatttgttagctttaaactatataatatttaatttatctttgtaagctattatccataatattcttcattatctaaaaagaaagaagatagacttagtttgtttagcatacatgtgtagcaaattaaaagtaagatgtttttttaattaaatgtttaggggttctctttttttttaacaaatcttggaaaacaattatttctaataaatgtatttgacttgtacgatcaagtctaccttctaattagtcaacattgacgcagtttgttacatacttatatatgaattattactaaagccagatatacatatccttatatatgtaacggttaactaccaat

SEQ ID NO: 37702 - DNA, 663 bp, Oryza sativa
aagcattctcgaataaacatgtgttacatttcaaatcggacttagttatatcaacaatggagtgagatttcatcaaatctgggcaaacttagacccatattataaaaggaatttacatttccggcctcttgtgtcaccccgtgcagacgacgggaggagtgccccaaacattagccgccgccactatcctccctccacctctgccttgccgctgccggaaatcgcgcaacaagcgaggacgacactggtggggcttcagttttgcctccccagctctggttcggagaacaggcgatgcaaggtgacaacgaagatagtgaggtggcgacggtgacagtgacgagcagcatggtggcttcctcgcgttgagctcaacggacagatacggaggaactcggacggccacccaactagctagccggggagctggctccacgactagttaaggtggggggaggcgatacgatgggtttggggagaaggacggtggttggttgcaatttgaggggcgagatgaaagtgatgataagtgggatgtgttaactgtataaatggcaatatgaatcttggagcaattctgaccataaaaatgtgactgatttttgagatacaatcaatttactgatgaatagtaggcaccttccaaatcctgccactgccgcg

SEQ ID NO: 37703 - DNA, 516 bp, Oryza sativa
tgctatgaaaattaatcaatgcaggcctttgcctttaccagttgtagagcacgtcaacaaaaaagaataacgagaaggtgtacagtcagggtttccaaggctgcaataattcaccctccatgtaatgcgatgaaaagctgatgtatcattaatataaagcgggggtgtccttatgaccccaacaggcaattccacactgtgtcctcttctggttggggagagagaggccaccaaagagaagcacagctggaagagatccatcagggaagagatagggtgtggcaccaagcagggaggggccagggccccatcacagcagctgtgatagagaggtgaccagagtggaccatgaagccagacagcctggcttcatgttccatctcctccacttactagtgacatgactcagttgtcccacctgtaaaatgggaccaaaaatggtaggataagggttggaaatgaaaatagctgttgggagaattaaagaaggtcagtaagacacatatcaagtgccca

SEQ ID NO: 37704 - DNA, 594 bp, Oryza sativa
ggctgatatacacctccatgaagttcaaaattgacagttcccaggatatccatgggagtgtcgaacgtgctgatggcgaagagcctcgaccaattcagaatggccctgtgcctacaaattccacccagacagtatgaattacatggtcatgctgaccgtgctctggaaatataaaaccaaaatggctcatctcttatttattgtaggtattaacccaatatctggtgcagaaattaatctgggatgttcccattcagcaactagccatgcttcaccggaagccgtgttggattaaatagttctatgcataatttagtaactgatcacgtcttatgttttatcactgcaatggatattctttaacaaaaatgtaatggtcacttctactttccaaaggcaatatatatactcttgtttccccccccccaaaaaatatatctactcttgtattattatttctctgcaaataaaaaaaactactgatttgcttccagcctaccaaatgaatgataccttgaaattttaactgtaggattgatcaatacccaaatttttcttactatatatatgtacctgggggcatccaaactggtc

SEQ ID NO: 37705 - DNA, 518 bp, Oryza sativa
tatgtatgtatgtatatatatatacgtatatatatatatatacgtatatatacgtatatatatatatacgtatatatatatacgtatatatatatatatatatatgtttaatgtttaggataagattcgctcataatttgtttataaaatgtaatagatttatgatattatgatgctactttgcgaggcagatccatctaaatcattttatttgtcattaaactaaacatttgatacactatttattgcaagaatttcaaaagtttaaccgattcttaccttaaacatcaaatactattttttaaccggagggtggacataccaatgttcaagaatggatattatagtatcaatgcttaatgtttaaaatttaattatgtagccgtggactgtcttgtcttcaccgttaactataataaatttgagttcacaaatgaaaacaggaaagtatagtgactagtgagtgggcatgtcaagaaaagggagggcatgcacatcaacgttgcaggatttaatga

SEQ ID NO: 37706 - DNA, 1082 bp, Oryza sativa
tgtatgtatgtatatgtatgtatgtatgtatgtatgtatgtatgtatgtatgtatatacatatatgtatggtatatacgtatatatacgtatgtatacgtatatatacgtagatatacgtatatacgtagatatacgtatatatacgtacgtatacgtatatatatacgtacgtatacgtatatatatatctatatatatatgtatgtatgtatatatatatacgtataggaaggtaggtatggaggaatggaggaaggtatatatatatacgtatatatatatatatacgtatatatacgtatatatatatatacgtatatatatatacgtatatatatatatatatatatgtttaatgtttaggataagattcgctcataatttgtttataaaatgtaatagatttatgatattatgatgctactttgcgaggcagatccatctaaatcattttatttgtcattaaactaaacatttgatacactatttattgcaagaatttcaaaagtttaaccgattcttaccttaaacatcaaatactattttttaaccggagggtggacataccaatgttcaagaatggatattatagtatcaatgcttaatgtttaaaatttaattatgtagccgtggactgtcttgtcttcaccgttaactataataaatttgagttccacaaatgaaaacaggaaagtatagtgactagtgagtgggcatgtcaagaaaagggagggcatgcacatcaacgttgcaggatttaatgaacatgatgaaaaataacttttcttcaatatctagcaaaaatagcatgttgataccactattttccattggcttttattttttctaaacaaattggctgagagccctggaagcaattttacaatgaacaacaggtaatagaaatgatatagacattctatcttctttttttcacctaatcaactgtatctatttatacaactaactcaaattacttgtagtaaaactaacagagaccatcacaaatcagtgacacaaaccgtttttacaagtagagaccatcttaaagtgatccgtggttatctgcaaaagcataag

SEQ ID NO: 37707 - DNA, 518 bp, Oryza sativa
ataaaaacacatggacacaaagaggggaacaacaaacactgggtggagggagaggatcaaaaagctacctattaggaactatgcttactacctgggtgatgacataatctatacaccaatgccctgtgacatgcagtttacctaagtaacaaacctgaacttgcacccggaacctaaaataaaaaataaataaaaggggatgcataagggtgagagaagatgtgacgaccaaagcagaagtcgcagtaatatgggatcacaagctgaggaatgtgacacctctggaagctgaaaagacaatgcagacagattttccccaagatcttccagaagaaacacagtcctgctgtgacagcaggatttcagcccacggagacttgcaagactgtaagataataaattgatattatttaacctaccaagtatatggccatttgttatagcagcacctggaaattcatacacctggatttactttcattcatagaatttaccacttttttttttttttgggacag

SEQ ID NO: 37708 - DNA, 1397 bp, Oryza sativa
  unsure (1)..(1397): unsure at all n locations
atagatcataaattaagttaatggtaaataatataatttagtaaactttattttcaaacatattagagctatttttagttatttatgattataatgtgatatatgacactataacatatgttttcatgtttttttttgtctgtgagatataacgcaattggtcaaatcgatatgaactgatttaattctaaagaatataattgtggtcgaataaaaaaaattgtatatataatttaaaaattacaatagtttatttattatttatatactacatttatctcaaataatgtatggaaaaaaggagttaaggagagggaacaggggctccacattatctgcaattagtgagtgtggctagttagttacctatggtggaacttacccacctaggtttaacatctagacttgacatgggtcttatatttatggctaattattttttagtaggcaacgtttctatcaatagcgaggcgtttatgatgacttcactaatttgaagatatatgattggctcagtctctcgaatatgttttctatagataagtgtacgcgtgtgtatataaactcatgtgtttgtaatatgtttctcctaaaaaggcggcatgcattacctttccaaaatgattatctaaaaaatcaattaacaaatttctggtggcaaagcacgcagcatcaagacgtcttgactaagtgctcaaaaataaactgacagcacccaaatacccgatgttaattagtgaatatattgtccaagaggcaagagctttgatatatcgctttgttgtagaagctagtagcaacagatcagaatacgaacaacatcaccgaggagtagtataaaattgtaggtaaaaaagcgaaattatatgcttaaaaaaatagagaagtggaaggctatgttaagagatcaaacaataaaaagatggaagttgctgcttgcatcactcacctgtttgatacgattaggattgtttcaaccttggttgttgctgctcgttcctaaaaaaatgtagatggatgtcgttaatattggtcgaaaaagtaagctagaggcgcattgctttcttttcctatggctttgcatctgaaaatttatttgttgatttttttttcgggagagaaagaactgattctctgcatttgtttactcctaattaattattttggtgggaccaaagcatgaaaccgtcatatattatggaggagagatgagaatttaatgtagtgagatttagcatccgtgaaaatttcatcaggccctggtaatcaaacagaaacatgaaaaattcagaaactaactattgagggcaatattcatgaatctgaacctaactctgtaaatagtttagagcagttagtgatattcacttttttaacgcanaggtgatattcactta

SEQ ID NO: 37709 - DNA, 762 bp, Oryza sativa
  unsure (1)..(762): unsure at all n locations
cgcgagtgagatttaccactatcatataatcggtatcgtcaccaagtaaatgcaatgaattgatgtatatacaataatacatggtatctatcaattttactcactaattaagccacaactcacgcccgctgattcctatatattttatgactagtattatgccaggtccctctgattcctatccattttataagtagttaatttgctccaaatatatatatagtacagtagtatatacttgtgttttttttacctggggcacgtgtaatacaatctagagattatttggaacttgggattttttatagtaattagtttaagactcataaagtttatgtaaatatcaaacattaaaaagtatccactactgaaaaaacgatttttttttacgagagccccctatgggttgcaaacgtaccgtaactggcgacatctgcaaaaatcaaccttcattatcgcatacgactccttaagagacctcatgttcagtcttgcggggggtgcgcacgactctaccgcgcgcgtcgttcgctgcccccctctccacgcgcgccacctgttcagtcttgcggggaggtgctgacgactagttgtgatttagccattccaggttgcatcggcatccatagccgaaggttgaagacggcggtgggctatacgaactgggtctgtagctctactaggctgggctggatcgaagagagacagtttgaacagagggaggcatggtgngctnctacanggaagtcaatcaagccagtg

SEQ ID NO: 37710 - DNA, 770 bp, Oryza sativa
  unsure (1)..(770): unsure at all n locations
agcgcattgaatgactatccgctggnacacnancncatcagacgccatccgttgactcctgcatccagcttcgccaccacagcttgagtctccgcttgcttgttgttcaacgacaccagcgactcctggatctcggccaaaacttttccgaagtcgttgttctgcttctccatggcctccacatgcagctgcaacctagaggtgtagcgtggtttctccaggatgagtgctctaataccaaattgtcacgaactcacttctctccgattcgatttactcaagtagcgaagaagtcagcggatagaagtttcgtgaggaagaagaagagcagagctagaggaagaagaaggagaaggaagcagaggagagtttgaaatattggggaatagtttgtacaatttctttcatgtcccttttctctcgaccctgccgatcttatatagcaatgagctattagatctcactctctgacccgtggcccggcaaacatcaccgggtccactcactatgagggaatttacttgtgggcctcctcgcctgagtggatcgcctgatttggatgtcttgagcttctggatcgcacggtgatgacgacgccgtgacatcggccccttgtgctcgcgctggtatgcgtggctcctaccatgagcacttttcttggctgctgtttcactcgcgtgtgaatcgaggaaagaccggagcagagtaccaactacttttatgtaagtatttgaaatttttatgagctactcccttcgtcccacaggata

SEQ ID NO: 37711 - DNA, 1643 bp, Oryza sativa
  unsure (1)..(1643): unsure at all n locations
tttaaaaagtgggaagaaagtaacaaataacggtaaattgacgggcaaaatagaaattagacatacctaacattgttttttttttctttggcttgctttacagttacctggaaaacctgaaaaaacctagctgatcaatcaattttcaacggccgcgattgctttaagatttatgtgtggattataatccttttccctccttcctcttctccccatttccacctcagcctgcccgccaagatcttcacccatacgccgctgtgtactataccggcgacgcccgtacaagcgtgtcgtcatcgagccatctcgacgagatttcccagccccgccactcattcgcatctccagcagctctcactcctaacatcacctcctaattatttcggtgagattccactatacatattgtcgtcgcactgcccatgtcctccccacggatgagacaccgccgccgcccgcaaccactgcccatcacctagccgccactgccccgactatttctctctgccccaaaatccctcctatacctacattgtcctcccccaaccccctcctaccttggctcccacgcaatacctaattcggcgtgccaccaccgtcgctgaagaagaacccatgtcctaggaggacaagaggagcacgaatcatagcgcaaaaatcgacggggggaaaatttaatcttttttctcctaatgaatagcaaaggtgtttttctctccttcatcctctttctttcttcccatattgagacctgcgaaggtgattctagcgtgtaaacactcacacgatggctgtgtccggtactggaggatgggaacctatcccctccacacggaaaacggagtggtccattagctcgtgattaattaagtattagctaatttttttcgaaaatggatcaatatgattttttaagcaacttttatatataattttttttgcaaaaaatataccgtttagcagtttgaaaaacgtgtgcgtgaaaaacgagatggaggacttgggaaccggggattccgaacacacccatacgtgcttcctaaccctgcttggtgttagctagaaaacacaccataagtgcttctaaccctgcttggtgttagttagaaatattacggctctattcgtttctgattaagatataaattttaccttgattttcgttagcacgcttttcaaattgctaaacgggtaaaaactttctatatagattttgctttgaattatcatataaattcatgttttagtttgaaataattaaaacctaattaatcatgcactaatggctttctcattttatgtgctcgtacttaatcttcatcactccatgagaggtatatctattatagtattaaaatagtcttgaaagaaagtatcacgtttgctatgctggctagaaattctcacattagtcggagaaaaagaaaaaatgtttaagtaggaatacatttaaaaattattgaaatttggaatgagaaataaggaatattaaaataagagtccatataagagttcaagcagaaatacatttaaaaattacaataataaataaagaaataagtgctcatatagaacacaactagagaatgatgaactacttgcagtaggnggcgagtcaaagtagannttcaatgccgccg

SEQ ID NO: 37712 - DNA, 786 bp, Oryza sativa
  unsure (1)..(786): unsure at all n locations
agtgggatttgattcccnccctgagaaacgcctcttacaggatgnctcatctacccttctgttgtgttctaaagacgctagtcatttgggttgggcccatcctaatccaggttgctctcatcctgagatccttaacttaattacatttgcatagacccctatacaaataagagcactgttttagtccgcctgggctgctatcacacatgccgcagactgggtgtctaaaagaacaaagatgtattgtctcccacctctagaggctgcaagtcccacattaaggtggcaggatggtcagattcatggagtgggcccttttccaggctgcaggctggtagctttacactgaattatcacagggcgaacagcaagatctccgatgagcataatgaggctcatagagggtgggcgacttgcctatggtcacacagcgatacagctggaatttaagccctgctcaggagtagcccctgagctcaaactctctgagactctgtgactccctggaagacccacccgttggagacccacttgtctccactcagtgcattagatttagcatgactctttcgtgagtggnccttgctacattaccccacatctgctggtgaagataattaagctgttgttacccaccctctttattcagtgagtgatcaacgacagagcggctgatgtaagagcacagccacactcaatcttgatgagggctaggccaacagccccattttccatgacttctgaagtagctttctttgctctgggtccctacgaaaccgaatttat

SEQ ID NO: 37713 - DNA, 1270 bp, Oryza sativa
gcgttcgcgaaaaaatttcgctataatcatagcccataatggcccacttacgttcggcctattattgtcacttccaggaagttgatttgggctggtttaggattaggccatgatccatgttgaggctgagctttcccactgggcccttgtttattgaacacttcaaaatgttcatttattatctctacttacaataattagatattttaagaatttttcatgttaatcagagaaaaaaatcaataaatttgggttccaccttgcttggaccttaacacaacatattttagttccatctccttttacattgattgacagcgtaattcatagctcttgagagcaaatgtgatgtggtgaaattctataattgcattaagaggtagaggtggataacgagtcagtttggctcgtttgagtttgttattttaatgagttagtttggttcggtttgttaaggttaacgagctaaaaacctagcccatctgaactcgcgtgttggctcattaatgtatttttaccacctttataattttaaattgactattttaacatatgtaaatttaataataaacactacctaatgaagaattcattaaacataaatagtttaggtggaattaaaagactaatcactagctgagaaaagctctaattatgtgaagaagatacgatgatctctagtactaatgagctaaacgagtagctcatgagctagcttgttaagagctaaatacctagcttggcttactatgagttcagatctatcaagactatgagtttggttcgatccgagccgagttcgctacgagctgatccgagtcacgagcttagagctttttttttcacccgtattaaaagacaatgagtggattctttgatttagctcgtagttttccatagctgagactaacaacatattccaagtggtttacatggcgatgagagttaatcattgcacaatgctgcaggggctcttgtcagatcaagatgtttgatcttggacgctagatttattttttatctgctcctataacggaaaagatcagagaagagaagcatctttcaaccaaaacgccctgcatttcctccatatcaaacatatcgcggcggatgtccctgaatcgaaaataacgtgacgcgatcagtttccctgtcctcgcgcgcacgttcggcaatacgagctcgtagcagtcaatgcgaaagcaaaagacaagaaaaataatcgaacagcgcatgtgatgagcttctgaccagtgatctactgcgcgcg

SEQ ID NO: 37714 - DNA, 1374 bp, Oryza sativa
  unsure (1)..(1374): unsure at all n locations
aatcagatgacaggagtttcgttttgtcagtgcctccctttgggcagtgcgcacgtatgtgttgtctgttaacctttgatgcaacaaactctggggcgtacgtctgcaaaccgcagcaactagaggccgtgagatctggcagctactagcagttggatgtggtgtgagtgtgacgatcgacggccaactgacgaagagccttccttttatgggtttcgcttttgcataactgcatttgctgcctttgtcgttctagatagccaaggcacgtttgccatctggtcatacactcatacttaacttagtttgcccaactttgtagaaatcgggaaattcatgcttcaaaagataacacactgcagtaattaaacccgggctccatgaaacggccacaggatttcgcatgcaagtacgtcactcatttagtaaaactcgaaaaagaaaaaaaggtttctaaaaaatatacatttgaaagtttttcacttaaaaaatatacatttgaaagtttttcacttaaaaaacactacatttgtaactacaacataattatggtataactacatttgtaacaagcatgtaactagatataactatactgcaactagcatgtaattacacaaatctacagtcaacatgtgttggtgtggctggctagcttggctggcttgtgattggagctctcaggttaaaaccccagcaaacgcgtgtcaatattttttttctctcccctcactactagaaaaagcattttccctaacgttgggggtcttattttcacagtcggacgcgattttttggagccaaatgaccgcctacaaaaatataaattggggtgatgttcgctgttttcgcagacggaccacttaagcagatcattttcgcaggcgccgcttaagtggtgcgcctgcgaaaatagacttaatataaataaacaggcgggcctaaattttttctaagtccctcacctcttctcctctcccctcccctctccccggccgccggccggagacggcggcggctcccggcggtgcggcggcgtgtgctctcggcggcggcggcgggcggtgtcggaggaggcgaggcggcgcggccgaggagggcgacgaaggagggcggcgcggtgacgtgtgctcccggcgacggcggagggcggtagcggcgggcgagggcggcggaggacagcagcggcgaggaggcgcggcctaggagggcagcgcggccgaagtatgggcgacggcgtcggctcccctcccccctccctcacagatctggccagaggagggaggggggaggccggcggcgatggcaacggcgtggagtggtggcagcgatgagcctgatgnggtncggtnccagccgtagtctgtcatcccg

SEQ ID NO: 37715 - DNA, 1385 bp, Oryza sativa
  unsure (1)..(1385): unsure at all n locations
cggcgncatttgatgactgacctcgtctgcaacnagcncatcactcctatcaaatatactattactgttgagttccacattgttgtttttggttattttgtatgacatcctcttatttatctaagttaccatataaattaacagcgcattcaaactacatatggacactaccatgttttttttccctgattaaacgttgttttaagcattgaccacagtcctaccctgtccggttactactgtagtaacttactagtagacgtcacccgctcactgcaggatcctttcccctaataaagtaatgccaaccgaatcaggggcatgtcacaaattggagtccctaataaatcctcaagaaaagaagggagcgaacttgtactagtctccaaacatcagtcaagctcatcatgtagtaagtagtagtaatagtagtacaacctacataattgactatattttgttgaatgtccatacacgtgtagtagtattactattatgttgttgattgcttgattactagttgcttacaacttcctccactgatccaatccaatcacccaaaaaaaaaacagaaaaaagaaagaccagagagcatgcagagcagaggacacggccgctcaacccgcggaacaagccaaggcctagctcggtgttccgtttccaaggatgagaaatatctctgtgtgaatggttccaactgcatgccacacccacaaaccacaacacacaaatgcaagcggccgagcgccgcaaacgcaaggcccaaccgcgacgcccgccgcggtcgaacgataccacgacgtgtgcgctccagctcgatcgcgaccagatcaccagaccagccagccaacggaaaggcttgtgtaccggtacaccttgcttacgcatgagttcacaaaaccatacgattattacgtcatacgattattacgtggttatcatagttataacgtgtggtaattatcccaatttttaaaaccataacaatttcgatggtaaccgtatagttttcacggtaaccattttaccatggataatagtaaccacatccaaaatggcttggtgaaatccttctacgacacgtgagagtaataagagtttaatgtgttaagtcagtgtcaaccacggcaggcagaaacaataagtacgaaacgcacacctggccttggctttgcagcataattggcactggcaattaaaatcggcggaaccgcgccgcgtcacatacgtgtcaccctgatctcgtgtcactttcgccaggtttaattcgtccagttttcggttctctctcgcatccctgctctggtaaccaaaaaaaaaaaatctgttcaggtcgggttcttttnctaattcgttgttgttnctaccagtagtcaacaaactct

SEQ ID NO: 37716 - DNA, 770 bp, Oryza sativa
  unsure (1)..(770): unsure at all n locations
aggacgatgacgatggctgnaccnatcacacgcaggcagtatccaaggtcgctgtcgcggggatctaggacgacgagacgcgatctgctgctgctgctagcgaaggcttgtcgatcaagaggccgcggctaagcttagctagagctagagacggttgggagttgttgggcttggagaagtgtggggagcgcgggagccaggatttatagggagggagcgaggcgggcgggcgcgtgcatggccgcgcgtcggaggaggaggagatgatggtggtggtggtggtggtggaaacnagtgaacggatgtggaggccctatcagaggcttgttatgtggctggtcttcgccatttcgcgccgaagggcgcccatatttataatgggagagtccggccgaaccgaccttacgtgtgcccatgtgagaaagacatcttttttgatcgattgctgggcacccttcggacaaataggacctatcgagccgctttttttcctccacgacatgcaagggagcgtgcctcgtacgtacacgcccgagacgagtcgacgacgtacgtacgacgagttcctactaactttccacttctacttagagaaatgacagcggcagtgcacggagtattagggctttggaacactcagagtttcaattctacttctatgcgggggttgggatcattcaaagggtgcactcaattgctcggcttttaagctagcctggcagagatcgaaaaaaaacgggcacccgcgcgtccatcttgtaccaagagtt

SEQ ID NO: 37717 - DNA, 833 bp, Oryza sativa
cccccccccgaaagcgatacgtatgctgaccgatccatgcgcttgatgcgaccatgcgtcgcgttacatcagggaaaacgtgagcggaacagcaaccgcgacggcgccaccaccgcgcagcagcagcacgtacgccggcgacacgcgcgcgcgcgcgtgcccgtttctctcgatctcgccacggctagctaaagagcgagacagtgagtgcaacctttgatcgatcctacccccaaatagaagtagaattgagacactgagtggtgcaaagccctactactacgtgcactgccgctgtcatttctctaagtagaagtggaaagttagtagaactcgtcgtacgtacgtcgacgactcgtctcgcgcgtgtacgtacgtgcacgctccactgcacgtcgtggaggagaaaagcggggctcgatcgtgtgcgatgtgtgtgtggcgtggccggccagcgatcgagcgagcgcgctcggtgaggcgcgcgcgcgggggggtgggtcggtcggtcgccgccattagaaaaatgggcgcccttcggcgcgaaatggcgaagagcagccacataacaagcctctgatgaggcctccactaccgttcactcgtctccaccaccaccaccaccaccattatctcctcctcctccgacgcgcggccatgcacgcgcccgcccgcctcgctccctccctataaatcctgactcccgcgctccccacacttctcctagcccaacaacttccaaccgtgtctagctctagctaagcttagccgccgcctcttgatcgacaagccttcgctagcatcagcggcagatcgcgtctcgtcgtcctaga

SEQ ID NO: 37718 - DNA, 543 bp, Oryza sativa
agtcaacggcgtcaaacattttgaaacggagggagtattatgattccgcgtaacacgggcgagagagagcagtacataacagattaacagcagattaacatggtcatcgtttggattattccaaacggtatatttgtaaatgaaaaatagtttatgaataaaactctagtatacgtgtttttagtgatttaaaattatgggctgaaaaataaactacgatgaaaaaaccctaaatcaactccaattttaaaattgaaaattcaaattttagctttataaacttaagtaattttaaaattgaaaattcaaattttagctttataaacttaagtgaaaagatgaggttgtaagctaatcatacgatatattccaatcgtttcaaatcggaataactatacgtacgaccctgcatgtccgacctacgtacacgacgcatataaacatggttttggctaaccccatgtgaatgataatagcttttgtgattggttgttggttcagcacggtcgtatgtgagttggatgattgagtcgatcggatgta

SEQ ID NO: 37719 - DNA, 2128 bp, Oryza sativa
catccatgatcctcaccctcgccaagttatgggctatcaaaccggaaaaaaacgaaattaataagaaaacatcacattaattacagcgataagaatgttgaagatctctcccaatttttgcgcgtttgatcgagtcttatacggcactatactatacggtgcatgatttctttgatagttgctctcacacgcggcagaacgcgcattattaagagatgctccgcacgcaatcctagtttcatttgtggagacttttattagcttgatttcgacgaaacaattttgcacaataaggcataaataatttttaaaaaatatcttttgaagacagcaactctatgacaatgtccatgtgcattatcttttcccgtcgtccaataaaacgtgtccaaattgcgtgatagtaaatgacgtagcattatattaagtatatagttgtgttaactcctcctagaaaaaaacaccaaacaattttgctatacgtttatcgatatttttttaaaatataaaaaaataattataatgtaattacattgtaaacttacatgtaactaaaatataaatataatttgtacataattaacgttcatgtaattttggatagctagatttactccacatgaaaaaaaatacacggtgcacatggatgagggcattcgatccaacgacctcttgagaaacgtttttgaaattaatttatagataagttatattgtagaaacatgcaaactacaatataattatactcaattatactatattatttacatttgataaattttcgagaggaaactacttgtcaatagatatataggtagtcccataaccctgtatacatatgtgcacacataatatgactatatatcacgtgccttcagaaatatgacttatttaaaaccttatttagaattatgtaaaattgttgaaaaaaatttcttgattagtggatttaaaatttataatgattaaatatcaattcaagtttggattgctatttttgtagtttaataataacaaaaataaaactatgaaaattgtcttaataatatgggatattagtacttccttggttcatatccttagtgaaaaattggtaagacaaaacatggggaattgacattttttttaattcaaagcatttaatttgtttttttctcaatgtcaagtcacaatgttgatatggttgctcgggctttgtgtttgattttgggccaactagagcaacaaacacaattgattgcaaaaaattggcatcttagtgcatggattgggcaaagtcaatactttaacaaaccaaatgaagccaaattgcactactaaaaaaaaaattctaggcggacattcactctatctgtacttcaaggcctgcgaaaatacgtccattttcacaggtggccttcagttcgcctacaaaaatcattttcacaggcgtcctctccatcttcgcaggtgctagatccactcgccgccacccccccttgggccagatttagggttaggtttttgggagggagagggagagggagaggtaggggagtcgcaccgtgccgtcccatccggccacgccgccgccgtcgccactcccctcaccagatctaggagggagagggaggggagccgcactgccactgtcgcccctccccttggccggatttgggagggagagggagtgggagagggaggggagtagaggggagccacaccgccaccgccctctctggctgtgccacggccgctgaccctcccctccgcctgatctgggagggagagggaggggagccgcaccaccaccaccgccctccccccttcggccacgccatcgccgccgcccctcccctccgccggatctgagagggaaggaaggagaggggaggggccgtccgcgccgcctcctccgccgctagcaccggctgtggctagccctccgccgttgtctggtagagggagagggagagaggagggagaggaaaaagtgagggagagggagagaagtgaaggagaagagtggagcgagggtgaggcacgactgtggaacttaatacaatttaatagtgttatcatatcttgcaggcggaccacttaaggtctcgtatgcaaaaatcatattattttttcatgcgaaaaataa

SEQ ID NO: 37720 - DNA, 697 bp, Oryza sativa
atagctcgatctggtttttgttctgtttctattactggtatttaattcagcattttttgtcgacattttagtggctttcagagctactcttcttgtaaaaccaaaaaacaaaaaagcaaaataattaaagtgggaaaagcacacaggtgtccaaaagttttaacttgacaaagtaaaagaaaaggacagaaggaaccttagcttagctatcaggtgtggttaataaaaattaattctactgtgcccaatcattcgcctttggtttgttaatttggaggtgagatctcaatgtgggtcccagctacatgctatacactcatctcgtatcaggtcaggacaaaccaacggacaaccgtccatggcgaatttgattttctccttggacattttcacacgcggtgacttaaatttatcctcgcgaaattcaaattaaactgtttgccattaaaaaagttttccctgaattttgtacggttgtagtttattccaggggataagaacaacatgaccaacaagtgtgtagcacatcgtttgtctgacagcttgtctttcttctcctcgttgtttcagaagagttttgtgagttggatagcagcaactagcagcttgtcacctctcactcacaattaatagataatttcagggtgttatgctccctccgtcccctaatataaggatttaaacattttacttgtac

SEQ ID NO: 37721 - DNA, 1623 bp, Oryza sativa
attttgtatatccctcgtagatatagaggccggactaatgaaaatcaattatctaaaaaaaatatggttgtaatcatttcttaatatttagcataataatcaacattattttgcaaagaaaaggtaaaacctagaccattgcattattattgttactaaaataaaagaaatatagtgcagaaaaaatcatgatgaggattagacatatattcaggaactagagtggactcgaatccttatatacaaatttttatatactaccgcattattatttgtttatatttaaataagaaataagaatggttccagggcggcgccgtacgtagcctaaagagagaaaagggagaaattggtggagagcgcgtgggaagcggcgggcggcggcggggctgcacggatcccacccaatggcgacgcgccctctgctccatcgatcccgacaacgcatccagaaggcgccggcgacacctcgccgccgatcgtccgccgcccctagtcgccgccatctctcgatcatccccctgtcccttcccttccacgcacggccggccattccatcgccgcctacctccagacccaatgcatcctctctctctctctctctctctctctctctctctgtctctgtgttaattttgtaatgtattagcaaccattcatggatggatggatgatgatgatcatggcctctgtcctctgtttttactcgtggctgcagactagtgctgtcttttctcttgtttgctgttctagaatctgtgtgctgttttctaaacaatttactgtttatatttgttttgttttgtttatttttgtagttgtaatataaggttagtcttcttagtaaatatattgaaaaaagaagaagtagataacacggtttgaatcttggtaattgtactgtgctcgacaaattaggacgtaatcctatcgtttcagattataaaatgatttgactttagtcaaagtcatgttgtttcaagtttgactaattttatagacaaatataataatatttataatactaaattagttaattaaatatattttcataataaatttgtcttgagttaaaaatattactactttttctataaaattagtcaaacttaaagcagtttgattttgactaaagtcaagacgtcttataacctgaaacggatgtagtactgtatatgggaactagcatgaagatcttgctactgaaagtaaaatatcgaatgaaattcgacgtgtatgagaattatacggtaatcataattaattagaagtggctgcatgtgagaatgtttggttctaaagcagacagacgaattaaaaaaaaacaccacggcaacggaggacgctactgttcctgtgaaattcctatgtttaattacctaatctgttttatgtaatgtgataattaaaaattactctggtgcttatttcacattgtgattttactttactataacataacttaatttgtatgaatatgtgtgttattaattgggtggcagtgccactagccagccagggggtggtgatgagcatactagctagatttgtgttgtgtagctaagctggtggccttgtgtgctccacatcactccaaaccctctgtcccaatcaccacatttt

SEQ ID NO: 37722 - DNA, 1404 bp, Oryza sativa
atagctagacatgtatttgtatagatgtgtgtgtgtatgtatatttatattcctacagtggaataggccatggatgtgtaagctagtgcagctacaagtctgcaactttgtaggacacatctggctttgtactgttgtgcaagcaagcatgctctcaacaagttaacaaaccagatgggccagacaatgcatgcatgatccacacggatacaatgcaagatgtagaagaagagaagaacaagcaagaaatagtacatggttatatgttcagggaagctcgaaattctgagaagcagctaagatgagtagctagctggattttgtatgaatgaatgaatctgaaaaagtaaaactaaactggattttgtatttcctgatttctagtttatttttttagattttacaactataaattcttggaattttgttaaagaattaattaggattctgtttgagggagtcgaagatttcgagagaagccatggctccgagaagctcctcgaaacagggctacactatgtgctagcttctttttttttctttttttctttttttttcttttttttatgccgggaacactatgtgctagctgtgtgtttacgaatcatgtacataatacatgtggggcaagagcctgaaagatgcagggtttgggcttttcctgcaagcacaaggccacaagggagccccttttgttctgaaagagtgaaagaaattggagatctctgcagggatccctttttactttttgcatttcagcctggacacatctatgatctactgactactaccccctcatttgcatgcatgcatgcatgaatgaatgatgcaaaaccagagaagatgccatgcatatgtgcattaggagttaggacacagggccaggcctcctcaactaacattcagattttcagaggctgcaacttgcaagcaaatctagtacaaagtactactagtgccaatgccaaatcagatgccatctctatctccatcacacacacaaaagctgagtagttagagaggcagtcagtacagacatggaggcagaggaaatttatgtgatggttgcagaggaagccaatccaggggactggaaatctgaagtttggtgaaggaagcaaagagaatgatgagtgagctagtagtagcaaagctaggtcactgagcccagtgagtgagtgagcgactgactggatgagtgaatgagcatgtgcagaagcaaattgaatgcatgaacacaagagagattttaatttctcggcatcattctcttcctcccattgagatcatttcatttcatctctctccctccatagctggcatgcagcacggcagccaagtcactgaacacagggcaatattaagccattgcaggggatgatcagttgttgcatgcaatattca

SEQ ID NO: 37723 - DNA, 1500 bp, Oryza sativa
tttttcatctcctcatctccattttttttatcatcttttttcagacaacgatttgttgttatcttcttgcagagtaggcatgccaactaggctcgccagcgagtcgcgccactgtgatatatggcctgtatttttccgggcttcattatctaacactatccgtaaaccggaatccgcgtgtagtatttgtctaggctctagaaaattcctggatccgccacgcggagagtcgcgtggctggatttatatgcatgtagttgtagttcaggtgccatggtgaaagctagaggtatggaagggagctaggttggaacacttgtaaggaggaggtgcaaccatgtgtaaggcaagatggatatgggtgaaaaaccggatatatgatgatttctttgcaggttaatcttcgctttctgatctttactgaacctcatctggaaccaaccaatccgggcctgaatatatatataaaccttttaaaaaaatccacaatatggcactcgtacaaacgtgcaattaattactccctggaaaagatcatagtctcctaccattagtagcaagtagtagtagctatcccgtttttcgcatgaaggtgtttgtgccggattgggaatttggattgctgcttggtttcatggtgtgacaccacatggaggataacgatggccggccggccgcctcgagcacacgcaactcaaccctgcctcaaagctcaaaaccagtagaagggtaggataggatgctggagatggagtgagctctactccgccaacgacagccaggcgcgacgacatggcactggctgtcgtggcggaacctagaaagattttagagcccggacaaatctaactacaagatgatataacgttagttatggtggcaaaaccgagtaaacttttagagtccggacaaatctaactacaaacgacataacgctagttgttgtggcaaaaccgagtgaacttttagagcccggataaatctaactacaaacgatcgaaacgatatgacgctggttgtcgtgacagaaccgagtaaacttttagagcccagataaatctaactgcattaagtatttgatatctattggttggctttagtataacggagccaaaaataacttttagagcccgaacgaatctaactactggctggttatgtgcatctcgcgatgcagaggctgggatttgacctctcccaagcatcgtccagcggtatttgacatctcactaaaaaccacgatgcaaatacaacggcagacagactgctagctggaatgaaacagggagagatggtttcacgttgaattattctccttttcaagctgtaaaaggatggtggttcagaaacagtaaaagaagttgctgccactttgatgccatcgtcgttgtctactgttctttgtgtgtgtgtgtgtgtgactgaccatgacagtcagcaatacatacacattgccggtgtgtaaatacggccgtaaatttcacaattaagacgggagga

SEQ ID NO: 37724 - DNA, 1373 bp, Oryza sativa
ggggggcaccggcagctgcagctagctaggctaagcaacagtgctactgcagggggacagtggtgttgatgtgtaatgctacagctactgtatgttggttttggctccagatcaatctatcagattcagatatacaaactgtacattccaaacaagatggggatcggatatgatcatccatagatgaacagtcaggtggttagcgatggaaggaacagtgccggatgctgctagctgcagctgctgctgatagctggctggtcgagaggcatcatcaactccattgcactggggaaagctgcatcatgcatgtaatgcagatgcagatgccgttctgaacatctgaatgttgcagggctggggctgggcttgctatgctagctagtagcaaagcaatgcaatccaatgacaatgcccgatacagtattgggttatctaccctccttggaatggatgcagagacatgcagtgaatcattattgtgttcgcctctcatgcaggagtactccctgcatactcataagggtacccacaatggttatctataggctctatataagagatccatgtcagcatattttcctacttggaagagattaaatgaagagagagagcaaagctatctactaacctggagatagtctatagagaaaaacgaggcaatgtattagagagctatagatacccatgtagacatactattgagatgatttactattaatctagtctattgctgagatgtacatgttttatagataacaccttactttaccattgcgggtgctctaaagcatactcataaataaagccgtttaggacaatgtttaagtcaaaccttggaatataaatcatgaataaagttgttgagtttgaaaatataaaaattatatgaatagatttgtcttgaaaaatactttcataaaagtatacatatatcacttttcaataaatatttttatagaaaaaagaagtcaaagttatgttttggagactcgtgtcgctgtcctaaacgacttcttttacgagtatgtagggagtactgcacaatactactactccatccatcccaaattataagacactctttttaaggaaaatcaaacttgataatttttgacaacttttaactagtaagcatactaatcatatataggctaagtattatgaatgttatatcactatattcatattttaaaatattttcatgtgatactaatttcatattcgtggagagcataaaataaaataaattaataatcaaaatatataattgaagacgtataaaaaagattcttataatttgggatgtacttttcaacgagcagtgcttatcagtggcagaaagaaaacagtgtatgcatacaaatggaact

SEQ ID NO: 37725 - DNA, 695 bp, Oryza sativa
cgggcttcctttggaatgcccgtcaggtggatcgactttgctgtctatagagacaaactcttactcctcttactatcacctccaactagaacatcaaacgaaggtccatcatatcctgggccaaggagagatttatccatactcctctttcctagcacaggttttaccccatcatcgatattttccttatgtccctcaccaagttcctcatctctaagctggtttataagagagatatcttcatggatcgttgataggggtggaacatgttcgtccacctcctcacggccattcccagcaccttcatcaagctgttcgtactgattgattgaatctttgctagacacccaagtctcccctgcagtctcactccttatttgtccctccttagcttgctgtgaagctgcgtggaaggtaggctgatcttcttgagttttccccatatgctcccactgttcagctagcttcctgacctcaccatcctccctggattttcctgggttcctagcatttaaacccttcaactcttcctgcaccgtagggatctctgcctctatctcatcccggttagcaaaattttcctttactggagcattttcctctggcgagttcttcttcctatcttccttgcctgatgggccatctttattttggcttcccgcaggagctggcttggactggttctcacctgggaa

SEQ ID NO: 37726 - DNA, 615 bp, Oryza sativa
ctacaataaaatatgtatattgtttattgaatacaaacggctcagataacattatttggaaatgtagaacacatatacacaatcaaatagagggaaaaactatttaaccgatggaaataataaaccatattttaacctaaagaattgtgtagtctacagataattcgtatccgattgatacccctagtttggttggacatctgactaactaaattatttgacatctgaaatagaatggatgcaaatatggtggcttgaccacaactgttgtttctttgttgtgctacccaattcataagccactcatctagatttgacagatgcaaatatggtttaatgttttccattggatatgttgtattatgctcttttctattttaactagaaaatgcaatgaagatatatgtggcatgtctaacaaaacagagtgaaaaacatttttgccactccacagagtgtactttcagtgcttaccaaatactccataggatgcacatttcatgttctggcattttggatcatttcatgttaaaacaatgatgatatctagattcaacctcagatatgagaatattcaaatttgtaatcgatgtaaaaacatggacacgcatgtga

SEQ ID NO: 37727 - DNA, 713 bp, Oryza sativa
ctgaagagagatcaagatggtcttttctgctgcgagcagcaagatcagttatagggttaattaaggaagtgcgtttgatgcactgtaatagagagtgtaatagggtcgcacatgaacttgctcagattgctatccgttcggggcaaagcgcggtttggcgtaataatgcaccgaattgtgttatgcaatgtctgcagcatgactgtaatcctgttacgtaatcaataaagctctctattcccgcaaaaaaaaaagtagtaacaaataattggggttaatgatgagcagagcgatccatggttggatcgatcgagctacctaagctatcatctgcattacggcagctagcccgatcgatcgatctatctagttgggggcagatgatgacaagagatgctagccagctgcagactgctgctgctaatctcgtctcttctgatatcgatcacccacagaaaaggggagaaaaaactcagatcgggacagacagcccaaggaaaacaaaagacgaacacgcagagtactctggtgataatcagccacttgatcattaatttcttcgtgaccgttggcgtagccctgcctcaaatcaaatcgatatatatatattcttcgatctatctactctctctaagcttctcgaatctcgaaagacgatgatttgtactccctccatcccaatataaatgtaaagcagatataaccagcttata

SEQ ID NO: 37728 - DNA, 809 bp, Oryza sativa
  unsure (1)..(809): unsure at all n locations
catggattttgtgtgacagccntttgcanannncnnnnnnnnnntnggnnaaaananncccctcttacacggnccancctttctatatcaattngtcacctgccttttttatttcacgatccaacaatgggaaacgcgatgtcaggccacaagggtaagcagatcctaaatcaacgctatatatatatatatatcatccagtacgtacaaccacacatctctactccttaaaaaattcaaattggtgttggtgatagtgaagccaaagcagatataggatctaacatacaaagcagacatgcgatccaacatacaaaccatcgacacgtttggagcgacaaaaataaaagaagacgtacacgcgatccggaacaaaaaaaaaaatcgtaaaaaacagaaacgccccgcaacctgcgccccctccttcgcgcgccttcatagccgccccgcaccctcccatcgcctctcctccgcgctgcccctccaccagcaggcggggcggtccatcgacgccccgcgccctcccctcgcctattctacgagccgcccctccaccagcagccatattcacaccgcgccggcgcccctttccttttcacccgcgccgccgccgcccctagcctacccaccgtgcctttacccctagccggagaggcgccgccccttcaccttcaccagaagccgtgcccacaccgcgccggagacccttggcttcccaccgtgccttcacccctagccggagaggccgccgcccttcaccttcacagaagccgtcccacaccgtgccggtaccctcggttttcacccgg

SEQ ID NO: 37729 - DNA, 756 bp, Oryza sativa
ggtaaatgagcccctaaaaaaaaaaaaaagagacattttgccgggtctaaaggcaagaaagaagaaaaaccgccctctgaagagcaacattgaaagctggcaaggaccaacaactctccaggcccaccatgggcagcacgctgcaacctccggtgtgaacctagacaaccgtactgttaaaaacagcccccgctcaaggtccagaggtgcctataacagccgttggtcgaccccctcgcccttccgttccccttgaattcacacaccgcggcggcgccatatcaaaggtacaagagcaggctacgcggctagagaaacaacgcctggaccccatgcttcgctgcctggatcctctccttgccaccacggagtgaagtaaaggggagagagataagggagagaggaggaggaagaagggcaggagaaagaggatgacatgtgggccctacattttgtgggtcccacaattttttttgcgtgaatgacgaatgggtcccgcatatttttttaatcttattgccacattaatgccacgtcaatgccacgtaggacgaatactaggtcaacaccgccacgtgtgggccacgtcagctaaaacgccctccaaaaccgccaagggagtcaaattgcaccgtttttaatagttgaggtgtcaagatatctggcattatggttgagggatacgaatctgattattcggtcacttgttaagggagtcaaagcgaacttattccttttcctttcctttgttttata

SEQ ID NO: 37730 - DNA, 672 bp, Oryza sativa
aataatgaaatgtagggaatgaaggggattctaaaggagagagttattttaccatggtgaagcaggggcgaaatgtggccgatcacagtggcggtggagaaaaaataggactgcatgctcctggatgccaattaggtgttcaacagaatgtccagtacttgtcgcagaatggtggagccgagctagtgtaagggaaggttgggcaactgtggcgatggtcttttggaagcttggggtgtaggtggatgaaggaaaagagagatgaggcagctaggtggtggtggttaggaaggtgaccatggatgctcgcttgagtttgagctcggtttgggccgagacacggagagtttgggaatttggtatttgtaggctacgaaggcttgcttgagaagatgtggaatggggaggcaacgagacggtgggttccacttgtcggtgacggataggaagcttctggattggattgatggtgaagtggcgtggttgtggtggtgaaacaggagtgttgggtgtccgctttttggtgttcgatgcaatccattggcgccgaggagggggttggctactcgaccacaaaatcactgatcggccggatggacggtgttgcaagatggccattcttgggggtcgccctttaagccgcttattccgtgctgtaccaagggtaaagcg

SEQ ID NO: 37731 - DNA, 610 bp, Oryza sativa
acggttattattcaatttgtactagtatacgacgggtatacgtacatgtacagatgtacaggtataatgaaggatttttgttgtatctagcaacgtcgatgtcaccgtacatatgtacgcacatgtattattgtacgtatacgcacgaataggacccggaggtgcagagagatttttcttttcagataatagagagaattttgtttgtcacctttacgccatgtttgtttggagtcctcgttaattgctctggaatgtaaacaatatatggtacacggatattaattgcattctgttttgagttctcataaaagaacaaaggtcttctgtttttttttctctttgttaatctctttgccgttttgcaggcaaagttggttgttttcatccctttttccatcttcgtctaattcaggtagagcccttgcttattttcttagaaaacatggtaatatggtgcttcggattgtatcttcacatctttagaataaaagccagcgtttgtttcttgcgataattgaatccatgtcattacaactttacctaattaaaaaatatcaccactgttcatgatatcgattgggtgccatcaatattttttgaaatttga

SEQ ID NO: 37732 - DNA, 602 bp, Oryza sativa
agcacccgcatgggtcggcacttcatagccacggttttgccatcgcggcccaccctagcaccaagccaacgtcgtcgccgcctaacgcgccaatgtcgtcgcagccatcgtgcacgctataagagcaaggttaatagtatagccaactactagctctaattcatctatagctaatctaatagccaatttatacaatagttgtttactatactaatagtatatggtcccactgtcatacatacattgcatcttggagtccgtgctgcagctagctacagatctgtatcccgctgctcttctctctcatcttttatctcattaaaatatatttgtagctggctaatattctgctattgtacctgctctaattgtcgcctcccccgcttctgcttgcctcgccgccaacctcgcccgtcgcacctcttttctcctcaccttcacatacaatcgtgtgaagatttgtcttttagttaacattttgagggttctatcggtttgatttatcaaatttgaattttcaaacttaattttgatgttaaatttaaaatatttttaacatagttttttttatattggcttaagttgccagaaatatatataca

SEQ ID NO: 37733 - DNA, 651 bp, Oryza sativa
aactctttataaacacacgtaaataaattagctctataatctttgaaaataaaatttacaacatattatatgtttacctagtaaatcaataagatagtttccacttaaatcggtgtactcattactttgtactattattttcaaataatgcactattttaaaataaaatttacataattatattgtgtacctattaaataaactatttaagatctatattaactaatatatagatgcacttaaacagataaatccattatttaaatcattggatctatttttttaattactttggactattattctcaaataataaattgttttaaaataaaatctacaccattatattgtgtacccattaaattaacaatttaaaatatatattaactaatttacatttacactagaaccagtggacccattatttaaatcatcggatctattgttaataactaaagtgtctaaagttctctttttggcccgctgcataatgcacgtctacacctttgcctttcggacgtgtgacagaatgtcatgtctgaggcatctcaggtgatcacgaccattgtagtgctaccgattttgttaataacatgaaaagaaaattaaaggtgtgatgccgtgagagaagaattaagcaccgtgggaaca

SEQ ID NO: 37734 - DNA, 618 bp, Oryza sativa
tttgtgaaattgactatatttttttttcagtttctggactacatttggaaggaggctttctttgggagcaaataagtttattgatagaaataaattcaccctatacttcttacttttttccttaaatccttcccatacataaagtagatttagcatctatctctttcatgcgttacacacttttcatcaaattgtggagcgaaattatctttggaagtatttgtcctatatctcttttctctccataaatcttgcaaaacggttggatttatttttatctctctcgcacacagatagacttttcaataattctagtagtctaactttggaagttaagcatctttagcagcacttaacttcattagcacactaactgtttccataaattttgggcatgtgagatcttttcaaaagttgacttttaatgaagaagctgatcacttccccacttttcctgtctttcatgtcgtcctatataaaggcacaacttaagctgtcatctatcaccaattcatagcttccaacattttcatttcattcgtaatcaggttttccacagggagatggcaatgaaggtgtatgggctgccaatgtcgaccaatgtagcccgcgtactgg

SEQ ID NO: 37735 - DNA, 533 bp, Oryza sativa
gtacaactccaggacaccttgtgcaacacagcagcctggtcctcggggccctggaagatcaagctcaagacttttccaccccaaagtaatagtggtgctttattaataaaaacatagcagaaggtgcaatttatttagaagacactagccccaggctgttctgagttcataacatttacacacacacgctacagaaagtcagatcgctaacggaaatagtgaagctgactcacagcatcagtttaaatgtgatcacaataggatattatttttaaatgaaacaatttttttccagctttattaaagtaggattggccaataaacattgtatatatttatggcatccaacgtgatgttttgatatgtgtacacactatgaaatgattaccacactcaagctgattaacccatccaccacctcacacagtcaccttttttgtgtgtggtgagaacaccgagttctactctcggcaaatttcgagtacacaagtcgttcttaccagctgttgtcaccatgctgtacattagagccc

SEQ ID NO: 37736 - DNA, 700 bp, Oryza sativa
tcttgcacctgcacccgcagcgtatgcttcctatgtagttacacccctggtcatgttttacacccagaatacagacattttctccataattcctgtgtaattgttcctgcaaggctgagttgcagcaacaagcaatcatatgcaaattttcagtcaagattatgtcatatcagtgcatgattctgtaggcacaagtgcactgcacatattaacccagcatgctgtggcatccccttggctacctccacctccacagtgtgggagaggggtacctgaggcccaccagagaataacaccacaagggcccaccaaacatattgtaacaactcacctccctggtggcctagtggtgcggcagggacacccgccatgctgctcctttgtgtcccctcaggcgccggttccttaggatgcgcacgcagcgtgcctctgtgagatttaaaggcaaaattcaaggactatttaagggcatttctgtgtgtgaatccttgcccgttaaaggtaatcttattgcgagttcctggtgcttctgtgctatatagcttctgttattctgtgatctgatatcctgttgtgacccctgcctgtttttggacgattctgacttctctatcctgactcttgcctggtaaccgacttcgcttatcctttatcccttctgattgatctcctggtttaacccttgcctgtttgactccac

SEQ ID NO: 37737 - DNA, 533 bp, Oryza sativa
atagagcaccgtcgatctgtggctgccgggctcacgatcaattgggcaaaaagaattttcgtttcggtttaataaaatttggagtggactattaggctattattattattaaggaatagttgaatagatgtgtagtgtaacgtttcagaatcaaaatgaatgtaattcgactaatcttgctgaaggtcaaaaccgtgcaaacctatgcatacatattttggtacacacgtacagtcatgtggcgcaaaaatgtttatccaaagtttcaaactatctctcgtcaaatttagaagatgtatttcaagagcaatatcttaatgtgatattttcactatggtgttttaacacaaagaaagaatatatgaatagtaataaatcattttcacctttacaagaacatttagccttctcgttaagatgaacttcccgtctgttatgataaatataattcgtttcctgctgctgttcccatatagatacagggtttcgccggtaatcatttccttgatttcattcagagcagcgggcaaatt

SEQ ID NO: 37738 - DNA, 622 bp, Oryza sativa
ttcctaacatgttcttctgggatcccaagccattcagtattgctgcacaagtcacttggcatcaaaaacttctcaaagaggtactccatctccaagacctccttgtcaaccgactcttcggctccaacgatggcagctgacagtggcagagaggctgccatggaggacctgctaaacttctttgtggctttgtgacacgggatgaagggggaggattagtgcgaatttgatgtccatggtgttgtgatatataggagagttggacgaacgcgttcccactaggagctatagtagaaacaaagtacaacctggcattttgctggatttatttccacttatcaaaatatatttatttcgtgcttattttggtggtactagtattgacaacctgttttagattgttatctgtaaagtctattggtggatacagggaaatcgcgtaactttgacagcactactatgggaaaatgtaatgctatacaactgtatataatgtgacgtgaacaaattaatttatgaaacaaaacaaatatggggaagcccagtgatagaaatatagagaggccacaaggccatgtgagtcaagccaatcaagccaaacaactcacaagaacttgagtta

SEQ ID NO: 37739 - DNA, 621 bp, Oryza sativa
ggctgggccgaccgtaaaatcggagggtcgtggtggctattgggctgccacgtaagtacccttctgttacaagaggaaggaactagtccacattgcgtcctcctctttccgtcgagtttaatcggcaactctaaaccgcaatacgagaaatcttcaccccctaacttattaaaatcgttaaaatcagatcctccggcagtatagatggctgttttttttatgactagacgtttacgtggggaaaaaatgagccccacgtgtcatcctcactctactcctccccctttcttctccatctcttatccccttttctctccaactctcgagaggagcaagcagcgcgcaggtgcagcttggagagctgatggatagtgcagttgaggagcgacctaacatggggggtggtgtgcccgcctacgtgtggaccacgatgcccagtgaggggtggggatcgaaggtgagggcgaaaggcgggcggtggggaaggcagccggcgagctcacctaacctttgttaggggcgagtccttggcggggaggtgggacacgatgtcatgcaagtgcacatcggggaggcttgtgatgcgggttaaacttgcacgggtcgctttcaatgcatagg

SEQ ID NO: 37740 - DNA, 737 bp, Oryza sativa
accgcgctagccttgggagaggcatatccaacgacgggagtccagggatggcatcaacaaagtcggtggcggccattatggggatggttgcggcgatgatgacgaattgcaatggcggcgatttcgattggggattggggctatggtttctgtaactttttggattttttatatttttcgccaaaaaactttttgtagtcagggttgaaaatccgttccgtcatacggttatgatgcccgcaatagaaaatcttgacttttgcataaattgtcttaggtgggtgctccatctatctaggaaaggtggttttggtcggctgaaaaaggccggtctgtagtggggatttactgttagtttctatcagtatatttcagatacccctcaatattacaattaatactgggaaagcagaggcacttttcgcagcaaatatcaacatatacatgtgtcgacgtttgatgtcgcgattccggtatttgcatagtatgagaatcgttggtactagaatatatgcgagattgtaataaaagagatgtggacgaggatttttatacaggtttgggcccctgaattgtcaggtaataaccctactcctgttggccgaagccggtcgttactcttattcaccataatcacaccagcataatatttagggtaacctatctaactgttgtcgacttgacggtctgaagtgttgactcgtagtcgacaacagggtagccttcctcctcaaatc

SEQ ID NO: 37741 - DNA, 558 bp, Oryza sativa
tgtgatgtaacacatcgcattgtttgatgtactctgtctccaacaaacaataattttgaagtaatcctataatttggcaggaataacaactaggctttacttctaagttcttagtatttcacttctcctgtttgagaaattttggaacctgagctggtttcgtggtgcatacactccctccatcccaaaatataacaacttctagccttcaatatttgtcccaaatataacaacttctccacctacattctcttctcaaccagccacaatcttccaccattcaaattctctacctacctcctcttctcaaccaatcacagccttctcccatttagttccactttcataataaccgagtccaacgtactccttatattttgggacgtaggtagtaactaagtttccatgtagacagtaattcagtttcttttcaccatatttggtcatttgttgtcttgagtcttgacattgaatttcccctcagatgtatacgtagatgtgccagatataattgatatctcgcacatgcgcagcaaaggcatacagcctggtgaagag

SEQ ID NO: 37742 - DNA, 748 bp, Oryza sativa
aaaacaaatatgcaagtacaaaacaattgtacattagaaatgcggatattttgggaaggagggaccgagggagtagtactggtaattaaatcttcgggttgcttgggctgtcatcgttgcgacccagctgctagttgtcatctgaagcaacccttttttcccagcattccgtgcctgtccagcttcagctttccaaccgccatgggcctcacgctgttcgatcgacaaacataatgtagatggagacgtacatatatctgtttgacgaagactaattaacactagttgacccaggcttaagctaatcaaccacccaatcagttcaaaacacgcaagccacatacgtgtggtgtctgatccgagcacgtagtagctgctgctgctgctgctgctgcaactttagacatattaatgctgacaatgctgggtaactgaagcttttgttcgatgtttttggtttgtccaacgctattagcatgtgcttaattaatcgtgtagtcagccagtaggctacgtgtccatgtcgttggctcgatctgcctgcgtgtgtgtaccaacactaggacaaaccaacactaggacgattaattctaaggtgtgttttggtcctttttgagacagcttcctttatgaggtccatctgaaggctgccaactgtagtcagccattgtttttttttctttttttttttaaaaaaacttgtagtcagtcgtgattcgaatttaagacctctaggcttgatatgcat

SEQ ID NO: 37743 - DNA, 746 bp, Oryza sativa
tgtaatgaagaagttgtttgggggtggttaaactataaaagcgataaaattcaatggtccaaagtaaaaagattggtttactggtgattcaaagaaaaactataataataaaatatagcctaaatttcaataactatttttttatgaaggaagtagcagtatggtagcatggaaatgaaacgatggactaataaaccgagccatcatcatgtctagctactactggctactgatctcaaacggattcgtccacatcttgtctatgactttcaatgcaaatgatgctcagacagattatgatattatcctaacaacttttatccttcctaagcgatcgatcgacgattaatttcacatatcgtatttaggctaagatttgtcaattgaatcatgttccattttccggtgctttgtggtagcacaaaaggaaacaaaaggacattgctcatgggaccccatgctgaatgaaggagccacacaagggataagagtgatagatccagcttataccaacatgaaacactgtgtttggcttatgtggatgaatcagtggacactatctagtgtatggagaggatccacaaatggggtacttggcaattgagcatggtgtttgcccccctggttcaatggacttgattgcgattgatgatgattttaattaattgctaatatatactaattagacatgtttcttaatttccccttgaaaaagatgaacatgcatgacatctataatacaggtt

SEQ ID NO: 37744 - DNA, 1323 bp, Oryza sativa
cgctctctcaatctcacttctgtactccctccatctaaaaaaattaatctaaaaaatttaatccagtgtaaatctggacacatataactctattatagatgtgaatctggatacacacttagaattaggtgtttttttgaaacgaaaggagtacgcaagatatacgtatgtatatagagagaacaaaccaaatatatttgtatatacattagcagcagatcaagctgcctccaccactgtacgtatgtatatgtatacacactggtggagacagctcgaccattaccatttacgaactgccattaacatatgtaaaatttgatcgattcgttgcttctttctttattacaaactgtcatcaatatataaaaaaattgatcgatcatcgtgaaacgctattggtggtttgggcttaagaaaacagtatgctgcacacggcacggatgaatgatgctgggaataccttcctatacgtccggacacgaatgtctagctatagctagtagctgcatatatattcctctcgagaagtagaagatataaggatgtgtttggataatggaaaatagggggtgggattgggattggaaaatgaataaagggttaggattaaatggaagagggagaatgaatggttagtatttaaagatgggtgggaaatcatttccctttcccatttgccaaacactcactaagagcaagtataatagtgagctataagcctactataagcttagatggaggagagaggtagcgaaaaattaagaatgttggctctcatgcaagagctagcttatcactagctctaagacaaatgcattaaatatataagtgagagatagagagatgagaagaaaattatagtcaatcttatagctaatctattatatatgttggctttaagatgagctaataatagaaagtgtgctctattattatcttgctctaaagggaaaaaaaaaggaggaaagatggtagtaataaaaagctgggacgagtggatcgatccatgcatgtgttgttgcgtacctgcgatgcaggtagaagatgctcctactgccccccttttgaaggtgttagatcttcaatccatcaatcaatcccgtttcttctccatctctcatcgccacgcaccatcgatcgatcaccaaatggttagtactcagtacagtactcctcatacctttccttttccttttcttttttttttctttctttcttgttagtagtagttgctgctctagctaggttgttgttttgcagtcctcggaggcagcagcagcagaggccaggggacgcagaatctgctatagctagctgctg

SEQ ID NO: 37745 - DNA, 586 bp, Oryza sativa
tcctcactaagatccttgaccgcactaggccaccgccgcccctagggccgcagttaccgaagctgaggaggtcttctacccggactcgcaggccgctatcgcccctagggtcgctactgcctacgaaaccacctttaccggattcgccttcttcttgccgaggactattcgtcgacgcttaggacgccgccatcctccgccgcacccttcgctgtcgtgctccgcagcacctgccacccaaagagacatcgtcgccaacgtcttgctgctacctgccgcagcgccgccctcctgaccttctccgctgcaacgcgtggcccaccgccgcccatggccccgctgactacaaccatatgttattacatggggaaaattcagacatgctagtcatacgcacacagataccccgtatcttagaatgccacgagagatgtattttgtttcgaacgtaaagggggccatttgccggtacatttccatatttcacaatcaatggagctccggcgaaaagtcccgttgggcttttctcctatggggaatggaaagttgtaaacctaatatcttttacaagtcatatacagctcaa

SEQ ID NO: 37746 - DNA, 1058 bp, Oryza sativa
cggtcgattatcatttccatatggctcggccggtagaaagtcgaaaacgaacgcttgtcggccggtaattaccgttaccgttttcacccctacttctaacacttcactaagagttacaccttcttaattcattttgtaccttgtatgtgcacccaacatgatgcgttccccctagttgcctcctcgctttctcttctagtactgcatcaaaacaaaattgtgaaaaaaaacataactatagccactgatgtcaaattggaaaaaattgcttcctataggcatgtaactgtaaatgtctaaaaagttactgtcctatttcatggtatttacttccaaaactgcactgacttacttccaaaaattgacttacttccaaaaattgcactgacttactttccaaaatgcactgacttaattccaaaattacactgacttactcccaaactacactgacttactcccaaactacactgacttacttccaaaaaaaaggtattgtactgtaagttacttctagaacatgctaagttatttttgacaacagatgaagttacttctagaacatgttaagttacttctaggaaaatacagataaaagtcatatgattcaatcctttagcaaaaaaaaagtctagtgcattaaaaaaaggcaaaaacacttccacttggattttacaagttttctaacatgtagtgcaattgtatggggacatagtcatactccttctgaagcaaaccaaaacttcattcaatactggattgcaacatcataaatctggattgatttcgaaaaactggttgcatttcatacttctaccataaaaaggattatgggtacatagaacaaggatagacatgcaatctcacataatgtgacaggaattagttaaccaaattttattcaatactggatcattctgatttactaaccatccggttataactataggtagtacacatgtccaagtccatattcaacatcaaaataccgtttcaaaaaaagtaagtgttaagttactttttatggaatattaagttacttctaaaactagttaagt

SEQ ID NO: 37747 - DNA, 2499 bp, Oryza sativa
ataaagtgtatatgcatgcaaatctataccttggaaaggcacgcaaacagcttcttttgcttggtttttctcagcttggaagcaacaggtagctaagctagagacaggaaagaaagccaagatgggagtgaaaggttgtgtttgtgatgttgcacacaagagaaaggagatgatgtagtttgtgttatataaaggagagcttgggggagaccagcagagatagctagggtttgggaacttgagatgatctgatttgagatgctcacccaaaggacatgacatggggttatataaagtagtactatggcatgtagggagagtgatggagattagctgttgtgaataatgatttgatttgtgcatggtcagtcagtgacagtgtgtttgcattggtcatggccggttttggaaggactaaaggaaaggaggagcgttgtctttggaccaggggacgcaccggccacaaaaatggcctcataaggagcaatgacatgtctccatctgcaaatagtgatgatctttttttgcatatatgccctctctagagatcattaattgctacgtgcaatgtagtatatattttcttgaagcttaatttgttttattgtgcgtgacaactgacagagagctagccaaataggtttggatttattccttgaaaggagaagacgttaggttctatatgatatgatggtccatgcgcatgcatgtgtaaagttttatatatagttcataaataaactaaaacaactttagatcatcctttgaccagccttgtgggagtcagggaattaagccctgcattccattattccatattccatttctattctctcttctattccctacatgttgttcattatctattcctaaaggctactagtaatttgttattgtttcaagtgaggattcaacttttgcattggttatcactcataataatttacttatcccaagtagagatcttgtgatggttcaaacattgcggttagcgcgcgtgtgatacgatctgaaattatattcaaacctgatatttgacttcttgtgaattaaatggggggtcatgtgacaattaaaaacccattttaatttgtcatccgttgaatgataaatgccacatcgattttttaagtacaattggatacatataaatatgtaaataaatgcaccgtattatagctactacacacactcatacacatcgattctctacacatgcctgaatattgtcataggcatcaaaatgcatggaaaaaaatttagcatttgaaccctcgtgagttggttgaagatacctcaaaattaacctagccattaagctagcttaattccaacaaatgccacacatcatattcggtttctaactaagtgtgtactgcttaattggtttgtgttgccagatattaactattttctcatatgaggtgttttacaatgatctctagtggtagtagaaataaatctataccatttatcttttctaatctaatggatcatatctaattatactttcatctcaattattggtaatagaatttcttttttatttacatatagtaagaatgttgaagtcacttctactagctataatacccatagagaccacccttggtactctttccctatatattttggctataagtttatctttggaagagcttttatggtagcctaactactactacctccgtcccaaaatataacaacttttatttatgaatctagacacatagttgtctagcatttatagctaaaatacttatatttgagacggatggagtagctagtatagtagaataaaatgatcttaattgattgttgatttataaattgtacgtactataccagtagttggggtagcataggagtactatatattatactccggtgctctctatttatagtattatatcactagtacgtattattaggggtaaattagtaatttactaatacaatgattaagaattactttgtcatttatgttttttcctagctaaatcgatatatcatccattgcgctagcatcactcgtatttcatcgaaaaagccaaaaaaaggaaaaaaaaaagtttagtcactgctaaatgacaattatatctccccacacctttttttttacaataatatccctccatgtctctactaccgctaactagatggtagtataaatagatttaaactcttcgatcaaatgatcaatggtttatattgttttctactagtagagagcaccgtagtgaggctaatattagtatggtttattagataacaaataacgaaaactctaggtgaattcattcaacaatcaataaaaatcatcctaaaatttctattctgactgtgtttagaatacaatttcctgattagattgaaaagtttgaatgaacattaatcaaattagatttggacgtatattttcaatcggagcagaaaaaaaattaaaacatatgggttcgatcgatcagctatcacccttggatgatcaagctagcattg

SEQ ID NO: 37748 - DNA, 1679 bp, Oryza sativa
tccaattagtctctccaacttgcacgcatgatcatcagtctggttcattgagtaaactcacgtatatattctgctgcatgccactagctctatacacatgtagccagctatgtattttccgcccgtgctccggctgtgcggcgacatgtcttcgatcgccggcgccgacgtgccacaccgtcgctccataccggccggcccgctggtcccaagctggcatgcagtcggcggccggcgccgttggtcgacatcgataacgattgatcatatgccgccgccgccgccgtcgcccgcggccggccggccggccaccggaaaagatgggtattgagcgtgtacgtgcagtggacattacacgggatgtgtacgcggtacgttgaaggaattaattaatttatggaagactaattttccttttattaaaaaaatagaagaaatacttcttccgtcccgaaataagttaatctaatatggaatgtggtatttcctactattataagtttgaacatatgtgtttgtctaaaatcgttgtattagaaatatcacattccatactagattaattttgttctgacgaaggtagtaggaagaaggaattaattggtaggaagattaatttcctcagacatatatgagtaagaggaattaatttgtaggaatattacattacgtcgatcgggagagagagagagatcgatttgttgcggtggatgccgatgggagtaagcggcaggaggcctcaaagtccgggaggtggcctgcgcgggtgcacgtgcgcgcgccgcgcgctcatcagcagctagctgcggcttctatcccggccggcacctgactttcagggatttatgctattttatttatatacactactactgctgctggataattcattatgaattcctgctcacaccttgtttggttgttaattcctaatacaaacccagtacacatatctaagaattataatttttttagtttcaagtactttttttgaaacaaatatgagtatatccatattaattttagaagttgagttgaaattattcgaaggtctattactgtatctatcctaaaatataagatttcactcatgcatatatagttgtatatatggacaaagtctctcatattataatataagtagtcaaagtttaaacatgttaactacatgtatctaaaatgtcacttattggtcagtggtggaagcaacttagtttttagagttaattgaaaaagacttcgataactttcgttatgcaagcttggctttcggttttggaccgccgctcatgagtcatgagccgcacaaccgcaaaaatgctttccaagcagctccaaattatttttctgtaattattaagtatatatatttgtatacatatactccttcatatatatatatatatatatatatatatatatatatatatatatatatatatatatatatatatatatataacttcattttaaacatgtgcgcaacaattaaaaaaagagctcagtgacttttgtttctttttattatattctgtattggaaagggtagtcatttttatgttggatattgtttaatttacttggctataacaaacaagaaaggaaataaaatgtgactgtacgttctaaataacctatattcatgaaaaaaaaaggttgattgaaatagacttacatta

SEQ ID NO: 37749 - DNA, 1456 bp, Oryza sativa
ggttgtaatctgccagccaatccttttcttccttttaagaaaagaaattttggttcactggttggtaacacagcacaatcgtttctttttcagttggtgttgtatcgcatttaaattgaccaccatacgacctttgcttatgtagtcttgtgttcatcatccatctacctggagtatgttctaagctctaacagtttatgacagtgacacattgttaaattgctatgcacaatgacaacgcattttaggttttctttggagcaaatgggatatattttattgatccatactgaattgaattatttcatgagaaatcccccgcattctagatacaatcttatcactaaaccgatcaaactaccgtacttaagtattgatacacaacggtaagaaaaaagaagtattgaagggaaaaaaaactgtaaaatgatgaggagcaatctgcgcagtgattaagggaaaatgacggccaaatcgaatgcaacccaaccatgactttgtctattaaatttcctgcttggatgaacatattcggcaacacgtgccattttgggcagaactggtgtcaaaagttgttctgttggtatgcactgaagttttttgcgtgcggatttgcgatgctaaaagttgtcactaccatggttttgctgtcaattctatacttcgttagctaaagaggtgcatcatgatagatctcattaggtgcaattgctgatggaaaattttagtgtggaccaaccgattattactcaattgagttaaagccagaggtattactctgattaaaaaccagaacaagtgcttgcaacttataatactctagctggataaaaccaagtttctcagaacgaacttctaacaacttacaaataacacgatgattataaattaactcctatcaatttggacacaagcatgcccccactgcattttggcaagaaaaatgcggtcacacttatttgattattctacctatttataatgtcggatataggaattctttcgagcctagatgaaactcgttacaatataccaccataccattttatacaatgatgtaatattttcatctcttatgccagtgaattaggacaatcggccagtattatttaaacttttaagatcgaaaatgtatgacataaataatatactagaaaaaaaaatatgccggtccaatatttcggagataatcataaggatatgatgtacgtgtgtatgtttatagtggtgaatgtgcacgtgttataagcgcatacgtttatactgtgtttctataataaaagtagaaatacgaaaacatgagttcacccaatccagagcttccaacctcatatacaggccgagtttagttccaaaattattatttaaacttctaacttttccatcacatgaaaactttcctatacacataaagcttttccgtcacatcgttctaatttcagccaaacttctaatt

SEQ ID NO: 37750 - DNA, 705 bp, Oryza sativa
gccacgtcatccctttgattctcccatggctcccatgcgattgtgtgcagcagtactcccatggctctaccacacaatccccaccgcacgtcagctagggaaagcgacggtctggagtgccgcctcactcctcttcctctccctttgttgccacacctcctggaaaccgtcgacacccaccaacaagtagttttcgtggctgccatgaagacattaactctgtgcgcctgtaacgtcgtgccaaaatcatcatcgtcctttacttattaccggtgaaacgcatctaaaatccacacaaactccatgccttttaatcgatgttggactcctagagccattcaaaggcttccccaatgttagccttggagtgggagagtttggttgttttgggagtcatcctttctacggaatgacggttgaaattgattactcatgtcctcgataactgctgtattcgtttgagaacttcagctgccttatcgttagattaagtcaatccgtgctagcactggacataagctttattgccttcttgatttgaggtaggtaatttaatttttcatatttattcattctttgttttgatcgttggttggctcagattgacctttatttcaccagtgattgaagaggttcaacattttccagtgattgaagctctggtgacttttgggaggtcagcctcttttttttctagctcataca

SEQ ID NO: 37751 - DNA, 1443 bp, Oryza sativa
taatataaggtcctattcagattatagccaaaataaatcttactaaattttagcgttgtcaaaatattggcaagatacaatattatcaaaattgtagaagtatttcttatgtatttaccaaatttggcaacaaactaaatatagatatttttttagcaactgtgccaaaaaaatggtatggttgaaaatggcgtcaaactgaaccggtcctaactttttggaagatttactttgtttctacaggacaatatcgatacacgtatagatgtttttattcacatataatatctatattttactagttaattattcaatttttatcgattacaataattttatttcgtaccttacttctttcttatcaacgatcaacattactctacttaatttgtaatacttccaagtacgttaacataccgtgaaagttctcatcaaatacatttgacttgagggagtagaaagtactataatttgtatagtacaatcatatcgtacgtcctcggcaagaaagaaagaaaagcctttatcgtacatttgaattagtgatgctgatgcgagattaattacgtactaattagacgcgcgcagagcacacaatccgatcgggctatgcgtcgtgcaaaagcaaacgcggcatcatcgatcatatcgttctatatgcaaacgcattgctgtgttgttgtgtgcttcgaaggccgtgcatgctccacgcgactaattaacgatctgctcattgatcaccttgatcttgcttacgccatatagtacataatgtaactgtatatatagagctagcttagctagggtttcgatctgctaattgttttttttctcattaacaattgctgcgcacacgcaattatcttgagaacaaagcaacatcctgttttttctcgtttagatggatgcgttgcatcgtgccatgcgatcgatgcatggaattaaaataacccttttattaatgaattcaaattcatttaagtgatgtacgcagtgatcgatatatgtaagggagagtgatgatagataagggagagctgtgtagagatggtactctcccagttttgagtgatctccaatcaaaagtagcattgcatataggtcggttcttggcctgcagcatgcttggaatgcagaaatttgatagtgcaaaattaagaaggatgaaatccaattttagtcattatacggttgtttttcaacctcaattttcaaaaggaacagttttgatttactccctaaactttgagcgtagtccgatttcccatgaactacaacaacaaacattcgatatctgtgaactttaaaaccggacgaattatatctccttgctatctaatcaaccatataagaaagacaatttatataaaaagatctatctagacacacctatcattcattatatatatatatatatatatatatggatattcttttctcttt

SEQ ID NO: 37752 - DNA, 766 bp, Oryza sativa
agtctattaggacttgatatctaactggtatcatcctgtttttgaacggattccggtatatagcagcttttttttttcaatgcacggtatattcatcagctggttggttatttagccaagaataaaaagatagaaaaatgttcttcctaggcccgagggccgagagctgttcggtatggccgggtggacgcgttagcccttagcagcttattgggcctgaaaagccgaaacagtgaacgtcgtacggcccattaaagcccaggcccaaaagagcccacccacctcctctcttatctatgggagacgcgctctccctctcgcctcgcggtcgcctcgctttctccctcgccaactcgcctaccctccccacccccgcgtcggcggcggcggcagcggcagcggcagcgacggagcctcgccggcggcaagcgtactcacccggtaaccctggctcctccccccctccttctccgtacctcgtatgcgtgttcttctgcgctcgtgcgtgcggtgtctgccgccacagaaaaccctaggtccgcctgcggcgtgtcagcgagctcgcccgtcaccgcttagatccgcgcgggattcggcggtttcgcttgctggagatgccttgacgagcggtttaacgagatagggaatgttctatttgtttttaccccgtagctgcaaggtttctgaatctcagatcccctcctgccatgtcggggttgaaggctagggtgttgcttcagagttgtcgtgaattagtcatatatgc

SEQ ID NO: 37753 - DNA, 1557 bp, Oryza sativa
acttttctatgagcgacttaaaaatcaatttcagaaaataaactatgatgaagaaaacattaaaattaactccaaaattaagttttaaaatctaaaatttggttgtagccttgtaggtgataacttaaaaaacatcgaaatccttccctatgacctgataacttgaaaaatgctggcttcctagttcctactcatgcacagcacaaccacagcctgaccacgagaaagacagaaaggaccttttcaagttttcttcacttcttcgaagtagccacaaggctagaaacatgaacatgccgtcactgacacctctcactttcaagtgattgcaactggggaaaataataaaaaagaagtcaataaatccgtactacatttgactgtgcttttggtaccaataattctgaaaagggagaagagattaggaggattcatgggaaccagcagctgcacatgcagctaaggtttgactggtgtgagtgtgtgcatgaattcatgatccaaatggtttgaatattatttccggatccggttcaattcgtcatttgcttggctggtgtcgctcatacgtagcacgctactagctggctattcgtttcaacaaaggcttggcaatattcaaattaattacaaataatttgtgccaagatgagaatatatatatggactgctacattgacaaaatcagcattgctatatatgtaggagtatatagtactagtctttctcatcatgaatactggaaaggaatttgtaatttgaacgcaagttttggtgaagcatacgtgggaggacgcaatcatgaacaaacaaattaaaccagacaacgcatgtgctgccccttgcataccgcgcacgtgccatactaattaaataaccacgagtctactcgctggattcatgtttgcattatatctaaaacattttttatttaaaaaacattttacgttccattgtcattttaagggatttatttgttattttcattccttggctccggaggtagtgaaaagtcgacctgaaattactttcaataaacggtctttataactaaatattttgggtttatactccgtggtccatagctaatataagtgacaaacatactattcgatcccgtccataataattatcgttttacacataattgaggttaaactttttagaactttgactatgtttaaaaatatttgctttacaaaaatagcagttacattacatgtatagattaatcttaaaatataaatattctttatatatctcataataaaaaataatagtaaagtttttttatttaaagcgataattattatgaaactatagggagtaccattttcttccagcatggaacatacaccaatttatttttgagaaacagaaaacctacaccacggcatcccgtggagacgggatctcctctactactcctctccctccaaatcatccggatcccctcctaatacctcactctccttccccaaatcacacggcactgtagccctccccgacacttctcatacctcactcttcttccccaaatcaggcggcactgcagcc

SEQ ID NO: 37754 - DNA, 1811 bp, Oryza sativa
tccaacagagcgcaagggctccccaatcgtaatggggttttctgaggactataatgtgattttcctaaagacaattaatggtctcttcatggtccatcttgagtctatggagttcaagagaattttgaaagactgtgctgcccttttcatttatccatttgcaagtgtttacactgcaggtaatggcatgatttacatttcatagttggttgatgtttgcctttcatatccttgagtactagagtagcaatttggacttctaattattttgtcgatgtatgcatgaatatcctcgattgctaaagtagcaatgtaaactagggtagtatcactctcttgttttgctgcttgatgaactcttcaatatattttgatgtttttctttttgttattgttgtttctgtagcagttgaagtatatatacagattgaaaatatgagtacagcatttctttttggtactgatagaacttaattattttgatctctatgaaagtcaagttcaagccaaccgaaatgcaaatgtgtactcaagtggctcattttagtgcttaaatagtgccatttcactgaatacctttatctttactgatcttgctaataatctgaaaaccataataacaccttggtttggtctttttatgaaacaacagttcgttatgtcattggcaaaaaagtcgcgctgcaagttgtgagtccaactgtacgggatagtagataaataaataaactaagttcttttttcattttcaaactaaatctcattctcatagttgccccctaatatttaattgttttctccatgaatctgagtctttttttttacttttaaacgtttgtaggcatgagcattggtgatggacatgatgaagatggacagtctccagctatgctagtttataatccccttaaccccacattttccattgcacatcttctattttgtccgtatcaaataaatcctctatacccatttgtggctagattgggccatgggctagttgtcaggggtttatcggtcacattaatattttaatatagaaactggtttttcttggtaactatctgctactccattgcaaatattcgtgagtgcagggagtaaaaatacctgaacatgacttcaaatttcaaacacacctttatttgtacaaccttgtggctatgacattttatatttctgtttttttttgtatttattattatgcataaaccacctagctagcaaagtaccaactggtgtagtactcgaagataatgcctcttcaatcatatgctattactgatcttagcagttgcaatgactgtatttttttgaatttattctagtgttttcagcagtttccttgaatatttctacagcatatttttctcttttctcagttacatgtgtgattgatcattagcctctgctactctggtatagttttcctggtccaaaaaatatgctgtgacagtctacttgaggttaattagtttcttttttcttcttgggaaaatttcatctataccacaaagatttcaccagcaccaaataataccacaagattcttgcacctccactcaataccacattgcagcaatgtctcttccaaaaatgatacagatttcaatggatgttacccaatcttggacaaactaatttgtccccgttaccagtgtttgagaagatcactgagctacccttatgaagtgtggaactacattgggagttctccaatctccatagtggccgcagcagcagcataatacagaagatgtatttggtaccagctagtggagctcatcatccagaaccttgctcaggcatgt

SEQ ID NO: 37755 - DNA, 539 bp, Oryza sativa
cccggtccgccgtggaccgcccccgagtcactgccatgtggggcccgcatgtcggcgccgccctctctctccccgggatttatttatcgcgcaataattcaattaaggatttttccgtttatagtaaaaacatagtgaatcttctaaaattcataactaattcatccgagctccgtttaagcccattcaagtctcagtaaatcaagaaaaatgtgtagaacccactaaaaatggttttgttctctgtttcagtagtcttatagcctgtttgtattgtttgctttgtatgtcgcttagattccggctctcccgacgctccggtataccttgaaatagtcgccaaagttcctccagctgcagagcaaggcaagtcatgcttgtctcttgaacatgttgatcctatattgcaaatgctccattgttttccttcaaatactgcattgttttataatatcactatgggatgctcttacctactgtcatagccatgctatcttgtaccatgtttcctttgttagcttgggatataacatgactag

SEQ ID NO: 37756 - DNA, 503 bp, Oryza sativa
acgcaatccctatataccgtcggactgccgccatctccctccccaccactggatacgccgccgccaccctccccaccctcggatccactgtcgtcatcctccccatcgcccgattttccaccgccgctgccattcccaccattggttagggactaaggcagtggatggtcctgctccatctccatctctcggactcctcccgccggcatcggttttgctggtgtgggccggtttcagcgtggatggcatccaaagccttgtggctgccttcggagttgggtgacatgaagctcacccgctgccacaggagttgggcggcttgggttgcgtgtggcgtgagcgaatctggcggtggtggtgtgctaattgttgcggtggcgaggtctcggggatggcggcaggacggcgatgttatgattccaattttataaaactctagtggcactcagtagatattatgaatagtaatatcgctttctagtttggcacatacataactttat

SEQ ID NO: 37757 - DNA, 520 bp, Oryza sativa
tgaaactcccatgcatcttcctttctcttgccaaacaggcggtttggggaagttttttatcaaatccgtgaagaaattactaaaagggattacagaaacttacggtcggtgggttacaaggattgtacatgcaccggtattaaggtgcaatcatatgggagcatgccccaaccacacaatctcctctactacgcgcagagggcgacgccgggcgccctgcttattgcagatgccatcgcagcctactacgctgcgttgggacgatccaaggactactctgcgaacggtccaattcaccgccagcttacaggtccccctggctttctttttggtacgaacttaacagactataattcagctacacatggtgtcaaatcaactgaaataagggtaaatgacctgaataaccttattaaattgtggctcatgtcacgcctaaacgataactggaatgctggtggtgctgaacaaagccactacacgctatcgtcgtgcctatacgcgcctggattttggaaac

SEQ ID NO: 37758 - DNA, 590 bp, Oryza sativa
tcatctctcttttccttcatccacctacaccccaagcttccaaaagaccatcgccacagttgcccaaccttcccttacactagctcggctccaccattctgcgacaagtactggacattctgttgaacacctaattggcatccaggagcatgcagtcctattttttctccaccgccactgtgatcggccacatttcgcccctgcttcaccatggtaaaataactctctcctttagaatccccttcattccctacatttcattattcatgtttcctcgaccgattgcaccatctagaaccatcaccaccctggagcccttcgctcgtgtcgcttcctccctagagcgacacaagaagcgaccgaaaaacaccgccgccgcttctccttcttcctcctcccaccttgccgctgctcgagtggcacgtcggcaaagtcggccgaccatgaggatggcggcatcagggctttcccctctctctcaaggaaggatgaagaggtgatgccgcctagatccaggccctgctcgtcctgatccggcgaggagcggtgagagggcccccatcagatgatttggatggtggccaaggcat

SEQ ID NO: 37759 - DNA, 851 bp, Oryza sativa
acatttacaaaaataattttttggaatctaaaccctatactttacttcaaaaccagaaaaaaaacaacctgtacaatattcccccacaaaagtgtgaaccgttttctactgtctcattgcttatgcactacctgtttctggcaactgccaatgtaatgttggatacttcactacttcagcgaggaatatacttttttttcgccttctctgttatccttatcagtcgtaggtaaaatttaaatttgaaaaattaattttttagagctgatcattgtaagagggtttgtttatttttcaacatatattggcttctgaatatgaataatacatgtataaaagttttactcataaatttttttattacttcatccattactaagccatggatcaaccaattagagacgatgatcttctttttattccttgtcttcgtcctatgtcttctttgtgtgagagaggggagaaggaatttgaaagtgctagcattatattgttccttcccaacaaattatatattctccctcagctcagtctctcctctctcctctctagattaattagcagtcccagtggcactacataaccagtactatatatacaataaccttgtgaacaggtttgcatatactccctccgtttctaaatatttgataccgttgactttttagcacatgtttgacattcgtcttattcaaaaacttttgtgatatatgtaaaactatatgtatgcatataagtatatttaacaatgaatcaaatgataggaaaagaattaataaatacttaaaacttttgaataagacgaacggtcaaacatgtttaaaaaagtcaacggcgtcaaatatttagaa

SEQ ID NO: 37760 - DNA, 905 bp, Oryza sativa
gtgattcactgagattttacaatttgtgattcactgagatgtataactttgtgatatgttgtatggatctgagatgtataatatgtgatgtatttggtttgtgtataatttttttaagatttgtgatgtatttgatttgtgtgtacaagtaacttaagatttgtgatgtgaatgttttgggatgttgggtttgatttggaatatgcatcccacttgatttgggagaaaatacagggattaaactctggctaaaaaaaacaatgaaaaaaaaagaaaaggagacctaatgggactgccgctaccctctcttaggtatctttagtcccggttatttcaatcgggactaaatatggacatctttagttccgcattgctagtctcggttggaaaaccgggactaaagtagtcccggattgctagtcccggttgaaaaaccgggattaaaaagattggaatcgggactaaagaggggttaccaaccgagagtataaatggtttctccacccgtgcatgcaagcagcaggtggtggactccacgtcttcacctccgttctgcattgccatcttcgatcttccttgggatcgatctagtaaatcgacagctctaattaattaaaaagtttatagtaagaataatgtcaagcaactctgtggtcaacatcagtcaccagcgcggcggtacaggtcatcgaaaccctcatcagcttcatctggcagtttgactttgtcagtttcatcaatggagaacatctcgcatgatgctaggattgaaaagaggagggagtcacgggtactttattttatggtttcttagggagattgttaattttgggttaagcttgattgattttgtgcaaaattagctattgctccgttgcgattgctgcgttagttataggtataag

SEQ ID NO: 37761 - DNA, 613 bp, Oryza sativa
atacatttttaggtccctgaacttgccatgtgcgttatataggtccaaacggattctaacccactcgatgcgctgacgtggcaatgccacagtgacacctacgtgttagtggaatccacatgtcaagcatatatacaaaataaaattaaaaaccatattttctcctattaggtagacagaaaaaatataaaaattctaaggtagagaggagaaaatatgtttttctacttatatttttttctatgtggctgacacgtgtgtccaactaacacgtatgaactatcatggcatgccacatcagcgcatggaaggggttggagctcgtttggactcatatgacactccaaaacaagttcgagaatccgaaaatgcattttgagagtttcgggatctagatgacacacccacataagtttaaggaccgctcgtgcacttcactcttatataaaatcactcttggaagaattttttttaagcattgtttttttacagaagatatatgatttctcctacatcacaataagggagatggagggtaagaaaacaaaatagatgccccttaaatgagttatggttgagagtgaaagttggttggagggaaaaatagtactgc

SEQ ID NO: 37762 - DNA, 625 bp, Oryza sativa
actagtgggatcccccagtactacagcggtacaaccggttggccatcggcgagagtacgtaccagtctgcgtgcctgtacgtgacgtgacacggtattcgtgcgtgcgtgagccaaaatcctcgttgcgccgccgcgccgctcggctgtgctgcgcgggcagccgacgggagcgggaagtgggtgggcgcgcgcgcgcacgcacgctggcaaatcttggcctttttttacgtcctcggctcacgcgcatccccacgcgacgccgggctgcagctttccaggagacgcggccggcggggtttccgccggctatgggggttaggtatgcggtacacgctcgcggactcgcctgtcactcgattatcacgggccggtttggctgaattatccgtggacggtggacaaatggatctcgcaccctgcagcgcagtggtccgtccgtccgtcctctttgctgcgctggcgaagtggcaagtcagtgaagtcgcaagtgagaagggaaagtaggtcaatagtaggtggtggcttcagatgttctctgggcctctcacctctggctggaaaagagcaacgttttaatgccaatgtcacgagctttttactgatgtgatatatcggttttagat

SEQ ID NO: 37763 - DNA, 713 bp, Oryza sativa
agtcaatcatggcttgtttcacctcctcgtcagtctctccaagaccaagcatgatagaggacttagttatcataccctctttgcaactttttgcatgcttcagaacagctaagctctgatcatatctgtaagaatgaggtaagaaaaattcttacaatgccagaggatatgaggaaaagaactgtgcatagtacaagttattaactgcacattgccacgagatactagaaatatagtgtatgcgcaaaatcgaggataaactggataaactatatcctaccactatacttccttcgaacagattctaagggaaaggtagttgatcaggcaaaataaatcatctcccaagattatgatgcgagaaacgttcagaaataaataagagtaccacaactcaccaatcaaacagattgcaaagctttgatatttgcaaaactattgttatgtctcatacaataaatacagcaaggaatatgcaggtcatcagatagaaaatatctatggctgtttttattttgcaatgttacagtctacaatatagtttacacttcagagacaacaatttgcaacctatatataagcactattacactgtaaagtatgcatagctcaataataattagattcatttttactcggggcgaatttaagattaatcacttaaactaagacacaccaatagcctgagaatgatcatatagtcaagctgtaag

SEQ ID NO: 37764 - DNA, 1809 bp, Oryza sativa
tgtgttgcttaaggaacatttgatttattgaattacatgctgcatatacatgcatgcacatacatgctccccccctatctgcagcctctgttctctgaatgtacgtcgatctctgcagatcgatgttgatctattcaatccatgttggttgttacgacttgaaacctatgtagctacccatatttacactgtgtatgaaagcatggaaacctagagctatcaaagggcacacaaaacccctggtaaaaaaatggcagcacaagtacacaaaaaacctctgttctctgaatgtacacaaataacataactgaatattagcatctacaattagcaacatggtaactgaagaaaaatcacactgggtttacattgtaaatgaagcatggaaccctaaaaaagctatcaaaggggcacaaagaaatcctagtataatggcaccaagttttcattatgctgaggctacaacatgaaatctgactcatggcctgtgcaagcaaatgtgcaaatgccaaaatagagaaaaaaaatagaaataccttcaaattgagcaagagatccaccaccacttgtgctctctgagaggatgcagagagggcgcagcaaaagagagcccgagatccaccaccagcactagcccctggatgaggaagagagagggggaaatgaggggatagagctagagaaaaaacaaatgccccaatcgcacactgatttgcgcagttaaaatgcccaaatctctccacctctcccggcacaaaaaacgcacacaaatcgctccacctctccacctctaccggcaaaaaacacacacaataatcgctcccccctccacctctgctggcataaaaatcacacacaaaaatggatcgctcctctctctccggcgcaaaaaaccacaaccacctctgcacgccgcagcttaccgccggatttggtggagaggaaaccgcagcctctgtttccctccccccctcccccacaactaccggcacgatgagagaaaacgtcgcctcaaccgcggattccgccgcctccgccgttgattccaccgttggcgcgacaggacgaaacagccgtaaccttcccccctcccaaaccgcccccgcggctacgtctccggcagggatttggccggagattctcgccgcctccgctctctccctctctccgccgctctctctctcgagcgccacaggaatttttgaacagtgccaactctctctctctcggtcggaaaaagtgcgactcgcggtcgggacaagccgacccgcggtcaggacgcgcacgcgtgccggatgaaggccacgtcgcccgcgcgccgatcgacggctccacgcgcgtcgcgcgatagcgctaaacggagaggcctctccgtttagattatacgatttaatttatgaaaaggtataaaagtaaaatattgaataataaatatatggaattaaataaaagatttaatatcttagatcccgtatttatgagatagatcccatatctagacgagcgaaaaagggaaaatacgaggcagaaagagtttgagaacgaacccaagctgagcagcagcagcttcagacgcatgtgactgttagtatgtgacgatgacgtcacggccccttgctttttccagcttccaaggcccaaggggtcgcttgccgtgccgtaatatccatccatcggattccaacggccacgattacacgtgcgccaccgcctccccccctctcttcgtcacctcaccccccaacccgaccaacaaaaataaaaacgacgaaaagaaaaaaaaaaaaagatcgcgcacacgaccccccc

SEQ ID NO: 37765 - DNA, 1308 bp, Oryza sativa
tcctttcccggctccggctaccaccgccgccgccgcctctccctcccctagctccgacaactgccacccctccctcccatggctccggccaccgcagccgctcgctccaccggatgcagctaccaccaccactgcccctccccttcctagctccggccaccgcagttactccgttccctagctccggccaccgatcgacgcccctcctttcttcgttgatgtatcccccaccggcggctcggacgcgacgcaccgctgcctcgacacgacacagacgaggtcctcgacgtcgcaggggctcaccgtgtagggctcgtcgccggtggccgcgtcctcctctcgccgagcaggtctttttccccaaccgtgccgaaggtcctcacagacaggcgacagcaacctcctccttacggctcaggcgctcagctctcgcttctctttggataggcaagaaggacgaaggatcccatgccgacaggatccccgtatgtagcattcccgaaaaaaaatcgcataggagaacactaaacatatggtagaagatggattttatcggtcttacggatctatatttggattatagccaccagatatctctatctctattgttataaaaattgaaaatgtttttaccggtattttggtacatcattcgtatttgagtcgggttttaaattttgttcgcttttggaaataaaaatccgtgtttgagtcagattttaagtttgtttgcttttaaaactacagaaggagtcgtatgagaaatctctttagaaaaactcgcatgctaacttgagatgaaagtcagacttctaattgcagctcatgattttttttaaaaaaatatccaagcgaattcctaaagtgaatttcatcctagataaaccgtataacaataacatgattaaaatagcattcacccgttgcaacacacgagcatcttttctagtaaatataaaagtatagtagataagaacggaacggaaaacccttcaacggaaatagaagatgttggactttgatccaagaaagacagtgtcttatctacccgtatctcacaagggctgctcgtggtttacttggacaagttatctctacccacatataaatactccaaacttctcccgcgcctcaaaagcacttcaccatcgcccctcaaaagcaccttgccatcaccacctctacaagcaatcccccctgcccaacacgtcatgcagcgcaaaatagagttagatctggcatacctgttgttgacctcatcctctctctcctctctgattcctccttcaaacatgctgccctaggcat

SEQ ID NO: 37766 - DNA, 649 bp, Oryza sativa
agtcgagctttaatgagcccagctgacttattgccttttgaaattctatgtatatttcttcgtttcatgtgtaggccacacaattttggagtcgcagacacgtgcacttctttcatttgagatttatagaaaatgagatttagctactcaggacaatctgtttttcacaattacatgaaaaacagacaggcgcatacaccaccacacacgcaccaccgcctcaatatcctcagatatgttcttgtcacctttgacaagaggttctgctcttcccttaaatcacatgcaagtgtttgcaatcgtaatgcagtgtgaagttcgtttacttcagaaatgtaaagaaaatttcttgcctgatatgttcccattattttcatcaagatgatgcaactaaggaaacactgaatctgaatggtgcggactgcaaagacttacatttagtagacagcaaaacttactaccagagtgcctatagaagcttcagaaggaaataataatgtttcctacagctgggtatgattgcgatgtcactgattatgaagttgaagttgagtcacccgactgatcacatctcacactgatcaatcttgctcttgaccagctggaaagctggattcacccaggctccgcagctgcactgcattcctgc

SEQ ID NO: 37767 - DNA, 3195 bp, Oryza sativa
  unsure (1)..(3195): unsure at all n locations
atagccttcagtagcgacgagtgtgcgacatcttttgcagcggtaagtagtgcctggatcagtggtttctaggtcaccataagttaccccatctgtgtactggtttgtttctgcagggtttggattagccactggacttgtctccagctcagtttgtactgctggtttaatatcagtttccgcgactttgtcctggcttatttccgcaggcttttgatcctccatggatcctggcatctcatcaacctctggttctgactttttctgttcaactcccaattctagcgcctggatggtttccatctcctggttgatttgctcacccctgcattagtaacagttaagacacaagtggtgtttctacagtgcttggtaatgtgcaaacataaataaagtccaagctttgcaatgttgctgttgagatattcatttatgtgcaaacataaatagtgacttttcaattcaaaaagaaaataccgtttctataggttgcagtgaatagtaattactcataaatgaagaacacaactgtattcagtattggaaaggcaaacatgatcacaatgtgctcacttgttatggaccagcgctatgggagtagatacgggtggcgcacacgcgaagaaatgcagcacccagagtagcatagcccggttacaattagatataagatatataattagtaccaattccctaattttggtgagtatcctagtttatctactttgtgctaaactatcaagaatgcaccgtgataanggattactattccattaagaaattcaggaaaggacaatctgccatcctatccagcagcaagatttcggcctgatattaaactcaatagctacaaggattataaactcaatgattggcgaaaaagtaaaacaaaatacgattaacgaagcagcacgaaaccaaatattagcagcagcagcagcagcaaaagattgacgtatataataataccttcacatcaggactaatagtagtaatccaaccaaattctggcccccagctaattaacacagaaacgattgcgggctgactattattatatacatatatacagaaaacaagggttcgtcccagagatgaagacgccaagaagatgaaatcggagcagggaaatccaggattcaaggtacataccctagatgttagatccgaccacccaagcggccgcaagcggagggctccttcgtcgacaccgcggcgcggcagcggcggcgacggctacggcgacggcggcggcggaatcgggagcgctgcgcctacgtctccacggcggtggttcttcttcttcagttccgcttcagcaggggacgaaatattagtgaaaacccaagtatatggacacgcagcaacgcaccttaactcctaatcggaagcagaaacggcccaagcccgtgcgatagttggccggcccattaacgtcggtgcaccttttactcagagtaagtctgtttttcctccctcatctctaactcaagggtataacgcttttcccatctttgaaaacccttctgaccatgttaacttaatcccaccaacaaggggattgagaggatgggaggggaataattccacacctattcaggtatggaattaatcccttttaatctcctccaatccctccttcacgctcggtggttttagaaagtggttttagaagcggtttctaccgatataacagtttgaccatgattgacccattgagtcagcagatgaaacccacgtggtaaagactttcttcgcttctcatcttcttccccgtctctcttccaggagcaaagagaaaagcgaggcatgatagagttattccttaattcgtttcatcgtcggttggtcatgactcatgacgtggatccatagcaggataacattaccacatatgggcttgttggcctccatctcaatcagactaacatgatcatgggactcaacatatactggagctgaataaattatggacaagggcacatcagatgaattttaagaaaaaaacattggaacttcattgtgcagtctccactggaaagaaattccatggatttgacaagtgatatgcactagcatagtagcatacaagtacaagaacaatgtatcaggcaattatcaagaacatatactagcaacgttctataggctattttcactcagaatgttgccaactaaaagacggcactaacacatcggctcactcagccatatttcacaaggcctcatacatgccacaccccatattctcatgcgccctaccatttagtctacaacaccacgatcaaaactccagggaggctgctgcatcagtgaagcatcaattttgctcctgcaaggtacactgttactccaaattgaaagtccgaatgcaaacagcagcggttctgagttctgatccttgtgtttttccaccgtttactgtgaaccccttggaatatgaaaaggagtttctgatacactgaaaacaaaaagagagtttcagtgtggattgtagagtattttatcagtgaacgtaatagcaagagctggtatagtgtaaatatcagggaactaaattgtcgatacataattaaacaatggcgacagttagatgagactttcttttcttgctaacaaagaattataataaaccacattatagtttttaactcaatcttaaaatttgcacggagaggatggtcaagtaagcaattacctaacaaggatgaccatgattttcatgggctgaacttgtgaggtaaacaacagggaattctcagtttctcacatgttgcggacattgcgatggctggctatgcagtcttatctcacctacaaccagaagaaaatacacaatttgtcatagagcattctttgagacatcagttaaattttagagataatagtatatcacgttataattagaacaaataatctatattgtcaagtaccacccttgagttgtatataaaataaaatatccatccattttgagttgtatataaaataaactatccatccatttttaaagtttctactacatagggcatgcccacaatattttgtgggcatgtgttctctaataaggctgtaccatgtccattattatttcaacctaggattaaatccaaagtttaattcatagcattaggtttgactactcattgcattccacgtatgatcaaatcactcccttcattagtgcaatcaatt

SEQ ID NO: 37768 - DNA, 914 bp, Oryza sativa
agcaactaaccaataagctcggataccatattagactagagatatggtgcacactgatgcatagtatttgatgaaaatagtttgtggaatgtatcagcccaggctatcaaccggcctaccagctctgagagtttgatgaacacataaaaaaatgaagaaatatagggaagtgctttgagcatatatttttaccattgtaacatacccaccaaaaattttatgggctcacgatgccataaaaaaaaccttgtaatatcttaaattctgaaaagaaaactatttaagtaaaaggttctaagtgtctagaagtgaaataaaagaatttcatgacatcacactaagtgatggatgatgagtcaaatcatggaaaggtctctatccaccaaaaaataaatgtttacccccagcactgcatagtaatttagaagagaaaaataagcaaattaacaaaagcagcaaaacaaaggggctacccaagacagaaaacttccacaagagacaggaggctctcaacagcaagacttcaggaagacaataaatggttaaatgatgtatcagcctttgtacattcgaccagtcactgccttcagtggtgtcattgaggacatgacagcaataacagacgaaaataagggtgatgataagggacaagcagtagcagaggtggctcaaaaaatggcagaccaccaccactgaattaaaatgagcaccccagaaactacgatggggcagggtaaggtgaatgggatgaatgcttggtcacaggtagtgctggcccatctaatcccagcacaagaacgatcatgggccctctatgcagttaaggtcagtttttctgattcccccttgcagaactgacagtcagacaacctgaggtcactagcgatattaatttttagaagtctttgacataa

SEQ ID NO: 37769 - DNA, 565 bp, Oryza sativa
cttgaactgtactgtgcccactttattcttttggttacagggaattgttgcactccctgcgtaatccatcaagtagccccaattttagtttcccattggcaagtttattaaataattgaacgggactaattaagaaacacactgaagaacatcatgaaaaatatcattttaaaaaaacattaatttgatcgcagatgcagccgcagcaaaagcaaccttagccgaagccttcgtattaacatcacaaaaaaacattaattcgtatttcctcctccacattgttgattgatttaatgctgaaaccttcggctgatatcacttgttataaaacctgtccggttagcatatcggaaactaaacacgaaaggaacgactactgccttgctccaaacatgtggtcactggtcagaggtcccaccatccccgaaagttgcctcctcttgcaagatggaaaaaaaaaacctattaccagctaattgttgtgcttcgataatcccagagcaatgccaatataatactaactgcgccatccatcaaaacttcaggaaagagctcagaacttgct

SEQ ID NO: 37770 - DNA, 716 bp, Oryza sativa
atacaacatctggttccatagtgtagtggttagcactccagactttgaatctggcaacctgggttcgaatcccggtgggacctcttttttggtattgccatagtcctcaaatgggatctatatagccaattgcttgcagggcgaatacatgattcatgcgttgttatacatataatagttttgttcaccatgtttttgtttaatgcggtgcatcaacatgtggcatatctggccactttaatggtatcagaacctattgatcatttgatcttctcagtatctcaacttctccaaacagcaacctttagtgacaaaccttccatcaacaccattaccatcaccaataaatcagacattggtactcttggccttcaacaagctattttccagttaagagttgtggtttcatgctagatggtaatgacaattttgggtgaacataggcttttaaactcatgattgcagatggaggcaaagaaggatagggagaataagagaaattagtcaatacactataataccatggaagcagaaaaccatggctgacactaacacacagcatttgataaaatatgcatggaatacataaaaacacagtctaagggcctgtttgggggagctttagattctgagaagcagctgtttggtagccagcttctgagaatctggaaaagctctgaaacccagcttctccagcttctgacttcttagttcat

SEQ ID NO: 37771 - DNA, 721 bp, Oryza sativa
ggatcccccagtttttgacgctacccaaatgagcaaggctctgggagaccaggaccttgagtgagctgctgccggctggcgatcaagcccctgccctacgctgcatcaagctcgaccttgcactggagctacattgagcgttgcctcgtactcgagctcactattggcggtgagcagaccatccagatcgcgccaccaatctagcttgacctcctccgatccctgcctgcgcactggagctcaagtttgagctcgaccttcgtcagctctggccactcggtcgatctcgctcgcacccatccctgcatcaagctcaaccctcctggtcctgcaatctctcaagctaaacctccatccaacaagctgttgcaagggagaagttgatggtgagtagctacgattaggttgagtaagcgttgcctgagctccttcgtagatatccgtcccaaaaagactcaattcttgggtttccgtgttcaatgtttgaccgtccgtcttatatgaactttttttatgattagtattttcattattgttagatgataaaatatgaataataatttatgcatgacctacctatttaaatttcttcaaataagacgaacggtcaaatgttaaatactagaacccagaaaattgagttcttttttgggacgaagggagtatccgctaatcgttggccaccagtgttcgagagagatagggatactgacactgactg

SEQ ID NO: 37772 - DNA, 704 bp, Oryza sativa
agtggatcccccagattttaaaagaatagacaaaaaaatacaatggtatttgcctttaccactgtaggcttgtgcatcgagagtcaggattagatcccctgtaaatgaaaagcatacaaaacgcaagagaagagagatggggcggagataagatttgtggtgttaaagcgtgaatgatagggagagaggccagagtcattgaatgcttctattttttaagcattctaagtcggttttttataggacaaactctccctcgtacattcgtggtgaacgttcccccacccccacacaccccccgttttcacaaaccgatgcctaacatgcttgcgtgcaaacatcgatagtgcgaagtttttgaatttgaaatgaagagctggaattcatgagcagaagtatcaagatttcgctgtacgaaaatataaatgcagagacgctcagggggtgctaaacaacaaaaactgaacgaatgcacgcatccccacgctgggctcactcttcccctgtttccgtgccaaagatgagcatccgaagcaaaagagcgtagcgcaagaggaaaggagtagacaaaaaccgacaagcttcacgtttcggattaatggcaccgaggcattttcccagcacccaggcgttcgactgacgccgacggggccaacggcatttacgcctagcaacaagcacacacagtgctgcttaccctacag

SEQ ID NO: 37773 - DNA, 569 bp, Oryza sativa
ttttttaatcagagaaagggcaacaactgctgatgaaatagcaatggtaacacagaattatccatcatgatgattttgcgagaactagatagtaaaattaataacctaaggaacatgaatatgagattagaatgcataaagtagcaaataggttcatcaattttttttatctcacatcacagagctggaggattgccaaacctcctcctgagtgctgacatgacgctcctcatcctactacttgcctgggcagatgattgtgcattgctggcgttagtcgggagatccatggctgccatctgatcagtaagctctgtaatttgcacctgtccagcctcttgcccgccattttcaattgcacctccagcatcacgctccaatacaatatccaagctgatagagaatgagccacccctaaccaccttcaggttctcaatacattcatacgatacgccccggcatctcttcaatttcaccttgaccaagctggggcagcccccattcagtgcccacatcccacggtctgagactgggcaaccttgatggaagcttcttaaaacagcgcagcg

SEQ ID NO: 37774 - DNA, 725 bp, Oryza sativa
catcactatcgcatgatttttttagacattcatttttctattttatacatattccatcaaatgttcaaggtgcagtttatgtagcaagtgttgattaaaggcctactactgaataaatatagttgtacacttgcatgacactgggctatccattagtgagctttgaataagcgcaataattgtgaagtatattttctagtcattttcatgttggtatgatgagaaccataatggttgcaactcttgcagaattcggcaatatccgcagcagctgataaacttgcagagtgccaagaaacaattacaagcctaagcaagaaactgcaggcgctaaaatgtccagcaaatgcggatgctgtagacaaaagaaagtctgataacttgcacctgttagttgcaaatcagaattttagttctcccccatccatagaagcagcatgcaagaaagagaacgatgaacgtgttacaactgaaaagaaccttctacaggagcaagatgttggcactggccataaagttgataacaatggttcaacacaaatcgctcctcgtcccgtgatccccaagtcgccactaaccactgtttctgttgatatgaagaagaggaagaaaaagaagcagggtgggagcttgctgagtagactcatctttgggaagaaggcataaaacagctccttggctgctagcctgctacgctcctctgattaactgctagtgcatccagc

SEQ ID NO: 37775 - DNA, 696 bp, Oryza sativa
tccatagcgttttattagcccatgtggaaagatcattttgcttttgtgcttggactcaccttgccactcggctttatggtggagctgtgcatccaacgattcgattgtgttgatcccatctagattcgcgcggtcatggtaactgagggcaacggaaaccttatggtttgtcgatatgcgaggacatataggcagctggtggcctaaggggaattgaaccagtggcaatgccttgggtaaggatgagccgattgcccaaggaggatgaggtggaggtgggagtgcgcattgaggataagccactgatgacgtcttatgcgaggttgagcttgtcgtggcggccagagaaaggacgcaacggaggtgtctggtgaaggaatcgaggacaagccggcggtgggcaaggagacgtggcaccactaaaataaaatcgtttgtataatggtatttggtaaaactcgatggtgaaatgtagaattagtagatgtttctggatagcaaaatgttacaggcttcaatgaaagagagacccaaaataagatcgggctagatttgtggtacaacgagaagtcccacaaagctgaattcatcaaggaatgggttggattttaaacagcaatattataggcttttggattgaaaatatttcttggattagcccaaacctaacaagcccaataaggctgtgggctagat

SEQ ID NO: 37776 - DNA, 704 bp, Oryza sativa
ttacatctgtgggttaatgcttcatgcttttaggattggacaattttaacacgtctgttaacttgatagattagttgatgacagaagtcagtagatgtcatagaaattttctataagggcatgatggatttcttcagtatgacatggaatttcataaattaggaatttgagctattacatatggtctaccactcttaccatgagtggatatcgtcttctgcatgtactttttaacacttggtatatccagggtgaatttttatgccgtggaagggcataacattcctcacaaactttgatatgaaataagcacatacaaagttacaaacaacaaacttgatatgaattgacaaatcaaatttttgagtctggaaaatgtaagcttaagaaaaagtattagttgtaatcctcagatgaagacaatgagggttaaaccacacagggatacaagcaataggagaaaaaggaaatgattttttaaaacataatgttgcaccagtgaataaccttaggagtcttttgcatcatggatgggctaggcaacacatattttccttcaccataggactttgggttattggatgttgttacaggggaacccttcctcccgctcgtttccatcatatccttctccagaagcaagtcagactttgaacttatggtgcctgctttagtaattctacattcatatagatgatttcagt

SEQ ID NO: 37777 - DNA, 671 bp, Oryza sativa
tttccccccacaatcttcatctgggtcattttgggaatctgattgggccgtcaattttcttgagatggaggggcacgtggtgctggtgttcatgaattgtgaactaactgattgcccactatcattattcccccttgagatatgaactttactaagttccaccaaaggagcttctctacagttctcagcaactgctgttgtagtcacgtgtgtaggatcttcaccaggtgtagaactgcaaggaagattctgagaaggcttgttaacagctgctcttgatgggtgtgtctcattagatttctcttcatgtgtatcagttgagagcaaatctactttattttggtccattcttgcagggctaaagctgaaaaaatcatgcataccgtcaaatgagttagaggaataatgtttgaagctgcacagttatcgttctttacattaccctaccttcccaaatgagtaggcctcagagtacaagcatcatgtgtttgcttttgttccttactaatgttacctcccagaacatcagagcccttaactgaaagaccttttcttggatccttgtcaccctctgaagagacagggttgaccttttctacaaatttactcagaccattctcctcaattcccaagttagcatcaagattgaacttgcccagccttcaagtaaa

SEQ ID NO: 37778 - DNA, 913 bp, Oryza sativa
gagcttggctagcttgagctagagcactcactctcactgatcacttgctcacacacacacacacacacacacactcactcacctctccaaccaacacggcaacacaccaacacaacacgagtatttatacatgaattgccattgccattgccatggccttcttcttgatccccattgtgaaaataaagccaagtgctcctaagctagctagctcatgagacttgtttctatgtgcatgtaagatgcatctctctatctctcttttcatgagaggaataaggtggttggaggcatgtaacatatgtgttgagtatagtacaaataagtggaggagagaagaagggcaacagagagaggggctatttttgccagaaaaggaggaatcgttttcatcccaagtacttccaatggtttcatgcccccatttggatctcctctctatatctacagcctttctggttaagctagccctcttgtctccatgcatccagatgctgcaggttcagtagtgacagagacacagagtgagtgagtgagtgagtggagcctagagaaaaccagcttacaattgcatgcatgcatgaagggaattgatgctgtgcatgcaacagtccaatgccagtatgccactgtgctagtgtgcatgcatatgtggctctcattgcatatgcatgcaaaaatcataaccaaattgtatctcaggtgttgatctttcagtttcctatagcaatgcgtgatatttgaagtattgttagtcttagaaatttcaggatggctagtgtcatgaggatggattctaatctctcgggtggacatccactcgtttcttgcatgtcacctaaatgattatgaaaaaatttcaaaacaaaacacaagatagtttaatatgtaatatatcacttcacaaacatgc

SEQ ID NO: 37779 - DNA, 661 bp, Oryza sativa
aagtttcacctcttaataatgagacctttgctgtacttttatttagtccttgggaaaattgccattttgttgtcgattaattctgataccgtggatgtgttagacacgattggttttaaagggcactttctgagctggaaaagcaacgaattcccttggtagtcaatgatgtcctcttcgatgcttcgtcatggggggctggaaattttctttgcctttcttctgtgggtaactgggtactggatggtaatgaaagtaggcatccaaaggctccaagcagtacaattgagtttgggagagtatgagtcttgagaaacaatctagaagaagaaaaaaacttgtttctagcttctagtttattttctagagttcgtaaatataagggctcgtttggattaaaggataggaaaaccataggatctgaaaagtataggaatagagaaggaatttaagcgtaaaacagaataatgaaaaacaaaggagtacaaaagttgagggcatgcggatcacagtaagttgactgtctaggacttgcatgtaggaagcaaaaaaagagcttgtgatggatgattttttcctggacttttcctgtgaaaccagcaccaaggaaagggaattttttttggatagtagttcctccaaaaaaaatgggggatccact

SEQ ID NO: 37780 - DNA, 711 bp, Oryza sativa
ttttccatctcacagacgacgacgtcgacgacctgaacccagcagaaatcagttcagagatgcatactggtcgtcaggatttggagcagggcgcgagaaattacggagctgagggaggcgagagaccgtggcggtgacctcgccgtggtcacccatggtgggttgtctgcagggtggggagtgggactactagcagtggctaggcttcatatttgtggttgtcgtcgtggctatatcctccttctgcaaggcctcgtgctgcagtccagctaagttagcagccgcaccaccgctcgggcttgtgacgagggcgccgcgccgtgtggcggaaggcacgcgcgcggcagtgacaaactgacaacgacgagggcggcgcggcctggcgggaatcgcgaccggtcagtcggtcgcggtttcatggcctcctctcactgacaggggggagccaaggcctccgccgctgagctaggttgtgttcttcctcttattttctcaacccacatctctcgttttccgtgcgcatgctttgatttataaaaactttctatataaaagttattttaaaaaatcaaattaattcattttttttaaaaaaagttaatacttaattaatcatgcaataatatgaacctcttctcctgaacacagcattaatatattaagaaataaaccaaaacagtatattaagaaataaaaaatcatttataagca

SEQ ID NO: 37781 - DNA, 2386 bp, Oryza sativa
tggttagcttagttcttgtgatgcgatcctacaatttaaacaaagtttgacggatttcaattgatttaggccaaattcataaaaaaatccaaaaatgttggacgagatagttgcgtgcgtccgtgcgtgagtgcgtgtgggatggtggggattggaaaatttcaaaccatgattggccctgaatcagataagtaccaatgcgattgtgcgattggagagtgcatgattggcctatcgatgcaatgaggtactgatgttgcttttctaatgctgacagacggtatcccttcttcctataaagttatcacccactaagtgcaattaatctcctaaaacacaaaccacagtgctccacgtcatcattaattgacagccgttggatcacttgattacattgcatctcaaccgttggatgaaaaggcggttgagttcacatgacgtgatgcattcacaggacgtgtgaggcagcgaagaaggcccatgttagcgcagcaaaggaggcccacgtcagtgcattgcagcccgcggcctaatcagtggtttagggttcggtgtctcatcctcccaagctgacttctcaataggagcggcggcggcgtagtgcggcgaaccgcctggtgcggtgcggtcgcgcgtggctgttggtagggacagcgcgctgcgcggtgtggtgcggcgcggtcacgcggaggtgttggtagggacagggccacgacgaggtgtggtgcagcatccgttggcatcggtcgcgggaggttgcgacggcgatccatgcaccgatgcgccgatgtggagaaatatcgggagtgatccatgcagcaatgcgccgatggggaaaaacatcgggaaacctgacgccatctatggtgaaatcaaccgccccctccctcatcctcaaccggtagcagagacggtaatcgcttcctccttctcattcccctcccttaatcacgtgcatttgcattagaaaccaccaaaatcattatgggacaggaggcgatggttaatacaatttatgtgcctcttgcaatttctcttgataaatctcttccaaaccttttgataatcctattgcaatccccagcgcaaccaggcctctcctcaaacatgtgtctccgtcagatatcacccattcatctggaagcgtcagatccataccttcctcgacatcatcctttcattctgcaaacatctgtactacactgccaaatttttatgtaagcttctttactgaatttgtatgtctgaattgaattggttctttgctgtcagtactaattttagtttgtgaagaaaaaaagtgtgtgaatttattatatttaataagcctggatttgacatgaattttttccatattctatttgagcatacattgtgatttgaaccaagcaagatcagtatgaaggttttgtaaattggtttctccaaacctacagaaataatccctatcgtatgcactgattgttgttccagttatacttatatgttctatcacttcaatttatttgagcagttggggatgagccaaaggattgctacatagatgtcctcacatagcaagaagctcctaacctgcttggtatgtcttctattgagctcacccatgctattcatgttttctgtgtctttttgatacaagctattttggtggaaaccaagatggaagggttagctactactgtacaaactgttttgaaagacactgactttgagttgattctatgtcagcagcacccccattcaattccctgctaatcccttcaaaacattcagaggactgctgagaattgcgcaggcaattgaattgataagacttgaagatcctcaggttattcttcagccattattatgttatgatgctttttttgccgcataagtatgatgaaatgagaatcttatagaggcgacctccttgctccgggtttcttggatgattggggaggcgatccatggagtcctctgagtgcatccatggtgacgccagcacccccagggggttgggatttctcctctggtgaccgttttcgtgatgaagtcttctccacgttctcttccccggtgcacttttctcgtttttttctctcgtcgtccttttcgtcttgtggtcgatttcccccgttcttcttttcggttgtgcacttcttcggttagtctagcgctgagagcttgtattgggggatctccgggtgatctgtttgtcgctaatcaaaaggatcggagctattcctttttggtttgttctaaagccatgggtatttggatctataatcttcattctttcatctgtaaagactatcatgctcgtttccatctttggagagaatggaggttcaaattggcagaaagaatgaaggctatggtctgctgaacagaattctgaatggac

SEQ ID NO: 37782 - DNA, 806 bp, Oryza sativa
ctgctcttgaggtccctaaaagaattgtgatttaaagggccgctgcttttgggggtgttggaagatcttggactgtttcggtctttctgtgtcatggggagatgcctgatatcatgcctggggatgaagatcttcctcctgtgaatcatattcctatccctgatcctgtcctacagccggcatctcatgtggaagtctttggggataatatgcaagaggatgcccctgctaatcagcaaatttctcaaaatagtgctctgtcagtggtggctggttctcataacatggtgctgcagaattaggggattatctcttttgaacatcttgtgcagcctcagtttcttattaatccattctttttgaggattctgtctgcttttaacatagctctctctacttgggaaggctctttgtctgttcagaatcagagtcccttcaggttgctgtagctctcacctcagtggtctctggcattgggcccccctcaggaccttcagattgtgcccttctctttgcctgttattcatattgttcagtttgctcttctagcagcagtcctgctggtggttggggttgaagacagtgagactcaacagaccatgttgggccaggaagatttggaggcccaacattttgaaaatgctgaaataattgagcccattagctgtgtcccccctgtgtaacatgtctcagatctgcccctggacccttttcagcagaattggtcctcttgtcggccttccttgaagaaaagcaaaaagaaaaaaggtaaaactatggttattgtggacactgatcgtaggagg

SEQ ID NO: 37783 - DNA, 1012 bp, Oryza sativa
acatgtaagtttcccgatggagggtggcactagtgcctacctgatcgtgggattcccgacatcacggcgaagttggaggcggcagcggacttggtgacgacggcagtcggcggtggtattgggtagagacttcggctagtcctccatccctccctctatcatcgaaaaatgagggttgatagcggtgggggctagccctcccccatgatggtgggccagttcatatgcatggtgactgtggtgaatgattggttcggtgatggcagataaagtcggcgatggtggaggctcttcccggcggtgtcctagggacggcgacactaggcgagctccagcacccgaatctgactatggccaagccaggattgcagaaaggtggttgtaggtgacatggatgattgacaatgtgatgatcatcgactcgcctaatgcagatgaagacaagaacaacagaggctctcagcagtagctgccaagcgagcgttggcgccaatatatgagtgcgggtaggtgtggatggtggtggagcatctctggcaagctcatggcagtaaaggcaggtgcatgtcgtgctgaacggctctgtgtgatgctctaggaacggccgggagtttgaaagtttgcgggaaatgatggtggtgcgacatagcggattcgcggcgcactaggtagtttcaattctccccatcctccctctcatgctgtgacaaaaggagtaagtcatctttgatggttgaagctaagtcttcaagtagctttttttttcttgttttcttctttgtttcttctatgcggggtttagagtctaaataactcgtataagatttgaatgtgtatatggttcatggatatagagaccaaatttaagaaaatccatgatcttaaaaaatgttgcattaaaaatatgaaggtttgaattggaaatacatacttccttcattttaggttataagttgttttgactttggtcaaagtcaaactgtttcaagtttgactaaatttatagacaaat

SEQ ID NO: 37784 - DNA, 711 bp, Oryza sativa
tatttctttttatgccacatgtagccaagcctcctcttgctctatacaggttcaaagtacgctaaacacaacacatacgcatatatgctctgacttttcaagctgaagtgttttatatgctagctacgcgttccacttgtcaatctcttttttctactctgaaactgcgcagagatgatcactccaacattttgactgtgtacttgaccatatcaaagtgctagcttagtatattaattccttttgtttggccatcaagttagtaattaattccaagttgatcatgcagcaacaaaaactatctgtcattaattctgaagaattattaatcctttaatttcaagcttgttcagttctgattgattggtttggttgcaggtgagggagggcagccgtgcacgatgctggtgaggaccctgcattgggtggtgccatcctactcaatctggggcttgcccttcttcctcttctactccactcgcttctcccagctcttctacgagaggcccaaccagggcatcttcagatcactcctctgccgcctcatgaccccattggtatgtacatactcactcgatctactcatttcacgtgaacatcttatcagaaattaagttcagaatgtgcatgctcaagactttgacaatattattttgtttgtagtagctagctagcttgtcagcatcataatttaccatgtttttttttggg

SEQ ID NO: 37785 - DNA, 666 bp, Oryza sativa
ggcaacttggagcccaacgaaatcaacggcaaaaactagctaaattcagcaactcttatcaaaatcagatccacaaaaacccccatgcgcgcagaccaagcgcaccaaagcccaattcaatgcatcgacaaatcatctacagcgatctagaaccatcggcgccctcacctcccgcgagatcgacgaaccgataaatccagaggactcccaacccactcgcacacgtacgacacgcccttctagaagctcccactccccccgaccgccacctaccactccggcggcgcaccaccacgcatcagccccctcaagtgtataattctacctggaccgcgcgattccagaagcttctagaaggatcggagatctcacctgcgccttcttcctcctcctcctcctcctctcctctcgcccaaagttttttttctcttctctccttttctgcggcgattttttttagctcgctctctctatcacttcttgttcgctgtgttgactcgtagccttatattattcgtggacgcgataggatcccacgggcgcctcccggccgtccgatcggcccctgcgcgcgcatccggccgtcggtcgccccggctaaagcgtactacctctggagccaaaccgaaccccgcggcggctgacatgtggggcccgcacgtgaaa

SEQ ID NO: 37786 - DNA, 1652 bp, Oryza sativa
atccaacctcccgcaccaaatcccaatccggatcccccacgctaaaccctagctttaaacccccgaatccaaccaatccccgcgccgattcccgccatttcgcgcacctcgtgccaggatctgctcctgggcggcgctcttttagaaaaaaacctggcagatttcgacttctgcaatggagcccgtcgatttcggtgggggcaaaggttatggaaggaatctctgtctgagcaacgatctgatccttctggagtaaggttttgtgctgggtggatttgggattcgatgtggctggagttgagctcatctcggggagaagggattcggacggtgtttgatctttctgtcgtgattgctttgcttcgggtttgctcagcgctagaagatttgctcgcagaatcccgcgcggagttttgaagaaagcttggtatttcctggttcgttgtggtttgtaagcgatgcagttcgaggacgggggagatgttcatgttggtgccggtgagggtgaagatggtggcagggtcacagtggatgagcttaccaggtgaagaatttttctttcttttttatttttaccgtatcctacattcagcagttcagcatcgagatttcatatgtgcaatgtttgggtgaaaagctaacgtgccaagctagttataactgtagctagggcctaccctccataatatagttttttttttttgaaaccgtccctccataatatagtgacctagtaacggacgagacatttcatagtacaataaatctaacatgctcttgtctagatttattgtactatgaaatattgaaatgtctcatccagtactaagttgctatattattagacggagggagtacgagatatcacgagagaagagagctctggatgttagtactatttagtacccttttgcagttcttttcttttcccaattctagtcttctgtagttatggttaagcgagaccggattcaaatttagaagagtaacacttcctcaagtcagtattacttgtcgtttcagacagggaaatactactaagtgcaaatcaattccactacctgaaacatcatatatttccgtccggagggagtagtagctgatcatcaatgccttttctcagatcgggttatgaaagcaataaaattatcaaaggctgtctgtcggtccatgcatatggtggaatgttagtattgcacactgactacttagcaggttggtgactactatactactcagtactatcaacattcagcagcatgctggaaattgatacagatcattttctcttgaatcaaggactcaattattcatggtagtgagacgattcctaacttttatgttatagtttttcagatgtctacgttgtggcatcagtgcaaatgcgacgcctcatatgcgccgtggaccagagggacggagaactttatgcaatgcttgtggtatagcatgggcaaaggtattctaattgttctccaccacttcttgtttatactcgctccaattccaaatgtaagtcgttttggttttctacatgcagggaaaagtgcgaaaagttattgattctgatacccccatggataatgccatgtttgcacaaatggttccagaacttagcatggaattcgatggcggagataaagcatatgagt

SEQ ID NO: 37787 - DNA, 553 bp, Oryza sativa
caccacatctgctttctttactagttattaccctgctatctaaccgaggaccatatgctacactagagaagtgatgaattaagtgcaaaattcatgaaggaatattaactatcacagcacatcgaaatacacctacagctagctggagggactaagctttcccaatcaaaacaaaacagaactaatatgagatgatgggtttgggaaggggatcaatacctggttggcgagggagagggagtggtactgcatgcgcgggctgcgcccaatgtctcccagaactaccaccgccgctcgcttcctcctccctgcctctagtgccacggccattgcctactagccttccgagtttggaaatttcagattcaaccgccaccaagaagtgaggttcctgaaaaggcatttaatttagctaggtattagctccaaacatccaggaagggaggagtagataaaaaatggacaacggttctcttggttatttttctgttcaccgcatttatgctcaattagagaatacgtctgtactattttacatcaatacaacaatgtt

SEQ ID NO: 37788 - DNA, 682 bp, Oryza sativa
agaatcaatccaacatcgtgtgcgctagctggtgcgagaaagctaaacttgctcaatctgtctgcctcttttcccttttcattttccctattaatgcaacaaattgcttaattatttacgactaatgtttttaataagtttgatcatttatatagtttattaaaaacatacgtatgaatgttatttattttattgtgactcgttttatcaattaaaaatattttaaccattacttatactactaacttataacttgtagtatttgttgcacatctaccctaaacttttaaatgagaagaatcatcaaacggtatatccaaaaaccagcaacatcgtctataaaagagaataaagggagtaatttaaaaattattataataaaattccacgcacgttgctaaacacgtgactaatttaatccggcagcatgacgccgacctcacgcggcaacttaattattttctcccctctcccttttttcttctcttctctgcaagttgggctacgagtcgctgtccctgttccccgtttcgatgaaattaagccaaatgtgcgaacacatgaccccgtacaagcaagcagtaaccaccgctccaaattaaattaaattagataagttaacacggcttaatttaccaatcaattaggccggatatgattattgttagtataattaattaga

SEQ ID NO: 37789 - DNA, 695 bp, Oryza sativa
cccatcaactaaaaacgcaactaataattcttatgaagctcttcatggccaggtacgtggacacctaaaaggccaaaagctaccaactttcccatttcccatgcctcaattccttagggagaggctgtgagaaatgcactgcctaattcatggaagaagacaccatcctatatgggtttcttcatttcttgacttaatggctactaggaaaggagagacctaacaagccaagaaacggcaattcttgggagggatgagcattttggtcagaatacaactcctaaatctacaacgcccaacatttgtagaggggctcttaaaccaacttctgttagttatttggcacagaaacgatatttaatgtctcatacagtcacttgcacgaaaatttccatgagaaaaaaattctccagcaaaattgtccttgtcggaggtctttggtctccaaactaagtgaaggcgttgattgacatagtaccttgaggttaccaagaaggaaagcaatcctagtacgcgaaacaagaaaccgaaaaaaaagcaaaggactaagttacacctccttgttgaggaaagaatttcttaaccgaaggattatcccagaaaagaaaaattacgaaagcaagacgcaagagaacttaaaataatctatccacagccttctctaagaacttccatttacccaatccgcgtggttt

SEQ ID NO: 37790 - DNA, 638 bp, Oryza sativa
tgacatagtctcaaacaacaccctgcaaaatatagctggagttcaaacaggactgcttggcttgaagctgatactgcaggtagtgttgaattataatgcatgttttttcatggacctatcacagcatacatgcctatttaccttatggttgaacttgtctgtgatgacagcaaacatgtttttggaatcaaaggatgaagctcatgattttgcaagcctacggcatgcgcttctggaacaggtgcatatgctctacttttcgatactaaattattgttacatattttaaaaccaaattattgtgcatgtgagcatgttgttaaataaatattgacagtattattattctattttaatgggactaaggttgtaagtatcgacaatattagtaatcatcaagccctaaaaagttgtaattgagttacatggttggtaacataaaaatactagcaagaaaactacttcatatcttgtcaatgtgacaaaaaagtgctctgtatcaaatatttcacagaatgagttcttttggtgatgtggtaggcttatatgttatatgactagttttcaaatccaatttggtatgacttttttttttttttggggggggggtgatggtggcacaagattattcattggat

SEQ ID NO: 37791 - DNA, 533 bp, Oryza sativa
gatattgttgcatataggagattcaggcacgcggttggccatgtgaccgtatcctcctttttttttttccgcttttgttactgcacgtgcacgcacaccggccagctgggccaggcccttgtctctccgagccccgcctttcgggctgaattctaagccaaaatggaccaggccgtacctggcctccatgctgatgggccggcctctccagctcggaggcccatatttgttctgccgtcgccgcgtcgtgcggcccgggtctcgatcgctttcgtgcgtgcattcctcggcgagatacacgcgcagcggccactggcttagctttcacagctcgaaagcagcttcccccccggagctttccagctgcacacacatcaggatgtcactgctgcatccatccgatccgagcccaccatctctgtgctttgcaagctcacgcggtggtccgtccagccgaaagcttcatcgacaaaaaaggtctgatgtcacgcaggaccaaagaacagcctccacctaattacctctgttaagtt

SEQ ID NO: 37792 - DNA, 1380 bp, Oryza sativa
ttctattactcacgttttatttccatttcagaaattaaacaaaaagctcaagatttatcgtacaattagatgaattaaaacggtttttcagatctctagcataacacctgttgctaggataagatagataggaaatattttgacattcataagttggagtacttacttgttttttttttggataatgggaatggcttctacaccaacgggggtgtatatatatacaaccattggagtacttagttgttgggctctcatatgtttagccattatcggctaaccgatttactaattatcttggtatccacatcacttgcaacgagtttcacgaaatatttgcttgaatttgacttagcaacggtggtaggctccaatgatatggctcctgttcaaagtttctcctcttagttgtatccacaatatattgttgacgtacaaagttaaaggtaactatttacacgtacgcaacattaattaatcatggaaaaaaaagaggaaatatgcattgtattggaattaagtagatgttctgagtgtctaaatacacatataatgcccataattatatttttttatctattgaaccttttaaatttttattttttaaaataaactatataccaaaacttccaaaactaatcttttggccacaacagctaggctagaataacaaaacaacatgcctaattttgtttcatcatgccgacttgactgacgtgacaagggttttgtgacttttgtcataattaaggcgtggcaaaacaccgggggcgtaccatattgttgtttcaccgcttgacaatcaaaagcaaaagcaaatagcttgattctgaaagcagattcgtagaaacgaggcatggtttctaataaaaaccaaaagttagcaatgaagctgcttttgtggggtgatgatgttgatctaaaactatcactagaagtattatataaattgcacatttcgcatgtttcaaaatctgaattcacaatcagattttaagaatccaactcctgaaaaatcacaatccagagacaagattgtgacaataaaaaacaaaaataaacggaataatgtaagtaatgggtttgcaagatgatgtgttcggttatgtgcgtaaattaattatggaacggtcgttcagtgcatgcatctcccacagccaaaaattaaattttaaaacatggtattagagttcattttaaagttttttcatcttagttcattttcagtattgacttttaaattactaagaaacacatatgtaaaaggtgtactcataaattatttttagttacttttcttttacggtttatctccatacagtaaacgatgagaagcttagctgcttgccttttcagaggccaaaacgactaattaaactg

SEQ ID NO: 37793 - DNA, 691 bp, Oryza sativa
gtcacagtggtacaagactctaaaatgtgattggcatgtctcacttgagctctccaaaacgatgccctcaatcccacatgaaatatctattttttgatgaatgaatgatcacggattagttacacataggattaatttatagttgtgtacttgtgttgagttgtacttcctccatagaaatatattatgaagtatgttatattttggaaaaggtatagattttcatcaacaattaatcttaatcaaattataagtatatttagtatataacaattatatcaatcaaaaatatatatcggtttgtaaaaatgttggctccatatattgtaagaaaatctatttttatgaacaacatctaaaaacttattcaaactgaaatgcatctatattttttcacataggggggttttattgagtataagtcggacacaggcacgacagttatatttttaattttatgtagagatgaaacatataattatggtttgtattacaaatcatattaattttagaccaaatattttattcatctatcatgcccttccaattgtttcaaaatatatgcaataatattgttggttatatctaagatataaaaaaaatattgtgtggataagccaaaatatcataagaagttgtacaaattatcgcaatccacctcaatggcaaacagtcttaacctaccaatata

SEQ ID NO: 37794 - DNA, 921 bp, Oryza sativa
ctacacatggcctaatttttggtttactctggccggctacggctagcggggcatgtacagtacgtacgcacgcacgcacgcacatggtggttaggtttgggcaccgtttgggccctcatgtatgctccatcgtgtgtaaagaaacgtgtcaagcaagtgcgcccgtgtgcacgttgagtctgaggctggaggctgtgcacgatccaaaattaggtgggggtgaaaaagattttcttttgactatccgtttttctacaggaaaccctccttttctttcgtctaaacaatattgactgtgactaaaacgtgaagattggttgaagatggcattttaatcgattgtagtatattttttcttggcatcaaaccaacttatatataacatgtgttactgtgcatgtggcacctaggtgcattgatggaatgtttacaatgaacgattcttttctttattttttttctggttatgacctcctatgattgtaatcttataattttttctactctatcaatataaactttgcactgtttgatgtgagccgttaaaaaaaacagcctacgcaaccaagcaaatccatggttcagagacactaaaaaatgaaaaaaaaaatccaattccgtcatacatgcataatatagagttgtctcgttgccttaggaaaaacagttaagctatgcgtcatgtttttagaataaaaagaaattatttgatagttgtactccattttttccaaggtttgacgagaactggcaaactgttataatttctcagagagtctatgcatgcgaaggattatttttcgacgagaactggcccgacgtaaagcttctaggaaatgcatgagtgcacgaccagccgtctcgatgaatattttgtacttgcaaggttgcaaagtgcacgttctcttaataaaatacttc

SEQ ID NO: 37795 - DNA, 698 bp, Oryza sativa
tgtcttgctccttgtgatgtgattctgattttgcaggacaagttgctggaccatacgagcgtcacgcacttgttcccgatcaccaagtacatcggtctgctcgccactggcctcacaggtttgtttgctctgcagctttgcttcactgtatataactagtgttatgtttttgtgcgtgttgatgatgaagaaaaagttgttttttttttgtgtgtgtcttaggtttaagattaagttattccagatatcaattttgagatagatgctgtggaaatagaccacccacagtgattttgccggttaattttgcgatgatgctagagctttatatagggcatggttctcctggttgttttgggttgtacatgaggcactggatggtatatcagtatgtttagctctgtttgttttaactcttagggcaatggtagaaagcactgccctttttcttttggggactgcgaaaacaccacaaaatttggatcaaatgcaagcataccatattaattaagctctttcatatttgccatcagtttccttatgaaggctcttgctttctagtagtatatatgttgtagcattaggttccacataatttgttctgctagtgataatttggcattgagaccatattttcttattttgtttttcctgaataccttcattcttcattgatcataaactttgttttccttttt

SEQ ID NO: 37796 - DNA, 652 bp, Oryza sativa
ccgggtcgcgtactcgcgtcgcgcacgcgggccatgtgtgtgtggatgcgatcgcgcgcgcgcgcgcgcgcgtcgtctctcctcccgtgtgcggtgcggtgccgggttgttaggcagctgcacggtggcttggccgcgtcgacgtcgcggccggacgcgggtcgcggggcgagagatgcccaacaattaggcgctcgcgtgacggaaaggcagggctggcacgggaggatgccatatgcagatatgctagctgcgcgatgattattgatgagtgttgagtggtacgcccagctggtgcatatctgctttgtcgcatgggaaacaaaatctagcaccgatgggaactcgagagaggtgccggccggccggccgcgcgcacatgtaacatgttgcccatgatttcgccagttgattaagttattaattaacttcccccttgttgatggattattgattggtcccgtacgtcaagttgggcagagaaaattagcgagcaatacacactgtctagcgcatggggcacttccaggagtaaggctaactgctacaattaagtgttaacaatgcaggagtatgtatgattgtttggtattagcatctgttgccggcaatggtcactagcaataatatcaatatagcagaacaactatga

SEQ ID NO: 37797 - DNA, 889 bp, Oryza sativa
tccctgacgaacacaccttccatccatgggaagtacttgggattttggaacaggcgaacgctggcagcagtctgaccttggggcaacgggttgtacagcagataactgtgcagaatctcatgtaatcgtggctatgtgacgggctgtgatcgccagagtttttatcacgcttattgtattgtttccgcaaccgctagcagtagatgcggcagccagttgtctggccggctacccaacgcttcaagccgaagacggtggcctgaacctccctcggggaccgatggcagccggaagatggcaggaaatacgacgacgagacgcatctcgtgcccgcgatcaattggatgccggaacgcgtgttcgcgaccacagctgggtctctccaagtccacgggaaccatggggggctagcttatagctctcgagtcacgagtccagactcgatcatccacaaccgagtatggaatagtaggtagcagagctgtccagaaaaacgggagcacatgaacgtcgacgcctcctgtttgggcctcacaagtcgcgtcacgttcgttgggctctcaggtttttggtaagacgggacaaacgttccgcgagacacacagctaggtacacacgtactacgtacgtagcgtcgtcacacgcagcacggctcctatttatgtacgtaccagccgcacggccgtacaatacggatcacaggatgtttgcctcgtactaatgtactccgtactgttcttcggaggtgctaccgttcataaggaaaaaaaatggagaaaaaattatgcaacttgcggtagaacccagtcagtgtctcatactttccctcgcgaagagggaaatgagaaccgtactcatttgcgaattgcgatgcggattcaactagctg

SEQ ID NO: 37798 - DNA, 570 bp, Oryza sativa
cgaccggcgtaacgcgtactcgcgtctcgtctggctcggcacggccgagtcaccgtgcaaatccatccttttccagacgaaaggtagggagatggagagggagagatagtggccggccggttgcttcgatctctcggcaaaaaactgcaactgtggctgaaaattatctgtcggaagaaagggaaagcacccagacccgagccataccgatctttccctattgcacatgctgtaattgtaattggtctctgagtctctctctcgcgcgcacacatgacacagctagcgccacctaaagttgattgcaattttgcaacccaactagcagtctcaggctggtaccgaaaccaacaagaggtgtttcagctgctagatattttccctcggccctactggattacagtgtcagttttgtcacgtatttggagcagtatactactaactccgtttcatataataaattattttaatcttttcttgatctaatcaaatttatttaggtttgattaagtttataggaaaatttgataacatatatagcaccaaaattagtttcattagatgtaacat

SEQ ID NO: 37799 - DNA, 644 bp, Oryza sativa
acgaatcgataaaatcagaaatcagggatttcataatttcattagacaaagctgaatacccagcttttgctcaaatcttaccacaaatttaattaaacctaaacattagactcctatggattggttggacaacttaaaaagaaagttctcgtggagcagtgtagatcttggatgtcgatagttttgtatgcgagaactaatttcctgagttttcttcaacatttttatgttgttgcaaaactttggtcgattgtactgaatattatgaatattattattgtggcgatacatcatgatagttcacggattagagacaatctcctgtaggccttgggccagtctccaagggttgaattaattttcatcatggagataattttggcaaaaattaggctgggcctgcccgtaagagggatcagaaaagttgggtgatagtacttcctccatcccaaaatgtttgacgccattgatttttttaaaaatgtttgaccgatcgtcttatttaaaaaaataagtaattattaattcttttgctatcatttgatttaatgataaatatacttttatgtatacatataggtttatatatttcacaaaagtttttgaataagacgaacagtgaaacatgtttaaaaaatcaacgg

SEQ ID NO: 37800 - DNA, 530 bp, Oryza sativa
tgagtggtggggagaggataagatggaagagaagatatgataggggacttagtttattttatggaggtataatttttgcaggcggaccacataagctaccttgtgcaaaaattcaaaaatcatattttttttcaggcggaccacttaagaggtccgcatataaaaataaaggtattttcgtaggcggacctcttaagtggtccgcctggaaaaattaatttccgcaggcggatgatgaaaattcacctcggtttatattttcgtaggcggatatttggctctgggtgtcatatccacctgcgaaaataaagatccaacgttggcgaaaatgctttttctagtagtgaaatatgtgacgctgcagctagttaataatgccaagtgatacttaatgatcgatacaaatacgagactgtgatactttatatcctgtggaaactgatttaccgctcggggcaagcaacatacagtcatcaaaagttggcgcatacatggatcacatgcacgagacaattaccaacgattaatat

SEQ ID NO: 37801 - DNA, 1276 bp, Oryza sativa
gccatgcaagtccacgtataggacaaagactcagtcaaaaccggcacgtaggcgccacatcagtcaaacccacctagggatattgtttgcaccagttttaatagttaaaggagtcgatatacccggttttatggttggaggatatgaatcatacttgagcgatagttcagggagtcaaagtatactttttccatttgttttctatcggttgttagtatatgctctgtttctttgtaaaagactctgtttcttctgtttttttttctcaagaccacgattattaaattttggatatgacttgctacatatgacagctggacaacatctagcctacaaaatgtaccatctgcgagcatgtgaaatgtttgcatcacttattgcctgatgtggtgcaatgcgttttttctttaaaaggtattttaaaaggtaggtctgacatctgacaggccacttataattaaatcttgattattactccctccgtcccattttaagtgcaatcataagtttctgtgtctaactttaatcgtccatcttatttaatttttttttataattagcatttttattgttatgggatgataaaacataaatagtacttcgtgcttgacttatgtttttaaattttttttaataagacgaacgatccaaattagacacggaacattatgactgcacttaaaatgggacggagggagcagtgatctttctaaaaatgtactgcacgtgctctcgatcgataatatgaatgaacctatgatcttttccttcctcatacaccatgcatttgtgatccccctcaaaaaaaaaaacttaacctaaattaagtgaagatatgagagattagttcacatttattgtaataggatggatcatattaccatctaggttatttttttttaagaatggagtatgttttatcaatatatttaaagttaattatctcgttcttcgtgaggtcctggaattatctcgttcttaataatattcattaattggacgaccttttcaagttagactccacattttgcaatatcagagtacttcttgtattatttctatatatgcactgggcctgccggtttcattttaattatacgttcacatatattgtatattgtatgcacgttcatcctagctagctttggcaataattaattaattatcacatcagctgtatttttagataatgtatactcctcgatctgcccgttccctttcatatatattatcatgtgcccgtataaatactcatagacgatgaaccatgatcgtc

SEQ ID NO: 37802 - DNA, 675 bp, Oryza sativa
aagcagcacaggcgcaaggacgaagaaccggcgttaggaaagtagcgtgaagatctgatcgtggtctcaagtttcttaatagcacaggagaggaatccgcccgttgccgcagtaatggcgcaatcaatgcgtattgaatcgcttgcccattacagaggcaatcacgcggggttggattccggtccgttgcaaaatgagagagagagagagtcgcagtcgcaacgcacgcctcgcccacggccacgggctcggctcagcgcgcgcgcgcgtgtggctttccgatccccacctcaaccggtcaatagggagcctccaataactccctatttaagttcagatactccacttttaattctcaggatggtattgttatccttaacatttattatgggcccttgagattttaatagaaaaacgggcctagcccatttattctaacaatccccaccaaatttcatggctcataagaaatgttctcaaaattgaacctgtttgacagaccagtgttttggtggagactgttaagttgaacttccacctaggaaaagagctacatcagaccataattgaataatggactatgccttaaattgtcagtcttgtgtgatcaggtttcagtcaaacccttgactggtactgggctgccgtttgcatcccctctatttggagcatata

SEQ ID NO: 37803 - DNA, 577 bp, Oryza sativa
gcttagttatatacgccctcggaatttgatgcagcgaattatccaccctgtacatttgttcacgaatgctggtgcgaattgaatgcatgtgtatcacaattaattcacagacctgcgggtctctcttgtactacatccgtactaaaatatagtaatttttagctatatatctaaatttatagttaaaaatatttacgtttgagacggaggaagtagtcttaaaaaaaattagtgatcggccgttgcacacttgtacagctgactacagtggctgtccgccatgcttgtacccaatatttttatgtttataacaaatttttgtattgttcttttcaggccggtactacaactaccaaaaaggtcaaccgtatggtgctggtgcaaacaatgtggagatttttacccgtgtgccattaaaaaacatgatgcctgcctctgtgccactaaaaagttcgagcctctttttatgccatcgtcaaactttatcgcgccctccacaccattcagtcctttttagtcctaacggtgtcaaacagcgcaaccaaatgactttgttgcccttagacttgagagccca

SEQ ID NO: 37804 - DNA, 1235 bp, Oryza sativa
acaatggctattgaaaggggaaagatggagatgcaagagaggagcggtggtgccgtggcggcggtaggtggaggggaggggataataacaagaggaaaagtagcctattagggttaggttgacacatcatgaatttcatacgctaggggataatctgacggttgaaaaaacaacccgctttttgaataaataatttattaattgtggcatcatttcttccttgaaaatgtatttaacatttcaccgttgtattgtaatgattatggtttctaaaaaatatgctaatatgaaaagagtttatcccttatcagacattgtcataccgattcatagttgatcgacttgcccttcctataccgcggatgtagcagttactttcatttttctgaagaagtgttctaatgacttataactctcgactagaaacttgaaacttgaaattccaactgatttaaactcccaattgaaagatcttaaaacttccatattatatgaaaaaaaatcataactttatctactccctccgtcccacaaaggaagtcgctttgctcagtagaaaatgccccaaaatactcgacgctgaactttcccatcagctagtagtagcgcataaaagtgacagtagctaatgaagttttttaaatgatgggaccggttggattactataatccataaagttggtaccaatgtgtaccgctgctgcaagcaccaactattaattttatcatgatttaaatgttcttttttaagtagatgtggcagtataactgattattgcagtgttgtagcgtgctactctcaagcctccgcatgattagctgcaatcctataaaacatgagcaatatgtcattttcacctaactctaatttggctgacaatacctagaacgacatacttcgtgggacagagtaagtagttggtttgaaagtttgaatcaaaccttggactttcaaccaacagatttgatataatctgaagatacattatttggaataatgaaaaagagaatatgaaattccactctcaagtctcaagttgtgatttttcaaccatcacttgcggtaataacggcggaggcagtgaagagtgaagaccgaagaacaggactagaggagtcgcttttgttgcgagatcactgcgccgtgggcccacactgtcagcctctctctctctccctctactcccaccatccgggcgaaatcactcgagcttcacacctgtgtcagatctcgg

SEQ ID NO: 37805 - DNA, 890 bp, Oryza sativa
ctatacattggttgataaattttctcctaaaaatttatttgggaggtccaaatataagtcaatcatagagtaattaaattataacgtatgtataaccacaaaataatttgtatgtaattaaaagtctcacacagtaacatattattttcatgaagcagaggtcgctatgaccaaatctccttacccatgtacacgctatgatattttgtattcctaacttaacggttttaacgtacaagttacattgcagttttatgtaagttgcaatataagtaattttagtgtatttatatatgatgaaattttagaaagagaaaatttatcgacaactatatagaaaaatcattctactgaatattattccagtcatacaccatgatacttcagggactacaaacgcatgggtaaattttatagtgcaaaccataaatacattgaaaatctgaaaactatatcgttggatcgaaaaatagacatttgaggataaatttactcctaataaatttttacttaggaataaatctgcgagttgagtaaaatttttacttgtgatgacgtggataaatctcagacatctatattttatccaacggtagttttatgtttccactccatatgtagaagatgtggcgtctgcccaaggaggaggtggactggatcctctctcagttcaacgagcctgtctgcgcctggttccgggagctgaagcgcgccaacccgtccactagtacagatccttccatctgtgacggcccctaacaagactggaattcgcgggccgtcacaaggaagtaatctcaatcgggccgaagtttcgcccgattgaaatatggtcgcacagccatggtagatcggcataaaactaagggtcataattgaggcccgattga

SEQ ID NO: 37806 - DNA, 915 bp, Oryza sativa
gtgacttgattcatcatcaaatgttctttaaacatgacataaatatttttatatttgcataaaaattttgaataaaatgaattatcaaacattggttaaaaagttaacggcgtcatacactaaaatatggagggagtacataagcacaattcaataaaatgaatggatgcaggttaccgattcaacactaggaagaagctaatttatggatcaacaaacagttcagctgtgcatgacatctgttgaacaaaatttaagtgtgttgttttgaccaaccatcattgttgattattaattcttctaaactgcttggtttacgtgctctgttgttagtggttagcttttttttttcttttgttgcaggaagcctcgtacagttcagagcttatgtaaaagcaaagaaaaatctttgactaatcgtgattagtctgtgaatgggattaggactgatggcattaagcattttttccaaactgtgctgttttcttcaacctgaattttgcaagcagagcgagctgactatgtcaccgagcagatattcagcagtgtcttcagctcttagcgattgcatcattcaaatgaatggtgttcttgcgacaaaagatggacatacttcatttttaccttctgtacatgctacccaaccaatcttcgaactaaatctcaaattacttgcctcttgcttctgtttatcaacaatcctctgtatttatgtgcttctgatgtgatagatataactgcattgacaagagaataaggatccactctagtcattggtaccctaaatttgtgaaaaaaaaaaacaatttctgtttgtaccccaaatttggacccgttcatctccactgtatttcttggatttttctgctgacagcgaggataacgaagtttggaagcatatcaagaggagagcag

SEQ ID NO: 37807 - DNA, 589 bp, Oryza sativa
atatatcccaacctcttgtcaagtcccagatatatcatgttcctgccagataattctatatgcgacctaactagcctgcactccaacattcgcatatatatctagtaatttttcttatgggtttggatgtagccgaactgtcttggagaactgcaacaccctagtgtaccatgtgtgatgcggttgttttcctctttcttttttttaaattccttcacagcagggggtttccctagcatgcacatatcaaaccatgttatattgggcgtatgaacaagtacgcgctcgaacttaaggatggatgtgacgagatcgatggaccctatccaaacaaaccagatatgcatgaacatatgggaaacatgaggggatcaggtggcccagcatgctatagctagaagtcacatgtttactgtagcgtcacatagcctcacatatttactatagcatcacataggctagtcatggattaattaggctcaatagattcgtctcccgaattagtccagggttatggaatgggttttgtcaatagtctacgtttaatacttctaattagtgtccaaacattcaatgtggcagggactaa

SEQ ID NO: 37808 - DNA, 1672 bp, Oryza sativa
gcccacgagaactccagctcgtcggagacgggcggtgccgcggccttgaactcctccacgagcccatgcgcagggtctgcgtcagtgcccggatgaagacaaggagcagcttctcggggcaggcggcaccctacgcacagagcccctccaccaacgctcccgccgcggacaccctgcccttgtcctgcgtcaccgctgccgtcgcgtcgttggccgttgccgttggacctttctgtgatgtcgtggctcctggagtgaggagaggggagagaggggagatgggaagagaggaggaagaattaagaggaggggtgagtatgacatgctctccccacatgggccccaccatttttaattcattctttgggtgcaactgacatatggggtcacgatttttattattttataaatcaaattgccacgtcaattccacgttagatgaagaccgagtcaatatagctacgtaggcgccacgtcagctaaaacggtcatccaaactaccatgggacctatatttcatcggttttgatagttgagggatccgttgtatctggttttctggttgaaggactaaaatcggattcgttgacaagttaagggacctgagataaacttattccaccacagaaaagatgacgagagattagctgggcctaggatggtgcctgccatgcgctgttgctcctgcggtgtgtgttagatgggctctctcatgggcctaatacagcagtagctcatcgatgagccttatgctctctctatttacttcttccccgacaaaaatcggtttggaaatttccgaacgtaccactccataaaactaatataataataatattcttaccgatattacggtatccaaaatttaatttttctaatttctatgtattgaagttgacactaaataatatccataaatataaaaatttctcaactgttttcaaccgtttatgtaaagtcatagaaaaatatcgtttccggttatttctggccgttttcactcctgtccataggggccacagcactttctgctgatcagggaagcaattttggagcttgttcattagctttgtttgtttgcttcgttgcatgagaaatttgtaatgtcagacaagttacgttttccgtaagatgatttatccccatttcaccctttctttctttctttctttctttctttctttttaaaacacaatacaaacataggagcccacaatacgcgtacactcacctatacgaacacacacgtacatcctatctctatgagcacccccaaaagactgggtacgtcacctaccactgaaagaataattaaccgtaaatagaaacaccccatgtcaaatctaggatttgaacctggataagttgattccaccacaagaaacattaatcggttgaaccacgctcacatccgccatttcgtcctttctgaaagacgtgtcgtcagagcaagcagattatatttcagaaaaaagatcgtcggaaagtgttttatttactcaatatctcaagagtgtcaacccaacaatcataaaaagttttaaatgaaatcaacatcatagttgtttcatgttgcattaaaaatgaactcctatccttccccatccttgcttcagatgctgccggagcgagccgtcggcaagccacgtggcgagctaggagggaggtggcg

SEQ ID NO: 37809 - DNA, 1706 bp, Oryza sativa
  unsure (1)..(1706): unsure at all n locations
ctatattggttggggaggagcgcccataatcagagccccgaggatgtaagcttcggctgaacctcgttaacaaatattgtgtgttcttgtgtcgtcatctggcatgtcttgggtgatcaatgactgaagcgatcaggaaggttagtcgtcgttccgctatatcgactaacttttatatcaacgaagataaggtaaggttcttcaaaatagaaataaccctttgcacctttgcatcaaggagaaagcactatactgtacaccacctaggatttattcaaaacatttttaaagagccaataattccgcgagttaaccaaatggcccagcacacagccgcacccacgaaagccgccttggccagcagctccagctgcactgggtcgtcgttgttgtcgccgctgaggagtggggaggtcaaaagggtttgcagtcgccacactcgccgctgagcttgatggaaacaggccgccgagttgctccccaattcccgcgcactaccactgaggttctcaccccacccaatgataggaaagaagtacatggtcacacaacggtgaagggtgcggctcgccagcggatgggagggatagaggagagcgcctcatgtcgagctagaggaggatagcggtggagaaaaggatgttgccttcaagctcgtccttgtgagccgccccattgaggtctgaggtattgttatcgtctctagccacgccatccaaagcagttgcctccgctagaaagtggaagaggagaagaggagacgaaggtgctggagggaggacgagtggcggcgccagagcccacgcatggtgcatccactgttcctgctcccctccgatggccttgctcgtcatcaccgacaaactccacattgtccccatgccgactcgagggccacgaggtcctccgcgacgctgacgtccacctccacgcctccttgctgaggtctaccgtccaccttcctcgatttgcaggaggcggggacggtggtaggaggcgtgaccgaagaaaagtgggtggcgggaggcgaggatctgggagcaccggtgtaggataatcccgcgccagcgtggggtgagggtggctcancggtaatgcttacacccatcgtctcccttgtcagcaagtccaccgctagactcctccccttagaatagccatggctggatcaagaaggggaaagagcagcatggatgccaggacgaggagggcgtgagcttaaggggttgagagagcaacaatggctggtcagctaggggaggcataggcggatggtgtatgggagaaaggcagggaggtgttgggtgtagggatgggtacggtaggcgctaaacaagaggtgggataggattgatgttggattttgatgtatttttatgagaatgtcctgatacttttaagatttagtgcgatataattagaaacggaacttccgtttcttcgcattatatttcactcaaggtcaaaatgttttaccataaaaaagcacaacgaggtattggtgataggaggatttcttcgcaattttctagagtatcagtagtctttatgtaaaaatatgaacatctacttgccccttatatacgggcaaaccgggcatggtcgcttaaatgcattaacacgagagcaagcgcgcacacaaccacaatagcgctttgaccagagcactgcgaatcgcccgtttcgctctgccatacaaggaggca

SEQ ID NO: 37810 - DNA, 568 bp, Oryza sativa
ggctccatactaatgcctgattgagatgacattcaggcccgtcacggatgactcatctttgacgggccctacgataatgcccgatagagatagattaatctctatcgggcttaaaataaggcccgtcaccgatgactattttctatttttcccgtcaagtctttatatttgtgagtgcaaaatatatagctgctatataataattcaatttattagtcataatacattttcggatagtaaatgatttgaaatcgaaatatggtcaacaacaaaattgtagagcttatcaagatctacaacttttattttggtcatttgtctatataactttgttcccaacagcttgaaattgattttgaaaatatgacaaattaaaacaactttttgtaaatagtaaatgatttcaaatgaaaaaggcaacaacaacaaagttgatcctgtcatcaagatctataacttttattttggtcatttgtctctataactttgtttccaaagcctgaaattgaatttaaatatatgacaaatgtaatcaacatttgtaaatactaaatgatttcaaatggaa

SEQ ID NO: 37811 - DNA, 743 bp, Oryza sativa
ttgagggaggagaaccaatttttatcaccggtcatgtgccgcgaacaaccggaatccacgatccacacgttctccttccttgctaccaaaacctacatacaagcagaagtcgaagcctcagtactgggttagatgataataaaaatttaggaatccagtactaagatacacgaccagaagatccaataggcatatatccacgtgcaaaaacagtttgagaattttcagaaaaatttctccgaggccggtctgaccgaaggggtactgccggtctgaccgggggtcggtcggaccgccgctgcaccgccggtctgaccgctgcccagtagccggtccaactggtcgccggtccgaccgctggacccactgcagtctgaccggtttcctcgagggaaaaccaaatttttgccactttgaatttgcaaaatcaatctctctctccattttctttttatgagccaatctgaaacaaaaaccaacaatatatccatctttcccacaaaacgagcaagcatatttttcacgatgattagaaacattggtagactcagatggcttagcaacacaagcaacaacatgagattttgcatgcacaacattggattttgaagatgatgcactcaaggtagacatgatgccaacagatttaaacacagtgtaaatagtttcatgtttaaccaaaatgtcaccacttactagcactaatacctaacacagtaggaggatgggtaccgagctcgaat

SEQ ID NO: 37812 - DNA, 602 bp, Oryza sativa
gcagtcagaccgacggcggcgacaggcggcagaagctgatctcggcggtcagaccgaagatacaatctcagtcaaaacgacggcaaccaggcggtcagaccggcgcatctacttcggtcagaccgcgatccattgaatttgagggtaatttttattttccgctaaaagtttcggtttttgggtataccaaccattcacttttgggtataccaaccattcaccccccctctggttggcttagttgttgtgattcgatcctacatataagacgatgacgtgcatggaggaggaggttaagatgtacgggagcatagctgaccatagccggtccaaaatgatttgggatattttgggagattttgatgtctacagtagcaatagggggtaagtacaaaattagtagcacgttgagatatggagggggctggatgtaagatgttgcctacgtgaagcaccacataggcggtcagctctgatcaaacgcgttttggaccggctatcactactagagaaaccctcatctcttttggtttgcaagccccttaagtccggtttagcatccgggagagagaatctaggacaaagatggcgatctttagtcc

SEQ ID NO: 37813 - DNA, 1245 bp, Oryza sativa
ctttttaccatcagaaaatcttagcaaagaatttttcaaataagaaacctatttttccaaattagcacaattttcacaatctaccatgacacctttgcttttacgacacttggggcaagaaagcacttcattgtttttcacaacatcttccttgtactcaacatgacctaaagcgtcctttaacttcaacttattcaaagtacatgttgagcaatccaaaacactatgaggttgttttaactttttagcacaaatcatgttaaacatcaaactagcatgaaaagcaatttgttatttttacaacaactttttagtcaaaaacaactcatccaaagtgcgtgtgtgcaaagcaaatccaagagctagagaagatctatttttcaaaccatgtgcagcattaacatctctaaattttgaaatctcattcattaagacctcacaacttttgcaatcatcatcattgggaataagatattttaatctagcaaattcagaattaagagattcgataataaactcttgttttctatacatcttctcacacaatatattttttgcactcaaaatattaatagctgcctcaagagcacttacctcattgtcttcacactctgaatccgattcgccacgcgccatgaagcaaacaccggagatgttctttcccttatcttcatctctactctcaccatctacatgcttagtggctcaaacgcggcgtagacttgatcaaaagccttcttgagagtctccttgatcttcctccctttgaatgtaccctttggcttgttgtcattggtcttctcatcaccattatcttccttcctctctcccaagcttaggacaacgtgaacgaaagtgatatgtataaccacattcaaagcagcgatttgttccacctcttttgctgtacctaacattggacacagctcgagaaagtctgttatttaacaaaaccaagtcctcctcctcgaactgttcaagttggtcatcggacatggcattaaacaaagcaaatacagaagacttcgatgaagaagcatcaacatccaaagaagttgaggaagaaaccaaagcactcgacttagaatcaactttacgagaaagaaccgtcatctcatgtgttttcagtcttgtgtaaagtgaatccaaagtcaaagtatacatatcaaccgacttctgaatagatgccactttcatctcccaaatagtcatgtcaagaccattcaaaaagtggcgagaaatctc

SEQ ID NO: 37814 - DNA, 653 bp, Oryza sativa
aacattccaaaaaacttgatagaactcagcaggaaatccatcaggacccggtgctttattatgttccatttggaaaatagcctccttaatctctttctcattaaattgttgcgttaaagcttcgttttcaaaatgagaaacttgaggaggtttttttatcagatcgtcttttaatagactgagatattgcaaacgtatcatgtagaatatgtacgtcaaaagaccagggcatagcgtatatgtatctataggtatactagcaaaatacccgtgcttcgctacagtgtattaaaactaaaaatatttatttttagccaaagttattttcacactgtttggtacttttgcttgataggaaaagtctcaaatgataggtgacgccgctttttttttcttttttttgggattatcgttcggtttttatgttgtgatttgtactccgttcacgattaggattttgtatcatctttgatttttttcaagaaaaagtgccccgcgccgtttgcccaacccgcggggaaaaaggaaaaaaaaaaaggggggatgagaattgggaggagtaagaaagattacttaattactaaaatacaaatttctggaatacttgtattttttaagtattttttaagtaggtaggtgtttaaattaattga

SEQ ID NO: 37815 - DNA, 728 bp, Oryza sativa
ttgtatagatcaacttaatctgcaatcaaaaatgatgaaaaatttctatgttaactttgttttgttatgcatatgagttgaggatgatttgtgccgggtccttttgcattttagcttgatttaagggctcgtgctcaagtcccgatcctcaaatggctcgggtcggggctagtgcctggggagatccacatgtcgagactggccaggccgggaacatggtgaccgagggttatgggtgacccgattgtgggtttttgccgattcccccccggagttcaccacgccccggggcacggctcggttctgggccccgcttggcgattttagctgaccgaaccgagcccccgagggcaaggttgagcacgagtgaccttatttcaagttaagattctttagaaggaaaaacggcacagacacaacctttaggaaattgaaactgcttttattgaaatgctgaaataagaaaagtaaggttgtgcatgtgtggtagcccccggctaaccctgcacacccgaggggggtgcgtggttagcccgagcccgaaacctgacacccgaccccccccctcaggggtagaagcgacgaaggtgttcgatgttccacgggttcggcagctcagtgccgtcgcccgtggccagccgtacggagcccggccgggggacgccgatcactcgatacggaccctcccacattggtgagagcttgctcagtccagcacgcgtttggac

SEQ ID NO: 37816 - DNA, 596 bp, Oryza sativa
cgggccgtgcttgggccgggccaaaattgcgggctttgtgccgggccgtgggcctcgggccatatggccatctatacctctactacacctgcacaccaaccagaagggatctctcaatttctttggacttcctcacttctagcggcaaatttaataactcctcggctccacttctttcccccgttttctttcttgttttcaggcaccaaatctctgctgtttatatactcgagtggtgtttttggatgcaattaggcagcattctgcggcaaatttagcatatagttttttttttctgttctgtttttggcgattgttttctatctgtgtggagtagtaagcatgtgaaaggagctgagaggttgaagcagcagttggatttgatgttcttgccaagaccccgacattttctcttgattctttaagactttttggggatcgattcgattactgatgcacctacctcgcagctccgagctttggattcaagaaacccaaatctggtgctggaatccgagctccagattcaagccggagcaattcgggtaaaaccaggcgagagatctttgcgcaagaagatgtcgccggccaccgcc

SEQ ID NO: 37817 - DNA, 679 bp, Oryza sativa
gggggggggggggtgaataggctttcctgaaattttctcaacaatcgcacggttaatttaacagggcccggaacctcctggtgaagaacaccggaacttcctggcagtgatgagcagcccggaacttccggagttcttgggccagggcccggaacctcctggtgaagaacaccggaacttcctggcagtgatgagcagcccggaacttccggagttcttgggccaggaacttccgggcaacagaaaaaattgaaatcggggatgtaaaacaggtcctagctagagacaatcaggcacaaggtagcacaagatgtaaatcacaagataccagcagattcaaacacagatcatgcacaagagagacaaaggcgattttttcccgaagttcggatcacacggatcctactctccgttgaggtgttcaaagagccgggtctcgattaaccccttgcctcacttatgcaaagatcccagaagaagtccacagccttcaactcaacacttctaggtcattttagaattgagtgaccaccaagatccaactcacaattccttctagaaaagaccacaagtgcaagttgctctacttaggacaacctctgaaaactcagcacaagaatctttactcacttacctcgtttccttgcggaggtgaggaaaaccttcacaaacttttccg

SEQ ID NO: 37818 - DNA, 1862 bp, Oryza sativa
  unsure (1)..(1862): unsure at all n locations
atgcgcccaagtgtccttctcaaattaatccgttaattaattgactaaccttttctctcttttttttttccaaaaaaagaagagtattgcattctacaaagtacaaacattctctttttttaacttctaaacgatgtattgcatgtagaaccttttcttatatagaagttatttctaaaaaaaagttaatttaaatctgttttttaagtttatataaatcaattgagtagattttcagtaaaccgttcaacctatataacaggtattatgactggtgttatataaaactcatttattatggttttataaaaccccgctcctatatatatatgtgtgtgtgtgtttagcacacatttacttaagtttttaaaatataatctatatggaatttttaattgttgattttaactacgatttaactcttcactactttcaatatttttcacatatgataaaattaattacagtttgaataaatgtgagatttaatggaatacttagaccatgaaacatgtggttatatgtcacaagttataacaatatggctttctaccattttttaccatgaaagtaatgatttctaaaatttattactttaattaatactcagttaattatgtattaatgaattttcttgtttcgcgtgccgcttaaaatcccaaccaaaccttacgaacgaacgcagccttaattaactaattgaaggatcaatctaacatatgatttgatcatgattttgttaatcggtattatgatcatctggttacatctagatataaactttagcatttaaatcaactaagacatgtacattctaaatattgaagagtgttccaaagcgtctaaatcgaacatgtatataatattaaaatccagccacacaaatacacagataccgtgccagtggttatatttaaaaggagagaataattgttctgaacctgaactatatattctaatctggaaatgagacagtggcttacaagctattntagagaacatattctctaaatctttgtaaattcaactaanagatggaaagtatccatacctgttaacatgaaaaaatcatgtcaatattttcacaaactgaattacatattttggcatcattttacggggcattgtagtataaaagaattgcactggccatggagtatcaagaagtcatttcaacttctggccggttctttctctaaatctcgaaaaccgcacaatgaacctcttgagggctcnntgaagctcttctacgcaatcatcacattacatgctagtagatgtttatgcacgatctatttctaggatgctctcaaattcttgcataagattcagaagcagctactagcatttatctttgaaatggaggtaccaatcgtgctctttcaaaaaagatacttcctcagttcctcttgcttgattcatcgatcaccagccgtagcatctaattaatctagctttcttcagttgacttgcagtaccaatgccattcctcaaaggatcaacgtgtcgcctccatgaagaacacatctacctctgaacccaaggctggatgatgacgagtcgacgcagctgctcttgcctcgcagcctcgccggattgtgtgtcaccgaaccatttcctatctatccgtgccatctcctcctgcaccgagggcagcatgaaggcttgctatatatatgtcgtgcacaatcggcgatcctatcggaaatgcctgaaagaaacacatcacaaaattgatcaaatcttgttcactaacccagtaaaattaactggagtagatgatgaagtattttaacagacgagagagacttacaaatccgaagcctcccaacctgtaggtcgggccaaccatgctgtaacct

SEQ ID NO: 37819 - DNA, 521 bp, Oryza sativa
accttgggcttcctgttcggcgaaattgccctgcgccgccaacggagggccttcgccgcgtcggaaccggcctcgaaggggatggagtggtagaaccacttcgccatctaatggcgatcccacttcgacatggcggcgttcaccggccatagatcggagcgctcggggcgaacattaaagttcacgctcccgaacgccgttttctttgtcccggctggggtgaccactgtcttcgagttcacggtgccatagaacacggcgccgaaaagctcggcgctcggttcgaacctggcggtccggcacgcccagtcgaagatggtgactcggacaagtgccgatgggctcagctgggaaagctccacctggaaaagaagaaggatctccggcaacaaaacgttgcatggaaactgaagccccacctcaaaaaacacggcaaataccatcgtccggttgtcgccgtgtttcggcaccacggcctttcccggagcgaaggccttcccctccaccagcaggctggcgct

SEQ ID NO: 37820 - DNA, 773 bp, Oryza sativa
gataaacaattggcatatgagattattggttttgatatttggagattatgggcgaactggttttggagatgattgatttttcaggtgatgaacagggttactatttttctcgggtccggtcagaccgggcaattgctgtcggtcaaaccagcgctatgcgagcggtcagaccggccaacgctgtgttggtttcggtttcgggttgtttgtttggatatccgtgattgtttcatgtttatggcttctagatggatactatacgtatgtaatactgttgtttgctactaatgagttaagttggagatagcttggtctcggaatatggtttctttatttgattcatgtgtaagtgacttgatgcctcgggagagtattgccggtgatggattgggagtcgacttggggataaggcgatgtccatgacggtcaaatatcatgcgggatacttaggatagagttcaatgcacgtggttggtgaagattccatatggcatacgatggaggtattgtgtgcgtataggatgcggagtcgaatttggaaagagtccaaatttggtatgattggagtttgtaaagtttgtttcttttacgggaaggtttcctaggtggattaggacttctagtatgagtttggttcgtggcattaggctgcctacctcatgtataaatagagagggagcgtgaggcttcccagtatcactatcgagagcattgagttgatagtttagttaggtttcgagtttagtcgagattttcgtgaggagatgtcccat

SEQ ID NO: 37821 - DNA, 1687 bp, Oryza sativa
gttaggagtaatcttaagtacagataataaaccaattattagaatctattcgttataaggtaaaacatagaatatcatatttatgcattaccctgaagtagcaaaagaacactaaacttattgttattaaattgttttaataccttaatttttttaaaaccacacatttgacagaagtctgtaatccaatattgttagcacaccaagcagcaaaacggtgaaacagcatatcctcgtgtcttgagccaaccgatagcacctcatactgtcattaagcatggatagctaaaaccagttatgtactccagctttcagtcttgaaggatcatgagggctgcttaacacaagcacgagtcatcgagaaatacatggaatgcatcaactgctgaagccaccactctcctgtgacttgtattgagaagaagtaactccagtgttcctattgcttcccacgcctaaagtggatttcctctttcctaataatccaaacagttgggaaaattctgaagttcatatggattttaagacgcaacaagtcaacaactcgccatgcatggttatttgctaattggcccaatagaaactattggtcttctttgcagtaatgaattcatgtttgtgtggggatatacttttggttatatatttcaccccttttttttgttaggttaatggaagagaacatttcacgcctgatcaacacccttacatagagatttttttttatgtacgtacttaagttgcttgatatcttaaatatatatgtagttttcggataaccaaaagagctagtgagaagtatatttttttagataatgtaagctttattgatctcagtcattctgaggatactctcgtcctttgcaccattgtcgtgcacacagccaacaaactccaacacactcaaaataagagaaaaaaccagcgtgcaagatcaagaccctacaacccgaaaactaggtcgccacccatatgccggggtaaaaaactccttgaccacttgctccaaatgtagataagccgaagtgacaaagtcctgcaaattgagtttctggagaataacccatgatcggagccaatgtgtaatcaaggaaataacctgcaaaggagaagaaacagttttcctatcaaaaaccatgttattccttgagcgaaattgcccagcaagttgttgccacccctaggaagacaagaggtctaaactctttggtatgtcataaaacccattgcctaaacatatgtgatacgttcctaggcgaacaaatgtttgaagcaatctggattagagaccaaacctatcgggctagccgacaataaaaaaaaataaatattttatcgtttcttctctgtggcaaaaacaacagatcttactccctttcaatttccgcttagccagattatcttttgttaacaccactcctcgacatagataccaaaaaaaatctttactttaagaggcatttttaactttcaaatagttttgttaatattaggagctcccatatgagccaaagcaaaataatgagatttaaccaagaatcttccatctggtgttagatttcatttaaacttatcttccatctggcgagaagtacatacaaaatagttaaaatagagatctgaattcaactggattaatttcttgcattttagccttgtcagtgttgaattgtcacacattggttgt

SEQ ID NO: 37822 - DNA, 1027 bp, Oryza sativa
tgcttgcaagccttcatttatccttcaaaactgatttcatcagtaggttacttaaactacaaatgctattgagcaattgtagtttagggaagatcaagttgctccttaagtactaaacaattgaactgcaattacagaattgctgatactatggtccgaacagatggactctagaactagaattgcaattgcttatctctgctattacacaaatacatcctccttcccttcccactcccatcccacggacctgtttggcatagctccagctccaactccacctctcctggagctggagcccaaccaaatagtttcagctccatcagaaataggagcggagctgggtggagcactcttacaaaatgaactagagaggtggagctgggtttaggctgctccacaactccactccagacccaactcctggagcagaatttaggagttggagctctaccaaacaggccccacgtatagaaaaacccgctccaaaaaaaatggtgtaccaaaaaaaactgaccaaccaaaagaattatgggagaacagaaaaaatgaaccacgttcctaactaaccaactaagagagagaaaaatacgggagaaaaactaaaaccaccccgttccattgcaatagacaggcatctaaatagtatatcataatttgggtaaatctgtattccttctgtcatgtttcttatatggacatttgactacttctcataaaataagaaaatataccacataactgcgtattctctataaagcagatgccatatattagagtacgttctagcttgtcatactataatgttgatctatagaaactaatttcagtctaaatcttgcagctcgaccaaagtttattggttttgcaaaactttgtcttgaagaaaaacaaaacatagctactaaggtatcatatgatctataatgaacaagtaattcgctattcctatcatgcataattggaaactattatgatcttctaatgacatgaaacaatttggaattctcaaagcagatagacagag

SEQ ID NO: 37823 - DNA, 906 bp, Oryza sativa
tttctactgcttctaccttgtgatccttgtgattacaagttatgtatactgaatcatttggccttcagtatttatttgtatgttgcttctttcaaagtgctaaataagatgcaatcttttgtaacattgatatgagtgtatatatgtcagaattttctcactatcttgaggttgatcctagtctagtatatataatatagggtgtggtcgtttttctattttgtctgtggtgcattggtaaagtatcgagagttccttgtacttaaagattgattgcatatgatttctgtgcgacaagtttatctcaatgaactaagtccctttgggcatgatctttttgctgatatgttttttttcgtcctgagtcctgactacacgatctagcaccatgctttacttcaaactcagtgatttccaggcagttgcttgatatctttggtgatcaccaggtatggtgtttgtgagatatcactttctgagtagcagacagttccaaaaggtaaaatgtactactctgttcactgaagattgatctgaacgttgttttacatggcaagaagttgaaaagagatcttatggtggatatttaaatgcttactgcctcgttggagtgatatattctctggattttcataggcatatagagccaacaacttgataaactcctcatattgatctcttggttaatcctcaaaaccacaatgttttgttctacagcattgaagatctaagagcagaatgcaactacgaaggcaaatcttcaaatctagtgcttcatttagcttggaacatattgtgattcctaatcattctcctggattctgaactggatggaactatttccaaaactttcaagtttcagcctcattatcaaggtcctgggaaagtaagatatcataccaaaca

SEQ ID NO: 37824 - DNA, 1977 bp, Oryza sativa
agtgtttagagcgagtacaataagatgatataagcgagttatacatatagccacatcatatttatgcttatgtggaggagaggagaaaaggcatgctacaggtttatagccagctgcagcacaaattctaataagccatgagagttcaagttttatgatagagatgactatcacatctaatttcattataatatatacatcattaaattaaggggtaatatgcataataggttgcctctaccacacaatcgcaatatctctaacactctcatatatttcttgaaatttgtgtagggttgctccttgcatgagaggtacctatttctctctcatatttcttctctcctctctcctctacctcatttagccctatgtggtatcttagggcttatacttagatgcccatagtacttgccctgagagagaaatatggggaatgcattaatggtagttaggctgtgtttaattcacgctaaaattggaacggtgtgatggaaaagttggaagtttatgtgtataggaaagttttgatgtgatgaaaaagttgaaaggttaaagaaaaagttgggaactaaacaagggtttaactattgtattattagtagactattaagtgagtaatgggttaatttttggatatatgttaacttgctcactatatggttcatcacgtcagtgtcttacggctgcagactgcgcctaaagcattttcccagactctctcacaccgaaacgtagagaaactcgcgagttggccccacgtgtcatcctcacgaccgtgtccaacccagggacccaaaccgaccgacctcccaccacatcccccgttccgccgcctccgcttccgcatcgcgccgccccggccacgaccttctcccgccgtcctggaaccgggcgatggccgcgtcgtcgtcgtcgtcccgtcccctgctccgccgcgtcgcggccctcctcggcggccgcgtgcgcgccagccaccgccttctctcctcctcgccgtcctcctcctccgccgccgccgcagcaaccgagagggcgtcgccgccgtcgcccgcagacccggataccgtgcacatgacggatggctgcatccgagtaggtccccgtaccctcctccctcccttcgttcattccctcagcaagatcgtgtctcccgtattctgtgtggaatataggcataataggaggtttctgctgaaaacttttggtaacatgatgttttctgtttgatttggtaagatttgatttaggtaatctgtcgtgatgttctgggaaaatatgcggcctccctcttgaggtttttttgggctttgcactgacaaaataccgatatagcgaattgaattcggagtcagctagtcaccgtgtgctatgttaatctgctttggaaatgctacaactggaagcacattttctgaacattttcactagttcagtaagggggcaaaatgcaaaagcctgcatgagaattcgtttgggtatgacagccacaaaaaatgggtgttggattgcttttttttttctttttctaaatggaagtttatgttggaagctgtgaagtgtaggacaactacaagcaatgaagcataataagttgttccaaagctcagagtgaaaaactaaaaacactattagacagccgaaacataatcttgtcagcactttgatatttaagttattgctacattatatttggagcatgcacacaccttcatttcgcgttcccgtaaataatagagtggcaatagaaggctttgacgcccttcatttgattgcgccagagctaaatgctgtgttgattatacaagtttgtttggtcacctagccttgcctatatttctcactgttgaaatggagtattctttttgggctatatcagggtttctgtgacaggatttcaattcttgttacatgtgttcagggtctctagatgaatgcattttctgttgttaatactagacagtaaaagtggtttca

SEQ ID NO: 37825 - DNA, 673 bp, Oryza sativa
aaaagatagtcttgactaattattatccgaaatttttttgaaatatccacccaaagtgcttcagcaaacacaatcagggtgaataaacaaagaaagattgtccagtccaatgataaaaacattgaagttgcaggagccagttccctgcttaaattcatgcacaaaaggagggggaaaaaacatcatcagagatgatgtgagtgaatgcaagagggaactattaagtcaacacttgtttgggaacaatcttaacggaaataaaactgcttctgcaacttcactttgctagctccaaggtctagtttgccccatcgctctcgtaatagcgtcgttcataatcttgcccaactaggcgtgagttgggacccaggtcactctttgtgtagaccccctcacagattttgtaaatgttttggtgattcgttatctcactgaatctacccagtaataagaatgtgtggttgaagctaaaaaaaaactgattcgcctgagaataaaattggtcctgaagcttgcttggatgatgcatatgggcacatgggataccttcagagccctcttataaaacttgtgatcatcgacataacctcctcctgacaaagctctctacaccaataaatcagatactaatccttcacaccctataccatgcgagtgaacctaaagagagcat

SEQ ID NO: 37826 - DNA, 538 bp, Oryza sativa
ctacacagtgtgccaagattgtccaagtcaatctcgtagggaatgtcattctctgccactgagaaaaccctctcggcgtgctcaaacacaccggtattactcatgtttctaaacaccttgccaaacctcagctacagcaagatatgcaattaatgatcagtgtcacttgaacactacgtaactacggtgccttagcatatgacactagaacagaagaaaatgctattatcaaatctttatgacccagagggtactatggttcactagagatgtgtggtagtggatcaagggcgaaaatcaaagaggacaaaattgaaattgtgaagttgcaaatgtttgtcaacatagaaaatactccgtgtttgtttttataagacctgtaattttttcaatcttcctgcaaaattgaagtcttgcaccatgagtttgttgaatatgttcaatgtttggacatggatattacatggcctctctcctgcatttatcagaagaatctcactaaccatgtcacttcagctatctataagaagtatgagaa

SEQ ID NO: 37827 - DNA, 1002 bp, Oryza sativa
gccttgcatggtcaatcacccgtgtttgtactttttaatactaattgctttcaatatgaacaggaattttctctgtcaaaaggggaaaaaaaacttgcaaaatgttgtaaagaactagaccgtgcaaaatttttgaacatgttggcatgaaaaattgtttatgcttacttgatctaacttgggaccttgatattcataaagaaatacaaataagagacacaaaattacaagttgatgaaatgagacagaagcaggtttgcaagacctaggagatcttattttgcattctggttcgctttgagctagggcagtgtgcctatcacgttgttgtggtcgctctggttatcttggacctgcgataaagatagcaatgtgcattctcttagaggacatgtaaattgtgttttgaagcacacaacgacatgtattagacttccaatgaagttaccccttgattcacagtatgacactttgaggactaaagtacttaaatggactatacataaccagtaagttattggtattttcttacaagaaaataataataacaatgtttcttttcaggtccttaattctgaaaaaaaaatggtgatacatgtagaactaatgttgggaaggataagaaagctgcctatctcaaatttagtgtaaggtaagatttaagtatataagatgtagtaagaatcaggaagagcaaacctcaagggggaaaccccaaacctctataaagtataatggatactaaaaaagtgcacaaaacagtggatttacatttcaacaaaacacccattgcactcatttacagaaaaagtgcacaaaaacagtggatttattgatgaaatgtaatttaatgttttcatgttggtgttgctctataatatattataaagagtaaatttcacaaaatcccaagatttagggcattcgtaatgcaaacccccccccccccattattgtgatttgttttaaggaatcacatgttttggggtaaaaatatttcaa

SEQ ID NO: 37828 - DNA, 681 bp, Oryza sativa
caataaaatgaagcagggtaaggctggccaaatgattaaatcgtctgtatatgccggtgcattaaccccaaaagagagcataccaagagaagccaaggaggtacaagaaattctgtcctaaactctaaacctactcattgtttttccgtactagaagaaacaatctctaaaataacagagtgagccatgccattgcgtgcaggttgaaaattttgctgaaggaagtttaccctcaaaactaagaacaaagacaggatttgatgcaaatgatgatattattctagtaaaaaggaaaaatatcccaggaaaggatgggttcaaggtaagccagataactgtgatttctataatagctttctttaactattggaggttactgaattttatcttcgtattgaatactgggggtttaccggaagctgtattacacctttttttttgtttacttgaattttgcgatatactgtaactattttaaggttgggtgaaataaatattacttacaaataaaaaaggggatagggtggtcttgcctactaacaccctgaattcgaaaccctctcagaggttttgtacatgtggcatgctgacccaagctgtcgtatgatctaaaagtgtataacttagtttgtatacaaatgtataaaaagttgacacagtaagttaaataaaatgaccaaa

SEQ ID NO: 37829 - DNA, 1106 bp, Oryza sativa
cagattatgttatattggtaggaacatgtgctgataaatattatctttagtttttgtatggatattcatcttattatttgaaatcttatctaaagttcagtctttatactgttgttttactcttcttttttttttaatagattgtttcagttcttggattagcatattttagctttagcttcactgtcatgtgttgcactttctgaaaatattgcaattcttgcagtgttggcattatcttcatttgtttctttaattcttctctttcttgctagtttgtacgatctattatttctatgtaacatgacttgaaaaatcacattttgtttttttgcagaatataatttgaaaataagctgttttctattgtatttactttctcaatgactggaatgtgaatcacaattttcattgcccctttatatctgtcatagctatagtattacactaaaaaaacatattcgcacgttttctcttgcatggcatcatttcagcatatctgtttgtagtgacttttaacttgtcatccataaaataacagattttattctcctggcaggaacctcatatggaagtattttcacctgggacaaaaaatatgcagaattatattctgaatcggattcttgtgtatgtatatcgtgagttccgtgctagggagaagcctggtattattcctcagattcgagctgatgaattacctattcagcctcctataacagaggctattgtgaggaaacggttaaagcattgcgcggatttaagggttaaaatctatcactcatgttattattactcttgtagctccttctgtttctctggtgctttgactttcgatgttgggtgtttggtttaaccaaaattaatgctgtccttcattgatttttacagaaaggaccaaagggacatttgttctatattcagagacctgattttcggattccatcggaggaagaactgagaagattattgacacctgaaaatgtgagtttcccaaaattacttccatcacttgtatcgataatgccttgtatgttacatttgtgacttttgatgcattaatcagtcatcacattgcattggccgtatgacagttgccagcatgt

SEQ ID NO: 37830 - DNA, 617 bp, Oryza sativa
ggatcccccagtggcttaaagtacaattcactctttatcttatgagtattataataaaaataaaaacgtattaatttattatatatatattataatagaaaaatatatttaaacacatatttcgaagatcgtgttactatttaaagcgtcaagaagaattatggaacctggttactagtacaagtggccggtcttgtctcatgagatggagaaatatggagtgttatggtgtctgtggttgtggatatgttatatatactcctaacgtacagctgcatttccgtcaactattgagcgacacatgtattaatttatggtggaaggcccgtccctaattaaggtccctaatctggcctctagcattatcagattatccatgctcgctacatctcctggatatgggtgggggttggggttttcatttctttcatccacaaagggccctagctgctgctgctgcatgccgcctttgccgctatgatgcatcctgccgtccagtttacatgcgtgttgagcgtacattaccacgaatgtccgtttcccttccccctaaaaagcaatgcatctttttcttcttataaaatgctacggctgctacgcatcttcaggcataccat

SEQ ID NO: 37831 - DNA, 500 bp, Oryza sativa
actataggcgaattcgagctcggtaccctatattttcaaaagcgaacaaacttaaaaactaactcaaatatgaatatgtatttccaaaagcgaacgaatttaaaaaccgactcatatacggatgacgtacctatcatgattacggataatacatacttcctatcctatgacctatgaaatatacggatacaacatacctttgtatgtacgatatacttctatatacaataaggaaattgataagagattatgaaaattatcctccggagcttcgattctcttatccttctggtcacttggaatagctttggaggtagcacaacgcgcgcttatgtctttgacaacatcttttccccagtctaggtgattgacgatattccaagagcggtcgaatattgctctccactggcaaccttcacataggggtgtatacatggatccacactccgtccattctataatatatggtatcctactttttttttatattaaggagaaag

SEQ ID NO: 37832 - DNA, 511 bp, Oryza sativa
tggatcccccatgagtacttgcattagttgcatggcctttatggttcaagttcgtgatggtttcatttaagacctaaattaatctcatctattcagttgagattttcttttcttttctttttggttgtaataatgtcactacttgagagtcgatatggaggcaggatgatggccgatgtgttatgtggaccacgcatggcatggtatggtcaggtagcatacgtaaatgctgaaaggacgcgaataaagcggtgacaaagtgtggcaggttcagaagatggtagggactgcatgtttgttactactgttgctgttactacacgttcacgtcggattggcagtaataaaatcacagagagaggccataaattacatgaaaggatgtagtattatttgctgatactactacagtattattataccatcctagtactactccctccgggttgataataattactcgttttggacaatggcatagtctcaaaaaaaaaaaacttcggccattatt

SEQ ID NO: 37833 - DNA, 693 bp, Oryza sativa
tgtgttgttgtgtatcatctttaattcttaggctgctatcacttaagcaattgatgcacttatgttgattttagtattgaattatcgatcaaccttagcctagtaatgattactgagcaaatatcaggccaatagaatttgttgatctgaaaaaggctgctatttctgctatgattttaagatgttctaaagctatgtaatgatcttattgctataccatataaacaatcaggtagacaaaacaaacttatgttgtaacaccccttaggtatgcacccgctactcaactttggcgtggacggctccatgtgatgggtggtggaaaagaagatcgccatgaacctggattagagcactggagcttagctgtcaaggatggcaaagcattggagaatgagtggcgaactgagatagccataccccgtggtggacctcataggtttgtacgagtgtacttgttgtcaggtgtgccgtttatgcagtttgctaattgatgtgcagattttattagtgagaacacatgcaactgattagaatattgacagtacttcatttttgtcttaactttttacagggcatgcattgttgctaatgataaactctttgtcattggcggtcaagagggagactttatggcaaaaccaggctcgccgatatttaaatgtgtacggaggcatgaggtatgtatgctta

SEQ ID NO: 37834 - DNA, 638 bp, Oryza sativa
ctcccctatagagggggcgctgcccgttgttctgccatcccctgtttgtgagccggtcagaggtccatactctattctagatgatgagcatgcatgaagcttacattttccagacacccaagctctccaaattaatgggtcaaaggtcgtgtcaagcgtgccaatgcactgtgctttgtaggctgacgaagccgagtactacccgtgagttgtgaacttccatgtgatttggtctggttctccttcatccagatgcatgccatggactgcgatccatagtgccacgagctattccacaaaagtcgccgtgatttgcgggtttgtctccgagaccaaatctccgatccagtcatcgtttttcttcttggagattgcatagaggcatgacgtcttttgggcctgcggccgtccagctagcttgctcctagctaagcgtacgtagtcggagactcggagtccggcgtcgtgctgaacaccggcttgtccttgtcacaaccaccgccgccgccggagtgggggcttgggcggcggctggtcgccatagcttttttacggcgatcacggcgcgcgtgccggggagctgatcgggctttttagactacaccgggggcgcccatgcccaccatggaacacaaccc

SEQ ID NO: 37835 - DNA, 668 bp, Oryza sativa
atggagaaaggttccctttttgtagaaaaaagaaggggggaaattgccggctttttttaatattatgcaattagaaagtattgaagaaataagaaacatgaggttagtattagtcacctggaagtatggttcttctttaagaggttccaacccaagctcatttagaactcttctgtttcagtcaatgctgtttgaatgtgcccaggattcctggcactgatgtctacccgaacctatcacccagcataatagagaatgaatcttgatgcccatttaacccatgttacagaaaaaaaaatgattaatgaacacttactggtgaaaataagtagcccaatgaggagacctcaattaaatgagtaccagctggcacattgtggcttaagcatatcatgtcaaggaggaacaaaaagcaacatagtatgctcttctaacattgtggcattgctgcccacaaggaaacattggaaaaaaaataacaaacaagaatactacaacaacagagctagatttatttctattagcaacccagaggctatatctaattttcaggaataaggctacccataacagataggaaatgtaagatatgagacatccaacaatagagcaggctaattaaatttaatgaaaaatgtctaatttccctaatccgggaactcaaaatg

SEQ ID NO: 37836 - DNA, 546 bp, Oryza sativa
ccctcaaattatcgctgagtttaaaattcatcaatcaaccacaataatatgcatcgttaacattgaacagtatgcaatgagtagctagaactgatccttccaacgcagcgtaccaagaaaagctaccagaacacagaggtcgaaacaccgtgaaagcagcgaaataaacgaaaaatatacgttcatgaacatgatttagacggcttccatctaatctttccacgctacatctaaaacagatttaaacaacctatccaatgtcacaccattgctcacgatatgaaataaacgcaaaattacttaaccgcaatgaacagcaaattcaaaatttgcaaaatatctccaaactacatactcctagggcttatttaaatcaaactggtttgagctgcacctctcagaaaataaactagagaaccaagatgtttcagcttcgccttaaaagggatcagaacagactggtatgctctcaaatcatatgctttgtttagttcctaactttacttttccatcacatgcacacataagcatttcaaaacttaaaag

SEQ ID NO: 37837 - DNA, 1144 bp, Oryza sativa
tggtttgtagatgtggttatatataaagagatttggtccattcgacacggagggctccatgtatcttgcaacagattaaccgaacaagttcgatcatggaattggataagaaaaagtggtttgtagatgtggctatatatatggagatttggtccattcgacactgaggactcctaagtatttttcaatagattaatcaaacaagttcgatcagatcgatattcagatggatctggataaaaatttgacgggaaagcaaagtgtgtttgtcacattttctcgtaaaaaagtggtttgtagatgtggctatatatggagagctttggtccattcagcatggaggactccaagtatttttcaacagattaatcgaacaagtttaatcagatcgatattcagatggaattggataagaatttgatgggaaagcaaagtgtgtgtgtcacattcgacatggaggactccaagtattttgcaacagattaatcaaaaaagttcgatcagatcgatattcagatggaattggataagaatttgacgggaaagcaaagtgtgtgtgtgtgtcacattttctcataaaaaagtggtttgtagatgcggctatatatatggagatttggtccattcgacacggaggactccaagtattttgcaatagattaatcaaacaagttcgatcagatcgatattcatatggaattggataataattcgatggaaaaccaaaatgtgtgtgtgtgtgtgtctcactctggtagtgctaaagacaaactaaatgtttgagcacattttctgagacacattttttttaaaaaaaaatgtttgaggcacattaccaaatttatttagagtttttatagcgaaaattaataaaactactacagtttgggaggaatatgttggtgatagtgtgtttggtttgctacattgccgaattttaataatgacaaaatttagcaaggttaaaaatagtatcaaagtgaacacacaagatatcaaaacacgagtagcaactcatgggcaatttaagataaaaaggagtgatggggcaaatttctagcataaaaacttaagagagttggtaagagagtaaggtttaaaaaacaactcgatctaaaggtaaaaccatttgcatgatccagat

SEQ ID NO: 37838 - DNA, 536 bp, Oryza sativa
caatattttcatatatacaaagaaataatggaaattttcaacacaaaaatcataaaaaaaaaatcgtaagcacttatgagtaaagattcttattaggttgcatgcctagaagaagtagggacgtgaaaattagattttaatcctataaaacatagtggattgtaggtggcatttagacattttttgataattcggtctattcggttacccgaggagactaactgaattgaccgaataaaattcggcctttcactacctaggaccgaatttctcggtctcggtctcggtcttttcggttcggtctttttctgcccacccctaactaccaatctacattatcttaaaaaaacattagatcctgcatgatctaatatctttaaaaatatatgtaattaatgtggtaattttagctctttaggatgatcaccgtgtttgtaatgcaataaattgcatagaaaatatagaacataacttatcaaacaaaattcctatattttaaaggagctctccaggctagagctttcagctgcgagggg

SEQ ID NO: 37839 - DNA, 651 bp, Oryza sativa
ttaagtatctcagtaagtgtacaggaaggattgtaattctcagggataaccggcggtttcaccggtttgaggatggggtatgctcttgtggggatttctggtgatatatcttctgatgtacctcattctcattcatcatgtttttctggtcaggcattttagattatatttcttcaggaaatagatctttacaggttcagtggctggtatgaaacacaaatctattgccatgctgttttggcacagaaaaaaacatgccataaccttcaagctgaaacagctggactcagccatgggtctattaataaaacaagacatcggtcatgatatgttaaggctagattaataatctggataacaggttcactgcaccataagttgagactggtctgagcttccgtggtgcttgaagaaggaatggtggttctgagaaggtacatacaagtttcataccccacttgagagggccccataaacatcagcatgggtccggtaagcccggtacacttcaacatataaacctttcttttttattttgggattccttagtttatcaatttaaaaggatattctttgggctaaggcaaactttcctttttatgttgggcgtccttggttatcaatataaaaggataattgcttggcccaggg

SEQ ID NO: 37840 - DNA, 717 bp, Oryza sativa
ttacactataatcatataaacttttctttaataatgtctgtcattctatagtattatcaattataattgtattatttctttggtactaagtcataacttttcttttataatgtctgtcattctatagtattatcaattataattgtattatttctttggtactaagtcatctactttgagaaagataaacttctatatcttaaatagaacagcaaaactcagtttagatcaaaatgaaaaattattgtggccctgtttggatattagctaaacaatgcaatgtgaactgaaagtagcattagctttatttttcaggcactggtacatctgttgaaatttgttaggccaagacttaaaggtagctgctaaatgtattaaaatattgtactttggaagtgataggtagagatctgagctttatttgtggctttaccttgttgcacgtaggaccttgaccagctaggcagctagacccatattcagaaaggtgcaatggagtggctgctaagctcatattggttttccttgcctaattctggtgatgagtgttgcaaaatactcctttacaaatgtgcctttcctggatgatgttgccaataacagtgaaaaatggtggttacatacatcataactctgtagatggctcttcacaaacagaacttttggctgtatggtcatggtctatattattctattaaggatatagtcaagattacg

SEQ ID NO: 37841 - DNA, 673 bp, Oryza sativa
aaacccaatacgagagattaatcaaaattcgaaataaaaataaaataaaatctaaaattaaaaaaaaaaggatagtccaagtaggaatacaattttaaaatagctaaaattcggaattaaaaatatgaaatattaaaagaagagtccatataagaacacaatacgagattaattaaaattgggaataaaaataaaaataaaatccgaaattagcaaaaaaaaaaaagagttcaaataggagtacaatttaaaattagctgaaattcggaattaaaaaaaataatattgaaagaagaatccacataagaacccaatatgtgattaattaaaattcagaataaaaaataaataatatccaaaattagaaaaattaaaagagagttcaagtaggaatacaattttgaaacaactgaaatctgtactattaaaaaatgaagatgtttttgccggtataaaaaaacagaaaaaaaggagaaaaagaacttttatgtaaaaaaaaacgtccgactccataaaaaaagtccgactatctgtggagaaaaaaaggccgaaaaaattatcaaaagagaaaaaaaaacctctacccgattaaaaaataaaaaggtgcgatttctgtacgaatgcctcgaaaaaagactttttggccgaaatcttctcttctcttctactccaa

SEQ ID NO: 37842 - DNA, 673 bp, Oryza sativa
atttctgcgtacgattctagtatgatttctaactgatggtgaacgccgtgcgtgcatcactagaaaacaggagacaaacgttacgggctttcgctggaaatcgttagtcgtacaagtatcgtacgtgaaaaatcgtatgtgtagcagctctcgttatagtttaggcacacagtaaattcaatcaaactcagagaggaatctcatgattccacacaatagaatactactttagccacagataaattcgatagaactcagaggaatctcatgatttcacacaataaataaagtaacacaagctcacaagcactactgctagacacgcaactccgcttgattaaaagcagcgccatcttaacctgagctttataatcttttcacagcaatataaaaatataaatctctgtgctgcaaattccccacaattatatcaatcttgtgctgcaaataccccataattgatgctcggataagctacttttgaacatgttcacgccacaagcaaccaaaaaaaacaactaaaatagcaaaaattagcgccagtcaccgctgcgacggcacgagatctacacaactacgcgcgtgctcagatcccacccaaaaaggcccaaaaaaaaaacacgaacagccaccggggtgagtaagcccccttccctaacttccgagaaggcgg

SEQ ID NO: 37843 - DNA, 634 bp, Oryza sativa
ttcgctgagccattctaccgctgacttacgcatagatcgaagtgggttggggcaggggaggtgcacaccagatggcttcataacgtcgtgtgacagtcctatcataaccttctttctgcacatagtgctattgtgaaagaacataatcgcagacgcaaatctgctctttatcagtagcattgtaaaaggagcacttgctgtctgacttagtgtgacaacttaacattaaagcaaatcccttgacttagtatgaacatcttacattaagcaaatccggtgtccctcgtggttgccgacttgccgtcatctgcactcaagaaaaaagggaacacctttgctctcaatgcacatgatatttcttcacttcagagcaataccataatctcgcaatgaaacgatgtttgcacatgcacttttccgcatcacaagattttcttctataaacatatatcaagaaaatgttactgtctacagtttgacactgaaatttagtacttcgtttgcactagtacagaagcactcatcgcccgtaatgttcctcatgatcaatgttagtctgatgatctcaaacctgcttcacatgaatggataatatgctccgcgaacaacctataccattgttagcattgccaaa

SEQ ID NO: 37844 - DNA, 688 bp, Oryza sativa
  unsure (1)..(688): unsure at all n locations
gcgcccccnttttgttgcttgtactctaggcgaattcgagctcggtacccgtactattcacgcctaaaattctctcttttttctgaatgtatatcaagtccgaaattgattttctttcaagtaatagatgtcactctgttgtcaattgtttctagaaatttgcattaaattgaagagaaaatgccccatgtaaggctcaagggtcgacaaattagataggtgtggtccagcacactcatactgtaagagctagagaagcaaataatgtgtggctcgcatcatatcccacctcacctaagggtaatgggcccgtgctctttgtacaacccatcttagctcttaaatatttttagcttaaaaatctattaaatcttatcctaatcttttttgacacaactcttatatatgtttataggctaaaatgttgggcaccttacaacccctaaatacattatgttggtggtacataattaaacagcatgtgtcctatgttgtatatacagccgtaataggatgtgttccatatatatgttcgacctgtctttgagcaaatagtggtcaagattatgcatattttacaaattaaattcaaatgtaatgtgaggcccaacttggtcctggtcgttggtctaatataggactgattgctctttttttttccaaaaggaaaaaaggaacttcggatgat

SEQ ID NO: 37845 - DNA, 1498 bp, Oryza sativa
acaaaccaagccccgcaaaggtcatcgcattgatttgaacaagatccaataagggagatatgcctacctaataagggccccgatggtgccctccccataaagtggtgttagtctaatcgatgatgataccaggcgagacacttgaatatgttcgttgataattttattcctattttcgggagttcattacaatgatggcttcttccatttacctagtagcgctttgtcccaacgtgctacaaatcatcactgcttggtctgtgttgttggtgatcaggcattggttgctactacgtacgcaggtagcgacttctattttgataaggaagattcgtggttgctaaaatcagttcaacagctacgatcaattgtgagcagatcgtgctcacccagagtcgtcattagtactctgggtgaaaaccctaatatggtttatctagattcgacagcgtcgatgcttgtttattattttctttattgaaggtgttatctcaagctcccaataaaaaaaatctagtcctgtttttttatggctgtgatagacaagcattaggtccttcttgaaatcattgtttcagagtagatgtgtatcactttatattcttgtctagattattgtgttttgtatgagttgatgtaaacaatatgatacgttcatagttgcttagattgttttccttttcttttctagctgtgtgtgcatttcgggttgatgtagagaccgggcgtagttatatttttaatgaaattattcttattatattaaaaaatcgacaatcacctagttactatgactatcacctgtcttgagccagtttgcatcgataaaccacttagtaagcctgccaaattaagaaaaacaaatttaagtgcgaaatttctataatttttttctaagtttatgataaccaacacgaaaacgctagggagcggatttcggtgggcaaacggttttataaaacctggttagaatacacatggatttagggccattaattctcattcaaaaagactcgctcgtgcagaggcgcagagctgacaagaatcagccagctattgagctgcaacagcaaaccaaatgaaagcattaatttaaactccatttctgagatacatgcatgtgaagctttgatttgatccaagctagccctccagccatgaatattctgagatgcatgaattttgaatcttgcttctcctgctgttcatcctccccttcactggtggagaaaccatctttaatcgatccggcaaaatccacaatagtcccggatccaaaaagaaccgggagtaaagattgtttttagtcccggttataaaaattatgatctttagtcccggttggttctttactcccggttcatcccctgtcagatgtatgtcgggggccaaggatctttagtcccgatcggtaactcaccactttaatcacggttggtactaccaaccaggactaaagatcaagatgatctttagtccaggttgatagtaccaaccg

SEQ ID NO: 37846 - DNA, 830 bp, Oryza sativa
tgtaatcttcggggctaatgtctggaatttggtgtctacttccactcttttgctagttgcaattatcagtaatttgctattgaattggaatgtgaaaagttggttgtattcttgcatgtcggcagaagcatattaaccacagattatatgtgggcatgtgatgtgtgcggcgtctgtggacaaaactttgtctgtcggtagaactaaaataataacgtcaaactgtctgtcggtagaagttctatttgtcggtaatgccttatcccgacaggctttccaccgacacaccctctctgtcgccaaaggcctttgccgacagactatttgatgataaaggtggtcttcgccgacagattaattgttgccaattttgggacatggtgtagtgtacatgggtaatagtgtacataacatcgtcatgtaaatatatatatttttaaggggatatcccaaggcaaccgcctatgcgcatcgtgttattatgagcggccacttaagccagccacctgggtagattgaaatgattttcatgggtggctgctgttagctgtcccccacagtatttgtttacatgggcagctacttaaagcaacatttttttttattcttgtctgcccatgaaattaagggggaggggcctttgaaaatcgtttttctactattggttgcaagggtttcaaaaaaatacccatgtaaatgggttacatactgcttgtacacatgttttctgtaccggtgcaaacaaaaattaaacttgagaaaaaagtctaattcaatattgggcctttataggtacaaataaagatcctcaattgtgagattgtgggttt

SEQ ID NO: 37847 - DNA, 683 bp, Oryza sativa
attcctgcagccggttacgaaaaggaagagaggaatagaataattcatattatctaaaaatattcaatgttacatttaatgaaactaatttagtatagtagattttgataatttttttataaacttggttaaacctaaacgacctaaagtagtaaaatagtcaaatgacctataatatgaatcagagcgagtatatattaatattatttatcaatcaatctatctatctatctattatgtctttatctttatctattataaaaataaagatgattcgttacacacagttggttcgtttagtctgtcatctacaagtctggcttgggaatgcacatatagcgtgaagtccgtccatggttgttatcgcgggagaagcaaaaaaggaaacataatcgtatctagaagtccatatgccaccttcaaatgtactgtcctcctctctcctaccacaaaattttcatcgttgttcctcgggcccactcaatttgtccctttgaatgatgaatcactctttccaaggcgtgattttcttctccccttccccccttcacatctgctgcagtttcgccaagatcatttcctcggttcccctactcctaggacaacgaggatgagcaatccatgcatccagtaggtttgtctctaattggataatgacgaggaaaagccatatcattagcttg

SEQ ID NO: 37848 - DNA, 684 bp, Oryza sativa
attcctgcagcctagtcggcgaagaacttgacgctacccctacctagcacgccaactatcgaaacaagatttcggcaatactaaaagggggtggctatcaagctggaaaagtggatgggtttagaggcaaggaattttatacaggttcaggccttcttaatcaagaagtaatacgctactcctgtccggggattaatccgccgagtgtattattgatcgtatgatctgggagaaaaatcgtgttcctagagggacccggacccctccttatataggggaaggggtgtccgtattacaaaatacagtccatatccctaacggaatatgtaattacagataaaatataatcgtaaccgactaggatctcaggtatttccttgacatacaagtttaaaacctaacccgagtcctcttaaagatattctatctatacatggtaccctgtacccagtcggactatacatgccgtgtagatctagggtatctataatctccacacctctctagcgcaacggtcaagcataggcattgcatgcatatatgtcattaccactcatactctctcccgttccataatatattctagatggttcagataaggttgaggtcaaacatagaactttaactatcaattacttttagttgaagacactagaacacgagtatagatttctcttacaaatg

SEQ ID NO: 37849 - DNA, 658 bp, Oryza sativa
ccaaacaaatcgagaaacttaaccacatgtgcatgcatctcctgatcaactcatcccccctttacttaatcatctaaaccttctttcagaacttttgccacggtataaagggtatgatattttcatgcccacaaagatgcagcttaatttaacatacactcacctccaccacaggcagcgcatcagtccaactccctgacttaataatctaaccttcttccgctgcctgatgcttgccctcgctgacccagccgccgccatcagctggcgcacgtggccaggagttaggcggagggggacggcgacagcggcgcataagttgatgagacctgaggtagggcaattgtaggtgagcgagccgacggcgtggaggagaggtgattctagtccaatggagacgagatggggagaagggaaatcacggccagagaaaggcgaaccgtcctgctcgatgactccgctcaccctaactgagccttctcacaatgcgcctggagccgagcggcctgaaccggatcccgactccatccacgcgtcgggcatccgactcgggattgcagggattggggtttgcagctggtatccacaacgtgcgcaggcgtgaggagacgtgcggagtggtgggtcccacgcagagtgggagagtgctaattggatg

SEQ ID NO: 37850 - DNA, 678 bp, Oryza sativa
atattttttatgaaaagattatctctagatatgacataaataatatttatttattagttattaaaaaaatgtttatgtagcatataaatagatttgacctatacactgctatcatagaaaaaatgctacatatacatttttaataattaaaagtaaatattattccttttatgccatatgtaaagataaattttttcgtaaataatatatcccataaatataagagtcgcatacaatgaatatcaatattcccataatatactttataaatgtatatgattctccgtacacaggaaaaaaatatggccaactaataaaaaggtatggaagtgatccaaactaaatattgaggtatgcaaaggaattagtaaaatcagggacatacaagagattaggcaaagttttagaggtatacatgggatttcctcatataactactaacttatcctgaacctttgggatatttggccattcatgacttgttgaggtcatgtactactgtgataaatattatacacacacttcttcctcctcccttctccttctatatcaatagtgatccagcgtgatgggggcttgaacacccagcactcacgctatatctgcccgtgcacacttataatcttatatggcagctcaaaggcaaacaaagctatatttatttatatagatttaact

SEQ ID NO: 37851 - DNA, 673 bp, Oryza sativa
gggccgaaggcggttgtgatggcgcagatgtggaagcgaatggtcctcctccatcttcggccacgggcgccgaaggctctgctccctcctcggcggccatgtccggtccggcgttgctttccttccaccttgcaaccttctccttcacgaccttcttcggtggcattcgctctcagtggtttcgctcggaggtccccacggtcggcgccagctgttgtcgaaatgactaccgcatacgtcgaaagacgtggttactcaacggtggtaggaagaaaacgaagtgtattaaattttgagtttcccttctttcctttttttcccattacatggccctaggggactatttatagccctattacaggttcttactactagggtttaggttatacaagggaatttacatgattacccttatgaaagggacatttacaggggtacataatgatataggggctcatgggcccctgatgggccgtctggcgatcgccggccctattgcccctaggcttgataggccgaaaaggcttcttcggcccttgcgggggtgaacttgccaacgcgaagtcatcttccttcggcagatagtcttcgccttgcacccttcgcctgagacgcctctggcctggcaaggcactcgtacgactcttcgccttccgccgttcttgccccatag

SEQ ID NO: 37852 - DNA, 673 bp, Oryza sativa
ttgaatccaactcgtaatatggaacaatgttagattaagagatcctatggataggaaacatctgtgtacatttttctacgagatgaaactggtatattttatattagtgtagatatagaaataagagaatagatgtatggggagtgagttcagtcaatgacaagtgggttgagatgagaccttgttaatcttaccattttgcagctagctcacattgtccaatagaaaacatacagtaactatatacgtctggttcagcactgaacccaacgaaccactgaccaacttggtgatgggtcgaccaccggtccagtttttttcactatggtgtccacgaaacactcgtccgcgtcaacaaaggtgggtgcatgtataaatagtcaaatgggccaccagacacgtcctggcccgagcatgactcgaggaccgaccaacttgtcatgacgtgccgtgcccgcccaccgactacacctacggcccaggcgcggcccaataaagcacaggttgtgccatgccagcacaaaggcacgatcagcccactgtgctcgtccttcaataaagtctattgtacctcactcatttctttggtccatgcctcatatggctggaataagtttattttacctccctcatctctttggacagtaccttatatggctggaataagtatatt

SEQ ID NO: 37853 - DNA, 703 bp, Oryza sativa
cggttttcgaatcccggccatctcgggcgcgggcgcgagcgggagagagaggggaaagggcgcggagagcgcggcgcacgcgcgggcgtggtcgacgtggcccggagaaggcggaggcgtgggcgcggcgacggttgcgggcgcggcggcgcgccggaatcggcgggaggagggagacgggtccgacaggtgggccccacctgtcggcgaccccgagagaggaggcagcggggcggcctgggctgccggactgggcctcggcctgcggccggcccagcaaggaggagggaaggaaaaagggaaatgggccgacggcccatttgacaaaaaggaggaaaaagaaaggaaaaaagaaaaagaaaaggaaaaaggatttttccctggaataaaatattgcttgctcaattttaattggttaaaattatttctagagagctctgaaaattccactaaaaatcctgttaatgaattttgacatgtagaactcaagaaaaattccgcatgtcaagtctgattattatttgcattactttctttaagggtttctcctgatttcacctgcattttcttagggtcatttgcaaattaccattttgacttgggaggaaaactttcggggtgtgacaccttgcttgggtgaacaagcactgatcctagccccagctgtgaagtggaaaacctaatttccgatcacaccgcttgg

SEQ ID NO: 37854 - DNA, 559 bp, Oryza sativa
agctctgaaaaattcaaatataatttcaaagagcgtaactaatcatggagaatttaaaaaaaattaaatttaaccatgtcattttatttctcacacttgctttacttgtaaatttatttaattatacacatacctacttaaaaataccaaatatttcaacgaatttgtattttaattaattgcatatttttctaatctgtacgcttcacattgtaacacacaggcacttttgctagaccaaacaacacttttggtcaatatacacactccgtaatcacccggtgcaacgcacgggcacttttgctagtggtcttataagtacatctattttctctatctatttaatgcttgaaattatggaaatttacccttttattcatatattaattgaaagcagcaagacattgagatgatggacataagttggaagacgaatatgtgcgtacaaattctaaattccaaccaaccaatgtaatgaaactacttattttccctccacatgttccacatgtgtataagaatcgaggaaatccttttttcaaaaaaaataattttatct

SEQ ID NO: 37855 - DNA, 2000 bp, Oryza sativa
ggcggcgacaaagagctagggattgggctagcggcgggctatggtttctgccggtggcaggctagggctcagggatgaatcgaggagctaggggtttcaaatttgatttttggaatttttgttttttggctaaaattattttcgcatgaaaatcttatttttgcatgcggttgttttgctcatatataaattttgattttcgcagacaccaaggtgcatcgagccacccagctgactacggaaatcggtttttggccatatgcaaaaatcgtcttttactagtgaattccctattaatttaagcaacttataaataaaaatattaatcaatatatttaaaatatgattagaacttaatatttataatatcaataactatcacccatgaaacgtacatattgacgattttttatatttaggtatcaattttttttggaaattgcggacatgtctagatgtctagatagcttttgctcaaaggggagccatttttgctctctctgaggggcaaggattttctaggctaggtagactaatttgctaaggaaagttagtttttaaagtagtttaccaaatgcccaatctagcctgtaaggagaggaagttactagcctagaatccaaacgtgctcgcatcttgcgattgtattctaagaattagaggttgaaaatatgaagcccttagtttattttattccttttcacttatccttttgttaaacaagaggcaccagcgtgaataaggtccttttttttaggcttctaagctaacttgtgaactgaaaaatttaagcccaggtagctttttcatttggcgtttttaaaaccataagctattcttacacgattaagaaaaactagattgaaaaaactttttatccttatgtgagatgacaatatgatttcaccattaaacttatgatattagatccgccaattcataaatcatgaaagtcaaaagaccgacttaaaagcttaaaccaataaatctaaacctagaaaatgagagtgctaagtctataagcaacgacggccggccaggagtgccttatatatagtttaacagtcgatcgagtagccggctagcccgtcgataaatttgtgatcttttgacaaagtagtgagctttgacggaatttgtttaacattattgtgtatatatgtcgctcttttatgcatgccgtaagtttggaaccttggacttctactagatttcttccgatcgagctcacatcacgtttgtttgcagcttttgcgggctttgactaattaatatgtgcattttgggtcaactgatttggacaagtagtggcatatgcagcttagccaggaccgaacagatcgctatatacattatgttaacatacagttttaccatgctctagtggtatagataatctaatactaatttattacattaattaaattagagatccagctacagtagttagtctgatcttatctgaaaaaaataaatgccagctgctactactacaaatttcttattctacatatatacaatttgtaacatgcaatcttatagaagccacatgcacagatgacatattatcattaaaaaaaatctgcaaagcgatttttgtgctgatgagatgatatggcactatcaccaccgttacaacagattaaatatgatatagtaaatactcccttcgtttgtaaatatttaacatttaggataatatttttattaaattgtacagagtggccaccaatggtttgtcaagtgtttaattgaaaaagggaaaatggtatatatggcatagatttgttttcaagtactttatatattgtatctactagcaaatatgcgcgtgtgttgcatgggatctagtaagaggggttaaatgttccgttccactctattatactccctccgtcacatgatataagggattttgattttttgcttgcactgtttgaccattcgtcttatttaaaaaattttagaattattatttattttatttgtgacttacttta

SEQ ID NO: 37856 - DNA, 668 bp, Oryza sativa
gtataaaacttttatcagtgattgtataaataaaacaactggcaaagataggtacgattttaaatcaaataaattaaaaagttatgtgacaacttaatttatttggaagtattttttcaataaattcaatttttaagtacttattttgaaaatatactagcgcatatttgtataagtatatttatatttttatcctaataactaataactgaaggtcaactaaactggatgtagaaatttttatatttcagttgatatttgagaaggtgaagaccacaaaaaaaatcttaaaggtaattggatgtaaattgtactactatgtgtagtataataattcttaaagattaaatttaatattataaggtaatatccatatgattactatgcaataacatactgacatcgtaaaaaaaagctcacctagcatatgtttagccaagttgatacatcaaaatattaaattgttaagttcttgtactagaacacactcacatgtcaagttgttgcattcggacgttcaattctcaagttcttatactatatcgcacccacctgccaagttattgtaccgtaggtgcaatttattcaaatatcaatctactaaaaaaatctagatagaaataaaaaaacagaaataaataaaagggaaaggagaaaaaggaaaaaaa

SEQ ID NO: 37857 - DNA, 581 bp, Oryza sativa
actccaattccatacaacctggaaaatgacaagttgcagtttttatttcagatgtctatgtgctttgcatgcttaatattctgttcactgtctgtccctttttttttttctgagaattgtacttctattttgactggcaggccaatctcaaaagttgctgaaaatgtctccagtaacattggagatgtcctctctgtgagtaaagcttctatttcctgaaatcattcattcctgtgatagaagtagaagttactgataagaaaaaaaaatactggattgcagtaatattattgggctggttagatccacatgcttaggagattcattgtgcagctttgagtggctccacttttcagtactggcctgtttccttctgtttgttcagatgtgcatgatttggactttttggatggcagctgggccaaagtgttgggtggggcttctgattgctttcacctttacctgatgaaccttgcccaattaggtccccttttactggtgcccattcatgacaaatctagattaagtgtggccacttcacttcccacaagatgttaagctttggtgatgtgttcatagga

SEQ ID NO: 37858 - DNA, 567 bp, Oryza sativa
atctgatttagctggaaaattaaagatgttttttaaggtacttttacactgtcaaaatcagagtcataagaaagtaatttcaaacatgaatccaataatatccttttcttatggtaaaacctaaatattattggattaatagttcgtcaaagctcttcaaaattggacagtcaaaatacaccttatattcctgaacggaagagtaatgaccttcttgagggtcaaactactatttacatgaaaaatacccacgggtgtgtatagcagcagtcttgagttatccctataaaaggtaaggtttctgcccaaaccctagctaatcaaagcctctagccgtgccaggacaagcccacacgacctgagaagatcgcactatccttggtcttatgatcaaccatatcattagtgtgcaaagcaaaacaacaaaagaacacctcaccccttcattctctctctcaatttctttagttaagtggggtacaaacaggtagcattaaattaattcaattgtcctgcaagagtgattatatatagataaagaaatcgcttgttgatctagcttgtgta

SEQ ID NO: 37859 - DNA, 608 bp, Oryza sativa
agcatgatttatacagaagataactgacagtgtcagaccgtagtcgatttaacatcgggaacactcgcataattgatattgtataaaaattgatattgtataacagacagcgtcagaccgtgcttatccctgaagtcaatatccggcggcgtgtcttggcatatgtaggcttctatgttggggcttctatgtcgattgtgttgggcgttgatcccttcatggtggatgtctgtccccctgtcctcctaggggggcttggatttatacccataggtgttcccttgtccaagtggaactagggaaaccaatatggatataattcgagtagcacttgtcctttccatgtagaactctggctgcctttccttatctggaactccttcgaggtcagtttccgcataagacatgggatgtgggggatcctgccgagatttaatcaactactattaggtatgtactagggatgtggtatcataaccctgacaaaatgtggggaaaaactaattgcgcagtttgcatgtaaattgtgagacgaatcttttttagcctaattaccccatgatctgacaaatggatgctactgtaaacatttgctaatgaccggataa

SEQ ID NO: 37860 - DNA, 595 bp, Oryza sativa
acgacgacgacgatctggacccgacgatgacgacagtgcaggcaccgaaatctgcgtcggcggaagtcgccggcgcttcggcccagcgggaggaggcgagctcggcattgagagaggaggcgagccggcgacgagagagtaggcgagccggcgacgaccggatctggtgggcgccggcgagagagggtgagcggcggcggccggggagagaggaggcaaggcggtggcgggagagataggaagtgcggcggtggggttgccggcgagagaggaggcgaggggctgccgacgaagacctttggcgaggggcggccggcgatttcgagaagaattttttttcctttttctcctttcccttttatttatttctgtttttttatttctatctagatttttttagtagattgatatttgaataaattgcacctacggtacaataacttggcaggtgggtgcgatatagtataagaacttgagaattgaacgtccgaatgcaacaacttgacatgtgagtgtgttctagtacaagaacttaacaatttaatattttgatgtatcaacttggctaaacatatgctaggtgagctttttttta

SEQ ID NO: 37861 - DNA, 555 bp, Oryza sativa
acaagaagagtaaatcattatcaaaatatcaattccgtagtaagtcataatataggactaccgcatgttagctgttaaaaatcctgaaagtcattttatgtcctatcacaattcacaacactacatacctcccaagtaatcagccaacagaagagatgatttgccgcatgtatgatgctatttgatattggaatacacagaaatttccattggtgaaattaaggctgtttggctgcctgggctgcatctgcgccacagacaacagcaacagtgctgcaagcagcaaggaaacagcgggcagcagcagccgcagccacagcccaggtagccgaatggcctgattgttaggtcagtgataacagcatgactcattgttttattggcatccatgttatgcaatgacgatgtcttcagcacagggagcatgacatgaatatgcaacacctcagtaaccctcgccatttgacaagtaaaatgtgaggtatgggtagtcttatgtttccacaaatcttaaaccataacagcatagccatttattttcggtgcgcagctgca

SEQ ID NO: 37862 - DNA, 669 bp, Oryza sativa
gcgatccatagtgccacgagctattccacaaaagtcgccgtgatttgcgggtttgtctccgagaccaaatctccgatccagtcatcgtttttcttcttggagattgcatagaggcatgacgtcttttgggcctgcggccgtccagctagcttgctcctagctaagcgtacgtagtcggagactcggagtccggcgtcgtgctgaacaccggcttgtccttgtccacaaccaccgccgccgccggagtgggggcttgggcggcggctggtcgccatagcttcttcacggcgatcacggcgcgcgtgcgggggagctgatcggcctttttagactacaccggtggcgcccatgcccaccatggagcacaacccgaagcacggcgggagcacgccgccgcacagcccggcattgccgtcgagctcgtcggggttgatcgacagtgggcagtagctgctgctgttactgctcccttctgacaaggggattattggttctttgtttggcacatgtccccagtagaatgtcactgctattaccacatcagattgaagacaacaaaagcaagtaattaaatgggttaatacaactaaggctgccaaaactgtcaagaggataaactgctagtggttagcgattagaagtaaatttggactgctgggttgccatatg

SEQ ID NO: 37863 - DNA, 649 bp, Oryza sativa
caagtctaatgcaccaagtaataaatagtccaaggattaacatagaaccaaatatggtaaggatatagattcgtaatattaatattattgtacaacagcatatgcttcactaacaaaatataaaaatgatgaagggaggaagaggactagaaagtttcacaagtatgcttcaaacaccatcagcatataatgtaagtttattttaaacttaatttatatacacagctactaatcgattttgcagaaatactcttgttaattgtatgtaatattttttaaaatttccacactgcagaattcaatgatactaactactagcagagtttgtgaacaagacatgctgctgaaagacagaaacaatgacctattaatcccaagcaaacattacagttaccaagaatttgatgaaatctacaacaagtgcaaggatcacaccagaggtaaaaattgcaattacaaaaataaattataatcatttttaaatttgtatgagtagtatgctaacatttcatcaaaatatacagattccagttgacaaaactatggaggaattgtacaaattacaaaacacacatttgaaatcacaggtactttcattaattaataatttaatcatgttaaaatgatataggctacatatcaaaaattt

SEQ ID NO: 37864 - DNA, 1813 bp, Oryza sativa
tgtatgtattggtcgcgcacggtaagtacgtgtcggaacggaatttggaatagtgtcttggtaccctgcacgtcacaaatcacgatgagggaggccggatcggactttggaggcattggttactgggctgggccgaactgagtacggaagttttgggcccaattagtctcggctagttaatgtatagggagtgtctagcaaacaatgatttttggctagttaatgtatgatttttttgcaactcgtggaagttaaatttgatcagatttatcacatattaatctatcttgttaaattttattattttttttcataactatttggatgacatgcaaacgagtggatgtccccttgagagtaatagtttctcctcagcacggatatgattcatttagtctgatttgggttgaatttggctgatggaatttcaataaatgtgtccccgtatatttatcccaattataatcgaagtacattgtgtatttaacttattttcatcctaacaatggttccatatgaggatttgttaaacttaggagcttaaagagtttctgttttgtattaaggccttgtttagatcacaaaaaattttaccaaaaacatcatatcaaatgtttggatatatgtatggagcattaaatgtgggaaacaaaacaaccaattgcacagtttgcatgtaaattgcgagacgaatcttttgagcctaattacgccatgatttgacagtgtgatgctatagtaaatattagctaatgatggattaattaggcttaataaattcgtttcgcagtttacaggcggaatctgtaatttgttttgttattagtctacgtttaatactttaaatgtgcgtccatatacttcaaaaattttacacccaaagaactaaaaacccactaaagagaaaaaaagggcgatcagttaacgaggaaagctgaccaaattaaaaccatagggaaaaccgataaactctgtagaaaggcgaaaattaaaaaagcatgcgatgtgagtcaacacaagtcatcattcccaactctatagaagtcatcatcgccacattaccaagatgagaacattcgagagttattgttatcgagcttgtcacaccttgtcaagtagttccgattccatcccgacacactctagtgtgccgtatgaactacgaagtaaacaacaaataccaacttaaaatttgcagcagatttgccatcatatatactttactctaactcagttgaacaaattaatccattttagaaaaaaaatgaattaaatcaaaagagcttgataaacccatcgctaattaagagatttgcttcagtccaacaaaaagtttctcgaggtactgttacctcacggagtcacggtactaaatcgtttccgatcattagatctagctaggcaagatgtgcattgttagatccaaagatcaaaaacgatttggtaccgtgaggtaccggtaccttaaagatactttttgttggaccgaaccaaatctcgctaattaatgttcatggctatatcaccctcaacattgcatgagcaatgttttaatatttactctcgacgtgatcggacgatcctttcccacatgtctgcgacgaccaacggacacgccctcttgagattaattgctccatgatctaacaatgtggtgctacagtaaacatttgctaatgatggattaattagatttaataaattcgtatcgcagtttataggcgaaatctgtaatttgttttgttattagtttacgtttaatactttaaatgtgtgtctgtatatccgatgtgacacccaaaacttttcaccc

SEQ ID NO: 37865 - DNA, 1741 bp, Oryza sativa
tgaaacatttcatgaaaccgcaacaatagtaaatggtttttatcacaaaagtgcaacttcatacacttgatgaattttaggcccgttagtcaactctggcacgcgcaaaactcacgtcgttacgtgtcggacccacatgtcacatgcatggtgagttaaaggtcacagttaaatcgtttgctaaagtcgtagcttttcccaactaaagttgccgtgaagaaaaacaaaacaaaacagagggttgcagagatgctaggacaaatctggattcgaccgagccataggggtgggcgttcggtcagactaaaaaattccctttggtttctcgggtaattcagtctttggaaagtcaggaccgaatttcataaaaaaaactcaggactggcaaattcggtcttggactcggtctaaccgaaatttcaggagaatgaaaaattttgacagcacttccctctttttagaaatttttcacagacatatatatcacaaaaataccaaacaataggcaacatcaagcaccaaattatcacaggatagatctcaagtctgaacctcacaagtcacaacagccacagacccacggtacaaggcggaggcgggatggaggcccagaggtgggatggaggcggagggcggaggcggcggccgcggtgctggcgctggaggcgaagggcagaggcgacgtcgaggcggaggcggcgcccgtgctggaggcggagggcggaggcggcgcgatgcaagcgaaagcggaggcgtggaggcgacgcgatggatgcgaggcagtgaggggctgagccgctgagagacctgagagcgactttactcggttgctccctctagggtttgttctatttagtgggcttattaggcctcgtacacctgttaggccaaatttcagttttttggggtaattcggttaacggaagcctatgaccgaattacccgaaaaaaattcggtcttttgatggctgatatcgaatcactaaccgaatttctcggtctcggtctcggtcttttcggtccaggtcttcggttcggtcttattttgcccacccctaccaagccacattgcttcgatccggcttgtaccacctgtcacgtagcactaagcactaagcaggtagtaacgaacccaaaataaagtgtgttatggaaatagatgtgcagcggagacacgaatttttacgtggaaaacccttttgggaaaaaaccacgggcgccaaccaacaataattactattgaggagttggatacaaacgcagagatacattgggctatcgtaccctcctagtgcggcttacgagggatatacacaggagaaaactaggagtcgtcgtgaataaagactaagagttatactagaaaactaatctaatagtcaggttctattagaatactataatccaaatatattgtgaacccaaaattcaaatcacatatttaaaagggaagaaaaacataaacaaaaagggaatatgaaaagaaaatttcttggcaactccaacgtgtccagcgcctctggactcgtatatatgtatgttgggattcatcgccgcagaatatatcccaaatatattttgagattcatatccgaacctacttttgccgtcgtgactggttcgaactccaacaccagaaccgttctgacctaagcctgccctgccctttatattatttatatacacgtcggtccggcaagtcacgcagccgcgcaacaaccagagcaacaccagctcgatc

SEQ ID NO: 37866 - DNA, 660 bp, Oryza sativa
ccaccaaccgggagtaaagaggaaaatctttggtcccggttggtgaggctagcgccacgtctctggttcctatcctttttttttttcattattctttgcatattgatttcacaccaatctcaccaaaatcataaaatcatcacacatttcaaatctcctctctccaggcgcaacgaccaatggcggcagggagaaggatggtgaccggcggggagaaggggcggcggatggaggagatccagctggcgctagaggccaccgtgcgcccgatccgtgcgaatgtcttccgagcccacgcacgtatggcgctggcggctgattcagtccaccggtggcaacgacgacactagcagctcgtgttccatctcgatcgaaacttgatgacagattcagacacaaaacatgttgattacacgatggttgccgctttgtaacacgaactaggtgaacagatgctgaattcagaatatccaaagaacatgacaagattttcggcattgccaactcatgatatggtattaatcacctggaataaactcatatattcagtgcatcctattcagacgtttttattcaactattcctttgagttcaaatttcgcatcggccaagaacaggcaccaactctgaatctctaatactcaaacgcattcatcgaga

SEQ ID NO: 37867 - DNA, 644 bp, Oryza sativa
cttcttcttccactgaatacaatacaaacagaagtatcagatcacagaaagttaactgatgaaaattagccgataagcatggtagcatagctaagaaactgcaaaagatcacaacacagtagccttctctcaaagaacacaagggtgaacagaaactggaacgcagaagcaagaagcaacatagcatcacagcaaatttagttgatttaaattcattgcttgggtgattcaagaatgccagcatagacattgttgaacaaaccaactgaagtaggggcatcatggatggcaaaatggcaatacagattgacaaaatacagaatgacaatttcatattacaaagtctatcaaatcatgaatgaatgattaagatgtacttccctggataagctttgcaccacaaaaataactactatgaaatggtaacttaggtaatcaccgataatgcagttatgtaactgaatttcatgttcacagggaattgaaagcattcataatttcctactgaaactacagcaggaatagcatatagacagtgagcatcacataattactgatcaacttaacagctactattagtatataatagttataatttcctacagacagtactacggagtattatttaaacagtgagcaccaca

SEQ ID NO: 37868 - DNA, 803 bp, Oryza sativa
gtccttgttgtctatattgttgtgcatccacatttcctagatgaatttcttgccatgttcttctaaatggccagaatataatatattaacacaatcattttgccacttcttgctgccttatgtaagatagtcaccttgttggtcgtaccatggactgtatctgcagagttcgaactgaagtttctgttgcgtgttctgaatgttgacgttcctcctgattttgatgctgtctacttgtgttctgaatgataacttgtgtcctgattttaatgctgtttacctgcttgtcttcattctcacgtttggaatcggaataccagaatctaggcatatctccaaacaacccaaatgaacttctgtaacagtattttatagatccaatccatttccaaccttttttgagggtagcagcagtcaaggaatcaatatagatctactgtatcgaaattggattgtcgtcctctgctttggcattctgttaagctatataagtatatggtttacttatgcagcaaccatttttgtcatgttgcatggctgtttgcacctttgacaatttggtatgttaactggcttcaattcaaggggctaattgactgtgaaacgtgaaccattctgcgctaatattcttttcttcctacgttgcttgtgacgaatattctgctagattgagttgcggctgatttagctactatgtttctttcaagtttcattgcacgtagcagctttagcagataagctttaatatattttatgactatgcttcaatctattttttgcctaccttttcttcttctaccata

SEQ ID NO: 37869 - DNA, 649 bp, Oryza sativa
aatcggatgtagtgaaatcggtcaagcctccaggatggaccaatggaaatacccacaattcgtgcaggtcccatcctggctccaacttggcatgtacagcaacaagcaataaatatagctaggctttttagattgtcaattagacagctgatttgtaaaatagaggaaagaaaaaaatcaaatgtaaagcttcacaacgccttaaaattaactatttgcatttacaaaaggaatattttctatacataagggtaaggaaaatgaaaaaaaaaaggtaataaatattattttgaagtattaatagctagaaccttcgttgtctcaattgttatgcgaggttagtctctacatagctggcaagtcgactagggtgtgctctttccctagtttttccaactctcccatgtcgttttttgtgcacacgtttttcaaactgctaaatggtatgtttttttttaaaaaaaataattatatactaaagttgttttttaaaaaaatcatattaatctatttttttaaaaaatatttaatacttaattaatcatgcaataataagtgtttcgttttacgtgccgagaactaacccctcctcgcgaacgcagcctaagaggctctaccatgcaacatatcatgtgtttgttttttgacg

SEQ ID NO: 37870 - DNA, 709 bp, Oryza sativa
cagttgtaatgctgcttaaatgttgctctcttcagagtagtacacaaatggactccatgaaagtagttaaagatgtggtttgatatggttctgggtagcattgcaataaagaattcatttagtctagtactcctgaattgatgctttatttccttatttatggacaatttttgaaggcatccattttaaaaggcattcatatctggttcttcattttttttctttattcttgttttcatctgtgttattgatgtttggttgctagctcaattcatgtttttctcacttatttgcaggtgttagtacaggtactggaacattttaatcaagtcgagtcacctctgcatggttagtgttctgggtcaggcaaaatcgctacaagatgaaagaagatattatgtttgacaaccaaacaaagccatgcagatcaagggttgactccaaaagcaatataaatgtgctcaagccaaaatttggatcctcttggggttcccaaattgtcaaagggttcacagctgacaaaaagaccaagaagacagcagctgctgcaagcaagaagccacctcttgcaagtgtggaaaatgttaacaccagcaaccaacagattccatatcattctagggttaagagatctcttatgggagatttcccttgttcacctgctggtgctcaggttcacccccatgtctttgattgccatggcatcagg

SEQ ID NO: 37871 - DNA, 545 bp, Oryza sativa
cgatagaactcagaggaatctcatgatttcacacaataaataaagtaacacaagctcacaagcactactgctagacacgcaactccgcttgattaaaagcagcgccatcttaacctgagctttataatctcttcacagcaatataaaaatataaatcctgtgctgcaaattccccacaattatatcaatcttgtgctgcaaattccccataattgatgctcggataagctacttttgaacatgttcacgccacaagcaaccaaaaaaaaacaactaaattagcaaaaattagcgccagtaaccgctgcgacggcacgagatctacacaactacgcgcgtgctcagatccacccaaaaaaggccaaaaaaaaaaacacgaacagcacacgggggtgagtcagtccccctccctcaccttcggagatggcgtgctggatctcggagcacttctcgacgacgttgtgctcgttgagcccctctcctcctcgatgaggtactcgctgcggcgccgccgtccttcccggcggccgcgccgggggacccct

SEQ ID NO: 37872 - DNA, 639 bp, Oryza sativa
ttctaccgtataaaaaaataaaaaggtccgattcctgtacgattgcctcgaaaaaggactttttgtccgtaatcttctcttctcttctacttctactatttttttaaaagaaacctctactattataaaaaatttaagatgttcttttgtcggtattttggtatgtcatccgtgtatgagtcggtttataaatttgttcgcttttgaaaaaatatatatcctttgagttgatttttaagttcgtccgcttttggaaatataggagtcgtataaaaaaattcgcatgctgactttagacaaacagactcctaaccacagcttatgattttatagaaatatatagatccaagcgaattctcacagtgaattaagactaaaatagttgtcacccgttgcagcgcacgggcttttctcttgaaaataaaaaataaaaatattaaaagaacacaatacgatattaattaaaatttgaaaaaaaaattctaaaattacaaaatgaaaaataagttttcaatttggaatacaatttataaatagctaaagtttatgataaaaataaagactattgaaagaaaagaccatctaaaagacatgacgagataaattaagtacaggcctataatagagtagagtggtggc

SEQ ID NO: 37873 - DNA, 622 bp, Oryza sativa
tttattttcaagagaaaagcccgtgcgctgcaacgggtgacaactattttagtcttaattcactgtgagaattcgcttggatctatatatttctataaaatcataagctgtggttaggagtctgtttgtctaaagtcagcatgcgaatttttttatacgactcctatatttccaaaagcggacgaacttaaaaatcaactcaaaggatatatattttttcaaaagcgaacaaatttataaaccgactcatacacggatgacataccaaaataccgacaaaagaacatcttaaattttttataatagtagaggtttcttttaaaaaaatagtagaagtagaagagaagagaagattacggacaaaaagtcctttttcgaggcaatcgtacaggaatcggacctttttatttttttatacggtagaagtttttttttctcttttttttattttttcttgcctttttttctccacagatagtcggactttttttatggagtcgggaggttttttttacatagaagttctttttctcctttttttctggttttttataccggcaaaaacatcttcaatttttaatagtacagaattcaggtggttcaaaaatgtattcctacttga

SEQ ID NO: 37874 - DNA, 548 bp, Oryza sativa
caaatatttttttaaggacggtaaaatttctcataataaaatttatggtctccttagtggttttcagtttaacagctttaagctgtaatttgtttctatgtatttgtgtatattcttctttgcgtctgtgtaggctagctgtggcgttcaagaaggcacttgggtctagcaattgccaaacgggccatagtacaaggaaatggactggattgttttttttttcttttccactgggcgatgccggccggaatttatgaagattatgagaaattggcacatatgaacaaacaacaagcctgatgtattcaatacagtagacaacacctatcaaatttgcaagatacctggctctacctttcatccttcgtttttgatcgtgtggcttccaatttcgactgtcaattgtcatatagtcagttactatgcaggatagtagaatggagaacgtttattcagttatactagtatcttgctaatacctgccttttgtttgaggattctaccaggtccaatctataatcgaagggtgtgtttagttcacacaaaaa

SEQ ID NO: 37875 - DNA, 878 bp, Oryza sativa
tagtggctttttcaaaaatattagaaaaatacagagtccagacaaatcacagaaaatatgttgacaggcataacatcatagccataaatcaaaatttcttgtatgtaaccaaatgttgctaaatccttatacaccagagaggataaatttttgacagaaacattcagtgccatataatgaagagtatagagagagatgaatataattcgaaagcagatttaagaggtacaatacaacaaataagagcccttcaaggtacacccatgaggccattatccctccaaaacacatttctgaaggtccatttgattttagagaccaaggcaataataatgctatggcaagggtcaatttaattttagaaaccaaggttgtcatgggctcatggcactcaagtgagtcattaccacagtcactagatcatgatacaatactgtcgttcctgaacctgtcccagtttgctggtcacagttgatgcaggtcacctccaggccgtgtttggttattagaggcatccaaatcaggtacagaaacctacctgattttgattggggcaacagtggccaggttcctcgccattcaggtggtgctggcatgtgtgaaggtgtgtggtggcacactgcaggggataatccagcagtagaagatggggaccaagttgctacaccctgtgatctcgtggccctcaaggttctctgtcgccgatgcaagacaagtcagcagaagaggggaggaggtttggagaagactagggcatttgcttataaaagatggtggcaagggtgtctgctgaaagcctgaaactgcatcgatggcgaggatatgagattatgttagaactgaggagatagagcaacagaattgtgtggctggatggg

SEQ ID NO: 37876 - DNA, 691 bp, Oryza sativa
catgcacaggtgacgctctacagtgcacaaagtggcaaaaaaaaatacaaaagcttctctttcccatggcaaattgttaagtacaaatctaaaaaaggtatttgactaattgccaaacgtaaaagtgacaaatagttaaatttcccgaatttataggcacacgaagatgtcctgcatgtgcaaacgtgtacgtatatatacgtcgttgttggtcagtataagtagtcttcagtataagttgcttgacttggagtcttggatttttggcagagtgcggagcttttctctgggcagcagctgtcagcccgatttttccaagctttttttctcacaggactggaagttctggaagggtttgattcccttgtgaaagggatgccacgcccttgctgtcggaaaatatatagacaaccagcctcatcatttacattagacatgcaggatcttaattttaaaattaattttagaatattatttctaaaccgctaagaacatgtatataagccactttagcttataatcagctcatagcaaccgattgatggggacaaactgaatgtgcagtgcagctggcttccagatttgtccaatcaggaggtatttgagttgagttgagtcgagtctcatgtcgtgtttaatttggtcctcaatatatacttgcttgttgcacactactcggtctgcaactgaa

SEQ ID NO: 37877 - DNA, 694 bp, Oryza sativa
atgcagggggaggaaaccccagggaaaaagtcccgtacagggattttcccctgtaccaaccgatccccttccacctccagaggaatcactcctattaggggaattttctctactaccatttgggagtagggggagggggttgatgggggaagggggatttagagaggcaaactgctaaatagtgtttgaacaacaaaacatgtctttagaaatattatagaaatttcaggaaaaatagaaagaatatagaaaatccatataaataggaaacaacctaaaaaaattccagaaaaaaaaaataaaaacataaaaaaaatcaacaagtattagaaattcagaaaaaacaaagaaatatagattagtttatgtggaaaccaacttcgtgacatgacataagtcaaactttagaatcatccatatcatacaaaatttagaatctttggaatcatccttgcatccacaaatatagaactgtacatcatatttatatagggttacaatgtcttgatcaagaacacaatttaaatctttatctcttctatcttcttcatcatctcttctacaaatcttcatttgttctaataaatctgccaggatgaaaaagataatctgaaatttaagtaataaatataaaatagtgatacttcagcaatcaaatttgaaggacggccattgatactagcttaggaaaaaa

SEQ ID NO: 37878 - DNA, 1107 bp, Oryza sativa
agtgttttgaccaagaaattttatgtgtttccatgtgcatgttagaagttgaatcatttgataatgttaagaccagtgtcgtgttgtgttgtgttgtgttgctcaatattagctttggtactagccagtgattcactgagcaacggagtagttaatagcattggtcattatctcaaaaaagtaaactgaaacttaattgagctggtcaaaattggcatccttgtgatcgctatgaaagattatgtttgtaccactgaaaaatcaggaagcatatatagcgcagtttccatgaatctatgttcatctaaaaaattcaatcccaaaatctcaaagcgcactgttattacttattaatactagtagcagcactgcagcaacactaatactaacaatgttattatctgaatatttcaggtactgtggtatatgcaattgaaaaagctgaatccaagtgtttttcttatctgtgacttttagtggaaaactgagattctttcttttgtttttgtcccagctcatttacatttctcttggactgctgtctgtacacatcacatatcctatataattttattgtacagttcatgtcttggagttgtcattttctaatagtttggactgatggataaaactcaaacatttctatcattggaaggattcaaaacatatttattgatgtggattagaacacttgattgtgttgtcatagagatcgaagatgcagtaaaggagtatcctatggcaaaagtaaacattacacataatgaaattcattgcattagtgtatcacatattgaacaagtgcctttatgtgctaacctcctttgctagttgtaaatttcagggtttcaacaattgcatagacatcaattaaaaaagaaaaaaattgaacaaaatgtctggcctattttcttctgaaatcttgtaattaatcatgatagctgtgccatcactaaagtactgaaatatataatgagtcatttttcccacaaaatgctagatctactagcactaaattattttagtgcaaataatactaaaacggcatcacattacaggactatatacacctcttataactctatttatgctgtatagctctgtaga

SEQ ID NO: 37879 - DNA, 620 bp, Oryza sativa
tgcatacataatgctatacacaatagatcattggtttctgtgttatattgcattaagtggctgtcttgtttatcctataatcattttgctgcacatacatgatgcttgtccttattttagtggatatctcctgggatcttatagtagttacccagttcccgcaaataatttaattgctgcatacggttaatccatatttatcagtatagagaaccatgtaccagtcaatctagcagctgcaactgccctgttcttactgtttgcgaaaaaacattttagaccctttttgtttaacttaatgatgcattcttgcattacttatttctttttttgtgataaatcgatcaaattgattgtagaagaaagacattatcgactattgtttcctattctgctccatgtctagaccaccccattcatttagtcagaaaaaaactatacaactgtcacccttctctgcttgtaagttgatgttttcttctgttgaggatgtgtactgtgttgcgaacaggttaaggacaagtcaactggagcagtgtatgttgttgctgaatctaggcttgggcaattgccagccaaggctaaatcatctggaaagaagcaagcaccttctaagggag

SEQ ID NO: 37880 - DNA, 578 bp, Oryza sativa
acttaattagtcatgcgctaaatcttcgctctattttgcgtgttgtgggccgggggaggggttccaatccccacaaattgtacgggtaaaatcgaaccatgcttgaaaaaatcgactacaacacactgcagcaaccaattgttatatgttaaagtaaaatatcgaccacaaaagaagagtcgaacttagcgttaaaaagatggtttgcagctgttggttggctgcacaagatagggatgtacgcatgtgattagagattctttttctataagggtccaacgatccatgtcacatattgtagccaacaaatcaaaattttgttcgaccatactaatcgaactagaactgcaggtaccctaaagctgacaagttgtattccattcgaaagaacacccttacagttacatccactatccttgggcatgggtggttgcttcatgtgaacatatatgtggactgtgggcctgtggcttgctagtgccaaattggttgttgaagaagggccgttgacccctagtcaatgacagtgaattgtactcccctgcctgtcctgcaggtgctataaattctgaacctca

SEQ ID NO: 37881 - DNA, 605 bp, Oryza sativa
ccaactgatcccatgtgcatattaaattgaaatgtacatttttagtgatcaagtatttttgtttaaagaagtttgtccaacttgttttaatgtggtttgttgtatagtcagtggttaatgaaatgatattatctaatggagttcatgatctgatcagatttatatcttcagatgatatgtcagtttctaaacattattgtatatgaagtttttgaatgttggtttttttttaccaaattgatgtttttgttctctgaaaaattagtgttagctttcatttcatttgtatggcgctacaaatagatttgtatgaagttacaggataaaataatggaaattacagttgtagttacattggaaatatatatgaattacaaatgtaattttaggtctgtggtgatgtaagttgttcttcaagtcaagtataattaaagtcaagttagttacaatatgatttgactgtttttacactgcagttacatgtcagtataactgaagttacaattgtaacttcacatatttcataatgtaactttctatagttctttttatactactgtttttcttgcaaaaatttccaaagttttgcttcttagtgttgcatg

SEQ ID NO: 37882 - DNA, 702 bp, Oryza sativa
atgcacttttagcccattgggctgtaaatttgatatggtatttgttgcgttcggttacaacttacaacatctccgtcctatttttatttcagttagggtctctctacacatcattcgacaaattttcaggccccaaatttgtcagatttctgatcccttggattagcatccaacggcagcaaaaataaagaaggaaacaaatagaaaaaaaataaaaggcctaaattgggccaaaattgcaacgtgtaaatataataatgggccgataaaatcatattgggccaaaaacacaacaaataattttatgattatagcccaaaatcaatcaacttggcaatcaagaaagctggagaaaaggacagcacatacatcacgtgatcaaagcacacatccagcgaatcaacgcttctcccatccaaaacagatccaaagtcagatcgaagaagatagacatggagagcgaaaagaaaaaggcaaagaagaaaagagaagaagaagaaccaaaatccaagatcaaatctgaagaaaaaatcaaaacatcaagatccaaacaaggtcagttaattaacaagaaacaatcatatagtaaatacagaaaattacactgtacatacacatgttgaactgaaacatttgcaccatacaagcacacaacaatatatttacacatttctagaacagttcatagctagtgcacacatg

SEQ ID NO: 37883 - DNA, 704 bp, Oryza sativa
attaaattgggctaagtgagtatgaaaacaaaaacacagcataaaaggcaaatctaacccataaactggcttcatccaagtgacatgcaaacatagtatgtaacacatatatgactactaaacatcagctcttaattaatacctatgaacatgcgagataatcattccggtcaaaatgatatataatttcagatcctactaaacatttggagttaacagccaactaaggtaagctacctgcctacttggttcggaaacaaattttggctttaccattccttcagagaccactaaccattatccagaaactaaacatatatcttacgttgatctacacatttttttgagctttcaacagttcaacttgcagtagccttgtctcaacatttaactctacgcaccattaacaactacggcccgtttggttggagggagttttaaagagggattgagagtttagagggatgaggctattaagtgttttgtttggttgggagacatgggaattttggtgggattgggatggagaattgaggaagaaactcccttcttttcaatacctgggtaggggcaggtcattgggagggaattcctcgtttacttgggctaagcaaatctcagccatccgttcttattaatgagctaatctgcaactaaacttcctatgaatttacatcacatttaccaaacaagacattgggatt

SEQ ID NO: 37884 - DNA, 641 bp, Oryza sativa
gcagaagttcatgtgcctaatgataatgtgttacctcattctcctattcataatgcttttcatgtaagttttttttgtcatatatagcataatttatttgcaagttttatttatattatttgttttttgagttcttgaattgaaaattttatagggaaatgaagatgcttttgtttctaaatctgctgttgaacttaatgattcaagacaatgtgatgatggtaattttgtaccaaatttgttatgttaaattatactgttaattgttttaatcatgcattaatatttttttaatttcttcctgttagatctgaattttgttacccctcaagttggtaatgctaatcattccaaacagtctgttgatgatcttttggatggtcagttaccttaagctttttttcttttcggttactgatttttttacttgtgaaaagttttttcaaatttatctgtttcaacttattcacttcggaatgttttctcaaatttaactttctataaatttttgtaggttctggaattgctgctgcagctgctgctattcatcgtgttgcaaaaaaatttaaatcaagatttaatgattatgggaatgtggaaaaatattttaataagtcaaggcccttatttagtttgctaga

SEQ ID NO: 37885 - DNA, 532 bp, Oryza sativa
ctaatgttatgagatacacttacagttatgtcttccgtgtaattgaatagggaaaagagaatcaaacgtttttttttaacctttttctatgtcatataggctcacacatcaaaatagcttcgatttgcattatccgaaagagccattcccatcccaagtggtggcccgattcggcctgctaaagagtgtggaggttcgagtcctcttcaaggcataatatatacacctgtcatcaaatttactagttgaaattagttaaaatcacacaaatttaaaatcacaaggcaaaggactcgatcccgcaatccccaacacacgcctatcccactaagctacgagcatttttgtgtatctatatgacactttacatgctagttacgagcataattgtactgtagttacattcatctgattttcgtgggaaaaaaatccgtccaatgatatatactcagatggtcctaaatttttatggaataagttcactcaacttgtggccgagtttgaatttcgtcatcaaaccataataccaaat

SEQ ID NO: 37886 - DNA, 549 bp, Oryza sativa
atgttctataattttccgtatttgaaggtttgatttcttagtgctacattgttgtcagcatatgatacaggaaatgacctagtcagaattatgatgcttggcctgcaaaaagtaaaatttgttggttaccagtattcagaatagatagcatggagactaccaggataagttttcaagtacctattggttaacttgaggtgcttgttatatagtatctaaggttattttcatctactgaaacttaggaatgtggtacgctttgcataggtaccactgttgtttgcttgtgaacattttgcagattatgttgataccacaaaaaggttgtaaacagaagcagtttgcaacgatcacctagaccatcgtttacatcctgttggattaatcattgcctttctattaactggagtaatcgttgtctttctatttccttgataactgcagataaaattttcttctgtcaaattagcaaagatgtacatgaaaagagttgctatggaacttcaatacatgggacctctgaacaaagatccagctttggagtatatg

SEQ ID NO: 37887 - DNA, 1548 bp, Oryza sativa
agtaaataacaacataccttcgcataacgaaaagcatgagaacaagattttcgattcaatatttctttcttaacatctttaacaacctataataaaaatagaaaaaatatacattaaaaaaataaaaaacaataacaaattataaatacagtcaagaaagtaatactacctcctttctaaaaatttcatatataatatcatcaagttcacgacgagaaagctctccatcctataattcatatatttcgaaatagatattagtaaactacaaactaaattcatataacatagtatttcataaaaaaaacattaataaaagactataacttacacaatcagattcatcagaatcatctacaataggtgctttacccaaatttctcttagcagcaggagccatctaaacaaaaaatataaaacaaatatctaaatcactttcttaataagacaaacaacaatgaaaaaggcaaatcatgcagaccatgaacttggctttacaactataattagaagaaaaacaaaaaaaaataggagtgcacagctaaagatgctttatcatggagagtgcacaaggaaacaagactccaacaacatgacacagctgatggaaacaaaagaacaagcagaagatttcactaaagaagtatagcagctgcacacaagctataccaaggagaaggtggcagaaaaataacataacaacaagctgaatggaatcaacaggcacagcaagttaatgaagatgaagaaaacagggtacagttgataggaattaaaaaaaaactgacaaacaacaatcagtagattttgaagcactagtagctgtcaattacacaagaataacttggaagtaaaaaattaggaaatgcttacaactatccaagggacatggaaagtagaatcatgcttacaactaaaaatctgtaaaagtttaatctactacaatatacaaaattcaaaaataattacagtaataataataacaaaaacaaaaatacaacaaactaagttcagacatcacaaaattttagaaactaactagctgtcaagttatcaattctacctcacaagccatcaatactaccctgaaaaggacacaactacaaataaatcggaacacctcacaaacatcccaagaactaaagcataatagaacacaatgcgcgccagccatcaaaatactaccctgaacaggacgcaactgcaactaattcgaacacctcacaaacatccccagatctaaaggcataataaaacacaagcacaccaaattttgttcaaatagctcacatatatacactaacttgctaatctaacgagagaaaactaccgagatctacttcacacagatctagttcacgaacatcacataatacctaacttcctaacagattcgaagaccaccaagagaaaactcaatcaaaataggtttcaaaaagagctcatgcttgacgaaagaacacctacaccgaatcggatcaacaaacacatccatacaccaaaaatcccaaacgagaacaaacaaaatgtaagagatctagttcgaac

SEQ ID NO: 37888 - DNA, 679 bp, Oryza sativa
tttgtgggcctgcatgctcatgaccctaccttggggctttcatagtgcacttacgtgtcatttagccatataattctacgtcaattttgctatatatttgtcgataaattttcccctaaaaatttgacagatgtaattacagtacaaccgtaatgtaattacactgtaacttgcatgtaattacactgtaactataatataacttgtatgtaactttcaaaaatctctccataatatattattttggtaaaataaaggttgtgggaacaattttttttcagatatgtgtgtactgtgattttttttctttctcaccaaaacaaatctttataatagatctaataatttaaaattacgtgaaacttacatacaagttacactgtagttacatgcaagtagagatggcaatgggtacccggtccccggtccccggtcccccgtggagaattctcccattaggtgatggtgatggtattaattgtgtctccatggggaatcaaatggagagaaagtattctccgtcgggtctggcgggggcgggtttggttccccgtcccccgtccccgccctctgtggaggcccgatataaaagtatgtgtgtagtaatatcctgtgtatttgacccatatggcccataaaaaccaggcccaaagcatagagtatataaagcaattgtgta

SEQ ID NO: 37889 - DNA, 628 bp, Oryza sativa
aaaatatgattgttaccatttatttagtcccaacatgcatgctaaattgaccactaattctacagttccctgacagagactacaagaatggattagactaaaaaatgcctccagaaaaaaaaacttgatgctagcagctcaaccagtactaagatctacctctaggttaacagagctgacagcatccaactaaaagaactgcatctctaattaactgcaaaaaactgttactggtttgcagactaaaatttctcatatacctcaccagttgaatgatcctcactgcatgtgtgataattcctcatttcttgggactggtgcattgatctcacatatttagactgcactaagcatgataattacactgcagaaaaaaccagagcacaacctactccatcaaattagaacatcatcttaccaaaactcattcatgatctaaaacaagagcaccatacgcccacccatatccccttctgaatcgcttccataacaaaatgaaatgctactgcagggtacaatactacaatgtattagaaagaacaggagaacagattacaactctcccaaaccaaatcaagaaacataccatacatacaccaagaaaactgaagtactgaacgaaccccca

SEQ ID NO: 37890 - DNA, 532 bp, Oryza sativa
cagtatcatgtcatgtgcatgttttcaaaacaagaaaacatgttaagccatgcaaggtttgcttgttccactgcatgcgtataacaaaaacccgcagtcaggtaacataattaatctaaccaaggcggtgatgaattcttgagtacaattgctggaatgttttgtgttgcgtcaaacaatatatataatatgtgcggccatgaacgactccaaacctccaaaattaaggaggttactgccttactgatcacgttgcagtgtttcttggatttgcatggtagctgatctcagcaaagccctaactgaaatataccataacatgatgtcaatgaggggtcggagttttaaactccgaactcctttgggatctctgacggccatttgatcacgcttgcgtttgcgcagattgaacagtgaaccgatcgagtagagagagccacggcggactcgtcgatcgaacacatgtgacatctcgaaccactttacactgcatctctgacatgccgcgcgccggacttgtggcaattcgtca

SEQ ID NO: 37891 - DNA, 580 bp, Oryza sativa
cttttttttaaagcttttcttttcttctttggtgccatcgaaatgatttttaaatatttccaacatcttgtaggagctcaaaaaaataatccaaatttataaaatttatatccttccaactgttttcaaaatcctgcatttcaatccttgcaaaagaaaccctgcatttcatcgctttctccgtgtataaatataaaatattttttgaacgactataaatttaaaagatgtttgtctataagttgaaatttgtggtttcaagacatgtttttaccattcctcatctaccaactttatactaccccttcccaaactaaagtttgtagtttattcctcacctgccaatttatgtgcaaatttatttttctaactacatgtcttatgttataacttgttgtgtcaataatttctcattttttttaaaaaataatactatgatttcctaggattcgttcttatagcaaagcaaagatagaaaatatgtcgttttgtacgcatatgcttccaaaacagctaaatgatatgttttttttggcaaaaatatccattaagaaagttgcttgaaaaaaccatattaatc

SEQ ID NO: 37892 - DNA, 533 bp, Oryza sativa
tgcagcagcacaacaacggtacgcaccttctgtacagtagacttggatatatgcatataattaactagatgatacctcgcactttgttgtgagatttatagatgagtatatattaaatattatcgaaatgatgaaagttaaaatgttaaaaaaataatatgaggaagatggtttgacacatacttgttgatgatgtgtcatgcttgtatggggatttaaaataggctataatagtaattactcgtgagtgaagatgtgacatgcttttatgggattttaaatgagctagaatagtaattgttagtgggtgatgatgtggtatgtttgcatgttgagctttggcttctaataattaataattgttagtggataccacctatatagaaagtatagatttattgtggtagtatttttatttcatatatatactcctcgtatgcgtcttaatctacgtatgtatactgttgtgtaaaatcttgtgttgaggatagtgctctctatccatttgcaggctgaaaacgtgtcctaggtaa

SEQ ID NO: 37893 - DNA, 561 bp, Oryza sativa
gcaccaatagtgaagaaactcttctcaccatcatatgcgaaatttttttttgcctgatcacttgaattagtttgctcacttgaaaagagctttttcattattgttgctcttccacaacatgaacattggtacctgttttatgttcgctgcgtattgcaaatggtttgccaatacacataataggtatatatcttacattttggtgtgctttacatatttgttctgtttacttttgtattatatatctattttttatttattttgcaatttttttgttatttaataaggataataagctaaaggaggctgcaaagattgattcatcatttacaaggttttccaccaagtatttctgtcgagttatatctgcactttctccacatcagaaaactattattcagggtgctggttttcagaatttgcttgagttcaacagcaattatgttccaaataaatttgctacttggattgcaaaacatgtggattttaagacctcacaaataattttaagagacaaagtaatttcagttacaaagcagactgtttgtgacatttttggtt

SEQ ID NO: 37894 - DNA, 1187 bp, Oryza sativa
tactgtagttagtatcagatatgtggataataaggcaataaataaagccatgtttgatgtccgagggactgtttagattgtagctaaaataaatcttaccaaatttaggtaaagttgttaaatatatgcatccatttagttcattattaaactctgataaatacataagaaatcctgtcaaaacttaacaatattgttaaattgctaaaattttagcattaataaaatttaataatatttattttaactataatctaagcaggcctgaaactttactgaaaattcaacgaaatactactgcctgatcttgttatactccatctgtaatcaatttgtgctcactgtcaaagcttcaagtactgtcctgtcaatctatcatgactccataaatgggtacttctaaatgctactacttcctcgatgccattttaggatttaaagtttgtcctaaaaaaacttctcattttagagtacatattcatttttgcaacaggaaagatttgaaatattattggtggaaattggctggtcacacatgtcccatctccactgaggttctctgcagtactgctcactaacatgtgggccccacaaatcctcgggcctacatgttagtctgcagtgctgcatgcgtagtactgaagaggatctgaattgtatctaattattggcaacatggaaattaatctcttggcaaattaagtcaagctgcaccgtctccaacacgaaatgtaatgccgacacgcaatggcaaaaataatttcagatgtatatgcttgatattaattaggacacgcatatttatattatgttcagatagagaagagagggcccgtttagtttccaaaattttttccaaaaaacatcacatcaaatctttagacacatgcatagagtattaaatataaataaaaagaaaaaactaattgtacagttatggggaaatagcgagacgaatcttttgagcctaattagtccatgattagccataagtgctatagtaacccacatgtgctaatgacggcttaattaggctcaaaagattcgtctcgcggtttcccggcgagttctgaaattagttttttcattcgtgtccgaaaaccccttccgacatccggtcaaacttctgatatgacacccaaaaattttctttttcccaactaaacacacccatagtgaaattgcta

SEQ ID NO: 37895 - DNA, 790 bp, Oryza sativa
tatctatataccatttaacgagggatatcatagtttttcttttcaaatcttaatatatgccaaacaacctagaattacaattattttagaatggaggtagtatttgatgagataagttgttgttaagaaaagaaataggaaagtggaatgaaatccatactatgcttagaagatgagtctgagaaattttcaaaatttaaaatttaaccaataagatgactgagagggacccccttaaccttagtatttaacatacaaatggttgcattttgggattgatgaagtatgaaatagttttctcacaacattgacttccgtgccaaacttgtccacgagtggtgcatggtaaacgcgcgtgtgtacgtctattcgtctactctgtaagttcacttttgtatatggaaattgatataggtgaacttattctgagatggaggtataccaattagtcggataaaaaaaaggtgttgcatgtatacatattgtgtttcaacatatttttgttccaattttgctatatatttatcgacaaattttctcccaaaaatttgacatatataattacactacaatcgtactccctccttttgaatgtgggcaatgctagaaagtcttataatatgaaacggaggaagtagtgtaattacactataacttgcacataattttccaccgttatattagtttcaagatttatgcaagtgaagaaggaaaaaggtcactacgcgcacacatgtaagaggatttgttccaacaactttcgtttcatcgaaatagcatgttacggaga

SEQ ID NO: 37896 - DNA, 803 bp, Oryza sativa
gcggcgagcatctcttcgccgttgatggcggccggacctttgtcaaacgtcggtgcgcgccgcagcgatggcatggaatccggagtccactataaggaaaaaaagctgtagtctgtgttcgtttagagagatttgaagaggattggaggagattgagggggaataatttcacaccacaataagtgtggaataaatcccctccaatccctccggattaaccgaacaaggccgcaaagggagaacaattgccatgtcatcggagatcagaattccgaccctcctcgggtctagctctgacggccttccaaagctaacaacatgtagtcagtcagatcacatggtcaatgtaaccaagacagtgctgaaataactaacattagcctagccacatctgaattattgagtgcaattatcgaaaccgtaattttgtggtgcataaaacaatgggaccatgaaattctactccagcaccctcttttcgaaaagaacaagatatcttccataccaagatcagaggcattcttctacttcgcccttagattactttgccatgttgacgctctgcatagcttttctctatcgtccgtgagtgccacggtgttcgatcgatccgtgtggcgctcgagacggcggccgaccgtcacagctctaagccagcatggcggttcaatcaagcccctgtgtggcccaaatgagactaaaacctgtgtcaatgcggttataatttgaaaatttttagtttttaacaatttgggaataatggagtaatatttttctagcaaaaagcaacatatatgttgaca

SEQ ID NO: 37897 - DNA, 550 bp, Oryza sativa
ggttaccaaccgggagtaaaagacatttccccaccagtagaacacagccatattgatagagtacagctaatgggtgggcctcaaaaaaaatatgtataggacatgatcaaatagagcccatgttggcaaaagaaagctccaaaaaaattactctcccaaaggttgcaaccccgcgaggtcttgggttcctgcccttcgccacgatacatcgtcttcgattatctagatgattattattggcatcgactataaacattttaacaacatatggtaagtggtaagacatagaacactctgattacacactgtctttggaagaatttctgcagagtactactactactaaacaagcaaaacatcaccagaattcaaggccagtacaagatcaggacacggccggaaccataataccagaaataacgagcaactaattaattgatcgactcgaacaatgaaagaaattaagcgctaactaagagcacccacaatagttatctatggctctctatgagagattcatgtcggtatatttttctacttagaagagatt

SEQ ID NO: 37898 - DNA, 715 bp, Oryza sativa
cagaagaagagataatagaagaagtggaaatagaagacccagatttggccaatactaaaggaagaaaaccaaaaagatatagaagaatagtggagaagatgatagaaacttcaaaaaggaaaagtaaagatgagcaacacacaacagaaacaagtaagtgtagcaagatcaagaatccacatataactataaattgtagaaataacaagttttttttgcaggaacaagtgagataaccaatatagggaacaagcaagaagagatgaaaacatcaaaaactacaaaaagaagtaataaacaaatcaattataatacatatacaaaaatgaaactatatataatgaaaacctaatgcatacttcttttttgcaggaaagaaaaacaatactcaagaggaaactcctaaagagaagttgcatgcaaagacaagctgaccaaagacattggaaatgaaaggacaaattgaataccatcagtaatggaagaaaaaaaaaagagatctttcttctatgtaatagcattcagactgtaaacactacaaatgttgtataattgtttttctcatactacattacaagtatgtaatatactgctagagtgctacattatatgtatctaatgtactgccagtagaacaaatatcctcgtcatacaaatttttgtcacacaactcatttaagaaaaactgtgaaatgtatactgaaacactggtcaa

SEQ ID NO: 37899 - DNA, 513 bp, Oryza sativa
cttctctgttatatttgaaattgcagccttttatttcttttcaatcactccctgaaactccagacaatgatacttgcaacactgtcattaatgaaaaccctggaactagtgcagcacataattctcagaattcgaacaagaggcttttttaaagatgttacagtaagttatacttttttttaatgttcttacttatgtttctcgtaacttcaaaattttctttattatgttttttgatctgatttttttttcaatttttcatttctttcacagaattctcctgatgttgtttgtttgggtgaaaataaaatttgtgattcatcaaaaagaatgtgtgttaaagctggacagttatataattcaacaaatcaactgaacaagtacattcgtggaatgagttcttctggcggaaagcttcctatacatggtccaagaagggttttagttcctgctaggcatgcttctgatccttttgtcttttctccaaggcgtcgttttacagtttctgatcaa

SEQ ID NO: 37900 - DNA, 640 bp, Oryza sativa
agatcaatttggaatggagggagttaggcataaccacttttcttatatgttacataatagtactactagtataaggcatgcatgcaagcatccaatttactatgacatcttctctattaaattactacttttttaaatcctctactctcatattatctaattctattggatgcatgcattatatttattaggatgatccaaactacaagataataataattatttcttgctctttgggttaatggaggttgcgctttatattttgaaatggacggagtacactgcactgataaatcttaattaatctggtttgcactgcatattacaggaagggaaaccaatatagattgtgtgttcggcacctcattttcccaatacatctccatcgtttttcgcgcgcacacttttccaagctgctaaaatgatgcgtttttttgtaaaaagtttctatacgaaaagtgtttaaaaaaacaaaataattccaatttttttaaaaagatagtgtaacacctccgcttttcttgagacattaaaaaactaattcgccaaatacctaattgcgaaaatttcgctcttggggtgcgagtctaaataatgccaaggatctaaattcaaattctggtgttccctttcatcgaaa

SEQ ID NO: 37901 - DNA, 604 bp, Oryza sativa
aaggtcttaaaagcatgcgttgtacactttagactaccgccgatgaaagggaggaggtatcagtctagatcaaatatcaaatacactatgcgaaatttgtatatatgtccgtgataacatttcaagcaaattactttgactgtgactattctactgccaaaagaggggtgtcaatacaacacaggacacactttcagctttctgatgacagaaaactgtaataggttatgttggattacgtgtgccttgcatatcttcgcaaatacctgggctccacgttcatgtgggtagttgaatgtactctacaaagctcgttgtgacaacacgctgcacctctctgacactgaagtctgaacctaatactcatcccatcatttttcttactggaaacaaattaagctcttaagacaattttgtcaataatgcgcttctttttttaggacaagtcggtgatctgccattattcgtcttaacaaatgatgatgggatgatacaacatgctgctggtgtctttttacccaagtggaggggtgaactgcatcttgataaacttcacatcaacttaaaggcctacaaagaagcctctagctccatgaggtatttt

SEQ ID NO: 37902 - DNA, 946 bp, Oryza sativa
ggcaatgatcacaggaagaataagtaggagatggatagattagggactaattactcaatgacctggattagcacagtcaaaactaaagtgtactatgcatcaaattggacgcgataaaaagcatattgacacaaagaaatgtatacagtttctgcatacacaatttaacgtaatgttaagcacagcagtgctgatgaacactgaatgactggatgttgtttatggttatttggttttacatttctattgcattatcagtacatttaaatttactaactgtggaattagactgcttcagtcataaatcaccatacaacactgctcggcaaatgtcaggcagtatttcatctaaaaaaaatcataaatcaccatattacgatttcgattgttcactcttactggtgaggatgcaattaacaattgctagatgcaatttaatttcatgattatgtagtctgtctacgtacctccagccataaaattttttgcactcattttatagcttgctctttgaaggtgtcatacatattgctagtgtatgatataacagggccattaataatacagttaggtggtttcacatatgagcatgctgaaaagagggtgcactgcattcagagatatgaccatgttgggggagtacacaattcagtcttgaatttatttacttaagctataatttttttagtagtagaatgatataaaaggtaccaatcctgccatgtgctagataattcaaatggtgtaagcttgcagcaatgacgatttttctaggaatacgtggaaaactggaaacctcaattttatcaagattcatcattctctgattcattgaactgattggtctgaaaaattaggtcttgttagctcatgggagagatggccgtatgcgatattaatgaaaaattgggcactgaagctgacttccttaaaaatagggaaaatt

SEQ ID NO: 37903 - DNA, 2288 bp, Oryza sativa
ctaattacacaattttttaagtgttctgtagcaaattttgcaaaaaaaaaggaatatttcaatgtgcatatgtccctctcttgacattgcagtcgtgtcgtgtgtacgtagaaatagaaatagttgctcctagttgatatcggattgtgttcaccctgatttctgattcttattctgagatcgaatcggatttgctttgatctccgatttccttcctacatgttgtgcagattgctatacatgtgtgtatatatacaaaggcatagcacctggccgatcggttgaggtgtgctgcaacctgcaaaccggagggagacaaagaacatggcgattacggaggaggatgtgccggcggcgaagaagatgaagacgacgacagaggatgatcatgaggaggtgttgctggcgtatcccccgcgcaagaaggaggatgggaagaagatgaagaaggtggtgaagaggctggggaaggaggaggtggagaggctgctgtcggtgacggtgaccgtgccgaccctcagcaaggaggcgatggaggaggacgatgaggaggatgtgcgggagagggagatgctgctccgagccgcatgcgcaaggaccaggtcctcatccgctcccagttcgaggccaagggctacgtcgacgtcctggacgaggtctccgacgacgacgacgacatggagatggagccgttgtaacataacctcacctgtaatctgaaatatactggaataaaacacataccgaccggcaatttcttttgattacggatttattttttaagtagttaagatcttgattaactagacccgtcacatcagcgtcacctctaaaacctacagcatcgagcttcacaatgcaggttggaaacatctgaatatctgccagtctcttgcccttgagcttcacaatgcaagtatgtatcccccggaaaaaaaaatatggagtatgtacggtagcacagttgttggaatataaagctgtgatcattgtttcctagaactgtcgcttcaagcattgttgtcattccttttgcctccgtccagatttgtttctgacagtgtacgtatccattactcagataagagcctgatgtggtgcagcaagcaatggtatttgctatgccttctgaatgttaatacatcccgtgttttttaactgatgcttccaacaacgggagtggattctaatcgctcgaggggatatcccctcgtatacttttttcttctaaatttgatgcaaatagttgtgaaaaagtctgaaaaaaattgacaatatagagtataatggtacctgctagctagtacaccaaaattcaagttcaaattcgatctacacatcgagaaaaaaaaaacaaatttagatataaatagtgcgctagtattcatatgctgattttttcttttttatatctcgacgtgtgagttgggtttggacttaagatttcgtggagttgtatatatgtggtgtatgaatattatcaaatttttccaaatttttcataaccgtttagatggtttttatgcaaacgagggaacccttgagagattaaaatatagtttccctccttgggacatttgttattccgtcttcctctgtccagatgtgttactgagcgagcatccagaattacatgagaacctgatgtgatgaagcgagcaaattgttggtatttggcgtgccgtctgaacatgttcttgttctcttgttaattgatgcaaccattggcacatgggttaatgggccaacccaaaaaaaaaattactagctttgcagagccagccgattgatctgtcaatctgtatgacaggattaattgagatggaatcgtattcgctgttgtctcctatttcctttgtgtacaagttgtgcaatctacggtgtatataatccgattcaggaggtgtgcggctaatataatccgatacgatttcgtattcacgacccaagaatttgtatataatcggatcgaggtgtgtacatctgatatgtgttgaagatcccagactggctagcaatctgacccagaggaagacgaagaacatggcgatgacggaggaggatgtgccggcggcgaagaagatgaagacgacgacagaggatgatcatgaggaggtgttgctggcgtatcggtcgcgcaaagaggatgggaagaagaggaagaaggtggtgaggaggctggggaaggaggaggtggagaggctgctgtcgttgaagctggccgtgccgaccctcagcgaggaggtggtgatgcctatgcctgacgacgccgaggatgatgtgtggca

SEQ ID NO: 37904 - DNA, 633 bp, Oryza sativa
ggggatgcgatgtatccggttttgcggttgggggacgattttgtaactcgatgacaagttgaggaaccgagctttttccgagcggagaggatgccaaatattaagcccaacccagaggtggtgatcgagtcgagtcgaaccatccaaaagagagaagaagaagcaagccccccaaaatccctagcaatggagaaggagttagatggggagagtacatgtgctgctccatgcgagaagaagcggctgattccaagctgtttcgagtggggtacggtgccggcgacgaaaaagatgaagacggaggaggatttggaggtgttgctggcctatccatcgcttggcgaagggaagaagaagaagaaggtggtggtgaagaggctgggcaaggaggaggtggagaggctgcttctgtgagcaagaaggtgctgggcagcgacgtggtgcctgcacggcacaacgagatcctgctctaagagcaagtatacttgtaggctataagccaactataagcttatgtgaatgaaagagaatttgaaaattggagagggttagctctcatacaagagctagctattcacatacttcaagataaatacattaaatgtataggtaagagatagagagaggaggaga

SEQ ID NO: 37905 - DNA, 2721 bp, Oryza sativa
ggaggtgggtctcgggatgagagcggcggctggggtgaggctaggaacggggtggcttcgagctcactatggaggcggcgaggtcaacggcgagctccatgacctaagctctgccgcccctattgtccccgccttcccgagccgagcaacgcgaggcgcgagtaagaagaggagcgagagggagattgaagaagaagaggtgcaaggacctccgccgccggctgcccgagcgagctccgtccacctccgtctgagcttctcgcgaaaggccaaaggggagaagaaggcatcagcgaccggatttgagggaagcggctcgctccgcctccgcctccatcaccggccacccgagctcctctcccctgctctctcatccttctctcctcgaggtatgaagacaccctcccatcatcgacaacagtggagcagcgccctcccagcaactccgccgcctccagcgccattctcggtgcactcctccgccaaccgcagacgccgccgccagtcggccgcccgagctctttcctcctccgcctccaccgccggccacccgagctctctcccgtctccaccgccagctgcccaagcaagctctacctttgctgtcggccgctcaagcgagagagagagagagagagagagagagagagagcagggggattggggagggatttggttgagggaaagggatggcaggtgggtctagggagtttttttatcttctttgctgactggattgccacgttggcgccacgtgtgcaagctcaagttaaaaaccgcttaaaacagtgctcaggggggttatttgttcggtttgcatagttaggggtgaaggatgtctggttttatagttcaggggggtaattcgatcgaccacgatagttcgggggggggggggtaattcgtactttttccttaatgtgttcacgtgttttttccttgacgacaagatctactcatttagaagccaacaactacatcgactctggatttttactttgaatttcattgtttgtttactttctacgttgtctaaacctaacacggatcagttcattataacatatgcttgcataacattagataagtcagatggaccattggatcttttcatcttaaccttgttgttcgcttgcaatgatcagtcaggtttcctacaatgttaaaacaaaatagttcaacacttgttcttgctatgttcaaaattatgaggtagaggctactgatcacagatataaacattactttgcgtcaatttcagtctattactcaagatgcataagcatgtctaaacaaactctctttgtaccataattttcaaaatcaactggaacaaaaagcgagaggtgagaacatgcatagcttaggaggagagggggtggtaatggttgaagatctcatccatgcacgtccatccattttagctttggtggccgctccaagaaacttcgggcagcatgcaacacaccatgcttactatctctatgcaataggtgtaggtagtagtcaacacaacttaatttggcagatactatatctgcgatacggttcatctaccttgttctcacctgaatatgattgatgacatattttgttttttttgccaagcttttgaaagtctagtgacacactacacgcgtgacttggtcgatactaataataactgaggtacgcaatcatgcatatttattatatatatatatttcttggtttggaactaaaaacaagtggagtactagagacaagcctttagtggcctcatcatcaatcgtttagtgattgaagtggtctctttatcactgtacataatggcagcaagcatcaagcatatatatactctcgtaaccatggtgcccatggaagaaaatggcttaaagaaagaatggaagaaaaatggctcctagatggctagccatttcaagcgaacaattgaacatacacaaagccaacacaacaaagtttttaaatttcaagttttgtatgcatgacttccatattgtgttggacttatgagtgatcagtgcaacctgctcgtgtggaagcatctttattgaatgttgatccttactgaagtttaggttcaaattagaacgaaaaacacttacgagttgtgtattcttaggttcattatgggactctatgcagataagtatttagggagtagacacatactcacatcacaaaatagtaagcacgttactagatgcatacacaccatcatactctagttatgtgaagcaagcaatcaaacgttcataaaccaaagtaagcaaggctcgaatttagatgtcatatgtgccattgttgtattcttttcttaagggttcaaatttggaaacacgtacgttcaatgcatatgcgttgtttcgattttagttcaaattgcaggggaacaaaatgtgtgccaactgtcttcttggttgattatgttatgccactcttttcttggttgtgcatgaacaactaagcaattacttaaatcaaactatatgtgtcatgcttttgttgttatgtaattaatgagcaaatatattattttaattattcaattccaagcatcaaacctataaatgtccattcttaattcaaaatccagactcataaataatgatggaagacactattactttaacgagtagaatgcactgctctatgtagaaaccttaggtgtaatcaataaatcactaaacaatactaacacattgttttttttacacacaa

SEQ ID NO: 37906 - DNA, 667 bp, Oryza sativa
attcttaaaaaaaagttattttaaaaattatattaatttattttttaaatttaaaataattaataattaattaattatgtgtttgtgacttgttttgttttgcgcatattttcagtcctctctaatactcttctctctaacacaacctgctgtgagattgcccctaaattatatatggttctgcagatggcgggtaggtagggatgacagagggggaaattagttgtactaccttgtaagtatgattaggattctccgacaacgagtgatcaaattaacaggaattaacagttggatcgtgtggcaaggagggcaagcacgtgttctttgctccaacaaaaagttggactccaaccaaaagttggataaagattaagatttttatggccacgcttttcaaactgctaaacggtgcgttttgtgtgaaaactttctatatgaaagttgctctaaatatcatattaatctatttttcaagtttttaataattaaaacttcaatcaattatgcgttaatatcaccttattttatgggaaaaaaaacataatttttatcttcatcttcacaacaaaagaacaccaccttatgtgctgcaaatgtttgctatcctactaaagctttctatacttaatccattaatgggatgtttgccccggcttgctgcatg

SEQ ID NO: 37907 - DNA, 1107 bp, Oryza sativa
catgaacatgagttagatagcctttttttttggttttagtgaaaagatgaactctctaacctggtctgatgaagatggccatctttcgggcctaccgaccccaagaacgtactgtacatatcgaatgatccatggatggatcgatcaaaagactcgttgacaagaacgtttccccttttatcgggccaagaacaaatgtcgcggcgtgtgccaaatatgcatacacaaactttgttttctgcaagctagtcgatcgtgccggtcaacagccaggcgcaaccaaaggagtcgctacctagctagccactttctactggagtaggagtagtttctacacgatagatcgatgtagcatcacaataatggccagtggccatacccttttcagcggtagtaatattcttcttcattttccgtattttaatatttgaagtcttttttttgcctcgaagctctggtgagaattttgaaatgtgaaagaaccaatcctcacttaattccgatgcattcgcatgacaagcttctcccgtatctgtattatcaactccctccgtcttaaattaaaattagattattattattaacctattttatttatttcaaaataagtttatttttagaaaataaaaaaaatacaatgagagtagataaaatgaaaaatagttgcattgagaaacttattttgggacaaagaaaatatgctatagagtacatatgcttgtgctcatgtcactcatagtcatagagcttaattctaggcactactagtgtagtactaactccggccaaaaatatagctatctagtacggtatgtgacatcacgtccaaattcatagtactaggtgatgatgttacattcagtactaggtagctatattttgagacgaaggaagtagagtttttaagtagtccaaagataaaaagaaaatactggtaagctgctagggtcatcaagctcaactactccatcaacggtcaaggggtaatatttggcgtttagtgacgggtgaatcacacggaaatccccgctttagaatgtgggatgttttggttttggtataaagttaaaagttaaaaattaaatttatagaatttaccagtacacc

SEQ ID NO: 37908 - DNA, 512 bp, Oryza sativa
acctaccctggacataagaaagaccatacaacactccaagcaagcaaggaaaagtaaaatactggaatctgttttggagatgtgttttatgccacttataccatatgaggaggcagccttgacacaatacggactatattccttgagttatggacactacattcaccaaagcttaaaggttatcttaatgcaatttacgtcatcatttcgagtatcatttctctcgatgaaacctttttctcttaagaacatttctgacagggggacatggggagtttttccttttcactgtatagaagggataattctgcctaattgcctgatcaatttttagaactcggagacacttgtgctattaaactgaagcctttttttttgacaatttttaggtgggagagcttgttaaaagagctgttccggttgcactctcaccggagaacgattcaagaaaagaagagccgaagaaagctcatgagaagaaagaagagatcgacaagctggcacacaagcaa

SEQ ID NO: 37909 - DNA, 587 bp, Oryza sativa
gccaaaattatgtgccctaccaaatttttggcaatttgaatagttctttggttagttttggtttgctaaaaaaatgccaataataacacataggttgccaaaaaaaatggctttggcactaccaaaattttttctaggttttgatattttccatattaattttgacatggtagcaaccaaaacgctgaacaaaaaaagaagaccagggcacacactacaagattcatcccagcctcccgctgtatagtaggtgaggtgaaatatatgtactccctccgtcccatcattttaagtacagtcatagttttccgcgtccaactttgatcgtctgtcttatttaattttttttttaaaaaataaaaacataagtcataagtaaattactattcatattttatcatctcataacaagaaaaatactaatttaaaaaaattataaataagacggacgatcaaagttgagcacgaaaactttgataatagctaatgacactcgatggttcagtataataatacagatacatcgatggttgaggagatcggcaatagcttatgacactcgatgattcacatcgctaataattaat

SEQ ID NO: 37910 - DNA, 958 bp, Oryza sativa
cgggagctcagctgactgctcctctaaactcctaatcaatggcgatagcagcttagcaagaggaagagcaactgatgcgtgtctgcaactctgcatgcatatgcatggtgtttatggttggggggtttacttgaagccagcttgaacacatgtgtagtactccaactacattggtaagagagtacaattggagtgagctgcgttggatggatgtgatgaagaagagcgagacggcacgaggcaagcagcaggtggtgaggctgcaaaatgagaaggaacaagagcaagtgacgaaagaattggacagggagggaccaacaaaaggagagacactttccaccccgaaaacaggatcgatgcatacatacatcgacgatcgatcctcgcgtggagtggatcgacgagtgaagaagacagtgccagaaagcctgcctgccttccggggtccaatgcacaaagcaccctctctacctactgccatctttgccccatatccccccttgacccttcccttctcttgttatgcgtaccagattacgtagcctcataatctctcatatcctgcgtcaaatgaacaaggcaaaatttgctacaaaacatccaaaaaatgtgtaattagctgtacgacactataaagacgtgaatttgcttgaggacactctaaaagtatggtaatttgcttgaaggacgctagacgtattaagatataatattcagtaaattgatgagagagacactacgtaaaatgacagttttgccctttttttcttatctacaattgtgtcacaagtataagcaagattatacaaagcagcctgactgatccagcaagccagttgctgctccccggcagcggcgacgagctggacgagccctgcttagagagtgagttgatgctcccgtggcttgatgctcgggtacatgatggcgcgcggcaacgccgagtggccgagcccta

SEQ ID NO: 37911 - DNA, 1008 bp, Oryza sativa
atggagataatagatggagatgttgttggagtaaacaagagtttgacttgctaaattagatggagagttggccaaatagacatttggagagtcagagttggagaggctgttggagatgctcttacagcaagagctcaaacttcttgagaaatttccttttgagtctatctctcatctgattcctatatttttcctacggggcgtttttcttatggtccaatcaaacgatcattcatatgttttacaattctttgttttacatttgcattactgtcaaaatcctatatttttttattcctccgttttttagccatacgattcaaaaggcctaaacatttggcattcttctcctcaaacatttaagggactgctaggaacatagaattaaaatatcatgacaccttaaatccagataaataaaaaaaacatagaaaactatggaacagtttggacgaagcacaggaaaacacacatgatttaaaatagagaggtgcctcccataaaaaaacatgcaatccatatgaacttcaaaggaacccagagacccaatcattcgtaccaaggagcctcataagaatttttctaatgagatttaaatactttgaaatttcacttttttcatgtgttcaaaaggagctctgaaagaaaaaaatagaaaaaaaataagaaatggattgattctagtgaattttcagtaaactcctcggtccaaaggagttttaaaaaatgttcatgtttccccttaaaaaccccctttcacacctcgtccatttcatttaaaattgaccagttgaactgatcaacaaaccagatgaactacatcagcttcttgattttatttatttatttatgtagtactctcttacttttacatttaaaatgtaatatgttatagtcttatcctaagtcaaaattctataagtttaatcatgttttgaaaaaatatagcaatatttttttatgccaagtaaatatattataaaaatatattcaatagtggatttaatt

SEQ ID NO: 37912 - DNA, 596 bp, Oryza sativa
  unsure (1)..(596): unsure at all n locations
agtgtgggaggttggtaacgatcgctatttttgtttttaatcggtggttacatgttgcggagcaggagattgctaattgtagggacggatttaactcgccacataagccattggatgaaaatatctaatggttaaaagagaattatgtacaatttagtggataaaactattacattttatatcagtatatctctactatattatacaaattgaagatgtttccgctggaattttgatacgtcattcgtgttggtttttcagtttgttgtacatcgtctatacacaattcgacgtaagtatagaataactattatacactctcctcctatctcaaccactcctnctcccagcccaccccaactggcccacaccatcctatcagcccatcctgcgtgccttcactcagagccgcaggtgccactccccgtatcaangtcttttttctttcctttttttcggtttcttttctcttgatcatactgatcctcttcctattctttcaaactcctctcttttctctccatgatctcttccttcctcttaggtatctctttcaaatttttggtattaataaaaaattttgttttgatattatc

SEQ ID NO: 37913 - DNA, 647 bp, Oryza sativa
atgatacctttgaagtagatccctggttaacaatggtgtatgttgattccttcacctgttacacgatttggatggatcttcttcacatttaccactttgggattgcaaaagagcagttccctggtggttattttttcgtataaattctttcatgtgtatctttgctcgttgtataagagctatactgtataacttgagtgttcactagcatggcatgtacagatgtcttgcctcaaccgcaagtattgggtgattttctttcttcttcaaggcctatgtaccatgtcacaccaatgtctaaggtttgagatctttgcattttgtacatcggaaggattcttgtatcatcagtttgataaaagataggacatagagctaaaacagcttcaacgtccaagcattgcaaaaccagaatagcgtgattgcatactgcaggctcatctacctttacattttggcttcagcactcaggacatcctgtaaaggtcactcattcacatatgcctgtttggtacagctccaacttctaaatataactttacgaaatgggtctgtaatggagatgtggagctgtctaaacctaacttcacaattctaggtcatttgtgagaaaacttcactcctagtttttgggggagctgaaactg

SEQ ID NO: 37914 - DNA, 649 bp, Oryza sativa
ttttttaggtcgcgatagatatctctatcctattatatggatataatgctcgggtagattaaattaaaaacttatgacaacaaaatatttatacccgcaaaatagtttgaatcgaaattgggtttgccttatttcgcgaataataaagttaaaataaaggaattgactttcgcattcgactttcatttggatttatttggattttatttgaattctaattgaattcaaattgttctttcgcacataattatagagaccgagggagccgcggatccgggtgaaggtcaagaccacgaagaccttgagcaaggcaagtcatcactattcttgaacatattgatcccaattgcgaaattgtttttgtttacaaataaaattgcatgcaaagatgaacatcctacttgtgattatgccatgccttgattattgtttaccccttattccttcataaccatgtttacgtatgagtccctagtcaactatgacaaatgcttagaaatgctattctagaatcaagcatactaatatttgtcaaatgctatatgcttgggcaattacctttgggaaggtaattgagatgccgcatgtggagacatgagcgccacattgccatgatattgaggacatgatctgtgaaaggagaaataaa

SEQ ID NO: 37915 - DNA, 1837 bp, Oryza sativa
ccggcgcgaggaggtccaacggccggctggcgatgcggcggcggagacacgggagaaggggaaggcggcagtagggcgaggcggcgtcggcgggctcgcggtggcggagtgacgacagcggctgcgacgcggggcgaggaggtcggatggcccgccggcgatgcggcggtggcgcgcttgtagtagtcgtgcccggcgcccatgagcccgccccaccattccaggttccacgttgtgtgtaaagtgtgtgtgagagagagagaggaggaaaggagaggaagggagaggctggcttgctgacgtggcatcctgacatgtgggacccatatgggtcccacgttgactcagctgccacgtcggacaaaactagggtcaaaaccgctgagggacctagtttacactggttttgtaagttgggggatgcgttatattcggttttgcggttgggggatgattttgtaagtcgatgacaagttgagggaccttcggtgtactttttcctctcctctcggacgtaatctgactcggacaagcccagcctactaggccacacccggacttctgcaatcacacatcctcaccattgttaggaataagttcatttgaggccccttagctttacccgaatccgatttctgtcaatccaaaaaccagatacaaccggtccctgaactgataaagccgatttttgtcaccattgttagctgttgttatggagcccccaaccaactatacatccgccactgattaagaattcaaaccaatattgatttggtggtaattctctatctagtactacatccgtcccaaaataagtgcagccatgagaatccgtatccaatgtttgatcgtccatcttatttgaaaaatttatgagaaaattaaaataagttagtcacacataaaatactatttatattttatcatctaataacaataaaaatattaattgtaaaaaaaattcaaataagacgaacggtcaaacgtgagacataaacagtgcaaaactacacttattttgggatggagggagtacattgtctatttcatggtcataaaaggaccttgttcacactagacagcaagcagatcctcgctgggttcaaactatcgatcattttcgttattggtactggggataccgatataaaatttggttaaactttgcaatttttttaaaaaaagagtccaaaacttcggccaaataatttcgtatcggatggaggacgatagaaccgaaatttcctgatcctcatcgatttaagccttgtttagatcctaccctaaaattttttaccctatcacatcgaacgtttgaacacccgcatgaagtattaaatataggctaaaaaataactaattgcacagattacgactaatttacgcgataaatcttttaagcctaattgctctatgatttgataatgtggtgctacagtaaacatttgctaaggatggattaattatgcttaataagtttgtctcgcagtttacatgcagaatctgtaatttgttttgttattagactatatttaatacttcaaatgtgtgtccatatatccgatgtgacacgccaaaacttttcacccctggatttaaacacccccaccctggatctaaacacccccttacacaaggggcttaaattggccaacaatggaagttccatgttttccggtatgtgttctactccaagatttcgatcaccagcactttgtcatggatgggaaaaacagaggaagataacatacatcctctaagtgaagaaagtcataaataatactccagtgctagaaatatattcatatattctctgtagacaaggacatgagggctt

SEQ ID NO: 37916 - DNA, 630 bp, Oryza sativa
ttagcagtctcaaaagacgagtcataatatagacaaaaacaaaaccatcgtaatgacagaaatcttagtgaaactgttggattagaaaaatgaaacgggttgaatgttaagccttaggggagtaacctggaacataaacaagggaatgtgccatggtaacatgggatgtagattaactgtgaagaaatagaaaattatcccaaaactccataaggatgacaggaatatgtaactggaccaatttggcacactaagcaactaagaaatacccataaagttaaaaacttgtggatgaaagacacacaaagataagtatacagttttaactttgtgtacataccttcacaagacttggtttcaactcccttgattgatgccctcgatcatttgaaactctattacttgtatctgcagagaaatttctggtggtatggttgctacaccagcctgctatgaactaaaaacaggtgtataaatggaaggatgactttgtaaaatgggtgtaaaatgttgtccgaaggaaaggacaaaggagaatagtacctcaatttgtgaactctgtatcctgcacaatgtagagagcagtgagattagtaatagaattagccaatggctcaaaggtagcaagaa

SEQ ID NO: 37917 - DNA, 780 bp, Oryza sativa
ttttccgtcggccgaaagcttccacacaaagctgtcccgggaatccggctgtagctgaattgcctcaagccgatcccacaagtgcagcgcctgcatcgaaagggcccccttgatgtcatggacggacggacccaaccatatgagaggaagctaagatgttaggggtctaatctgacggccggtgacagaaatggaatcctatattttacaatcaactgattttctttcttttacaatcaactgattttctttccaagaaaatatttatgatttaaacatgttatgtaaggagagttggagacagatagaatcatcgtgtttcacgctgggcaccaaagaacagttcgtctaatcaatcaaaagcaataaagctagcgcactaggattacacatgtggattcacagtgaaactttgcagcatgcatggtcccgtgtaaaagttgattgattattgtactatgctaatgggtggacactgtgattagggactgaattatgcagagtaaactccacgttagtaatccattaattccccctctccctttaaaacctgccccttgcattctgttgatgagcacctgcgcctcaccttgtctagttagcaatggcggctgatcaccttgtcgtggccatgcttctcctgctggctttgtcgccgccggccgttgctgacgacacggcggtgctcggccagaaaggcggcgtcgtggaagggcaggcagcggggccggggaggtacgccgtgatattgaacgccggcagcaccggcacacgggtgca

SEQ ID NO: 37918 - DNA, 1403 bp, Oryza sativa
agagagagagagagttttgtggaatccaatcaaccaatacgccgctcctcctcttcactctccaagcaagcagagcacaagaaagaaagcagagtgagtgtacaagcgcaagaacgcgctttgctcattaacacaccacactccccgaggatggaagacaagcgtcttcttcgtcttcctcgcttgttctctgcctgcccctgcctagcttaatgtggaactaactaggagtattaattaattccttccactaattaccaagcggcaatcggcggccacggccagtgaggtcaccgtccgctccgacgacgacaagctgccactgctcactgctctctcgagtctggaagcaggcgttgctcggcttctctcactatgaagggccaccattccttgccgccgtcgacgccgcccaagcgccgctgcactgccctggccgccgccgtcccggcgctcgtcgtctgctccatcctcctgcccctcgtcttcctcctcggtctccaccgccccggtacctcgcctcggatctgttctgtaccttacctacatatacatgctgctcacctcatctcctgcttgtcttttttttcttaactgtcagcagggcatggatcgaaggagcgcgccgcggttgtcatcagcactgtacgatttcatcaacacatttttccccttccttctgaattagaacatgctgcatttcgaaattacttattccttttttaatccggtggggtgatttgtgcgtcattttaaattaggaattagggtttagcaagcacaagcatctggatgggagaatgaagcacaagctactcaaggtaatgctgcttgctgattctgcccattggctgactcataattcttagtcatctggattttttttttttttgagggaaggctcgcgcccagctttactgaagaatttttccaatttgacattctgtcctgccaattggaagatttgtgtgactctggagtaagaactgaccttctgaatataaattcccaaatttccaggcgggttttatgggtaggtttctgtagtataagaaaaaacaagacggcatcggttcatgcactctgcgtgtgtgtgcagtgtgcttgctgacgctttactgcgttctgccttgcttagcaggggtactcactctacactgtaagccagggctttgttgctattctcgtattgccaccccaaaattgttctttgccaatgtcactgacaaatggacttggactgttgctgctgtgagcaacatttctgctgaactgcacatctttccatttcaactggtcatatttctcttgtgtttttcttttcggccttacattattgctggctttcctcctaactgctgttgtcacacctaattttcaattaacatgttgttgtgaaaaat

SEQ ID NO: 37919 - DNA, 1657 bp, Oryza sativa
atgtgcaaactcctggtcaaaacagcttaaaacagtgttagggggtaaattcgtccggtatgaataattgagggtgtaaaatatctggtatttgagtttatggcagtaattcgatcgaccacgatagttcaggggggtaatttgtactttttccttttcttaattcttcatatccatccaatttgatgaaagagtgaaaacctttgcagaataatatagtcatcactatatgtctacatctattacattggagtgccgttgtcctgcctatggcttccttttagttggagtggtcaaaagacctaatattcttggagcactcataaaagctaaaatggatgaacatgcatcatagacaaactcatgctgatataacatgcatttatctttgtctcctcatatatatgatcctgtatgctagaaagattttgccattaataattagatgggtcatattatcatgattgaagatcttaataagaatttatattaaataaaacatgtcattgaaaataccatggatgtttttagttatagttttcacataaattggaaattcaaaattaataatacgaagttgaacgtgttctggaccctcaattttatatcgtattaatttagttccaaacttgaaaatttataattagcacattgtaactgatatggactgttaggtacaagtcgtaacaattcaagaaatactaatgtggatagactcttcttttaatctatgttgctataatttggaaaataatcaacatatttgacaaacaattaaaatttgaatatagatagcactaacaacaactagttatttctaaccctttatgattgatatttgatacaagcgaacatgtaaaagatttgagcgccaatacatgcgttcaaatataatggaatatatttgaaaggaagagagttaggatagttaactttttgttggtttgtctgattagttagagaagtaaatatatattttggtcatatatatgcatataaaatgttaagtgctttaatatatatatatatatatatatatatatatatatatatggtttatatatgcatgcagcaacagggccatgcaaatgataaaaaaaaaggcagctcgatctttagtcccggttatttcatccgggactaaagatagcgatctttagttccggattggtagtcccaatttgaaaaccgagactaataagggtttctccaccagtgagggcaggaaggccacctgcgtttgtccaagttgtcggaggtcaagcagctgccccgagccgccaggtacatgaacattttacagcgaggagagaccttagccccccagactaactccacccatgccgcctttgttttccccatgaaaaacatggagtaagctgaggaggaggagtagtttccgtcggccgaaagcttccacacaaagctgtcccgggaatccggctgtagctgaattgcctcaagccgatcccacaagtgcagcgcctgcatcgaaagggcccccttgatgtcatggacggacggacccacccatatgagagcaagctaagatgttaggggtctaatctgacggccggtgacagaaatggaatcctatattttacaatcaactgattttgttttttttacaatcaactgattttctttccaagaaaat

SEQ ID NO: 37920 - DNA, 1074 bp, Oryza sativa
gattcggcccaagagagggaagggggatttttagggtttttctttttataaaaccttttcaactttgtttatttcttaataattactatttgtgctcagataattccactaaaatttatttacacattttaggcttttaggaaatatacaaaaatcctctaagccttatttgacttttaactttgcacattttaattgttggaggcttcgcacggattttaattattctaggcataatttagaggatgtattttagagtcgttttgggacgtgacactataccagagccaccacattccgggatgtttccctgtgacatgtctttgattataaaattttctgcatcatcaaagcagaaatcatccatcacttcgttacgaccaccgacttccccatgaaaagtccatattttgtggccctccttaaatccttgctataagatgtgcgacaatacttcattcggatcttgcagcaaatttcgttcttacacactttgcatgggcaaaaaacgctcctcaaattctccctcacagcatgtgcctttgcgacctcaacaaatttggctgcttccttcaagaacgttggatgagctcttttcttgctgtacatccatgacctacaataaagcttgtcattaatacatccatgcccgatggtaaaaaagaatgtatttaaattggagggaactaatcacatagtaaattaaagttttacggactatttaaacagccacacaacaattttaagcattaataaaatattgtccatttcttacaaatgaaaaaaatcgtccttttatccgaatgaaaataaatttaatagaggcaaacccaacttttcaatttaggtactaaatacttttataaacatgtaatggaatcattatgtatttgctaaaaaataagaaaaaaataaaaaagtaactacaatataccatttataaaagtgcaagtttcttcgtattgcaccgatgaaaactgacaaaaatggctgcaaatgaaggaggagaacaagctctacaccttttatatggaacccaatcaaagatttgagatcgaaaacattctcccataa

SEQ ID NO: 37921 - DNA, 633 bp, Oryza sativa
actcccacggtacaaaagtttccatatgtatgaagcattagtactcaagggcgtgcctacgttatactacccggtgtcataggacaccgggtagattattcaaatcctatataaattacactatattaattaatatattagtcaataattagataattagtatgtattggacccccggtaatttttgttctgggttcgccactgttggtactgctgccccttgatcccttgtgcacgcacgatatgcatgccctgcatgctcatgttcacgtgaatatgctcaagccatgcacgagttccaaagctgcagcttccctgcccttgtttgcatgcaattgctcgatttggttttgcttcttgcctttgctcgttagtctttgcacgccatacgtataagacagcacctgtgctatctgtccgtgcctatgcacgcaccgcagtcgcagccctcgtgttcaccgtccatgaccccgtcgtcccggccctccacgtccgccgcgccgcgccacgctcgccggtttcgccctttcatcactggcctcctgccgccgcggatccgcgatcaccacgtgcgtcgggcgcgccgtccatggcgctacccctcagatctctccagtcgccttcggccacgcc

SEQ ID NO: 37922 - DNA, 755 bp, Oryza sativa
ttaagcaaataaaataaagacaggctccgacacagttatgccacacaccggcataaccatgccccacaagatcccaacaagaagacaaacgagaaagaacacacgcgcaagcctactaactgctcgtctaccgctgcgacgggccaggacggaaggtgagcaacagcgcatcctccgtgctaccgacgccggaggcttccccctcctgaggaaccacgggcgcgggctcggcacgaggggtctccacgaagcaagtccacgccagggactgacgaacaagctcgggcctggaggtgctctttcaggcggtgatcttctggctgcggcagacgcggcgacgcttggggtgacagacctctccctgggcgatcttgagctgatgcagctgtgcctccactgcgtctaggtccttcttcagctgcagattctcctgacgcagctctaggatcttcaggttgttctcgaccatcccacggcgcaccatctgatggaagtcgatacgagccgcgtcgtacgcctccaccatgcgcgccaggtgcatgatggtagcgtcatcctccgagctagcatcccggaaggtggcgtagtcgcgggctcctccgcgacgagggtggtagcggtagggcgagtgctgcagctcgtccgggtagcgctggtgaagagtgccgatggagaggagagcggcgctctggcaagcggcggagaaagaatctccacccgcggtgactgccaacgaagtccgctcgggtgagcca

SEQ ID NO: 37923 - DNA, 1195 bp, Oryza sativa
gacttcgtccatctccatccgtgtacttttgtttataaccagactgagccacaaactaagccttacccactagacatgtggaagtacggtagtgctttgcaacagaggcccgaagaccggtccttatatggccgaggtgctactatcaaaaccatgcaccccgagcccagcctaaaaccattttggggattttgaatagagggggcggtgtgaatccaattccacaatactccaacaattccaaagtgtccaggtgatatgaatatcccaaagtctagagttgtaaaaccgcctaatgttacctaattaatcagcgaagcatctacctaaaatcatactagtggtactatgagtagagtgtccactagttggggttttgtttaatctagggtgaacaaggaaataataacaataacaataataataggtcataacaaaggtaaataggcatggctagataaaacagtgataacgcgggaatttaaataaagcgataatgcaataatttaaagcaacataattttataaactgggattcaatatgttcaaagatgatgtgacttgccttgctcgctttcccaaacgtcggcttcaacctccacgaagagcggatcttccgaagctgcagcgtctacacgaccaacggaaaagaaaaggcttttactctaataaactccatataacaagcagaaacaaagcacaaaaatgggttcttgacttcttaaggaaaaattagagacttgaacggtccaattccgagttcaaatggccaagttatggccatttgaagtttatatgctctttaaatgaatatttgcgaatttcttcatttaaattttaatttaaaaaaaagctttattgcgtcagccgaggggagggggcgcgcggactgggtccacgggagtggggcccacgagacagcctcacggtccacggtggaccgggcgcacccgggctcgcaccggccggcgtcgtgggccccacgcgtcagccgcacccgaggacgtgggcggctgacggccgggccccacgcggcggccactcggcgcggccggcgggagacggcgcccgcgcccctatggtcgccggcggcggccataggcacggcggagcggcggccgagagaggggaagggaagggggaaaagaggcggcggtcctcggctcaccctaggtcgacagcgacgacgaaaaag

SEQ ID NO: 37924 - DNA, 589 bp, Oryza sativa
catcccttcacctccgtgtcgtccttcatcatgggttttgtccatagcaacctgcatcaccagctatgccggtctctaccctggcgtcgtccatcgcatcctccgcaagtgacatttgctatggcctccattcgtaggcactgtccttatctcgctttgtcggcgttctcctcacctccttcatttttgttcttgtgtgcggttaggtcggtccttcattcgcaaggtagttcggtttggttttttttgccacttgttaattcaactgtcatattttaaaaaaaatgttttgaaatgctaaagaaattaacctaaacaaagaaaccaaagaaaccgactaataaccactacaataatttgatttgattactctctttgttcacaaatatataagcatttctctgagcttgtagcggagattaagttcaaggtgaaactactttggtatccttgaaagtttatttgacccaaaaagatcgtgctagcgacaaaaaaaatgtaaatgtaagatatatatcataacaggatttggataaattttatatgccagaaatgtttgtgggtaccgagctcgaattcgccctatagt

SEQ ID NO: 37925 - DNA, 663 bp, Oryza sativa
aacgagaaccatgatttgtgtcactcgaggaagactcccgatagcaatcaaccctacaacagttgccctgtcattaaagtaggtgaattcacgagtaagagagatgaccacaggtagaagtacttctatggggacaaggatggaaacttttgtgacatgaccaagaagtcaagaagtaaaaccggaacagtggaatctaaagctcggttcaaccttgggctttgtatcagatgctactagaataaaagcacttgcactagtatcgttcaacgcactttcctagcaatcgatccatcgagaaagaacacatcaaggctgaaggtgtaaaggaatacgttgaatgctaaatgatgacaacatgaagagaatagtggaaagtaaactgaacataaagaaagtgaatccgagttgcttgttcgtgagagctattcccagttatgaatcaagtgatatgttcgaagataatctacagaggtcagattaaaatcacatctaacaacgaagcctcagatttggcaggataatgattagacaataacaaatccagcagtaaagccatttgggaagacgtcaaagtatgtcaagtgggataagttggttctcttgggaagcataattcaaaggcaaagttatcgacccttgcatcaaatagcagaagtagct

SEQ ID NO: 37926 - DNA, 555 bp, Oryza sativa
gtacacaaatttattatgattctgttcgacaagaatgactcaaccagcaacatttagaactataaatgataacaataagttctcaaggacacctaaattggttgccttgccttcatggtttttgcaagtacagtgggacatatctattgcagtccactactatatgtgaatctagtatgaactgtgcatagattgcagccatttcaatttaataatcaacattggtggcacttagaactagaaagctgagaccttttggcatgaaaagttggtcatgatgataagaacttttagctcgttcatagtgatccgcaaaccaaatggaggagaaatctttcccacttctcggatcaccaaagaccatggagaagcttgataccacagaaccactagaaagttgcaacctttttaagcctaaaaagttagccataatgacatacttttagggctccaaaacgcaaattttttttactcttccttaatcatcctatggactatggtgatctagggctagtactacaaaccactgatgtgatgatgcatagatagatatac

SEQ ID NO: 37927 - DNA, 1259 bp, Oryza sativa
tacacggtgccacacaattttcacgttaaatacatacctggagtaaataattttaaagttattgattggtaaaattctaattgtttcacctctcatccttaactaaaatatctgtaattacggaaccgaaggaagtagagacagtgtactttaataaaataaaatttttcttttattatatattattaaaaaatcgttgttaatatatgttttggagaccatgtccatattaaaagtgttacagtaagaattataaatttggagggagtatacatctaaatgagaaactgtatgggttagctcctgcgtaaaaatcgcctgtgtcgaagttgtttgagatgtccaagaactgtcagggatatcagatgtgctcgacggccaaaagttttgcacatacttttctataattatgtcatcacatcagcaccatgatatggaatctgcaccacaccaaactaaccatgaaactgtcaattttttttctactatattgctatcgtcatacatgagtactaaactagaagcattgattagtcaaccttttccaaagaaaagcaacataagcatgtgcgtaactagctagcaagtaaagctaagcttgggaaggaatatataggaatttttaactgcctccataattacttgcagagaaataaaacttctgaagcagcagaaaagaatctaagcacgtcttctttctctgtagttaagcatgaaatttcaagtctgtttaattgtcttccttgatgattgaaccagtcagccccaacatctctataaatagttcatcttgaaccataatttacttcatccaaaatcaaatgaagtcacctgtccatctcgaacatccatttggtacacaaatagttaaggataatatggcgagatcatggtcgcttcttcttcttccatttgcgcttgctttggttgcttccgttgctcaagctgctgttgtggagtacactttcaatgtaatattctatctagttttcatatacttccatttatgcatgcagttttttttcttctattttatcgcatatatatcgcaacatgcatgaacactgttatctttaattcatgagatagggcttttggctcaagacgtagacatggcataaaaaaaactctcctggaatcaaatacataaattttaatactatttcctgcagtttccaaatatggactattattaatatgtttaagaatttagtttgaaactgcaaaactggtgtgacaagattcttcacattaacata

SEQ ID NO: 37928 - DNA, 1663 bp, Oryza sativa
gaggccgccgcgtcatcgtccattgccggtgccccattatctactgttgaaaccgccgccggttgccctctgctgccgaggccgcctcgtcgtcgtcgacgctgccgaggtcgccactcgacgccactgtctttgtctccttcgccgttgtccgcctcgcgcgcgggggatccaccgccgctggcgctgtccacctcgcgcgcgcgaggagccgccgccgccgtcgcctcagccgtccgcctcgcgcgtgcggggatccgccgccgccatcgctgtccgcctcgcgcgcggggagccgccgccgccgtcgccatccgcctcgcatggggatgcctcaatgaggagggagaagagattgaggaagagaaagaagaacaagaagaaagcaatagaggctgacatgtggatccctttgttattttggagatgtaaatggagaggatgttggagtcaacacctagtttgattacccaaatcaaatggagagttagctatatgggtatttggagagtcaaatttagagatgctgttggagatgctctaaatttggccagttgggagaggagtttggccagtaatttaacttggccatctgagtagagagtctgttggagtgctattttctgctgaagttaccaaaatttaacttagagagtcagatggagaagctgttggagatgcttcaagtttcctccaaaatccacgtacaatgagtcattccataggatttggaaaaactttaatcttttaaatctaatggccaattagaaaaattttctatagaaattaaatcctataaattttctatataaattatttgattcaaagagctactcctacaattgatttttggaggttagttttacaaagttttcagtttttacctgtagtgtgaaacttgtacacagtacacatgatattgacgaagccattattacatgttaagtgtgaacattacaacagggacaaacatcggtccgagtaatcaaccatgggaaaggtgaaaaagaaaacgaaaaagaaaggatacacggagcccaagggcaaatgacacgctggtactagtccagtagactgcttgccgttgcctctcttcccccataaattacccctcacacaatctcgtgatatgctcctgctaacctctccctcttggtctcctcctctcggcctcttcctctttactccgcttcccccttcgcgccatcgcctcgcttgcgccgcgccaaatcccataaaaattccacccaacacaagcgttaggcctcccgcgcgcgcccgtccgctcgccatgctcgcggccgcttccccttggcgtttgtagatgggctcctcctccctcctcctcttcccctcctcttcctcctccgccacccactcctcttattctccctcctcctcctctcatgccatcacctccttgctgcctcctctcccctccgaccaccatctcctactctacctagaccaccaagaacaacaccacctcgccgccgccatggtccgcaagcgccccgccttcgacatggacctgccaccgccgcgccgccatgtcaccggcgacctgtccgatgtcacggccgccgcggcgccgtcgtctgccagcgcgcagcttcccgcgctggccacgcagatcccggcgtttcaccacacggacatggac

SEQ ID NO: 37929 - DNA, 2921 bp, Oryza sativa
tatacggcgaattcgagctcggtacccggtaatttgcagtgtacagtagggagttactactgtgctgtgctctctgcctgcaatgcccattgttgcacaagcactgcagcgcacgtctctctcgtgccagtgccaatgccatgcttacaacagtctgctctgtcttgggttcagttgatgactcgatcaacaagcagaagctggaaagagaagagaaaattggaaaaataaaaaaagaaacaagaacagctactgcagactttacagtttcgccattgctgagctgacgatcccttcctgggctgggttcacatacacaagagcaagaagctgacacgcacacatcgcatctcatggccatcgggcgtcgcctgttgagccatcgccaattcgccatcgcatccggatgcgatgggcggcagtggcacagtgtgggctcgcgacagccatggacgacgaccaccacagcggcggcgaggtctctctcgagggtttggatcgctattaatgatgattgtgatcctgatttttcggatcgctgttaatatgctagccatggtaaagatcgtctcccaagctacagcgtcagataaaatcatttcagcatttctgactgaagtgaacgatggccccgccggacgacctgtttgttgctaccactccgcgatgacaagaccaaatgcctcagaaattggtctgcatactttgatctgaagctgtctatttgacggacgggcttaacaaatgagctctacaatcagttgcagggacagcaccaactgcagactgaaactcgcctcattttttacagttttcagtcaacaatgctcgtggtctgatttttaatgacattggtcctcagaagtttatagtatagccagctgctggctccaaatcatatatagtcaacttagtagactattcatacaataattacctataaatatatactacactattaaattctgtggtcccaccaatcatacacacatgtatcttggagtccgtactgcagctggctacaaatctgtagcccgctgctcttctcactctccttttatcttctcactgctggcctgaatgctggaagggtacattgcctgatcaagcttaatcctatttgcagacggggatgattggaggatggaattcggctttcttgtttctgctgtctgtctgtatgttagttggtagcaatattaaatgggggaaatgatgagcagaattcagaggagttgggtgaaggtattcattttggtagtaaaccttgcctactcctgcctcactcgccggagaccagtacggagtactgcttactgtacactgcagtctctcctgccatgccttcccgtactctgttatccgctgatctggcaacctgacatacattcatgctagtatttcacagtaactatgcaagcgtaaaaatggaagttacattggatacaactgttagctgatcagcactcagcagtagcaggaaaagtacgtacagtgcctgtggaattcgctaacaatactgcgtaaggtgaaggtttgcagtcacacatgcatttttgacgattctgaccaaattcacacttcatcagaagtggagcactcaagctaacccatgcgtgtacatgcacccatggttcactgatgacagccatgaggataaatgtggcatgcgttaaaactgaaaactggaatataagtgaaggaaacaggagagtacaaactcacttttgctagtaattgggcttgaccttttgtgccatatccaggcccgctatggccttcacatacttgcgcaatcttacacttggagtatgtctatttcacctcccttgtgctcttgccctcggtcaaatcgcatccctcaaccgtaaaaccgggtatcgtttttgagggtggtttttttgacgtggtagcctagtcattgaaaaaaaataaaaaaaaatatatacattgggtctacatgttggtgactaattttattcttccttctctaccactcccttctctcctctccaccctctctccacgggcgaggttgatgatctacacgatgaattcatatggtcctcctaaacaactccattgtgtggtacccaaaagccgtcaagctttgcttccacggtcacaccgtctttctcaagtgcttccaccactggtcacgtggcaggtccttccacgacatgaagcctaatctcaccgagtgtcgcatgtggagttcggagatggcggtggccacaataatggaggtgggcttaatagatgcctcgtgtgtggaggaggcagcgtatcaaagttatataggccttataatccaatcaagtttaagaagagtaatgtaatgtaagatacaaatggatcaacgaataatgtttgataagaacaaggatctatttgattgggcttaaccttgggcttcactttttccgaagacacgaattaagtttgataaggataaggttgtgtttgattggactccaacttcacttttttttctaaggctaaagtctaaaataaaaatgggttagagtgatcctaaaaaagaactagagagacggtgtggatgctccataattctgctccaaactccactttcagtagttatatttagaagtaaaagcccttctaaacatgtactaaatacactgagtaagagcacaaggtatgaagatgcacaaggatgagcaacttagttggtagcacaaggtgcattctttcaccaaagaaaagtcttgttcatccccataaatttcagttggtgatgtatttgcaaattggaattctctatgcaacctcgcaagaatggacaacatcacgggcctgttcattttgatgccattttcaaccttaccaaattttggtaaagttgccaaaaaaaaagtggctatatttagtttgctgccaaattttggtaactatataag

SEQ ID NO: 37930 - DNA, 1388 bp, Oryza sativa
tgtcccatagcaaattactatacttttggagtgtcctagagcaaattcacgctttttcgatgtctcacagctaattacacatttttttaggtgtcatgtagcaaattttaccgaacaaacgaacaatgagcaatggtattgaaataaacatattctaggcattaaacatgaggtggtttttctatccttttgggatgaccaggtgggtcaagcctgggtggtcgatgaagggtattttcttagtactatcttcgtctcagaacaaaaacccaacctagaattgggatgagacacacacgaatcggggcaggcttctctctagatatttttgggacggaaggagtatgtttttaaaatggttagctcaaacatggttttttaattaatcaagcctgaaatattattttttaagatggtctaatgctaatgcaagtagtggagagaaacctaagctgtggtgtaagtgccgtgatgggaagccgcgtgcgtgcatctcggggcctcgggccagctgttgaaatcccgacaaagaaggatagccacattcgattaagggtgagcacaaattaactaaagtccataccgaaccaagcccgtacggaaatgatgctcaatcggccggtaattgatcatatttatcatttaaactattcaacatcgatattaatatgatgtagaaataaattagaaaaaataaaaattataaatagctaaaaagggtatgtttggaaatggtaccccttatacgaaaacgtcgctcggtcgatcgggaaattccatgatcgttttcacccttaccatcaactaaggcccatgaaagtataaccctaaatccctaagacatccagcgctagcatcgcaacccttcaacgctcacaaggcgcggcataggtaccttgcacctaccggcctcagcaatccatcgaattcatcttctgccactacgtctttagtcttgctctcctctctggccactgtgaccttcatagcatgtcttgttccccatcccttcacagctaactccctccgtgtcgtccttcatcatgggttttgtccatagcaacctgcatcaccagctatgccggtctctaccctggcgtcgtccatcgcatcctccgcaagtgacatttgctatggcctccattcgtaggcactgtccttatctcgctttgtcggcgttctcctcacctccttcatttttgttcttgtgtgcgggtaggtcggtccttcattcgcaaggtagttcggtttggttttttttgccacttgttaattcaactgtcatattttaaaaaaaatgttttgaaatgctaaagaaattaacctaaacaaagaaaccaaagaaaccgactaataaccactacaataattggatttgattactctct

SEQ ID NO: 37931 - DNA, 614 bp, Oryza sativa
ctagtaacgtgcttactattttgtgatgtgtgtatgtttctactccctaaatacttatctgcatagagtcccataatgaacctaagaatacacaactcgtaagtgtttttcgttctaatttgaacctaaacttcagtaaggatcaacattcaataaagatgctttcacacgagcaggttgcactgatcactcataagtccaacacaatatggaagtcatgcatacaaaacttgaaatttaaaaactttgttgtgttggctttgtgtatgttcaattgttcgcttgaaatggctagccatctaagagccatttttcttccattctttctttaagccattttctttcatgggcaccatggttacgagagtatatatatgcttgatgcttgctgccattatgtacagtgataaagagaccacttcaatcactaaacgattgatgatgaggccactaaaggcttgtctctagtactccacttgttttagtttcaaaccaagaaatatatatatataataaatatgcatgattgcgtacctcagttattattagtatcgacccagtcacgcgtgtagtgtgtcactagaccttaaaaagcttggcaaaaaaaacaaaat

SEQ ID NO: 37932 - DNA, 572 bp, Oryza sativa
gcatcaaacacacaaatgtcaaatttgatttcacaatagtcaagtcaacgaaatgatcagaagaaaagaaattctgggttgtagctagttacgggtcatcttccctatgataactaaaaacgtgcaattttagatgtcgacagtctttggaattcaccgttgactattatcaaaaacacaaactctgataaaaatcgtatattgtgacatattttcaagcaaaaattactgcaatcatctgcatatgcgtataatttaaactgtttgaatatttacattgaaagttttaacgagacattaatttggcattaccacgcgtgtgatacacttataattataattaatagtactccctctattccataatataaagttttaaaaactaatatttcactaataattataaccatatgaaagtaaattcaaattttatctataatattattttcagcaaataaaatttagttcatattatattgattgttgatcgtgctttaaaagttgaatcttgaaccacatgtgtgtcttatatgatgggatggagagagtatatgattttgtgcaaatatata

SEQ ID NO: 37933 - DNA, 667 bp, Oryza sativa
ataaacataatgacagctgagcacaccgaagaaaaggttgatggctgactgcccaaggaagatgtgctttctctctttcacacattcaaatgttgggttccaaagaaaaaaaaattgcgttttcactaatattattttcacatatggaagtcctaatttttaataattaattaatggtttaagagttcgatgtttggcaccacatgttttaggagatctagatgttattctttgaagaccacataagtactcgctccgtcctaaaataagtacagttttacactgttcatgtctaatgtttgaccgtttatcttatttgaaatttttatgattaatatttttattgttattagatgataaaacatgaatagtactttacgtgtgactatttttttttcaattttttcataatttttttaaataatacggacggttaaacgttgtatacagatacctacaactgtaattattttgggacggaggtagtaatcacttttacgtactcaatgaactcaatgattgtccggaagatagttttcatgattaggctccaatctatcacatctggataacttgcgatcgtaggtgcagttcatatgagaaagttatgacattcgtagttcaaccttttctcagaagcccggaataagttatacaatacttgtct

SEQ ID NO: 37934 - DNA, 3148 bp, Oryza sativa
tctaatgaaatcgaaatctcatgtcccctctccttcgctgcctcgctgatcttcattgttccttttaaagtggtttgtctacctgacctaagctaagcaagctattagagcaagttcaataatatagtccgctacttactccaaaatttaaaacatcatatatagtcaatctaatagctcacttatataatatatagctatagaaatatactgcattattaaatacataattcatctatcttttttacatagtttattagagctcatgctgtaactggctacaaatttataagcacatttttgttctctctcctctcatctctcctctacataagtacaaatctgatgtggtagcttgtatagcccgcttatgtcaccttattgtacttgctcttagtagtacacaccatttggagcagcacatcttaaatactcctaaaccaacatacaggggcggatccaaagtgggtgcagggggactcaagtcctccctacacccacaagacccatagatattccccggagcacctccttcaattttttcaccatgttcctatatggctggaggttgaagaaactgtgtaattgcctacacccacaagacccatagatattccccggagcacctccttcaattttttcaccatgttcctatatggctggaggttgaagaaactgtgtaattgagttcccctaaattttttttttcctagatctgcccctaccaacatagtacgtggatcggttataagctaaaagttgtttaactctatctaccaacatatagagattaagggcttgtttagttggtgaaaaattttggattcgttgtcacatcggatatacgggcatatatttgaagtattacacgtagtctaataacaaaacaaattacaaattctgctagaaaataaattaagactaatttaatacttcatgcatgtgtccaaatattcgatgtgataggtaaaaagtttttgttttaggaactaaacaaggcctaagagcaaggtacaatagcatactattagtcagctataaatatattttaatgagataaaagatgagagagaagcagcgggctacagatttatagccagctgcagcacaaactccaagacgcgatgtgtgtatgacatgtgagaccacatattaattgtaaagtaagtaactattgtatgaattggttattagattggctataaataaattggagctagtagtgggttgtactctaaggccccctttgattcaaaggaaatttataggaattttaaaggatttcattcctatatgaatttttcctatatcgccctttgaataaaaggaatggatcctatgaaatcctataaaatttctatggaatgcctcttcccatataagttttagaggaaatttaacataaggtagaacctcttgataactcttttttgagtctatctctctcatccaattcctgtattttttctgcggttaaatcaaacggtcatttctgtgtttttcctgcgttttgcaatcatctgttttacacttacatttctatcaaaattctacgttttttttattcctatattttctcaatcctacgatttaaaaggcctaacagttcgaccagcagctgggaaaatggagtactactaggactcgtctcgtgaagtgaaactgcagcgcccaaatgactatagtccccaccgtacgaacgtaggccctcctccatgactccatccatgtgcccgttgcccatccatcaacccaacccaacccaacccaaggatttatcagttttcctactactactactcctgtcctggagtataataggtactagtactcttcactcaccctagtgtagtagtatatcactgcaatttcaatctcggtcatttttactcgctgccatgcgttgcacgcccacagcatcaacacgctgatggcctgatgctgatatgcatgcacatgctgtcttgtcagcgaccaaaaaactttgggcttgagcacgcacatcgcaaaactctactactattccagatagattcgtcagcaatcaagtaaactaaactaaattaacccaacccctggttgctttgcttcgcttggttcaaggttaatttgagtcagctctcagtcagtcggtcggtagcagccagtatggccttgcgcaaatcgagcaacctgttgccattaacctactacaccaattgtcaatcaaaccacttgcgtgattcgtgccaagatttcatcaccattttaaatagcaaaggcgtttttctatcgcatgctacagttatagataatccaacaaatatactgtccgtagatctgcgctacacatgcacacgtgttcacgtacatgtaaaatacttcaatactcccctctggctgggttggcgtgggctgtgttggattactcagacgatcacaaatgtatataatcagcatgtaaattcaaacaaaatacaactccaacctcaaaaaacaatctacatatgctctctcagctcttcactaaagactaaagactaagtactccctccgtgaactcatgaatgacatactctttccgtcctagaatatattatattattacgaatctagaaactcgtactccttccatcccataatgttacaacctagtcccatcctaggacatgtccagattcgtagtcctaggatgggtctcatcccatcctaggttgcaacattatgggacagagggagtatgtcacaacctaaaaatcccaaatatataaattgttgtctaaattggaattattagaatttatttcaaaagcctagaagagaagatctaattttaaataataaattccaatataaaatggggccagataaaattccattaaatactttgcttgattctatagttcctagagttttctgggatttatttgagccaaggaagtatttttaataaatggaattgcatttcatgaataatttaaattggaaaaggttttaaaagttctcttttggctttgggccgaaagtcggcccaaaacctctctctctctccctcggcccagtcggcccaagtcagcccgcagccgcccgcgcgagcgccctcggccgctgacaggtgggtcccacctgtcggactcgtcgtccacctccagccgccgcgctgaaaccc

SEQ ID NO: 37935 - DNA, 659 bp, Oryza sativa
cctactccggcgtgttcagcaagctccgtggtaggggggtcctcccgacagagaaagggtgttctgtggatggatctcgatccgggcttggtatcacttgtttttctttcctaaatcactgcgggcatcgtacatagtactgtgacacaaataaaactcttcccgaaccttcaccatgccatatgagcttagttggaggctaggaaccacagttttaagatcacgcgtagggcatgggctaacagtacttaagccctgctccaacaaaattaaaggtcaacacggcacgttgggtgggtgatgatggtccgctccatgtacggcaccctttggatcctctcggctgcacgcatgcggccacccgcagtgcttgtgcatgattctcccagttcatgaattcccactcccacaacgatgcccgtgcaccgcgcggacagacaagccggccggccacatgcgcgcaggatcggcaggtggctgctccacgcctcagcgagctactgctacgagctagagttgcagactgccattcttctgttccccgcccatgcgtgcatcatcacctaaccgccaagtcgccggccatcatgcatcccctcgctctcgtgaccgcgtcgacgctggcctctcctgcgtggccgcgtgtgcactagtctaat

SEQ ID NO: 37936 - DNA, 536 bp, Oryza sativa
tcctgtttaaacagaaagccattcatggcattggaccagaaataagaagctgccgacatcagaggttcatccttagccatattggctgcagtcagagctagggcttgggctatcccaatttcctcccagtgagaacccttgctagccgatacccttttataccaagccggctaactcttctaagttgatggccatgacttaaaggtattttttcaaagacttaagtttggattggctagtctaaaggggatcctattggtttcggcattaatgaactcagttggatccaaattgtcgatcggaccaagaaagtactgattgggatgaactaaacttgggattgcgatctgatgagaaaggttctatagaagaaaagaggaaaaaggcagattgagcgaagaaagaactaatctactgcaagaacaagggatctagccgatggggacttacctcggggaattcagccgatggtgcagcaaaaggaccagcggaagttgacatcgtcgcgggtgagggcgccactgcagggaagtcgc

SEQ ID NO: 37937 - DNA, 569 bp, Oryza sativa
gcaggtttcagaatataaatgtgtgccgtgtagatggtttcacagttgttgaaaacaggacgttgaatacgttttgggtactgtgtgtaatgtgtgggtgtggcttgtggaattatacactttgtgggtttgcatatcagtggacacatgcaaaacaaatgaaagcgcatgtggggctgttgtaattggattactccaggttattgggtgtgggggagatcttctggtaattgaattattatcgtgtttggttgcaaagaaccgataggggtgatgaaagtgatgacagtagtgtggtaatccatttactacgtgcaccaaggatggtaatccatttactacgtgtgccaaggatggtaatgagacatgcacactgaatggcataacacagttaacgaattactggtcaatttccacgcattaaaaaagaactgaagtgctcggcagagagattgttgtaattaggttacatgagttgttatgatgcgtctaaaatctatagtaaagcaattattatcatcgttagctgtttaaacttgttgttgacagaatgatggattgtgtctcaa

SEQ ID NO: 37938 - DNA, 755 bp, Oryza sativa
caacaacagacgttcaacaacaatctcggcgcatcgccaccctttaactttcattatgatttcgacgagttcttgctttcaggttgagctgcatcggtttcgatcttcaactagaggtaaaacttgttatggcggcttgcgttctcgggattagtgcttccatctttatgatactctaatcttgtttatgtaagttgtcgagttatcatgtatcttatataatctccgacaatatcgttatctaacctccaatcggctaatatctatcgttaggaagcagccgattaggttaaatatcgacgttggcttagattatataggatatctaccactctatgaagcttccaatagcttgattgtctagatattgtctttctttttatacttatggctgcattagttgagtttgatctcataagtcgtgtttagaactatagtctcaagcctgcttcttggttgctgattagagtagcatcgagctttcagccgatcttacctgatttacctttatgtcttatatgctcaattgttatgctaaatatgccctttatgttaagatcctattgcatttaggtttattaagctctatgtttggtatattttacttgctttaatatcttaatatagagtagtatcagagtattagccgatacacgctagatctatctgatgggctatgctatgagcatctataatctcattgttaatatttatttcgatctaagtgattgtgatactgcctaaaaaggggatcc

SEQ ID NO: 37939 - DNA, 732 bp, Oryza sativa
gaaacctgaaactttgttctgagattatatggtgatattataataataatttacaaaacagagggtagtatatgaaactcttgggtgttattaatagtcaaataggtgcttaccaagtctacagtagaaattgttttattctgtttcagagcatctgcaaccttttcagctccctggtgacattcatattaatttatgttacaaaaccaaacaaaatcaccttccttctctaaaaatgccaaacaaagtaaacataattacataaatgtgtacccatttgatacgttggatcacatgtgaaaaaccatgtatatgaattaagaaaacaagtaaatctcccgctctttgatgtactatggagttaaagagtgatgggggtagcatcgaattataaagtataaaataagaactggagcatcatgtatatgtcaattttacaagaaacaggatttaggcaagaagtttaaacctaagtaactaacagcctaagttctaaagcagtactctatttagctcatagttccataatagcagaaattatatattggtttggcataagcatcattaaatgcttaataaaatcttgcgggtgtttgataagcaaatttctctagcttgatcatgtcctattatatgtagcaatcagaaaatttcagtcactggcataaaacagaacaggtaaatgataacagaagtactacctcatcacttatatcgttcatgtatagactg

SEQ ID NO: 37940 - DNA, 593 bp, Oryza sativa
accccagcaaactgcaggttttgattatgtttttccaacttgcaggatcataagtctattttctgttaaactgaaagtcaacagtgcctcagtgaagcagatagcacagaaattgcagcactattgggggaagtgcctgtaaattgtccctatgaacacaatgaagtagaatttctgatacagcaaccaagaagataaggatatgcagcagagaagaaatcacagagcaaccacaccagaaagcttaaggagatgaggcttccccgcaaaaaaaaaaaggaaaaaagaatggatgttgatcaaatgtagactgtaaatcaaaatcccagaatccccatgtgcaactaacagaaaaacaatgttgaacatttggagcaaatgttgatatcggattttaatcaaagctaaacccgagagtaccaaaatgccgatttggagacctaacaagaatcaacatttgcaaccagaacacccatccaaaggtcccaataagccataggtcatcatatatagcaaaaaggaaagacagtgcttttgtcaattccccactgaacccaccaacctagagtcctagagatcaggggaacccagaa

SEQ ID NO: 37941 - DNA, 760 bp, Oryza sativa
ttgaagaatctactcaagtgtggaaatgacagaatggttagtcctgatactctgccagctgactttcaggatgacagattcaggacctttgtgcaggttgattggtataactctgtgatcatgggaagatctcatccagtggtagagatgaagtggctagactggcagtacatgtcctcaaagaacaacatagtcttcaatgaggtacgcaaggtgtgtgagcgcaagcacatggcagatttgttggccttgcagtattcctggaatgagtaagtgattggacagttctactccactgctttctttggcaccaccaagaaggggcttgattttgtgaagtggaccattcaggggtagcagtatagggtctctatggcacagtttgctgcagctttggggttagatgatgatgacctgagtcgtccacatatctttgtagaggatgctctgtcaccgaccagcactacctttatgtatgagaaggatgctcccaaggattgtttggggactactcgagggttgcgtccatattatagagtgttgtactctatcttcaggtggtctttgctccctaaagtgggagatgctacagctcttccaggtaggcatgcgctcctcctcagtcgcatgcgctacaacaagcccgatttcagcatcatgaagcttatctggagtgagatctatgagacagtgtgtgagccaaagaggggctgcatctatgcttcttatatcatgaagatgattgaggccatgactggga

SEQ ID NO: 37942 - DNA, 1571 bp, Oryza sativa
agagctattgctagcctctcccaagtgtttcttgccttctccactcaatctagagcctaattcttgtgagagagattgagagggagaaaagaagatttggagatgtgtgaagactaggatcttgggtgagcacttggaatatctcatgggctgtcatctcggtgcttattactcttggagatgatctcctagacgattaggtgtcgcccgcgagaatccgttgaaaattgtggatgtctcgggtaagtttgtgaaggatttcctctcctccaaaagggaacgaggtaagttagtgaagttcttgtgctgagattctagaggctttcaaagtagagcaacccacacttgtggtggatttctagaagtaggttgagttgaatcttggtggtcactacattctagaaatttgcctaggggtgtttggggttgaaggctgtggatttcctctgggtttttgcacaagtgaggcaaggggttaatcgagacccagctcttggagctcctcaacggagagtaggatcacaagattcgaacttcgggaaaaaatcgctcttgtctctttctgtgatgtttctatggatgattctgtgatatatcctctgcttagaatacctgtgcaccatcttgtgaagattggcttagtctcttgtttcgaaatttaaatttcatctctgttttgttacccggaagttcctgtattagaacaccggaagttccgggcctgggaggccggaagtttcggagttccttaccaggaagttccgggtctgtttgaattttaccgttgcgatttgtttttaagttttcagggacagcctattcaccccccctctagtcttcatcagcgcgttcaaatcctagattgttgaccagagaacaaccacaacatgctgggcaaagtgtcaatcggctgactcaggagcaggttgctgcaatgtttttaccaaatccaccaacagccgacccaatccagtcaatgccgattcagcaaatgttgccaagacagccgatggttcggccgattcaacagcaaaacttgcaacatgcatcggctaggctgaggaatcggccaaggcagcatgctgcaaatcaagtagttcatgagcacttggtccataatgtgcaggccaatcagtcagtcgtacctcaagttgttcctgaacatttggtgcacaatattcagttgaatttctagaattatcaaggaggtaatttgaattatcaatatcaggctccgtcacctcatgttcagtaccggcaaacaaaattgcctcaatatgctcctcagtttagatcagttcgagccgatacaacagcaaacgcaaggaatacctcagcaaaggccatggtctgatatgattgcagatgtgatgagggagcagtttgggttaaagccaaaggacactggaaacttgtatcggcatccttaccctgagtggtttgaaagggtttcattgcctagccgatacaaggtgccagacttctcaaaattctcagggcaagacaatgtttcaacttatgaacatgtcagccgattcttggctcaatgtggtgaggcatcggctgttgac

SEQ ID NO: 37943 - DNA, 686 bp, Oryza sativa
ttccgatgtgtcgggcatagttgatggatgtatgtcatatactctactaacatgataacctcactcactttcaaataagaatattgtatatgtattattgaaatttgagtaatattgatttacactataaacaaattgtgtctactatataccacaaaacaactcaatctttaaaaaggattattgtaatcacctccgtcttctctttttccattctcaaaagggtgccaagcatagataataaagcttgctatactaccatgatatagcaaaggcatacatttggatgagttaagccaccatgggtacttaattaacgatgcaatcctttatgagggtactaatagtgaattagccgttaaaactgttatccacgatggtcttgatgggcacgattatgtcgatatgtgacccatgtttcaaggtatcgagaaagaaagccttggtagttatgttcggcttcatccgttagatgggcattcatatcaaattttaacattattatcctattaactcatagaagcgatattgttataatatatttttttgataaaatattattggaatatttatacatagatttagaaataagtcagatcgacatgaacagttaggttagtagtggagataatttttttagtcgattaacgatgtattgttcttattaaagatgttacaaatacagg

SEQ ID NO: 37944 - DNA, 570 bp, Oryza sativa
agaaaagaataagctggtttagtacttttaatgtaaatgtgcatttttttcttggcatactgtggacagagatatattataacccttacatacatatagactaaatgacataccactatatgtttagaagtgcatgtgtgcaaacctacccatattgaacatagccagccccagccctgatcttgacattattagcaccgacccctccaaagctggtggcaaagtgaggtgcgacctgcaaaaatattaggcacagttgtatatattagtacatatagattaattatattaatgagcatgtacttatggggatacttattactcatttacctattggagatgcaagcctaggagatgccgattacactagcatatagactaggattacaggctaacttacgtgccaccgacttgaagagcggtaacctggcaccattcaccactgccactgacactgcctcctcccccctgagatcttggttcgtggcatctgaaaccccctcttcgaggctttgcatatcttcgctggtacccgagctaccgacgaccgtatcatcattatgaaggatc

SEQ ID NO: 37945 - DNA, 717 bp, Oryza sativa
tttgtcctgttgatataaaagtattgttactctctcaaatcataagtaccaattgtatatgaccatccccagttctactcatttacaattatatccaacaaggtagtgcatgataaaacgggaggaactctacaatacatccatgtgaacataccaatatagtaatatacaactcctctatgttaggatgcatatataaagatcactactactaataaacatatatacacaacaaccaccattgattcatgccatgtgctacacgcatctggtgcggcaatcttaaagatatccaaatcggcgtccctctctccatacctgaaaacgtttgctttaagtgctttctaagaaataaccgaaaagcttccctctaaagtctttatttaatccttagcaaattacctcgaaacacagggtgctagctgcaaaagagacgtaaaaacagggagatcagagagggctaggctttgaaccggaggcggcctcgcggcggagagccacgaacccacgagcgacgcgccacccgccgccgggctcgcgacgtgtcgcccatcgagccgtccacctggcgcatcgtacggctcgtacgtatcctctcgaggcgcccgcggtcactgacacgtgggcctgatgcgtaagggggctgaggcggcggcggccacgtaggaggtatcctctgtacggaaggagcccagccaggacgtactcccaccgtcc

SEQ ID NO: 37946 - DNA, 623 bp, Oryza sativa
ttaaatttaaaaactttaaaatttggtttttctttggcttattaggccatccgatgggagcctaatttcctctagccccactgcggtgttttcatttcttgtcaggtaaaacagcaccagtacaaagtttaatttcctctagccccactgcggtgttttcattttcttgtcaggtaaaacagcatcagtacaagtttaatttcctcgagccccactgcggcacgatcattccttgcacgaacacgtatgatccaccaagtccgcgatccgttgaaaacttgaaacggcctcacgggcagtgtcaacaagagcgaacgtaccaggttttggtaaatgattcttcttcttctcatattcagttctggtgcgcatatcctgtacaaatccgggaatcgcgtactctcacaatttattttctactaataataagaaactccagtatacccgctgaacttcacgatccgttcaatctaccgagatcagtgtaaggtggtgtttggatcaagtgactcttatatcggatgaatttgaagtattaaacatagactacttaggctgcgttcgccaccgtgagattgggagatagtttgttccgttttccgcgcgcacgcttcccaaactat

SEQ ID NO: 37947 - DNA, 662 bp, Oryza sativa
ttctctggcaatcatcattatctaacctacaatcggctaacatctgttagtagagggcagcgcgatctaggttagattttgatgtgtgatttagattatataagatatccaccactctatgaaacttccaacggcttgattggctagaatattgttcttcttttcatacttaatgctgcatcagttgagtttgatctattaagtcgtgcttagaatatcaatctctagcctgccttctggttgccgattagggtagtatcggagtttcagccgatcttatctgatttaaccatattcgctctatatgcttaagtgacatgttaaatccgccctttctgtcaagatcttattgcatttaagtatattaagcttttgtttgatatattatacttgctttaatatcctgatatagagtagtatcggagtattagccaatacatgctagatctatatgatcggctatgctataaacatatatagccctgttattaatatatatttcgatccaagtgattttatactatcttggcatggcgaccgatctatcccaatcacttgatttaaatatatatcgatataagaactatatattggtaatatctacagccgatcgagtaggtctagttctttattatctattatactcgccgatcgattcacat

SEQ ID NO: 37948 - DNA, 751 bp, Oryza sativa
atacaatatgtttttacgggaatccagatactatacagaatggccatttgtgcttgggcccaggagtaatctgaaccaaacgggccaactccaacgatacgagtgggccctttccttctttcaacccacggaaaccggaaccccaccatctggccatctccaactccaatcaggcgtccaaatgcaaaaatccgttaccaaaattatggaaagcctccttccccacgccggctcattctaacaggctgcgttacccactcaccagtcggtatgccgtatgccaatcgggctgcgccctgactgcttacgacgatactatgacaaaataaaagcgaaaatgattatccagtcggttgcgttgcattccattccgtgtcggacacgatgagtttgccctgcgttcgcagcgatcgccctggactccgatcaggtctcgaggcgcatacgcattcgcgcctataaatccagggcatatgcgccatccaaacccccttccatattgagttcccgagggagaattcgatcgaagaatacgagcaaattaaaatcgatcgcgatacttcggtgttgacgaaacagcgtgatctctctgccccgcaatatgccgccggctgctgcgggctactccgccggcatgaagcggcctctcgccgcggtggcgccgtcgtgcgacgtcgacgggcgcaatgccgctgccgctgccgctgcgaaacggcgggaacgacgacgggaggccaagcgggcgcgcgcg

SEQ ID NO: 37949 - DNA, 972 bp, Oryza sativa
atatgtaattatcatttattttgttatacttttccattaaatttcctacaaacgctctcacgtcaccatgtgtcactctacaaacgcttctacgttgctaagtagcgctataataaattaaataaaataatataaattcttagttaaaataaaacatttaattctcgattttcacttaaagctaagagaccattattttagacaattaaattattatatctataaaaaataatctctccctcctaatatcccgttcaaattattaaatctataaaaaataatctctcgctcccaatatcctattcacatagcctagtggttacaagagcttcagtagcacctgaggtcctgggttcgactccccgtgggagcgaattttccaggatttaacggcgttgtgcttttagtggtaggcgacgtacccgtcgacagcgagacgcctacggtgacttcatcaatctctccaggatttgccggcccagtcttcgaagatgctcataggagtagggtttgcgtgcgtgcgttcataggggtgagtgcgcgtgcgttgtgagtgtctgtgttgtactgtgtaattctcaaaaaaaaaaaatcctattcacatacaagagaaaatcgttgcgtacaattcatctggttaaaaaaaaatcctattcacatacaagagaaaatcgttgcgtacaattcatccgggaaaaaaaaaatcctattcacatacaagagaaaatcgttgcgtacaattcatccgggaaaaaaaggcaaaagctatacgtatgtacgaacgaaataaaaaccaaagatattgataactatgattgaaaaaaaatcactgccaagattaattataaaagcaccagcccaaacgatcagccaagataatcaccatcagctcacggcacaagcacgtatatgcattatctgctcttcttatttttaggttgttgagatatctacagcataataaaatctaaa

SEQ ID NO: 37950 - DNA, 553 bp, Oryza sativa
ttggtcgttaatagcgtcgcctcatctggtcccaatcttgatcttggattccgcttcaatctaatttttatctccgatacttagattaccaaatttggtcgttaacagcgtcgcctcgtccggtctcccgtgcacctaccccaaatccccatctcgctgtggtcgtcgtcgccgctacgtcgcctcgccagatccgctgccgtcgccgtggtcgtcgtcgctgctccccatcgccgccagatccgccgccgccggtgcggaggccggactcgcgtcgcttcgccgtggtcgtcgtcgcctcgccagatccggcgaccccgcacccggatccggtgagcccgccgccgccaagctcgccacgccgtcggcgagctcgtctgcgccgtcgtggggggaggaggatggcggcgtcgagccatctcgccgtggtcgtgaggaggacagcggcgtcaagccatccgccctcaccgttgctccccgccaccaccaccgctgctccttgccgccgccagatccaccgccaccgctgctccccgccttcgccagatccgcc

SEQ ID NO: 37951 - DNA, 607 bp, Oryza sativa
atatttgagttgaaagtttcaaattttgattaattatatttgaattttgagatcaaagttttaatttttttcatagaagtttttttatttaaaaaaatgagcttgacactttccgtttaaaaaagtcagataaaccgtatagatgaaacctatatatatatggtggttgcatcgcatactgcttcctacatcgacactcgaaatcagcacgtaccatgttccttgagtgggccttatatgggtcaaaaccatgtgttccaacacagctacgctaattagaccgaggacggcgacgatcaatggcgaggaggaagccattacgccatttgccaatagcgatggagatgcccttggcttcaaagggggtgttcagataaagtttgagcgtgacacatcgaatattatatagggtgtcacatagggtgtttgggcactaacaaaagaattaattacagaattcgttagtaaaccgcgagacgaatttattaagtcttaattcgtcattagcaaatgtttactgtagcataatattgtcaaatcatggagcaattaggcttaaaagattcgttttgcaaattagtcacaatctgtgcaattagttattttt

SEQ ID NO: 37952 - DNA, 653 bp, Oryza sativa
tggatccccctgaacagtccacgcgctccacagagcaatttgatctctcttttttaaagaaaaaactttgttgttttctccctttatgctacaagcttatgagatagagccctgtcctagtgatagagcacaacggcatggcatatgcagccggccacaccaagacacatgcacaaaagatacagtggagaaagagagaaaaggggtagttatgattgagaaagtgtactaaatgtcaaatagctctttcatcaaaacagcttaaggcctatttcattgaagagctattccttgagtaaaaaataggtcttaaaataactcttggctacttatccaaacagggccaaaggtcgatctctagtttgtttgttttctacatgtcagccggccttcgtgattgatcatttgttccagctgatgatgtcagcggcggtaccgacgacgaggagcacattttcttaatttctttacttaattaacaaaagagtcagcagcttgtaccggcaaattcagccgacaaagccaagcatgtacgcgtacatcgagtatagctagatcaattcataaactgttttttttaactcatgtgtcttttatttgggagcgtatcctatgcacacaggcgctcgcgtgtacacaccgtgtacaccaac

SEQ ID NO: 37953 - DNA, 580 bp, Oryza sativa
tacctaaatactgatctgtttttaaccccatcctgaacctaagaagacacaactcgtcagggtttgtagggacaaatggaacctaaacctctgtttggaacaacatataatgaatatgcttgcaaacgaacacggtggcctgatgactcatcagtacaacacaatatggaaagcatgcatactagactggatacataaaaacttagtagtgacgactgcgagtctgctcaattgaacgcttgaaatggctagccatctacgagccatatattttccatacattatttaagcccttgcattccatgggcaccatgtgttcgatagtatatatatgctagatgctagctgccattatgtacagtgatctagagaccacttcaatctctaaactattgatgatgatgccactaaaggattgtctatagtactccactagtcattagttgcaaaccatgaaatatacagatagaataaaaatgcatgactgcgtgcctcagttattattaggatcgaccaactcacgcgtgaagggtgcgactagactttcaaaagctcggcagaaagacaaaacatgtcataa

SEQ ID NO: 37954 - DNA, 615 bp, Oryza sativa
tgttctatcagactgttagcattccatgtagtgcatcagccttagtttggatatcaagtgtggctcttttctttacttgtctgctcttctgtaatctgtactctgcattaattcaatttgatatttggttgacaagaaagaacatatatggtgtatttctttttggaattgatccaatgttgttccctttttttttccagagatgggaacactgcagctgggtgactgaagctcatggtggcattagtgctaagcttaaacacttgcattcaatttgtagtttagctcttagctggctagttctatttattctaaaaaaacaactgaattgtaaccattttgattactttgtgaccctttcatgtatgcatttgtgaacgtacagcatacatgtgtgttttccctgtgctaaacaatgtttttttttactgtgtcctatggatttgatctgggagaatgcatattggttcattgcttacttgggaacgtacagctgctgccttatttttccccgtgctaaacgaaagcagggtttctatgacagggattagaaacgggcagggattcgaaccccgcaggattgagtgatatgggagggattcactcagtccctcc

SEQ ID NO: 37955 - DNA, 659 bp, Oryza sativa
atattatcattcatgggagcaaatatgatagaacctacccagcatgatatgtatagatgtaaacttaactttaactaagtcctcctgactgaatgtaacactcatgaatacttacagtgtctttcagatatattggtagagaatgtaggtatccagaagctcctattgaacagtacaaatattggagacgaggtttgtatctctccctccttccctctctctgtctctcttgcactctttgtgtgttgtttcatgcgcgtgcactgcaatgtaacatgatattttcttttcagggggcaaaagcaatttcggatatgttgaaaaagaacaagacgatacgtactttacaactcagcaacaacacaatagaatacagcgtatgtatatgtatccacttcatcgaagacatgcacttgaatcacaaatagaaaagaaaaactaaccatatgattgtttattgaaggattgctatttactatatctcctttttcttggagcagggttttgcaagtattgcagaagcactccttgagaataatgtgctacggagcttatttgtcaagttagttgctcacaacccagtggctttatatgtgatatatgatgagtgtgcatatgaagttgtgctgagatactgcggtagtgattacattggtagt

SEQ ID NO: 37956 - DNA, 707 bp, Oryza sativa
caatgaaagattttgttcagaattagggttttgaccacggcaggattactagctgaacaaattccgtccaactacaacaaatatcgcctgacacaaacgacaaccaattcaatctgaggactagcctagtaaccaatggcatcgacatctcccatttttagtttaatttgtgtcgaactgtcgatgaacgacacactctagaatatcccaagtagtagtcttaaacagtgctttattacatatgttgaacaagatcactgacaacacgataaattattgtagtagattgcaagaatcattatatgtcacaattggtactttgccatttaagaaattaaacatacaaccacgcaacatcgataggagtaaattggtttgcatatcaaatacagaaaactgatcaaataagaagaccggcgcatataaaattgttctcccaaaataatttgcatagctttaatacataatgtaaaaagatgtcaaactcagagagcatcgatgaaggcaagtgtgtctgtgccatcaacaattaaacatatgattggcactcgacatatctaagaaatatatgatggaaaattatatagtaatgcagcatgaagcatgcagcttcctaatcttatatgcttcctcatttgagaaagaagcatctgcattaaggaaatcatccaaggaatgcccaacaagggattagcatatttccatgg

SEQ ID NO: 37957 - DNA, 643 bp, Oryza sativa
aagacaaagttgtgtttggattgaagccaaaatagcctaagttcactattgaaatggcctattttcgtaggcatgtcaaaagttggcttcaaactaaatagacactaaacactattgaaattgtcaaatattggtaagcctaatttaggcctcaaaccaaaccaaccttatattttttctgattttaagtgccacgtcaacgccatgtaagcatcatgttagtcgaaaacgccatctaaactgttttaggactggttttgtaagttgaagggcacttcatatatgatattgtagttcagacacgtatttctgactcctaaaaattgagtaacctaaagtgaacttattccgttggctgttgcggtcggcctagaattggctgacgtactgatccgttggaccatatctgcaaataaagaattttttatttataattttttttattaaaagttttacaaaaataattttctattttgaaaattgacggaaggagtcgcctaccgcccttaaaaatcgccctctcagagggcggcgaaaatgacgtggcagacggccgtcgctcggcccccttgccgccctccgctagggcgattttgtactgtgggggggccgcctgcaaatgggcggcgagggggcatggaat

SEQ ID NO: 37958 - DNA, 685 bp, Oryza sativa
tttctatccaaaattccaaacgcttacatatgtgtgaaccctcgtccaggaatcagccgaggcacacaataacaaattgataatagagtacaattattactctaattaataagcgaataaaatgtcattacagaggtagatagttcctctcaatcaataaatatctaagcagcggaaaaaaaaaagataaacggggcagacgacccactccacaggcagcttgaccagggctacacctaatccttcacaccatcagcatcactgtagaactcctcctctgatgaatgattgcaaggtgagtatatgacatactcagcaagccacgcaacaaatatacaagtgcacaggataacaaaggatggcatagtagggtttcatttgcataaacaacatttaataaacatttcagaatttaataaaatagttaagtagtaattaaacaatattaatccaacgctatacaacataccctggtgcatatgcccaaccattctgaacacccatcccggctgcacagttctatttcaaaccaggaattaaccatctcaaaccaggagctaattaaattattaccaggtatagcatttttttataatgtgagaaatgtgaactaatcaccaaagacattggtagacccacccattaaccgcggcaccggtatttgaatagttttactttggccaga

SEQ ID NO: 37959 - DNA, 678 bp, Oryza sativa
ctagaagtaaaaaataacccaaattaatataatgttcaattttaaaatttcaatgcaattaaaaaaaaaagacagtgacgggccgtaaagaagtataatggcggcgttttatgagcttttaagaaattataaaacggaaacccaatgagccaattaagctctaaaacctataagatccattttttaaaaggtccaaaggagaataaatgataatagtagatcgagcaaagcaaataaaaaaggatatgacataagtaagggtagtaactggtgtgacttttcaaaaactatttaattagaaattcggggataagaagatttgttctttcaaagtcttaagacaataagatagctatttaaataattttaagtaaaatcatacgaaaaaatatatgattttgtttgggtgctagtcgcgcaattacgcgggccacccagctagtttcagtagaaagaaagaaaacacatccaacaagtttcagaagttaaaaaaaaagaattaaaaaagatgtgatgggacaaacccccaacttccactaataaaagtatcaactgaaataacgttttcaaaatcacatagattctagcataaaatttcgtaggtactacaccatccaaactggaataaaagctccgtggctaccaattccaagagtgcaacaccagtacgcatagcat

SEQ ID NO: 37960 - DNA, 575 bp, Oryza sativa
atttatgaaaccgataccgtattggataaagtttatatcttgtaatcctgccccccatcctatataaggtgggcaggaggccctctagggggcatgagacaactagatcgtcagatatataatacacccggcggactcaaatccccaaacaggagtagggtattacctctcattgagagggcctgaacctgtctaaatctttgtctccgcatccatctacttttaggtctcgtgcgctacccccttttcatattgccgaaaatttgtttcgacagttccatgtaaactgttaataattaattatgttcatttttcgctttctacagtgtctgaactctaactaataacctagatactaattagaactttgactaacaataaattttaaaatatttagtttgaggacattagaacacaaatgtttaaattagtattaaatattactctcttcattctaaaatagagaaaatcccttgtgtgcccatgaaaactcacctaatcccttccataccctcgaattttacccaatcccctgtgtacccttgaaatttcgctttgattcctcccatgcccct

SEQ ID NO: 37961 - DNA, 532 bp, Oryza sativa
atcactccaacctctgcatccgtcctcacataaccttccggctggatgtgtctcctccccttctcttctcttctaaggacgcttgtcatttggtttgggcccgtcctaatccaggttgatctcatcctgagatccttaacttaattacatctgcaaagacccctatccaaataagagcactgtcttagtccgcctgggctgctatcacacatgccgcagactgggtgtctaaaagaacaaagatttatttctcccagttctagaggctgcaagtcccacattaaggtggcagcatggtcagattctggagtgggcccttttccaggttgcaggctgctagctttacactgtattatcacagggtgaacagcaggatctccgatgagcagaatgaggctcagagagggtgggcgacttgcctatggtcacacagcaaacagctggaatttaagccctgctcacgagtagcccctgagctcaaactctctgtgactctgcgactccctggaagacccacccgttggagacccac

SEQ ID NO: 37962 - DNA, 709 bp, Oryza sativa
gaagaacaatatgaaaaagacgatcatgataaggttcatctctatttcccccaaatgctgcatcatatctcaaagaacactttgtacatgcaaataatgattatgaataaccacatctgcatttgaaaacatggagctaaaaatacttactactttctggggtatgcatctgctgataaatcgctataacatgggtttttagaacatttggactctcatcatctgcttgttggcttatcaaccgcagccaaaatttgaagtttgaaacttaattttagagttgatattggggttttttcattgtagtttatttttcagccttggcttattgagatggagggttttagtagttctttatctcgcactaatcaagaagctagtgcttaaggagttatgttttttgcattggtaaaaaaactgagtatttttggcttggttgcaggtgacaggcaaagaatgtcacagaaaaggctttaccttcctccgttccacaggcaagtttgagagcagcgatgaaggctctacttttagcgatgatgagaccattttagagttactgccgttaggaccatccacttcacgcattttggtggcatccacttctgtcaacaatggccaaaatatatatgcctctgaccagccactatctacattacctccacttcctgatttggagataccccaaagaaagggtcccttgtgtattgat

SEQ ID NO: 37963 - DNA, 575 bp, Oryza sativa
ccaaaagttttttgttcgctaaccaaacaagattgtgaatgaatatcagcatcaggccatcagcgtgttaatgctgtgggcgtgcaacgcatgcaagcaagtaaaaatgccggagatttgaaattgcagtgatatactactacactagggtgagtaaagagtactagtacctattatactccaggacaggagtagtagtagtagaaaaactgataaatccttgggttgggttgggttgggttgatggatgggcaacgggcacatgaatggagtcatggaggagggcctacgttcgtacggtggggactatagtcatttgggcgcctgcagtttcacttcacgagacgagtcctagtagtactccattttcccagctgctggtcgaactgttaggccttttaaatcgtaggattgagaaaatataggaataaaaaaaacgtagaattttgatagaaatgtaagtgtaaaacagatgattgcaaaacgcaggaaaaacacagaaatgaccgtttgatttaaccgcagaaaaaatacaggaattggatgagagagatagactcaaaaaagagttatag

SEQ ID NO: 37964 - DNA, 504 bp, Oryza sativa
ccatgttaacatttttcagagtcctgatttccttatagaacttatttaaattcttccttgattccttttcagcattaaagcttgcagatgttgacaaattggaaccagcggcaaaggaccacatgatcccagaaggggtagattctccagaactctggtcctttgtcttcccgggaagcaaattctgaaccaccctccatatgactgtcctctgaaacagagagttagtattgattccacacaccgcagaaaaaattacatgctctgtaacataacgtgataaaaatatgaaaagttcggcataataatccctctgtttcattatttcatattataagttgcttcgacttcttttgtaatcaaacatttttaagtttgataaagttttaaaaaaatatatagcaacattattaacacaaaataaacatattatcaaaacatattaaatgttagttttaatgaaactaatttattatctagatgttgataattttgttccataaa

SEQ ID NO: 37965 - DNA, 691 bp, Oryza sativa
aatgggatcacctctgaacttctttctggtgtttatgagttgtgtcaaatgcaggattcaacatttgctaggtttgtgatagataggtgtgcccccttatttaccagtaatgcatgagagcaacatgctttacactctagtattttttttttggatcatgcatttgttcaaccaagttattgcaatgatagccattgctgtgctcctgcaaaaaagtacaaatttctagaggccacagttcctttcataatgtagctcaatcattccctgagacaccaattaatctggcagaatacatagattatagatatggttgtactgtccatatagcagcactaactggaagatcgaaagtactaactgaaggatccttttaatgatactcatttagggaaaaaaaataaacagcaattctttatgtactttttgctgtttaatcatgtcatatttgcccacccttatttcctgtggtaatcagggtactaaatcttccatgttttggttgcagctgctttgaaagttgcatcgtacctgcctcttccctactcagctttgagctccctgctgatcatccccgccccactgcgggatgcaatctacgattacattgcaaagaatcgctacgattggtttggcaaggatgatgaatgcatcgttaccaagaacaaggagcttcttgagcgcttcatcg

SEQ ID NO: 37966 - DNA, 690 bp, Oryza sativa
tggtcataatgaataattatgcttatgatagatgacaaattgataaaccaaacgtacaagttgccagaaaataactttccatgactgtaaaataactaaatggctgtttggtgtggtgccaaggttcagtgttgaattcaatagaatacactgaacgcacagcagatgggtaatttctcatcatacttaaataaaaatcacgtggcatactcaataaccaacaatttttgaaagttttgaagtatacctttcaccatcaggatgagtgataataatatccatgtcaccacaagaagattttccacgtctgtatgatcccccacatacaattatcacctccaaataaaaaagatcatgtataacaacccaataatcacttaagggaaattattgttctactaaaatcttaaatatatgagctatttgttttcaagaatcaaatcggcctaggatctcgataggatgaccccattcctcatttttgtactggatgtgtactttcagaggatgactggaggaatggtgatgaaccaaccattagttctccaaacaaaataagtagtcaggttcagactaatagggaactacaaaaaataggtgtaagcaactagctgctacaggaaacaataaccaccgcatatgttgagacaaattgaacatggaactgatgcttcagtattagtttttgaa

SEQ ID NO: 37967 - DNA, 640 bp, Oryza sativa
actttatcagatgtagtaattctaattattgtggatatattctaataacaagcacgataagatttatcgcattagcagttgccactgaattagtcttgtgatggagcacataagatgatgaggccaactacaatgctcaattgtcaaccatatcataaatagaagagcgcttacatgattaattccctgaacaggagaacagctgttggtttataacatttattgaagttgaacaggggaagattaaataatacagtagtataatactgaccttttcaagagggtacacagtcttgttacaaactacgcacttgtcttgtgtgccaacaaacatgctagagaatctgttcggttgcccctgcagtttggataacataaaagaggaagtggacatgaatgttatgtcctctacatcaaagctgccaaacaatttagatactagggacgtgcttcaaaaacataaaagagcatatcttagaaatatattacgataccttgtttccattcgatttttctgctttagctgattttgatgtccctggcataatatagtcaaaatttagggcaggcctaaaaatcatgagacaatagcaacaatttcgaggtaaagacactagcaataattaaggcatcaagccca

SEQ ID NO: 37968 - DNA, 592 bp, Oryza sativa
attggataggattcaatcatttgtttcaaagggctttataggaaattttcctataggattaaaatcctctaaaattcctatattttttctccaaatcaaaggggccctaaaatttctatgaatttcctttgaatcaaagggggccttacaaactccctgggggagagttgcagaatcgagaacgtcagtgcgtggtggttttgatccgttgatgcttctgctcgcaagagatgcgcctgcacgtttggttgaaagcgttggagaggttgcaaccgagcgccgctggatcgctggccggcctcaccggggcatcctcctccgtcggcgcgcagggcccggccggccatcattgccgccgacactgaatcacaaccattcgcaatcatgctgctgctatcactgtgcacacggttggccgatgcagtaggcggacagataccagtatccagtacatcgcatgccattcgcatgtaccgttccaaactcctccatctcacacacttttttttttcccttcaaaacgcagtagagacatacaaattcgttttttttatgggagggaggagtagatgttaatcgtgcgtgcatattt

SEQ ID NO: 37969 - DNA, 512 bp, Oryza sativa
aaatttacagttttcaatttttcaacggacaaagcgacagcataaacaatggaaaggaaacacccataaccaaacgaagataccaaaccaactccaccataatcttccgtgtaatcagttaaaaacattaatcaaatcttccgtgacaacgatccatcgaatcaaacctcccccccatcccgttaatctcaccgcctcccatcccatctcatctcatcattttcatctccacaaataaactcgtctcgctcccttgcccacgccggcgcgccgatcgccttccccccagatcaatcgaccacaccaatctcctcctctcgtcggcgcagccggaaccctacctgaggcagacgccgccgccgccgcatcccgcgtctgggtcatggaggggttcgctagggcggtggaggacgggctgaagctgtcgaaaaggctggtgctgccgggggggctgccgccgccgaggccactggcggggatggaccgccgcgtttgggttgggggtgggggtg

SEQ ID NO: 37970 - DNA, 716 bp, Oryza sativa
acaccataactaaggccagtgatcctatgcagtcgtctaggctcgtcgatttgtgactgataataatagacattttatgtcaatataatcagctaatattacttagatgatacccctgtaatttactacggaataaattttttaatgcattgctttgcccatatgttttaaattacatatttatcaaaatacttaacatatgtttacaattaaatagataatctgtcgtaataatttactcgacaatctgtttcaaacaaaatcttggaatattgtaaaagatgataatatatatgtttcaaacagaatcttacaatcttttctagacagacggtggccggcctaggctacaacacacggggggcggcggaccggcggtacagcttaggcaattagttagccatagtagccagtttaagcgattgaagaatgaagaccccgggcgttgacgtcacgcttatgactgcggcggcgaaagcgtcaaaagcgcggggcccgattgggtcgcacgcgtgcccggaaaaagccagcccgccacttaccctccattccgccttgccaagccacacaccacaaacgccacccggttttaattttttttcgcgcacacacgcacgcacgcatgcacctgcaactttgaacaacgcacgggactcactggtgctggtactactcgcttagccgatcgacggatcgatcgatcggaacgccgagtc

SEQ ID NO: 37971 - DNA, 719 bp, Oryza sativa
tttcatcaatcggcttcgatgtacatgatagatctattccctgatgtcataccccaggtaaaccttatcattattaacctgagtaattgtcagccgattcattacttgactaatctcttgttcttgttctgcagacaatcgactcttcccctccacgccaaagcaacagtggcagagacattgaatatgctccaggtctaattcccaatggaggtgggccatctccccctgtcatcggctatcatgcccccaggacttcaactctcctccaaggcctaatcagggaaccagccgatgcaggcaggaaaagaagaactaggtcattggctatggacgcattagctccagctccaaagaaaagggccaaatccaagaaaaccaagtcgactgatgacctgccttctttggatccatccatcgagcaagctctagatgaagaagaaattgacgaggctgttgaccaggctcccgctgatgtaagtgatactgaggaaacaccatcggcttcacccaagcaaactcctccgactccttctgcgccagttcatttttcaagataaagcagctctctttgatcccttttgtaatcacttcacttttcggccgatcactcacagagtttattgttgcagaagaagaaaactgctatgaaaaagaagccagcagcaacaattttcaaaccggctcaaccagtaagatattttaattcttttattagt

SEQ ID NO: 37972 - DNA, 513 bp, Oryza sativa
atattagggaagaacctaatataaaaaaaaattagaagggctcagctgtaaaaaacttctccactaagtaaaagaaaagacacgaatattagggaagaacctaatataaaacaaaatagaaggggtaaggcttcgaacccaggtcgtctagcctaccatcttgtggagctagccggaagacccctgggtgtttcgagtaaaagaaaagaaaaaactcacaactgttaatatactctcctctctctctctactttgttcttttgaactccataatttagagaaattctatgccgaagtttctatcagcaagatttatgtttcctttgaactatgttcaatttcctttatcaccatgctctttgatatttatggttgctcttctgggagtgggattaaattcatatggaaatggaacattcatattgtaccatattgttagataatcctaccaactcctgcgagctggcctccccctatgtatgtataaaaggaggaccagtgtctctaagaaga

SEQ ID NO: 37973 - DNA, 538 bp, Oryza sativa
acttttgccagcgggtaataatggaggatgccctcatcattcacacccccttaacaagggcctagctcgaaggtgggattattcagaggcttcacacggtcgccgcctgacttttgcgtctttgccagcgggtaatagtagaggatgccctcatcattcccacccccttaacaagggcctagctctgataccaaatgataacaatccgatccaggtggggttggctgaggtccaataacttaaggttgtccagacttcaacagttcataggcacacccactcggggaaaggcccaatctccctgaaaaactagtccaataggggaagagtggctctcccttttaaggtggcttcttcctcccaagctaagtaaggtgggattattcagaggctcacacggtcgccgcccgacttttgcgtctttgccagcaggtaatagtggaggatgtcctcatcattgaccaataacttttcataaaagatatatcaaatagctgtaaaaccaatattgtgtgaaagtactaaatgtaatggcata

SEQ ID NO: 37974 - DNA, 530 bp, Oryza sativa
ttaactctggttatcttttagtgattgtgccgaacatacggaaatacctcgacaattgaacacatatatggtctttgaggttctcttgattgcatttcaattggagaagactggaaaatgatatatccactactggagaagtgctcgtctctcccggttcgcaagcccctttactcccaggtagcgaatcgggagggagaatccgggactaaagatggcggtctttagtcccgattcaaatacccgggagtaaagctccatctttagtcccagttggtggctcagccacgtggccgacagagccatttttagtcctggttggtgttaccaaccgggactaaagattttttttaaaaaaatttggttgtgttgtgtgctgcctgtacatacatacatacatacatacatacatatatatatattatgcatatatatgtttaaatacatatatatatatatatatgcataatatagaaatgtatatattacacatatacatatacgagcacactatatgtatctatacatat

SEQ ID NO: 37975 - DNA, 843 bp, Oryza sativa
actagagttaccaatccacttgttgactagccagttaaatgacatagctttatattccattcgtttcaaaatataaggtttctttgattcaaattcataacacaatataaacattactccctccatcccataatataagagattttagagggatgtgatatttttcaagcacttcgagtctgaataggcctgtccagattcgtagtactagaaaaatatcgtatccctctaaaatcccttatattatgaggcggaaggagtactacactaataactcatatggttcccatcatcatgaattccaaagcccagtcggatacttggaaaggtaatctaaacaattcaaaattcaaaaattgacaattgaagtgattaaactactgctaaacaactagaaacaatccttatattttagaatggctagaggaagtaattagtaccacctttgttcctttttacttgtcgttttggacaacacagttttcaatgcacaaaactgatcactactttttctaattatatgtttaaaaaagtattaaaattcatatataaaagtgttttcatgactattctactactaatagtcttttattgtgttaaatcctattattttttgcattcattaatcatctaaagattttgataatacatgacgacatatatttgacaacagagaggtaatacaaatcagttaaacaaaaaaaaaagtttaaaagtattaaagtaataatgtctaactctgggggaaaaacggattggattcagatagatagtggtcataccatatcctaaaaacatatttttaagagttaattttagaaaactgcaactttaatgacaaaa

SEQ ID NO: 37976 - DNA, 750 bp, Oryza sativa
  unsure (1)..(750): unsure at all n locations
tgttttgattctttagaaagattggatgaataatacatgtatcgaccgtattgtcatgtaatgttttctttggacaatgaaattcaatacacgatcgagctgagctttttttaagataagagctcctgcttacgggccattacaacaagttcagaaacaatgatagcaacacacggggggccctaatggtgaaggtacattgtttaatttggtggacttgcttgtaaaccgttgcaacttttgtcattctgaccatttcatggatacaaggattgttaggagaaatgaacagcccataatatgtttttttttaaataagggaggccagaggacttcgccgggcagaaacaaaccaaataaaaaaatattggtacacgctgtgaattggattaacgtccaaaatagcctaatcaaatcgtttctcaattcatacttactccctctatctcaaaatatgttaaccaagaatgtgactagtgtcagacgtaacgtaaaggcggagaggtctttaagcctccactgtttgaaccatggaagcactccaaaaaatatatatatattgccacacctccattgaaaggcggggcttggaccttggagctctattttagtttcgagataattntgttcttgtctccactttgatgtctaatattgattttgcccttgttttttagggttttcgtttttacccctactttttgaaacgaaacaactatttgccccagttccattaattcttactaatgg

SEQ ID NO: 37977 - DNA, 678 bp, Oryza sativa
aaaaattaaggtggtttttgcggtattttggtccgtcgttcgaatttgagctgattttaaattcgttggcttttgaaaatacaaattcgtattttagtcggattttaagttcgtttccttttgaaaatacaaaagaagtcatataagaaatcccttttaaaaaacttgcatgctaacttgagatgaatgttgaactcctaattgcagctcatgattttctagaaaaaaaatatctaagcgaattcccacagtggatttcaccctagccaaaccgtataacaataataaaaaaattataatagcattcacccgttacaacacacgggcatcttttcaagttataaatatatatattattcggtcgtagatttaatgaaagtaatctggtgttctatatgttaatatatttttttttgaaaatctttggtttaataacttgaataaatttggcttgggataggaacgaagggagtatataattattttttctagttgcacacatacaactattatcttctttttttccgtttacatcaaatgcgtactcaagtgcttctcctaatacacgttcagggaaccggagatgaacaacaaatcccaacaaactgaattttattcaaatccacagcgattacaatggtaaaaccaagttacaacacaataattactgtattcgag

SEQ ID NO: 37978 - DNA, 625 bp, Oryza sativa
caccctgctgccgccgccgtcaacccctgtcgccccgccaccgtggctgtcgccgccgggttgtccgtgaactcggcggcggaggcaagcatgttgtcccttcggaagcaaaaaaccccaacgtgcacggtggaacggagacagctgcagatgcacgagcgttacgcctagggatttgggccacggatcgaccgtgcgatcgagaaacggacggtcgagaatggaaggaagacgcaaaaaaggaaaaggaaaaggaaaaggaaaaggaggaggttaatgcagcagagtttgatttgctgtaatgcagaggtagaatttgtctgatgcaacagcctgggttttatatatatattatccagtaattctagcaggttccaaaatacacagacacctttaatccaaaataataataataattattattgcctcctagttaggatcaccctaatcctatcttcttatataattggtacctattaaagagcatttactcctataaagtaagatatacaagaagccatatcattaaaaaaaattgaagatgtttttgtcggtactttggtacgtcatccgtgtacgagtcgtttttagttccttcgcttttaaaaatacagatcggcatttg

SEQ ID NO: 37979 - DNA, 702 bp, Oryza sativa
gcacgagcttggcgaaaggggagggagtggctcgtgggcttcctccgcggccgacacggcttggcgggtgggcgggcagaaccgcgtcgggtagcctcctggtggggcggagccacccccagctgcaacggccccagcctcacaaaggtgacatagggtgaatctcagccctagaaagtaaatccaatggctaagattcgtccacataatcacgagttaaaattttactcccaatacctgaaaatttactcctagtaaattttttactcctaaataaatctgcgagtaaaattttaactcatgatgacgtggatggatctcagcagttggatttgttttggagggccgagattcacgctatgtcacattgtgacatgcctaccttatgtcacccaatcccaatccgagggagagagagcagtggaactgaggaagagataaggtggagactaaggataacatgtggggcccactttcattttttgctacatcagtgtctagtcagcacgagtggatcgggtcaaattgttacgtcaacaaaatcgatgtatatactgctataggatccaaattggatggtttgtataatttaaggggtgaagttaaaatattactatatttatctttaaacttgatcaagtttaaagataaatatgtaatattttaaatagaaaacaaaccgattctcaaagtatatacagt

SEQ ID NO: 37980 - DNA, 897 bp, Oryza sativa
ttaaaagccggcttggacgcaagaaccaagccatattcgtggacactagaatctactccctccttccaaaaatattagacttatttcatattttggtttctccaaatatgttagtcatatattgtaatttttacgtatttaagacttactacctccttgcacaaatatatgacgttggttagttcaattttgagctaaccaacgtcaaacaaaaaaatatagagggagtaaatggaaagataaattgaattattaatcagaacctgatgagcctggtaaacatacattgtttgatctttgttacatgcaggataaattattttttttcttagtggcaaaagtaatactcctttcgtcccaaactataacaatcttaaattgaatgtatatttatacaatgaatctggacaaaaccctatttagatttgttgtatttggatatgtctcatccagttttaggttatgatattgtaggaaagatggagtattttaggttgcaagttactccctatgtccaaatgaatcacctaggatagagatgtgatctattctaagataatgaatctgaacaaaggagggagtatgttgtaaaatctaatcttttttggatgcaggggccatgatgcttcactccttcctaagcaagggcattattactccatctgcttcatattataatcgttttgagtttgtagaaaaaaaacagtaatattttcaccccaagacaaatatattattaaaatatatattcaattatagattagtgaaactaatttgatgttgtaaatattactgtatttatttacaaacttgaacaaacttgtagtagtagtttaagtaatttaactaaagttaaaatgacttataatataaaacggggagtagctattaagagta

SEQ ID NO: 37981 - DNA, 738 bp, Oryza sativa
atgccatgagtaatttgcatggtcgactgtagcgtttaatttgtcaaagttccattccctggaggtggcatgaacaatcttccattcagttcgtcaaacactgcactaggtcccatgcagtagtaaatatatcaagtttgctactctactcgatgggacttgaaaatgtggtgaaatctctttcagttgctggtagaagcctggcattatgcaattttattgatatggtgcatagattgaaggagctatttcttttgtccctgcagatgcaagcactgacacaatattcttgtattttgaacacataatttttttattgctgggtcgggagaaaatttgacagaccataaaaatccccaaaatgaactttagtttttaagtcaattatttctagaaaactaacttcagacacctttgcaactgataggtcattgagacattgtgttctggtcaagatcaagagactttctaaactaccatgctttttttttttacaaaacaatgtaagattttcagttcttgtaatttgacggccattttgttcaacttttcagaattcagattttaggacttttaagttttgtttatttcacagcgttttgatgctttgctacttcatggacctttgcatgaccttattcaacatgtaataagtactaccgcaatgcattttattttgacgatgactgagctagacttcttttgagttactcacatttggatctacagttctgctga

SEQ ID NO: 37982 - DNA, 1603 bp, Oryza sativa
caaccaccacggccgttgcctcgccagccaaccgtcgcagtcgatgccgccacagccgtcgccaccgtcactgctgccgtcggcagccgccgccgccgccagctagatctggctagagacgtcattgcctcctcccgcatcgccgacgtcaccaccggctctcgcggcacctccaccaccacacccgtcgtccggccacgcctccgtgctcggctaccggagctagctccagcagcgtctcccgccaggtcgtcaccgcccaaacccaccgccaaaactcgccgccgagctaccaggacgccgccgtccgtcgttgggggaccggatccgggcaccacagcaccggatctggacgccgccagtcggcgtcgacgccatgccctgagctcctaccgtgccgacgtcccgaccgtcttgaccgtgaacgcgggagagagagcccctccgccgccgtccttgcagccggcggccgcgaggctggggaacgttctcgcttgttaaagcagatttaataatatcgtcaacttgctgactataagacaaccacatcatctatagcctgttagtataggctgctcatatagcaatggtctttattactatcatatcatttgtagtaacagataatatatttttaagcatgaaccaatctccatcaggcttatttctttttctttattgaactgcgtgttgcagccggtgataattctttcgtcgactcgtgttctcgctctaccattccctcctccagcatatcagtgagactgacgtgatcacgctatcgccgatcttggttggcctattagacatgctcttacgctctccggtttatgttgtgacacgatgggggataaacgcgtgacgagacaactatgaggctgttcatatggatgtcattttaaactatacaattttttaataaagttatctagttatgtacacatttagtttagttttgccaaattttggtctacatataaacatttctgtcaaaattttgatagcattgttaaggtaaaggtttattttatctaaaatctcaacaacacctacgtttttggttgccacgtgttcacaactcccaatcagcaatgagccaagtcgtgacgaaaaactcgatagcgatcgaatccatcccatccacctgtcaacgcatccgatccacgtggttcttagactagtccaggtcgttctcgacggtttggatcatgcaccggccaccggaaaagcgactcccctcgtctcaactctcaagtctcaaccgtgcatgaggcgatgtggggaccaccggaccagcaccagcaccagcagcaacggtcacgggctcacgacacgcgaggtcgtcatcgcgtagatttgggccggaatacctgcggattctgggcccactcctgcctctgtggtgcgttgctcacgccgccacgcgggcctcttttgggccgcaagaaagagaggcgagatgggctcctttgctcttccttgcagcggaagaagccgcgggccgtttcctcctccccgagaccaagacacaccaccacgccaccattcccacgcctcacgcggcggaaagagagagagagggtgaatttgctagcgagatgcc

SEQ ID NO: 37983 - DNA, 560 bp, Oryza sativa
ttcaggggcaactgcaattcacaagagaatgtgacctataaagatttcaaactagttcagggaataaatgaaatggaaagcgaacatcaaaataatattcagcaccaacaaccacactagggctgagtttagttccaaactttttcttcaaacttccaacttttccatcacatgaaaacattcctacacacacaaacttccaacttttccatcacatcaaaacattcctacacacacaaacttctaacttttccatcacatcattccaatttcaaccaaacttataattttggcgtgaactaaacacaccctaaggctgtgttcggatatggggagttgggaactaaactccccgcacggaaaacggatcggtccattagcgcgtgattaagtatttactttttttttttcaaaaatggatcaatatgcttttttaaaacaacttttgtacagaaactttttgcaaaaaaacacatcgtttagtagtttgaaaaacatgcgcgcagaaaaagagaggggtgagctgggaactctgtgttcgcacaccaagttccaatctc

SEQ ID NO: 37984 - DNA, 650 bp, Oryza sativa
ccgtcacattgaacgtttgaacatattaaatattgaaaaaaattaattatatagtttatgtataaattacgagacgaattttttaaacctaattgcgccatgatctgacaatatggtgatatagtaaatatttgctaatgatggattaattaggcttaataaatttgtctcgcagtttacatctggattatgtaatttgttttgtttaatactttaaatgtgtgtccatatatctgatgtgacctagtaaaatttttttactggtggaactaaacacagactaattcattagggcatgtttagattaatgcaatttcaaatcataccattttttgggtaaaattatcaaagatgtatatatatttagtttcttgccaaagtttggtaaatacataaaaaaatcatgccaaaattttagttatattgttaacttaaaaaaaattggtaaggtttattttgactacaatctgaacagctccttttttttctaattatacggatgacgcatacacatctgatgtacattcttgattacatgaaagacacgttcacactagtgtacattcttgattacacggaagatgcatacacatcactgtacatgcgcagcacactcgcacctgtttacacctcgtataactaaaacttta

SEQ ID NO: 37985 - DNA, 1673 bp, Oryza sativa
tctcaagcggcaatatagttttatcagtgtaactaccccaagctttcaacaagcctatacccgatccgtcgtaaaaagccagcattaatccattatttctatattaaaataattcattactgctagctatcaattagaaacgacaacaacggttataaccagccaacaggacggtaacccgccaacagcagcaagtgtctaacggctagactgtgcagttgtaatcaaggtacacttagctaccgaacaaccccaattttttaaatcttttaaaatacaaccaaatttgatcccgaatcttaaattcctatttaaaaccaaatttattcagaatttcctaagccatccgatcatcagaaagatcctgaaaactagggcacatgaggattatctgcaaagctccagagccagtcctttaaaccggtagaatatccccaaccccgtccgtacgacccaggtgttccggtgcgggtagccaatagccaaagcccaaagagcccagcaaccgaagcggccgacgtggcgcatcctcagccgccgcctcacgccgatccaacggtggccagatcgatccgtgcaaagtatacgtggcttcgcacggacccatccatctgtgccctagtttaatcccccggggcgcgggcctaatcaacttgattaagcgccactaaccaccccctggaacgatctccccgatatttaggcggagattaacgaggcctctgtgcctcgtggggagtaattaatggcggagaaagttttggttaatcaaagagaggggggtaattagatcgatgagtggtcattaacaaacaggtgtcagcccgacacggaggagcctggtcgtgacacttgtcctccccgggatccatgttggcccatatgggtgggctctcattggccgaactgcaaaagctgatcatttcccttgtgcggaaatgtgttgttcatttttgttttgtttttgttttttttacgccttgtgagatattgtcaatatttcaagatgtactccctccgtattttaatgtatgacgctgttaactttttgataaacgtttgacctttcgtcttattcaaaaaatttatgtaattataatttattttattgtgacttgatttatcatcaaatgttctttaagcatgacataagtatttttatatttgtataaaatttttgaataagacgagtggttaaacgttggttaaaaagtcaacggcgtcatacattaaaatatgagggggtataaaatatgaaataaagaattattgtagttctagcttgggtcatgcgtgacaccatcatagtacggtagcagccgcagtagcaacagggtggattataaaggaagaagttgaatgcatttatgactctatttatcagggtttaaattatgacacatataatggaaaaattgtaaaaccatctcaaatgtcactataagtttgagtttccccctataagacgatttgtggtaaatacacccccctctcttagttcacctttgatttgagattcccctgattggcattgctcgtccattctcgtgacaaacccccccccacatgtgttcacatgaatactaatacgggaggagttgtggtcaccactcatgttgatcaagcctaatgacaccaatggtgacattttttacacatgacacgcccacacc

SEQ ID NO: 37986 - DNA, 638 bp, Oryza sativa
ccggacaaatcgagctaagcaagaacatttacataataagcaggcataagattaagacagcaacgcagaattgcagacagagagaatgcatggaggcagctagcaagcacccctgcctgtgttctctacacggtttcaatcaatcaccagctaattggcagacattcaaacaaatcgcaacaccgtagtatagtacttttaattcgtcttcgagatacgactttaatcattaattgccttacctcaactttatgttcggattacatatcatgtaatattataaaaaaatctaatggtgtaataaatgttataaaataaacttagatgcatagttccggatatatgcccctccggtttttaatgtacaacacttaaattttggatgtgtgttcgttttgaatcaaatctgaaatagtatgttacttttaaagtgcctttaaagataaaacaaatcacaataaaaatacatatatttttaaataagacagatgatcaagcatatattcaaagtcaacagatcagtcatacattattagaagagaatttcttgtatgcccttgaaatttaagtcaatcttttctatgcccttgaattttactcactctcttggataggtgtataccttttaattatgattt

SEQ ID NO: 37987 - DNA, 749 bp, Oryza sativa
tattcgggaccaattatattgttaagatcattgatttaaacttctttcctgggaaatgggtgccacccttggattaaaatggggtttgggttccagtacctggttggaataaatttgttgtctacgtttggacattctacttgttcataaaatttaaccttcggtcatttttcaatttatttccagcctccgacgataggtactgtgccgttaaagatacatgtttctattcaagttaaatcacacttatgcaattattcatggctatcatttgagattgtactaatggtttgtattttaaaattaaatattaagggatccatatgcttacaaaattgttctggattattttttttctatatggttcatccatacaacttaaatggataatgcaccgcagacagcccacaccactgccatcgccatccaccgcatacagctcgcaccactgccatcgccaccgcctccgcttgctctcctgtttttttgggccaccgcctccgcttgctctcctgtttttttttgggaaaaagacagagagggagaatagggctgacaagtgggccctacgtttttttagtatttctcctatcacttacatgtgggtctcatcttgtaacgttcctatgataggactacactttacatgaaatatattttatgtcgatatgaattgaattaaagttcaaatgcatagatcatataaaaatatttttttgctaacatgaaaatttaaaaatttattaaaa

SEQ ID NO: 37988 - DNA, 734 bp, Oryza sativa
tcccaaacaccaccttaattagctgcgcacaacaacacagtgaattaattagtagttactaattgattgattccacgtagggagttggacagcctcatgcaaaattcccacaggatcaatcaatggtgctgaggatcgggccccccggggctcgacctcttcgactcggagtacggcatcgccgccgccaccgccgtctgcgagctgatcgtagtggcagtgttgctcccggcgacgacgagcattctccgcccggtgatcacggccagctggagctgcacatgatcatgatcaggctcgccgcgcgagacggcggcggacatgacgacgagcagcagcatcagcacgacggcggcgcgcaccagcggcgacctcaatgtgctggatgaggagtaggccatggaaaaagctagaggtcttcttcttcgtctaatctcctagcttagcttagcttgagagtgagctagctgtgttctcaggcgcaggttgcaatggcatgcatggtgctgaatttatagctaagctaagctgatcgagattcgaggggcagtttccggccgttaccgtgagcactatcgagctagcgacaggtgtagagagtgatgggtggtggtgatataccggaagtggatttttgtccctagaggagacattccctcgttttgtgcataatgtttaaatagttattaaaaaaatttaaaaagggtaccgagctcgaattcgcctatagtagt

SEQ ID NO: 37989 - DNA, 549 bp, Oryza sativa
gaacagatctagtgaaaatcaccaagcatcaatcaaggacgcattttgtcgagcacctagctagcacaaagtatcattggcccaaaaacaaaaaaaaagaagaagaagaagaagaagaagaagaagaagaagaaaaaagctagtacaaagcacacctccctcgatggcagagagtgagagaggagaagaagatcagatcactgacgtttcaggacgcagctgcgccttcaccttatgtaggcgaggtggccgaaccttgccgccgggatcgaccggccgaacaccttgccggccttgccgacgagccctcttaccaccaccttcaccccccgcgcaacggcgccggcgccgaccttcgccggaacagccgcacggacggcgactcctgcatcacccgtcgacggcaccggcggcaccttagcgccatgaaaacaccgcagtgggagctccatctttctcctgcaagaagacgacgacgacgatctagctagctatggacaccgagcttttatcagctacgcgaccatttctttctttatacggggggcg

SEQ ID NO: 37990 - DNA, 641 bp, Oryza sativa
ccgtcccagccatcccatccagagagaacatcagagtcctcacagctctgaattaggacaacatgcacgcacgaaaatattatttgtagtacttgcatgcacaaaacaaattaccttttctctcaaattttttaaatgtgtcaagttttttaaacaaactttaaactacatgttctctcaaattacttatccaattcatgatccaattgcaccactaaattcattgtaattaaatctttaaaacaagactaaacatggctataatctgatgaaaaaaatgtttagctttattaatgaattgtttttaatgttgcacctatatcatttaaatgtttcatgtagtattcatatgatgtttcactttttaatttgtaataatttgtaaatgttgcacatgttcttctaggaatgttttagcatgtactttataatattttaataattataactccaccaagtagatcggaatcgtttcactaagtagatcgaaaatgtttcagtcttgtaaaaaaagctgaaacccaaccaaatcacctcataaaacattttactataacgtagtgaaacaacagtttccgaaagaaccagacgatgtttcaccctatataaaaataatgtttcagcaaatagtgaatagatgt

SEQ ID NO: 37991 - DNA, 571 bp, Oryza sativa
ctttctgtcccctagctaagccaataggttaattattgcgaatagttgctaattgacatattaatttatgtttatgtgtttttgtacttaccaaatcaagatttgacaggtgagcatatatacgtgcactactaatcgatccgacataatggttatagcttcttcaaaataaaggtcaaaattgttttcattataaaaaaaaaatgattcgacgtgtacgctcactggctcactagctagctcactgatcgtggcctatgatttagtcaagggcaagagatatataatatccttaattcagagtttcacatttttgtttggagcaataggtgttactatattcatatatatctcttgccaattatatagatcgacattggaactggtctaaattaattaattgatctttgaattgtcataaacttgccttaaaagtatttagagatggacaaacctctgtccttaaaattatttttaatcctcagtgtggaatctctttacgccatttatatagcagtactaagttaggttgtcatgaatgcacacacgctgtttactatatagagatggg

SEQ ID NO: 37992 - DNA, 592 bp, Oryza sativa
tgataacttgggtattaaaatgactagatgttggtttaggagatgcttagccatgcttagttcaactagtgcacaaaaggggaccacattaaagcatagacttgattattggcaatagctttggattagtgccaccgcaatggtgttggctaattaaaatacactacatggtgggctgtgggtgcatggttttgctagacgtgcccatggcgattaaggaccggttcgcgggatgccctggaagaatttatcgtacttaccacaagccagcgtgggcaacggctgggcttgtagtgtagcttttctctagccgacgtacccaggcgagggtgggcgtgatggagttgggtcggccggggtgtccggttgatcggctgccggattcaccgcggcacgaaaggggggctgcccgttgcctgctggggacgggggcgaaccctaaggtgtggtgcgatcggttagagggggttatgcgaagggtcctgtcacggcctctttccggtatgtcgtggtggcatgtcggcgcacgggaacgtgtcgtggggctgtgtcttgtgggtacaagtgtacacctctgatcagagtaaaacta

SEQ ID NO: 37993 - DNA, 520 bp, Oryza sativa
ttttttcaaatcatggttaaaagttatcgaatttgatttgaaagttttaaatcttgagttaaaagttaaaaatccttatttgaaaatttttaaatctgacttgaaattttaaatattaatgcgaaaattttcaaatcttcacatgcaagcttttaaatctgagttaaaaggttttaacaagaaaggaaattggataaagtgttgcactacgtactttgctagcgcatatacactaaataaggaacccccgaagctgcatagcacgtttctttttgggcaaagtggatggccactatccggattagctcttttgggctgagtttggatgtggtgctagaaatttaggatttttcacaaatgctaaatgagactaaattattagtgtcaggttaattgaatactttctccattttcatatattggtggtttgaattttttttctattctacctttttaaatttaatcaagtttataaaaaatatagcaatattttaaaacaaaacaaacacattattaaaat

SEQ ID NO: 37994 - DNA, 2170 bp, Oryza sativa
gatctggcgtagtgcgggaagcctcacgctcctcctctatttatacatgaaaaaccctcctactcaaagtagacgtaggactcctattcacaataggactcaaaccttaatttccaaactcatctaaaccggaattcaatccacatagaatcccagccatatagcaaatctcagcgccgtcaaccgagccggactcggtctcctacgctcgtcccagctaactcgctcctgcggcttgtcctcccaggccgagccaaccagcaagcagcaagctgcacatgtacagcaccgtacatgcaaacacacacatgcatatgcaacagcatgcatatgcaccatgctacagtaccacgagtaaccaaatattatcacacaatttccttcgcgaacaccgacgcttgcacgcacacctcgtgaagcccgttgcgaagatctctcccacacgatatccatccaccgtgtgccatctcgtatccaacttcgtcatccggtatccttaaccgtctggacctcaactcctccctgagtctagtcccgatctccaccgttgaccgaagttgacctccaagaatcctgactctagtcaccttctcatatggtatcccgaccacactagacctctgctcctccctgagcatagtcccggtcctcaccattgaccaaggccgacctcaagtcacctgcacacaatcagacaaaacaaccgttcctgggcacagatatcacaacctgacccacattagtcacacgcactcacaccaacattcacacaaactctcaaaccaattctttgaataaatcattcgcacagccaattattcatcacaaataataatcatgacagtgatttcacatatagctagtactctgcttcaagttcggggatgcatggagatcgtcacgctggtcagtaaacatgcatcaccatacatatagtcatcacaatcccatagggcaagttgtacattgatcactgccgaaaatttgacattttggccccttttgaaaactatttgcaaatttggtccctggcaaaaactatcaccagatctggaccccgaccttagcgcaaggccgacggcgctgaggttgaacaactcagcgccaaccgcatcggcgctgagtacttgacggccctaagggaaggatgaacggaacggcgcaatgccagcgccgaccgacttggcgctaagcttcgggacctcagcgccatcgggtctggcgcggaggtcctatcacctttggccgacccgcgcacagcagccggggccttctttcttcctcagtggctctcgactgaggcgcgcgggcgccgaaccatctctctcttcccctccaaaaaatcgaaaaaatctccactaaatcgtcgcattttggaggggaaattattggaggacatagtggcaaggtattctcctcagaatcctctcgtcatttcgcatttttttgcttggatttgctcattgatggatgaaccctagaatcgtgatttggggttattttcccaaattagttggttctctactctgtggttgtagttgttgttggtgatgtaatggttagatgctcatagaaccctaatttttagtggagattttcggcacttagggaagaaccctaatttttcccccaaattagtaaagaacacttcttttttgtttaattttcatcacaatgcgagagttcaaatttaggatggatcgttacaaatggaagtttgcgtatgtttagatatttatggacaatttcgttgggggacatagttgtaggttagatttttttttattgcaaattcaagtttttaaaaaatgcaatatgctaatatgtcggttaatgttgtagatggatagattagtacgattgcactatggtggttcggtggtagagcaaagtaacagtggtaacaatttcgaggggatgagtgttaagcaacttatatttggtggaaaacctagttttgaggagttagtttgtcatacaaaggatgtgctggggtggagcaatcagtctatagctatacaaggtagatatgatgttggagcaggacccatttcacacaagtacatgctagatttgaatggggagttggagtggaacacatatgtggatatagtgttgggctcccaattcaagtcgcttgaggtggttgcttcgaagcttgatcgtactg

SEQ ID NO: 37995 - DNA, 638 bp, Oryza sativa
aatgtgaaatgctatatgttcagatcagaaatggaatctcagctgcagcaactatactacaagcagtaaaaaacattcaaggatcaggcggtgacgtcgaagcctaataccagcaccctattttaaggctgtcaatccacgtgattagccaatttagttaatgctaatcactcgattaggaacagttccccaggagggagcagggaggcgtaggctccagctgtgaatgagcagggagccatcaccaccctttatcaaaggcgcccccccggttgtgaaaaaaatgctgcgatgcgatcgatggcatagttttggtgcagagaacgacgatgatgcctctcctgccccgtcgattttttactcagagaacgaaactcatgacgcatcattccacgggctctctcctcctcctcctttcgctttcgcgacgccccagccgatgcgcataatcttttgtccttgtcgagttcacacaaaagtcacaaaaccgctcgtgttaacgttacagtttttaccgcgccatcagagtttaatcgtacgctaagcttccattttagtaggactagtgggcagtggcttactggctttcatcccccgcaaactgcattgttcttcaaggaagatacagtcggaaagag

SEQ ID NO: 37996 - DNA, 847 bp, Oryza sativa
aatttcggacatccatttctcaatctaacgatagttttcaagtttccactacatatatagtttgcactacatattttccttattgaaaagactcttcacagtagcaagctagcatagacatcgtgcgtcgttcttctccaatcctaaggttatacatacctttgggttcgtcttcaaggctcttaattggtcgttggttccgcgagtctttgagacaaagttaggtaaaaattttcacactttgcatgcaaattagtttgtttagtaatgcctcatagagtcaaagcatgaactattttctccatattttcatatatacaagcatattgcttgtgcgttaaatatacagtacatgttgtacaaacgttaaattgtaaatgttgtgtatacttaaatgtacataaaaatattttaaaaaattgtgagatgtgcaacatgcatgtacaacacgtaaaaatgttactcaaaattatcatatgcggcatgttttgacttagtttctacttatttttaagtctagctaactctcccttagtctcaaaataactttactttagcctctacctcgtgtcaaaataagtttacctttatcaacttacctatatcatgctctaattcacaattcgatgattttttttattccatcaatatcttttacctatccttacctacctatctacctatccacacatactagtttcctattagtgagtgacactttggtgttttttcttctatattgttttgaacatccaagtctaaacttaaagttattttgaaatggaaggaccgaagggttattatcttattaaagtgtaatagcaaagaaataagcttgagtattggg

SEQ ID NO: 37997 - DNA, 696 bp, Oryza sativa
acactcgtacccatcccgcacatgcaagaacttgtcagggaccttcattccggccatggtcacgaagcgatcatctctgcctcggcatctcaattgctgcttcctccggcatcctctcgaagaagagttggagccatcaggctcaaacccatcgaggcattggcacctcgggatggctgccgttgcgtcgcagtagccgaatggaccacacgaggcgtagggatcgcacacgatggtgggtgatgggcgctggacgacgactgtccatgacgacgcgctgtcgttccaagccaggaacttcaaggtacccgtgtagtccagttgaagacgcttgtaaggtgagccatcagaggttgtgtatatgatgtagaactcatcatccgtgctcaccgatgtttcgtagatgagagaggtactgaatgagaagaccgaagaccacatgctgctaggcccaaatccaataaagcggatatatggtctggtaccgttccaaaggaagatctgaaggtttgagctgggatcaccgctgatggagaagtctccggtggaggggtcatttgggccctttcaagcgatgcacccgatggcgacttgtgccttgtagctaaccaaaaaccttatgcccatcagaagggtgtcaggtgggtgatcaaagctcttgcccatatggttggaccattcgggaaccggagaacc

SEQ ID NO: 37998 - DNA, 725 bp, Oryza sativa
  unsure (1)..(725): unsure at all n locations
agcacgcgcgctaactagcattagcgcggacttaccgggggttcctagaaggcgcgtgcgcgccgactgcttaattcgcgcagccgcgcgcgtctcctcgacgtcttgtccgcgcgcttccgccgctaattatggcaattagtgttaattactgtcattagtattatttttaaaacagtaacaacgtaaataattcagttaccagttttttttagaaaagtaatggaaagttttaaatttgtagtcaaaagattttgaaatttgagctgaaaattttaaattttgatttcaactttttaaattttgatatagaagttttcaagttgagttgaaagttttcaaaattgaagttgaaagtttttaaatttgagtaaaaagtttcaaaaattgagttgaaagttttgaaatttgacttgaaagtttgtaatttgatttgaaagtttcgaatttttagttgaaagtttttgaattgagatgaaaattctaaaattgtgagttgaaaactttcaaatttgaatcgaaagtttttgaattttgagatgaaaattctaaaattgtgagttgaaaactttcaaatttaaatcgaaagttttcaaatgctgagtggaaagttttcaaattttgagttgaaagttttcaaaattttcaatttaaaaatttaatcttctgttaaaaagtttagttaaatgttctaatcactgcgggtaccagnntgtacatcaaag

SEQ ID NO: 37999 - DNA, 535 bp, Oryza sativa
tttataggtggaggggaaggcgaacgtgcccggaaaagcctctgatttcaccggcgacgtggggtggagagagagagagagtggggtgggatccgaaatcgaatcccgccctctcgagcgcgcgcgcgcgggcgggagtgacggggcatgggcggtgacgtggggaggacgcgggaacggcgcggcgtgggcacgggaggagcggaggaggtggggtggttgcggcggttgccggctttggggcgaagtgggcggcgggaggttagggacgaccgacaggtgggccccacctgtcggtgcccgaaggagagagggagagagggaggactttgggacggggaagggggagcgggctggcctagcaaagagggcgtgcgggagggaggttgggcctacggcccaacaaagaaaaaagaagggaaagaaaaagaaaaggaaaaaggaatttccctgagatttaaatattgcagttgctcattttgaattggttaaaattatttccaaggctctgaaaattccaataaaaatcctgtta

SEQ ID NO: 38000 - DNA, 1239 bp, Oryza sativa
ccataccttaatggtattgtggtgaagggtatgggtatggcgaaaggctccagaggctagggtggcctcatagcccctgagcttgaaagcaactcattttcgtccccagcccttgtcgccgtaccttgcgggtactgtggcgaagggtgtgggtgtggcgaaaggctccagaggctagggtagcctcgtagccccccagcttggaagcaacttattttcgcccccagcccttgacgccataccttattggtactatggcgaagggtgtggcgtgtggcaatacaccgtgcctcgtgtggcgaaacctcttcgtccgcagcccttgacgccgtgccatattggcactatggcgaagggcgtgggttggcgaaacctgttcgcccgcagcccttgacaccgtgcctcgtgtggcgaaaccttttcgtccgcagcccttgacgccgtgccatattggcactatggcgaagggcgtgggttggcgaaacctgttcgcccgcagcccttgacaccgtgctttattggcactatggcgaaggcgttggcgtgtgacgaaaggtgtcaaaaggcttgggcggcttcgtagccccccagcttggacttaactcactttcgccccaagcccttgtcgccgtaccgcgcgggtactgtgacaaagggtgtgggtgtggtaaaaggggttccatttcgccttttcggtttgggttccccacgaacggcgccagctgttgtcgaatggacaactatgccacgtcgaaaggcgtggttctcatgtaaaagcaattgtattgattcgtgaaatatttttggggatccccccattacatggccctagaggtttatttatagccttagcacaagcttgcaccttctagtgtttagggttacaggggattttacatggttgcccttatgaaagggacatttacatgggtatgcagtgtcatttgcacatatgggcctttaatgggctgataggctgggcctggtctatggcaaacgggcctaaaaggccgggggcagcctgttgggcctccttgatgccgaactcgtcatggcgaagtctttgtagtttgcccgagatgcctttactttcggaataccgacgcggctttccagccttcgccatcttcgcttatggctttcgccatagggcttcgcctgaatggccttgacgtctttggcttgaatccttgatgaaactatagtttcggcaggtccggccgaagggcttcatggcat

SEQ ID NO: 38001 - DNA, 545 bp, Oryza sativa
agtgttataaaatattaaaatatttttacaaagtgattcttattaacttttctccacagagatgtagggaagtattttctaagactaacacatttggtttcacaatttttggagttataatgattttcttatgaattttacaagttataacgtgttgtatgcatataatgttttacatgcatatgtcttgagagctttatatccagaacataatacttcttgattgagttgagtaaaaggaataatttggttaactaatccatttttagttcataagcttatggtcttattatcgtggtttagttcataagcttatggtcttattatcgtggttcatatttttatagactaggggagatctagtctatgctagtacctagaaattactatatgagctaagttcttctaagttttggtggatggggatagaactatggctccactggtcctaataagttttatttggatttatttggagctaccatgcatatatatacttattcatatgtattgtttaaccactattatgtgtttagtacctatac

SEQ ID NO: 38002 - DNA, 1035 bp, Oryza sativa
aaagggttagagagtgatccagggtgtgccactcctcggggtgttagaagaaagttagtagaagactttggctgaaaccaaacatcaaaaagaggttttgaaataaattttacagggagagcaagtttgaatctgctaagcagtttttcaggattttggagatattaaagtagatcaaggagttagcaaaccttactaaacaaaattctgaaaatttgtgggttgatttctgacatatcaaggtatttttgagaatttttgtagaattttttttggatgcatataatttccagattaattgtttttgtgactctaggcctatcattgcatgtgatgatgagatgattaagatccaaaaacaattaaaatcactccaaaaccacatgatgcatttaaattaaatttagttctcaggtttacaggcttgggtatgttatattcaacgtgtagaatgtggtagagtcttgcaaactcgaaacaaactagagtgttcatatcatgtaggtaaagctgtacaaattctgcagagtctaaaaactaatcgattagccgtgctcgcggttatgagcggcatatggatatgtgttgagtatagacttgtgtttattcttctaaatgctgaaatttactttcaaattgtgatgagatttgagaatgatctccttgctgccatggatggcaatgaggtgcatattcatacatgattaatgtctactttgatgcccatatgctaagtactagcttgctgaaaactatttgaaagcaaatcagatttaaatgtgttttatgcaaacaaaacttgctttatgctaaaacgaaccatattatgccttccttgataatattccttacaagtagagtgttaggcttgtcttggtgcttgccagtatattatttcaaataatgtactgactcttgccgttgaattaaccttttgcttgcaggttttaaacttagtctttgagtgatgcaggttttgactgcttcttctaggatttgaacttaatggggtaaacccctagtcggtgtgcttgt

SEQ ID NO: 38003 - DNA, 537 bp, Oryza sativa
tatcgtggcagcgtgaaagcttctcctccaaaactcaaagccgcgtcacctctcattcactctcgctcttgagccgatgaaaccgagagagagagccctgcttctccgccgcccataactccatcgccggccgcaaggatgacgaccgtcgcatcgcctattgagccgcggttgtctcgatctcttgtccgttcccttgtctcctctcagtgcaggttccgttccccttaagttcagtcgatttcatgcagtggacgttcgggaacgcggacctcgccatcgctgatctggagcaagcctggagcgccgccgtggatcgcgtcgccgttcctgtcaatccggtggatctcaagccgagcttctgccccacaaacaccaccatgaactcctctgctaaagcccacaagaatccccaagaatcgtgcaccgacgagggagatcatcgccgtcttctccaactccggtcgccggccatcgtcgtcaattcctcaaacctgggagagcttcggcgcaattcctcgcatctaaagcatccta

SEQ ID NO: 38004 - DNA, 615 bp, Oryza sativa
atgatgttaagacggtacaggagtcaagcaaaagctgaacaccgaactgtccggaacctaattaattaatctcccagccgccagcagccgcggaaagataagggaggcattggcacggcgccgcttgtgcagataatgctcagtaatttacatccattatgtcgacgatgctaatgctgagtggctgatggcataaagttgacctgtcaaatctaatctcatgtgtaatgacaaccaatctaaattgttaacgagtgtgatgcaaatatgcaattgttcagtagtaaatcggaccctttatctgttactagtagaaaaattaaacggatgggacaatgaactacagtagcacacgctgggatgttggctggctggctggctggctagctagctccaagatgcggccgtatgcaaccaaactagctggagccacacgtacgattccgggctgcaaaaatgcaccaccacgaaatctcccggaacgtcgcggtctgcaatccatcgtccaatctagtttgaaatgctagcctatttttgtttcacggattagtctcgtatattacgtattgcctctcacgtcgatgccacaattaaggcaagcgtttcatccaatct

SEQ ID NO: 38005 - DNA, 515 bp, Oryza sativa
aaaaacaaaacgacaagtaaatatacagatcgaaacctaaataaagcgtaaaatactaatagaagaggcacttagtccccagaccgaaaagaaacaactgtgaaaaatagacgatcctagcggtgcttcagctccactccacaggcaaactcgactgggtataagccttggtcctctaacatcatctttagctcagaagcactacacttctgaaaagggggaataattagcaaggctaagtacaaccactgtactcagcaagccacacccatgatgcagacgtgcaaggggagacaaagaagggtttgtggctatttgcataaaggtggttgcaaacatattatagttgaaagcagaaaaactattgattaattaaggcaatattaaatctccactggacaatgctaccccacattgaacagacccaaccaaaccacctgaactacaccagttctttaagttaaattaattaatagaattgagtctaatcacgatggctagttgatcgcccataa

SEQ ID NO: 38006 - DNA, 621 bp, Oryza sativa
ccgctcccttgcagccgcttgccgtgccgccgctcgccgtcagtagccggtggccgtgcgctgccgccgcgggtggccgtcgggccaggccgacgtagccgcgctccgcgcccgcgctactgccggctgtatcggacagccgactgccgcctcccattggtcccagccgcggtcgatctgggccatcggatcggcctcggtctccatccgggctacccgtgtgtccgcatacgtggccgccacgtcggtgctccgtcggagccacgtgtgcgccacgtggtgcactagcccgtgcctccgtggacttggtccacggtaggccgaagcccttgagtcaccgatgggtgggtcctgcttgtgcaccgcccgttccctctcggtgatgtcataaatcgagtttaattgcacaataattcgttaataattctagaaattcatttaaatggcttaaaacttctaaatttcatatctaattcattcgaactctgaattgagccattcaacttgcaaaattcatctaaaattgagatctacatgtttgtttacttttcatgtactgtttatttggtttttattagagtttttcctcgttttgcgtgctagcgtgtagttcccgtcgtt

SEQ ID NO: 38007 - DNA, 2821 bp, Oryza sativa
acgcgaccttaatatcgaatcaagcccctccaactatttaaaatttacaatcacaggaaagaaaaaaaccattcacgtgtgtcgaccgtgccatgtgtaggaccatgtagcaatgcgggtaaaccatttgcgcgtgccgaccgtgccatgtgtaggggtgggtagcgacgtgggtagccgagtggggtgcacatagcacctcaggttgccaaaaggtgtcagtggcccccacctccactccacactccacagtccaggccaaaaaaaacaaaaaacagccaaaaaaaaaaaagcgtgacgtggacgatagatggagtaacggatcggaggccccccgtccgcaacagcaaactcgatcggctcctctacctcccggaacacctgtcgccgccgccgccaccgcattcgctcgagctcgctcgctccagtcgagctagcgcgctagcgtcgcgtcgcgtcgcgggcgcggcgcggcgcggcgtggcgtggcgtggcgtgtcgcgcgcggctgcctttccgcgccgcgcgcgcgcgggcacggggtgcgcgcgggcgcggcgcggcgcgggctggcgttctgagtcactgaatgggtagaagctgggataaggattggtgacacaaaaccgacgaagagtttttgctaggttggttaattagtgagcttttgagtggttttggaggtattttcgtgtaaagttgtgagagattattccaaggagtttagctcgagctagcatacgacggcgagatgatctgtcagtgactcgagtgtttagctagctacgaggtgattagcaccgtccagaaaaaggtaaatggtgcagtgtataggcacccgcagatcgtgatgctaacttggatttataacaactgtttttgtattgtgtgtgcacgcttgcggcatgctgcttggcagagagataagcccggtcatcatgttaaccacattaaacagttgaaaaaccagagaaaaattatgaagaatttattttttttatgggtgttaccgagtctttacgataccccggcggtaaaagtggtaattgacgataaatgagacactgcttcgaggcatgtgagttcgattaacaaatagataccgtatgacggtatgagtattgtcatgtacgtaattctaactatggaatatggaacgagaagtatcagatgacaacatggtctaccatgatcatcgatccatcttgagaaacgagtaaaatgtttccattacacctcaaaatagccaacaccatggaagactgccgttaacatacgccaacactgtcgcaaaaaaacagagatgagaggcttctgccctctaatgtgagttgctgacatgtaaacccataagctaaacaaaagagtaaatttcacaaaactacaaatactttgatcaaactattacaaaactacaaaactacagatttaagaatgtatttcacaaaactacagatttaaagtcaaatttatcacggaactacagatttaaggtattatatcacaaaaccacacatttaaaaactattttatcacaaaactacagattttataactttaaataaataatagtgctacgatctaaactctagaatatgtagatttttgataacttcatcactaaatctgtagttttgtgatatggtgcattaaatctgtagttccgtgaaaagtttgacgctaaatctgtagttttgtgatacacatttttaaatctgtagttttgtgataatttgactcaagtatctgtttgtgaaatttactctaaacaaaatatttcacacatcagttattcaaggtcagaagaaagtgaaagtaagttaaacaaaatatttctcttctagagggctttagggatatagatctgcagaattttgaaatcaaaatatatctttataaatattttattaaacatacatttttttaaaaaaaaatcagcaaacaagcattacgagtttgagaggatgggaaaagaagagattgagaagatacgcaaaacgagataagccattagagcataattagttgagtattaactattttaaattttaaaaatagattaatatgatttttttaaagcaactttcatatagaaaatttttgcaaaaaacatatcgtgggtagcgtgcacgcggaaaacagagcaaacaatctctctttcgcctgctgcccgcaacctaagaaacccatgtaaatgtaatgcatgggctttaataggcccaatattaaagcccatgcacatagtgggccgaacaagatgggacagcatgtatacacacacatcaccagtttcagaatgggaaaagtacaccgaaggtcacttaacttgtcatcgggttacaaaatcgtcccccaactgcaaaagataccggaggtccctcaactaacaaaaccgttcgcttgaggtcctctggtagttttgaccccggttttgtctgacgtggcgggtgagttagcgtgggccccacgtggaccccacctgtcagcattgccacattagtcgtctctctcttttcctctcttctctgttctttctcatcctcatctctctctctccgtactctccaacagcgagtctatgagacgggagaggaggagggtgtcggcgaccggcgacgcggcggcggaggaaggggcggcgcgtgggcggccgggggcggagcggcaacgtggcggcgggggaggggcagtgcgcgggtggctgggggaggcacggcatgcgggcggccaagggaggagtggcgacgcggcggcggggaaagaggcggcacgcgggcggctgggaaaggcgcggcgcgcgggcggccgggggcggagtggc

SEQ ID NO: 38008 - DNA, 610 bp, Oryza sativa
tccatcacgcccaccctcgccaccggtgcctatgaaagggtcgagctatacttcagatcaagcagttacccactcccgcttgtggtaagcacggtaagtctcccagggtttcccgtgaaccggtccttaattgccatgggtgcgaccagcaaaaccatgcacccacaacccaccattcggtgtattttaattaactaacaccattgcggtggcaccaatccaaaactatgctcatagtcagagtctatgtaataatgtgatccccatttgtgtactagttgagctaagcatggctaagtatttcctaaaccaacatctaatcattttgataccaaagttatcaatggcatatgaacaataaatggctgagtaataggacccatctcacatgacattgtaaaagtatgcgacatttaatagaaatgcgggatatttgtaaattgggtacaatatgatcaattgtaatgcatgacttgccttgctctcgcactgatgagacctcagcaacgtcttcgagaaacagcggatcgacgaaacggccgaaatctacgcgacaaacaaagcacacaagcaaaacatgctataagactactgaaacaggaaacaaaac

SEQ ID NO: 38009 - DNA, 1012 bp, Oryza sativa
atcttttgtaatgtaaataatttttctacctttttttcgtcttggtttcattgattttgctagcgagaacataagagcaataataaaattgtgtacagatcagcgaagaactacatgaaaaatggaagtaattccatttgtttctcttgtgtggtttgtggtttgtgatttgtgtttgtgcatatattttttttccttgagaaatgcttctgtgcataaataagttgatctctttgtatcatagaagttctctctgccctgcaatgtgtatgataaatcataatcaattcgtggttaatgttttatgcattattactagtctgtatttttagttcacattattcctgttcctatcaaagaattctaagttgatcaccaacctcgttttttttgcatagatgacaatttcaattgaaactattaactatgtattgtccatacgcttctgacctcactgtaaacttggagacaacagacaaatcctattttgattaccgcagcatctgggagtaaatcgaaatgaatattcaagtttctttttatttgcattctgagatggttttctaaacctctagcacaggccaatgaaaacttcgtttttagcttaattatcccaatagaaagatgcacatatgtctctggtatttaaccatgtgtagtactagtacatttctagctcatgccatgaacctgattttaggtcggcacaacaacttaattaatcggtctctgcaacgcgtgagacacgattgatgttgatcactgcctccaattgctggccttacatgcaccttaattaaacctgtcttaaggaagtctccaacctctcaatcactgcgtacttatctatcctatcagtgccatctcgatcgttcgttttccttgcacactaatagtactagctctttttctttactttattaactgctaattaaccagtcaacacaatcaacacacagatgtacgtcagagcccaactagctttacatgctccattggaatattacacttt

SEQ ID NO: 38010 - DNA, 736 bp, Oryza sativa
cttgtaataaagcatagggatagaatattttcccgtcagcccattttatgtctctaggttttacctcatcgcttacatgtcgtaaaaatatatttgtaataaagcatggggatagaatactttcaccataaattaaatgaaaatttaatttttagaacaaaaactaaatgaaatttgtacatcattttcaacaaaatttaaaccaaaataaaaaatattttttggttttcactttctatgtgaaaatattttatggatttaatcttttaattttttttgaaaaaagtagctcgaaaatttaaaagtatttttcaaatttggtaccaaataattgtcccaattcatttaaatctttggtttttcatgaattatgtttctcacatttagatttatgtttcttaagtaagctaagtacgtgagcacgagatatggggcgatacagccttttgaaaaaaaaaaattaaaattgtcaacacacagtgaactaacaaagttaagttctatatagaggggatcaaaatataaaatataaatgcaagggcatgtagggaatgtggaaaaattcaggatacataaggactgagaaaaatttatagacacgtaaacaatttttctcttaaattgaaatggttttataaatgtttttaaaaattttagtatagtgacatctattaaagaacatccgactcaaatttgatgtacacatcgagggaaaaaaacaaatttgggtgcaaat

SEQ ID NO: 38011 - DNA, 610 bp, Oryza sativa
atcgggtatacgcatctgtactggtgccattgtgtttggcaatttttttgtctaatcgtatctcgcgttccagtattaattatcagccatccgtcctcgtgtcgcaaaaacatgatagacatgcagtttaagtgtacgattatgtttacagcttatttgaaaaaaaaatgattatgtttacactacagtgacgtccaggataatggtcaaaggcagcatttgtccagatcagcccagcccattccatggtatcttacctcaattacaaaataagttcattttaactaatctcacatatacaaatacaaaatctcaaaaactagaatattcatattttatcaaatcccaatataatttctctctgtccaaaaatatataagattttggtcggatgtgtcccaatctaagctagactcttctgttcagactcgtagtataggatgtgtcacatccgactaattttttttattccccttaaaaaaatcttttgtattctaggatgggtggaattttgctcactttatctactcccaataaatcattccctactttcataaattccttgcaatagttactccgaaaatacactagtgtataactttgagataag

SEQ ID NO: 38012 - DNA, 693 bp, Oryza sativa
ctatagggcgaattcgagctcggtaccctgagcccaccagtgattcaagggtattcagacgtatacccaagatttttgaaaaaaaataagtatatatactccatacctcgtatatgtattaaaaaattaaagagaaagctaaaacttctcattttgggtcctgttttaccatttcttctctatggaatctaaatttcccacttcctccttccccttccccttttccttcttcagcccacactcagcttgggccgcaactagttcatttcccctccccgcttaggcacagcaaacccaaatcgggcaaaccactgaggacgtgcgcggtgcggcggcggcgtctgggcggcggcgactgcaccggctgcggcggcggctgccggctgcgtcggcggcaggcggcaccgaggcgagtaggtagcgcgtcgggtaggggtgggcagaaaaagaccgaaccgaaaagaccgagaccgagaaattcggtcattaattcggtcctaggtagtgaaagaccgaattttgttcggtcaattcggttagtctcctcggttaaccgaatggaccgaaaagaccgaattatcaaaaaaaacgtctaaatgcaacatacaatccactatgtttaataggattaaactctaattttcacatccctacttcttctaggcatgcaacctaacaagagtctttactcat

SEQ ID NO: 38013 - DNA, 1287 bp, Oryza sativa
ttgcggaagtttttcgctcgaaaatcatattttcctggcggccaggcatcggatttgtgattttttattttgtgatcaaaatcattttccctaacaatcagcgtaacctaactgtggtgaagttccgcctgtaaagatggttcattttcattggcctttagttgctagcggtagcgccggccgtcatagagaacgcaaagtagccgtcaggaaaaacactttgtttttaagtagtgtcggttttcttcgatgttgcatgcagtggttactttagtgttgcaattagtatttttaatgttgcatctgtttgaaatatttttagtaagtaataaattattttttactaaatgataaaactccgttcgacgtttttcttcaaatcaagcgtacaactaaataacctgcatacttttaaattacggcattataatctgatatggttgattttaacatcaaattaatcaaacgtacgcactacaatgacaaatccgacaaactcatgcagtattttatatgcgtagtatatatagacagatacatacatttcactaatcaacatcctgcctacctttactgaaagcaacgcacactgctccagagcaccaaaggttagctagctgaatcatagatggtccatgatctaaacaaagatctaaatactagccgtgttgactaattacatgtactgattacacatttatacccgtaataatgcatcatgcatgttaagccatgcaaaagctgatggttacgtgtacgcgatcgataattattgatttaagccttaacgagcaccacctgcagtgaccctgaaaacatccaactcacctacatactatacacactgtcagcacagctacctgcatccaccgaccgtctgcactgatgactgatatatatgttgactggcgaatgaagaaggagaagaagttgaatcaaacttcgtcatcaatcagcagcagcaaacctccaacagaaatgcagtcacctacatgcatccatgatccatgtaggagtaagcaattattgtcttttttttaatccttttcctttggtcgttgtataactttacttcattagcttggcccatcttgtttttgctgctactgttctctccggtttagaaggtaagatgatattctgtttttttcatactgaatttatcgaaaaatgtaatgacatctacatgacttaaatagttttattaagtccatcgtttccttcagacacttattaaataggtaatttggaaccataccattataatttttcaaagtttaagatatg

SEQ ID NO: 38014 - DNA, 952 bp, Oryza sativa
cctctcgtttccttaaaaaatatatgtatagaccacgcgcactgcataaagctaacaatgtgctataagatactacctccgttcataaatacaagggaagccaacatacaacaacattaatccattatatttgtggataggggtatgtagtactaacgtatataatggtagtgtgttacacaaaaaacttgtgcaataacaagcaacttaattatagccttaagaaaaaaaaagatgccacacaggcacaatattttcatgcattccatgaaaaaggaaaaacagaacaaaagaatgcacggagccgtgttgatcatcatgaacaaaaggcatttcccttttcccgtaactttaaattgacagcatgcacgtatatacatcaggtttgaccaattttacttatcccttcctttttggctgctggctggacatgtggtatattatccatcatcaattcattacttcgtgacttcatcaacacacctactccgtcactcctactgaataaagcgcaatcagacttgaaatgtaaaactaatataactttaaatttctcatataccatgtttgtagcaataaaaccataataatataaaaagaaatccaaatgtcaatataacgatactaattttatcaaataagatttaatttataataaataattaattattggtcaaatattttaagtgttgaatatgagcgtctagctactaagctcggcatgccaccaatgcaccaatatgcgtctgaggaataaattaacgttgatgtatcttatctttgtctccaaaaagaatccggccggactctcaaataacaggtcaaatcggcacaaaatgcatctacagctgaaaaacagcataaggcatgtatttcatcccttcacgcatgtcttgctccctctttttccagatgtgatatatgatctacaacgtaagtgttacgtagctga

SEQ ID NO: 38015 - DNA, 792 bp, Oryza sativa
tgaaagcgtgcagctgctgcggcaaaccaccaagcctcattgctttccaagggggatttagtcgaaaggtttaaagctcaaggggaatctataggccaggagccaaacgcatgcttaaaattcttccgcatttcgtaggcgtggaaaaaggcggcaggtttgtcaagcaaaaacctgcacttgacctaacaaattcaaacatttaaaataacttggactttaaccaaaccggggtcagcaggttgcttttcttccaaaataacacttacttttttaaccttcttgctgttctagctgtatgaatgtcattcttttttcaagttccactttccttgggtggtattgataacatggtaacaacatccatcagaaagtggctgtaatttacaaagttggatagatagtgcagcattacgcatacagaagtacagaatcggttccgactcaaaagtcaaaaataaaacctgacggccttcagatgactcacaggatcattttggcaacttttgtgagctgggggtgataaatactgtcattagttgttaggcacattccctcctgggattattatacagctcaagctgcgagtttgtaaatgcaattaaaatgtttgccgacacatgctactggcccaatcttatatcggtgtggaattaaacacatttggctgctgagtttcagtgtgaaattaaacacatttggctgccgggtttctttataccatcatgtctcccggatgcatgcatgtaactagctcggtgtactacacattcttactatcatctcccattg

SEQ ID NO: 38016 - DNA, 910 bp, Oryza sativa
aagccggtgtcgagcagaggaagaagtccccctcgcctactcctccgacagcggcagcttggggtgactgcaaatgatcgcggaagaggcccacgatggtagaggggatgcccgttttttccccccccatgtgtctgcggttcctagcaatgaagccgatgggttggtgcgggatccgacgacgttggaagaagctgagcgaagggcgccgtgacggtggaagtgaggatgggtcgccggtcgagattgatgcaaatcaagctggaatcgaggttgatcgacggcttgggaaggagctcgagggcgacaacagtgagagcgtctggcacgaaggaagcaaagatggcgaggacgaggaccgccacgacagctaggtggagaagcaggatgggagcccgatggcaccggctacgtcggccatgtcgaagcagatcaggtgggtggaggtgactaaaacctcttgagagaaagaatatgagggtaaaatgaatattttatatggtttctctctcctcaactaagtgaatgttgtattttaatactcatgtgttttgcagtaaattatcatactttctgagtactcgaacaaattcacgtttttacaatatcccctagaaaaaccacattctttgatttttcctgtagcaattatattatttttaaaagatattgcagcaaattaaagagcatatagatcctatccttgacataaaaaggagaacttcttttaaaagatattgcataatgaatccataaattagtcaataatgttgacagcatgagtcggcataacaaaatttgttggctcaattaatggatctcgattaatctgtcacatataaaatgtagggtccattgaatagcaaagtaaagatgattgggtaccgagctcgaattcgccctatagtag

SEQ ID NO: 38017 - DNA, 551 bp, Oryza sativa
aaagctattagcatatgattaattaagttttaattattacaaacttgaaaaatggatacatttaatattttgaagcaactttaatataaaaagttttcactcaaaacaagtcgtttaatagtttaaaaagcgtgataataaaaactaaggtaaaatctttatctttacaagaaatgaactaggtcatagtgtctatctatttgtagctcgcattcaccatgcaaaatggatgagtcgtgtacctattttctcggttgtcttattgttgcaattgcttattaggcaaggcaaaataaacactcccctttttttttccccttgacttgactagagtacataaaaccggacaatcatttcttactagatttaaccattttgactctagtatacatctttagtgctgtgtgtgggaatggatgataagtattttttaaagaaatacggcctttactatatgttaaaacaagaaatgatactacagatgttagcttcgtactataccaaaatgcaagatcctctcggtcaattaaatataatttttttgctgaaat

SEQ ID NO: 38018 - DNA, 611 bp, Oryza sativa
aggtggttttggttcaatgacatatcctgatgatgttgaagagacactgatccagaagaatcttggcataattggaatgagaagagtcagcattgtcattggaaccatcatctttgattttctcaagttgatcatgtgccggctccactcgatgaacagataggtggttttggttcaataacatgtcttgatagtgtggaagagagatcgatccaaaaagatcttggtcataattggaattgggagaggcaacattagcattggaaccatcatcattataatcatcttcagtttcctcaatttgatggggtgttggctcgactcgaggaacaaatatgtgttttttgttcaatagcatatcctcataatgtggaagagagattgatccagaaggaacacaaggcttgggtattggaatttcattgcatttatgtgctatatcaagcatctcctgtccaaagtgaagatatccgtcatgttacgacaattttttcatgtgtatatggacgctatagcaaccaattaaataatgattgaacataggatcttataaaattccttaagaatagacccacaaaaagcccttaatgggctggcttattgggaaaaaa

SEQ ID NO: 38019 - DNA, 629 bp, Oryza sativa
cctatgcaaatgcatgagtatatttactttccaaatctaaaagtttagtgatacgaggtgtaaacaggtgcgagtgtgctgcgcatgtacagtgatgtgtatgcatcttccgtgtaatcaagaatgtacactagtgtgaacgtgtctttcatgtaatcaagaatgtacatcagatgtgtatgcgtcatccgtataattagaaaaaaaaggagctgttcagattgtagtcaaaataaaccttaccaattttttttaagttaacaatataactaaaattttggcatgatttttttatgtatttaccaaactttggcaagaaactaaatatatatacatctttgataattttacccaaaaaatggtatgatttgaaattgcattaatctaaacatgccctaatgaattagtctgtgtttagttccaccagtaaaaaaattttactaggtcacatcagatatatggacacacatttaaagtattaaacaaaacaaattacataatccagaatgtaaattgcgagacaaatttattaagcctaattaatcgcgtcattagcaaatatttactatatcaccatattgtcagatcatggcgcaattaggtttaaaaaatctgtctcgtaatttata

SEQ ID NO: 38020 - DNA, 617 bp, Oryza sativa
tcacaatctttcaccaccaattaaccaaacccaacatccacctcagacactgcattcttctcttgtctaattttttttctgacaagaaaagaatatcgatcttttccgacttctgaagatccagaagtccccgaactgccgggcggtttcccaacccccgacagttccaagccactagcttcatttcttcccgcaggactggatcgcaagtcccgcttccattgggttttgttcctcactattctttagctctccctccttctttcgctttccagaaacttcctcccctccctccatctatcttctctttcccgggatcaccgtccccgagcctgctggcaaaatcttacctctagtctcccttgtcattcttttgaaagttttctgtttgctacctcctggcccttttactcccgatggcacctctccctgagcagcccctccgtcgacgtgcatgggctgcatggcgttgttttccatgtatttcccctgggcgtccgctttttcctgcactctgtcatgttgagctggtttcagcatctcccctcctatttcgcccccttggggctgattctttcccgcactaaccatctccttctcaatggaaaacaatgctt

SEQ ID NO: 38021 - DNA, 512 bp, Oryza sativa
cacgccgccaccgcatagtcgaatggcgccgttgcccggcccccacaacgcgtgaacccatcgtatctaggtggtatttagttggagggactaaagtggggctaggctaaactttattcccggtagagacttatgtttttgtgagagggactaaatttagtccctagttcccaaacacccccctaatcgcgcaacagttcccagctgcacccgtgcccgtcgcatccggccacgttgccatgtccagcgccccagccgcttacagcgccgaccactcacgacgtcagcgccggccactcgtgacgttggccgctcaccatgggcactcgcccactccaccgctcgtagcaccgactgtaccgcctcgcccctggtgccgacaggccaccgcgactctccagccggccccctccccccgcgcagcaaggggggcagatggagctggagcggcgttgcatgacggcaaggcgtgcgtccgcgccacgtgcgtgagggcaatctggtctttttcg

SEQ ID NO: 38022 - DNA, 729 bp, Oryza sativa
atggcttgactagtgagttcagggcaccggcaacaagttctactcaggttgtggacacgatgttaacatctctgaccactgcacctcaactcagccgttcccgctggcagccttcgcgatggagcaagaggtggcagtgcagcagaagatggtgctgagtataatgatgacaaggccggctgtggcaccatcgcctcgggcgaagatggcggctgacctctggaagaagcaggagacacaacaaatctgacgaaggtcatcgtcacacggcatcagcaaccactaccgtgtccacgtcacttcaagttgtccaggcaggtggattcgtgtcaccaacggccaggtccaggaagccctcaacctcgacgttggacttggcaacgacgtcgtcgtcggcgaccgcgatgcagggtgatgccacgagcagggccgtttcttagggctcacaacctctagcaccaacgactgcggtgattgcggcgcaacggctgacacaaccttgggcgcgatttccaggtgagatggctttgtttcgtcatgcatcggcacgattttcagagccggatggattgaagcaatgtgcagcggctgcatggcttgagtcatgttaggcttgtttagggagttgtctcagccaacaaagatcgtgttgcagcttgaggatgagctgctcaaaagaagggtgtagtgtcatgggcattgggacagaaggcagaggcccataagcag

SEQ ID NO: 38023 - DNA, 1181 bp, Oryza sativa
aacttttctgtcatatcgaatgtttggacacatgcatggaacattaaatgtggatgaaaaaaccaattgcatagtttacatgtaaattgcaagacgaatcttttgagcctaattgtgccatgatttgacaatgtagtgctacagtaaatatttgctaatgatggattaattaggcttaatagatttgcctcgcagtttactggcgaaatctgtaatttgttttgttattaatctacgtttaatacttcatataggttcgtatatgttaattttttttttgaaaagtaactaaacacggcctaatactaaccagtagagaccatggtatatttacctgtttccctagtcacagtcaaaacgattgacgcagtaacttacaagttgcccaagacttagaatatgagttcatacctcactatcaagactgcaggacttttagttattccggaatcaatatccacaattcgatctctgacacacacatagtcgcctatgaacactggaaatgaatatagagagaaacatttttgaaagaaataggagggattatgctgagaaaggaacttaattattttttaaaccttttttattttttaattttaaaaataaacccttcaaaatttatttccacaatctaaaccttttggtcacgctaaaactgtcacgcacgttgcaccgttgcggatggtgtgtcagtgatgttttaccatgccaggcgggctggcgtggccaaatgattcagattctagaaataagttttgaaatggttcatttgtaaaattaaaattttaaaaagttcaaaaaaaataaaaaaaatcatgagaaagagcatttctaacctaagcactactctccttctctatcaaaagtacctccccagggcttatctagcgagtctcgcttaatcaattcatagtttcgctcccagcgtagcgtgtgttcgctgcagcctgttaccggcgttagctatccattagcacgtgattaattaagtattaactatttttttaaaaaatggatcaatatgatttttaaagcaactttcgtttaatttttttttcaaaaaacgcgccgtttaacagtttgaaaagtgtacacatagaaaacgagggagatgggtttgggaaacttggggtaaagaacacagccaagtgtggtttgcccctcctacaaccaatttg

SEQ ID NO: 38024 - DNA, 798 bp, Oryza sativa
tggcaaaaccacaagttgtatgagtatatagggtgtgtttagttcacaccaaaattagaagtttggttgaaattgaaacaatgtgatggaaaagttgaaagtttatgtatgtaggaaagttttgatatgatgaaaaagttaaaagtttgaaaaaaactttggatctaaactcggacatagctgaggtttttcctagcaagtgacagggttgaaatatccatcttctacatatgtgttctcatggttgtgtgtgtcagtttgggaaagtccttttccactggaagggatttccaagtaattatgcaattttttaaataaacaaaatatattaatatatgatatattactacataaatatataaatccagtttatgcaagttgatgggaaaaaacaaatatggccatcaatagtacacgtacttgttagattttaatttgtttttataacttctattcattaaatttggtcttatatgtatgtgagtgatataacttatatttatctgtgttattatctttttaagaaaaaatttaactattttaatgatatggaagaagcgaggggcatcttagcatctactcgagggaaaaaaacatgtcctgttcggtctagtttctgaagaaagaatccacaagtctttgtgctaaattcaaaaatgaaatcatggatttcggctgatctctctgactccctgtctcatctgaacttgctctatacggcagcgcgacgtgtgggtaaattagcaattgccaatgggcagcatgccactgttaattaaatcgtccaaatcaaagata

SEQ ID NO: 38025 - DNA, 1645 bp, Oryza sativa
aatcatggtggtgatttgagtgctgggtttcagagcagatgtgtgtagtgcaatgcaaggcaaaatgcgacactgcctgctaattgatgcgtgcacacgtgcgattcgtattattgtccttctaccctcaagaaaatttgtacgtatatgtgcacacgtgtttgagctttcagtatttttttaatataaaaggaagttcagaaaaatcaatcaaaattttgcaatacaaccaaaattccaaatttaggaaatgtacttcttttttttatatataaaagggcctcattccgttgataaagaagagaagaaatgtactttaagcatcggtgaatttgaattgaagcttggaattggaaatgccatgttgcccaaccacatgtctaattcagtatttcagttatcactatctaactacgatgattagaatgtataatatttaagtacaataacaataagatgtcgaataaatgctgagatttcgatgattggattggtataaccgactgcggtttgtcttactggcgcctaaattaattgattaaaattttaaatgcaacaatggatgcattagttcgtcagctggaaaattttttttggagattaattaggacgtagctgttgcctgccaccaatcatggcgacaacacagccgctacgaaaggaacggagattacatactcgaaagagattctttatcgtcagaaaaaactgatgaccacagcagcagtgacaggccagcacgaagcaggagtagtagtatatgaattataatttaagaaatacacattatatttgtatatgggttttattattatacatgcgcatttcggatcatatgcgtatcaatgacaaacatgatgaggcaatatgaaatgctggactgcctgccctggatagagtcatgcagatacttgtcggcagcattacgcgttgcttcctgcagttgcatcatttttattttcttttgagtacttttaaggtgttttattattctactgccagtattatcatccataaaaaaaattttatcaattgatttataagttctacaactagtagtaaaaaatatttcttatactaccaacagttaagttagtagtataaatagaaatgatacattggactagaaaaggtgattataaaatatctaccacctctgtttaaaacatagcaacttttagctataaatttcaataaagatatgtttatattcgtagcttaaggttattatattttagaccagaggtagtattttattttattttcttttttgcatcatacaattttgctagttttttttattctacatcacccttccttttttattatagtttttttgagatggacagatacggtaaagagtactttggatgattgttaaactgttttggagccacagatgctgtgttttgttgtggggcttaaaaaaaaaaaaaaaccttcaagaactttgttgggtagattagtattctccgtttgtctggtccggcctgccattctacagtactttagctggctgggccaacatagcttgatctgatttgcctcagattaattctgcatcatccacacaattgcagtttggatacacacaataattacatttaattgtaggatccgatattggatttaagtttataaactg

SEQ ID NO: 38026 - DNA, 624 bp, Oryza sativa
agatgtggtataaccaagagcccaacatgacatatctaattagaatacattgtatccatatataatttaggtaattatttgtctggtctaatccatgcatggtataggacacatgcaaatagatgcaacccatcttaaacacatagctaggctactaggctctgccataataagtaccctacatggctagggtacgggactactagtagctattacagggatttgacatgcacagcaagctagtagtactttcggttttatttaatagctaggctagtatcaaaggcaggacaggcatgctgggtattagctagctgtcaggaacaagactatacactgatacacatagcaaacatgcgtgatgataatcctagcagcacgcgacatactcgggagaagccggcacgcggggccgcgtcatgggggataagcggtataccattcaacggtataccgttgtgtagtctttctcttttagtaattagggagtcgagatatcccggtattgtggtttagggatacgaattagattaagcctctagttaaggggagtcaaagttgacttactttacggcagaacactttccggccgagatagcccagtaaggcccatgggccttgtcg

SEQ ID NO: 38027 - DNA, 596 bp, Oryza sativa
atgtttttaagagagaagaaagaagagacaatttggattatagatctatcatccaaaggctagaaataattggggtgatgtggcttaatgagaggagagaaatagcattaactacacttagtggggatgaactatgtaagtataaaggattcctgaatcctaacgacttttgtcaggttcaacatcttatcagtattattcgaggatcaaagaaaatcatatatatccttcatcagttttgtattttgtcacacgctccaccctccaattcaccagtgcagctgtcatttttgaatctgtgcttaaaatattgctagcttagctgtgcaagcactcttgtgatcctacaagttggtgcaagcacaaagtgttcagtttgtgagtctattccctccaacgtgattttcagtttcctctttgctattatagttttaagacagttgtagcttagcttttagggtagtatagacagaattctataaccaaggcatgttgctgtggcaaatggtgtgagggcatatatgctgagtataccacatgctgtttggactcagactttttaatggtccacacacccaacctattccatggaccat

SEQ ID NO: 38028 - DNA, 518 bp, Oryza sativa
aggcagattggtatactttcaatttgtttttaaataatgacaggagacattcactttcacactttaccattgtcctcttacaaataatttacaaacacttaaaccacgtcattaaagtggtaattgtaggtcaaaagtcaaatactccctttgtcctataatataaggattttgggtagatataacacatcctaatttatcctgattcattgtattagaatgtgtcatatccacccaaaatttcttatattataagacagatacagtagtagggattagttatataacttttgaaaaaaatcatctcaaaattaaaatttatcgaatgtgactacagtacaaccttaattaatataattatagtgtaattagaaagtaattacaatatattttaggtgtaagactcataaaaccacacaacacatgtagtagctcagtggatgtaaggtcgtacatgggatcgagcccctgcacgtgagatttttttctcccgccacccgtgaatctttactcgtatc

SEQ ID NO: 38029 - DNA, 570 bp, Oryza sativa
tactccctccgtttcacaatgtaagtcattctagcatatcccacattcatattggtgttaatgaatatagacatatatatctatctagattcattaacatcaatataaatgtggaaaatgctagaatggcttacattgtgaaacggaggaagtacaacatataaatgatctgcttggcttgtcaggttccaatatttctcacagggtcgctgtttctccgatctattattttacagggtactacaggttgtggattatcaacaatgaatgggatccaatgtgcaggtgatgatttgtcaggttggcaacttccattcaaaactttgcggctacattttttggttatctggatgagttgattgtaatgccgtgcaatgtaatcatcaaaacctgtggtggatacaactggcagtggggtgtacagtttattttaaggaggggcagccctgattgcagatcaattcttacgcacgaaggatctttcagtaatacaacaagtctttttcagtgctattgttttgtactgaaaattgtccatggtcagcatgaatctggatagattctaaagaa

SEQ ID NO: 38030 - DNA, 708 bp, Oryza sativa
atgtttctctctatattcatttccagtgttcataggcgactatgtgtgtgtcagagatcgaattgtggatattgattccggaataactaaaagtcctgcagtcttgatagtgaggtatgaactcatattctaagtcttgggcaacttgtaagttactgcgtcaatcgttttgactgtgactagggaaacaggtaaatataccatggtctctactggttagtattaggccgtgtttagttacttttcaaaaaaaaaattaacatatacgaacctatatgaagtattaaacgtagattaataacaaaacaaattacagatttcgccagtaaactgcgaggcaaatctattaagcctaattaatccatcattagcaaatatttactgtagcactacattgtcaaatcatggcacaattaggctcaaaagattcgtcttgcaatttacatgtaaactatgcaattggttttttcatccacatttaatgttccatgcatgtgtccaaacatttgatatgacagaaaagttggaagtttgaaggtaacatagccttagagcaagtataatagtaggctataagctgactaaatgtgaagtgtaggagagaagagaggagagagaggagaagcgggctgtaaacttaaagccggcttggacgcaagaaccaagccatattcgtggacactagaatctactccctccttccaaaaa

SEQ ID NO: 38031 - DNA, 803 bp, Oryza sativa
cttaattaatcacgtgctaatggactgctccgtttttcgtgcggggagatgggttcccaaccttcaagtaacgaacgcctaagtatgtttaggatttgttctaaacaaaattgagttttagtctattatgatgtttatggagttaggtcaattatttagattctttgcctttttacttttgctaatgttttcacgggttcttcaatggagatcttgaaagacattgatcaggttgcagattatccaatcgacagtgtcggttttaggtgggtcactgatttgtttggtgatgccgttttagagatttgccaaatgatcaaagatggtggtcgatagaaagacttttgtgcggtccagagttgattagtgttatggctgtgcttgtgtacttgtatctcttgtggcattttaagatgtatgtagatcctctttgttctgtatcggtaccttatttctcatgtactagaactatcaaggttgtgatgatttcttatatttaatataaccaccattgtttccataaaaagaagtcaactggagtgataatccaaaagcagcctagctagttcctacaaatgagaggggaaacaaatgacacatcagaataaggaacatcgtcatcagacttaatcaagaacatgacaggttcagaatttatgtgatgcaagcctagcctagtttgctgatagatgcgagttagtaaattccatagaaatatatacatatccagggccccatccttttgtacatatcgatgtggtttaatagaaacccatacgatcgatgccgaaatcaagaggtag

SEQ ID NO: 38032 - DNA, 949 bp, Oryza sativa
tttatctatagccaacataatagtcaattcatacaatagttgcttactatattattaaatatatggtctctcacctgtcatacacacactgcgtcttgagtccgtgttgcagctggctacagatctaagtccgctattcttctctctcatcttttatctcattaaaatatgtttatagctggctaatagcctgctattgtacctgctctaagagcaagattagtataaccaactactagctccaaattatctatagttactttaatagccaatatatacaatagttacctataaacatatactacactattaatatatgatctcacttgtcatatacacattgcgtcttagagttcgtgctgcagctggctacaaatttaaaaggaaaaaaagaagaatgagaagaaaatggaaaataaaaagaaaaataaaagaagaaaaaaaagaaaaggacacatcatgtccatgtggcatgctacatcaacgccacgtaggatcctagaggtgatgtgtcaatttagaatctagatgatacactttgataagttacgtgactcagatatgtattttgagagtttagaggcctatataacacaaccctataagatgaaggaccgccaatgcactttactcaagttgaatggtagagctaactacttataaactcatattacaagtataagattggctataacatttgtcttcaccttttcttgcttatgtatttagtgcatgtaccttgaagcatatgactagagctttgtacttttcttgtcttccttctccatataaacttatagtttactattatccttgcttaaggtggttgcttcagcaacaccaaacacgagggcggcgaatgctatctagcgccagataatggtgtcattttcttccatatttttttttgctcgccatatcttcccgctcatgtcattctaccaacact

SEQ ID NO: 38033 - DNA, 1092 bp, Oryza sativa
tttcaaaagttatataactaatccctactactgtatctgtcttataatataagaaattttgggtggatatgacacattctaatacatgaatcaggataaataggatgtgttatatctaccaaaatccttatattataggacaaagggagtatttgacttttgacctacaattacactttaatgacgtggtttaagtgtttgtaaattatttgtaagaagacgaatggttaaagtgtgaaagtgaatgtctcctgtcagttatttaaaaacaaattgaaggtagtaccaatctgcctcgtcgtcttgcacgcggccaaagctcatcgtcttttcagacatttacagtcgacagctccactctccatgtcaatgatttagtccagaacccaaatcaaaactgctgatgagttaatcatcatcttcttttctttttgggcactcaaacaaagtggttctagctttgctctgaattttgggcaacaatcactcaatcagtagcagtagacctgattaaggataagatgagatcaacgacgtgagtgcttgggcaaagagagggcagctttaatttgtgatcacaagtgcgagttcgttatgaatgtctgtgtctgtgtccatgtgtggtggtggtgcattttcagagaaggggatactttatagttcgctaataacaatatatacagggatgcctgtggctgatggctactgtcaccaccaacatcttgttattgctcagactaaagtgttggttgctagctcaagtttaactagctccaaatacaaatcttcactcataataatggtgttgctggtccatgcttgatcaaccatgcaagtgtggtgttctttgagttgggtgttgtcccatcaaaatcctctgtatatatatacttgcatttgattcgtttgtgcggtttaagcacagtgtttagctttgctttgcttagttgatgcccatgtctgaatcacactgagaatatgccctctttgcttaatggacatgtatatgcctgttgctggtgatgttggttaaggcaattcatttctttttttttctaaccatgattgattattctgctctaataagatgag

SEQ ID NO: 38034 - DNA, 1231 bp, Oryza sativa
tgcaacatcttaatttgtttttgatgtatgtgctttaatttcctttttgcataagatgttttctgagttctgacaatttgctgcctgatcaattgctaacagtttgattagtccctgtgtaatttagtagtactgctttagtggacgcggcaatgtggcttatattttcgtcgtcttttcattatatgcgtaataaaaactgaatgattgaatgtgtgtacaatacatctgagttggaccagcatcgctggtgctactctaggacagtatgtttcataattgaaagtttgaaaagaggcacctaatcatgtattccactgacttattttaacacttggaatagccttttggattgattatttggcaagtacaaatatactaatgcctgcagaacaattttcattttttgtcgaacttggaagtgagtgattagtaaattaagtaggagtactaatgcaacctgaggctgtcgactctgatgaagtatccatgcattctggatgtcactacatgtctacatgatgtctgcttttgcttctcagtagagaaattcatgccattactgtttgagaactgaaaaagatttaatttgggatctgaagaaacacttctccttatttactactaccagcattagtcttcctgaacattgaattgtgtacttgcaggagtggttgctattcataactgtcaatctgtcatgcatggtgttattgacttgcctgtaactgctgaaaaagctttttagtatttatcaagaactttgttaggtaatccaactctatcatccaaaacagcaccctcgctctcatctacatgctgcatgattccacaaacgcattatgattgtcagatagtcattattcatatcagtagccaaaaagttatttgcctgtgatgaaacagaaagctagtctagctaagatagttgcttcatttcagcatcatccagctaaacagcactgatcatcacctcccttgatcctttgtgtcaattagacgtcaccctacctttcttcctcctcttttccaggattgggaaactgctagcaggtcaagcagcattgtcagcaacagcatgagtctgcatctactatcccaaaattatgcgcatgatttatatagttaaaaagaaataaaaaaatatagttatatatgtataccaactctataaagatataggggatgctttaactttatagggaagaatttgaagtggtggttatatttg

SEQ ID NO: 38035 - DNA, 858 bp, Oryza sativa
tgcaatttgttcgattaagagaatttaattttaccgatctcgtgaagtagtgtttctactaccaatagatactactgtaaaacggtatacctttttggtggtttctagttgcatcgatctaatatgttttgtttcttaaaacctttagctgatgagctttcctctgtccttccatgaatcattgcttaatccaccgggtgacatgttcacatcatgagctggagaattgaattccaatggatgatgcatggatgcaaccgacgatccatcgatcgagacggtactaaatggagaatattagtgcaatacgtggttagctgcaacgacgtgcatgcataatgcattgcatcctgggagggtacagctttgtgtacattgatcataagataatccaaatgtaatccaagtgtccaatagcctcacagtttcgatcgaaattgacaggttgaaaaatagcaagagcaactcatcactcgcatgatgaacgtgtagtgctatcgatcaacagtcggcacaaattggggcggttaatgtgtcaagttcagagatgaatctggcagcaacatgttacctacctggaaggacgtccgttgattatataattggtttatttagctttaaggttgatcctatcttacaggacaaaaatggacggttaaccgtttgagaaaatctataaaaagcaatcgattataccagaggttcagtttacggatgcatctgagaaaatctggacggttaacagttcattttccgatcagacggcataagttcttctgcctcagatggtcgaatcagaccagaggtataaaacaaatacactagaaaacaatgttattttcgaatagctctaataat

SEQ ID NO: 38036 - DNA, 834 bp, Oryza sativa
gacccagctctttggagcacctcaacggagagtaggattgcaagatctgaacttcaggaaaaaatcacccttgtcctctctgtgatgattctgtgcatgttgctgtgattgtatatatgctctttcatccagtagtttatttcgtgcaatttagttcaagtccctgttaaggtcttcaggtttttctgttgcccggaagttccggacagtctgagcagaccggaagttctagtgttctacatccggaggttccggtcctgctgaatttaaagctgcaaatttgtttgtaattttaaggaaagcctattcacccccctcctctatactacatctttgcgcgttcagcaatgaaaatgagcagttacctctcaaaacatcaggacaaatccccaatactaacgcctcctaatcatgaggactgggcgggcgtggactggccggccgcctctcccgccgacgcccccacctctcgtgtcggcgcgcctcctctcctcctctcctgccacctccgtcgcgtcgaccgcctccgcttgccgttgcaaccgcactcgccgatgcccgccctcgcagccacgctcgctcgccgcttgccctcgcagccgctcccgccgacaccgccgctccgcctgcctccgcccgtgcccggagagaaaaagagaacaatagaaaaatgagggtcacttacatgtgggctccgcatatttatttttattatttgtactgactaggatgtcacgttagcgaaaccagcccactatactgtcttgggacctcttttgaacggttttgtatagtttaggggtgaagatttctggttttgtggttaagggacct

SEQ ID NO: 38037 - DNA, 616 bp, Oryza sativa
aagcaaaccatgccactctcaccaaatcaagtactactaagagtatgtttattcttgccgtttagttcatttttgtctttttttttgtccattataaaatattttgacctatgttttttgtgtattcctagatttagcatgacatgtttttttcacactccaatgtatataaaaaaagagtgttatcacttatcacgggattcatgagcagatacgtgtaacttactaactttgattaactcttttatatgaatgttggccacacaaaatgatgtcagtatatttaccacagaaacctctgatgattatactctgtccagaagtataaggatacgtagagtttgaaatttgtcaaagaatacaaggacacccacacctacttcgttatctcagccaattataaccatccctcacctcaaccttaatctctccacaaaacacgggagtacaagttttgcaaataggataactgtggtgcaaacactttcaagtactccctccgtttcacaatgtaagggcctgtttggcacagctccagctctagctccacccctcctggagctggagctcagccaaacagtttctgctcgaccaaaactaggagtggagttgggtg

SEQ ID NO: 38038 - DNA, 2061 bp, Oryza sativa
gtcgtcgtatccgtcgcctggcacgccggccagatggtcccacccgctcctccgcggcggcggcggccggacgggcaccttcacgggagccgactggtggtacggcaccgcggggggctgctccgggaggtggaacctcaccctgggggccgatgggatcgcgcgcgcggcggacgggggcgactgggtctgcgccgaggacgacgccgccgcctccgcggcggcgatggtcgccttgcggcggagcagcgccccggcggcgccggcggtggccacggcagcagcgccgccgcgcccggagagcttcctgtccccctcgtgaagcgcggcgaggagccctacgtggccgccctggacgcgggccggtttaccggacggatcgggaggcggcggcggcggagggtccgaggacggggccggcgcgaagaggaggtccccctcgaggagctcgtcgcccgccgcggtcggggaggtggggagagacggggtcggcgaggtgaacatgccgaggaagcgctccgccggcggcgagcggagcgtgcgggcggcggagtccatggtggtggtggtggtggtggtggtccccactccggcgagggccggcggtgtcaggaggtgggggctgcgtgcttgactttttcgagcatcgtgtgggggctttgggttctatatactccggcccacagattgagatttcctaggcccatcttgggctgggttaacgtaggcccatatctcgaagaggaagtaggaaatgtacatagacggcccctcatcttatcatcggattacaaaattgtcccccgacaacaaaaccagatatatggcatcctcgacttataaaaccgcgtcactctgggtccttagacagttttgaccctaattttgtctgacgtagcatataagttagcgtgggacccacatgggtcccacgtgtctgtgaaacctccctttttctttccctttccccatctcccgtctcttcccccatctcttcctcatgtctagagtggcggccccaatgatggcacaggaggtggctaacgaggtccatcctcactcccctcctccaactccttcctcggcatccccgacccctccctctctctcctgacgatcttgattgagcggcggcacacccttcccgaccccatggaccccgacgacggcatggacagtaggaggcacccgacgagctccactcctctcttccttcttctagatccctcttcctcgacgtcctcgaccccttcccctctctcccagcgatcttgaggaagagcggcgacggcaaccttcccgcccctacggaccccgatgacggggtaggtaacggccgacgaggtacacacgctcccctcctccaccaccctcttcctcgactcccccaccccctcatagcgctcacgtgttgttgcgccctccgtccccggtctattgacttcccgtggagcggtggcctctcgaagcccctcttcccgcttctgggaggtggtcttgggagagcacgtctgacgtgcagcgctcgctagcactgtcctctcggtcgccagcgatagccgggatgtgcacggaaaggacgacgcacaacgcattcttggtcttcctccacatcccgtccattgctcctagcacacgcatgcgtcgccactgccaccggtccccgggcctcttcctctgccgcctcgttccaccggccttcgcagcaatcgcttcgccctgcccagacaatgatgagaaaagtgatagagaggaaaaagggagagaagaggggaaagagagagggtgatgacgtgaacaccttgacacatggggtccatgtgggtcccacgctgacttagttgccacgtcagacaaaactgaggtcaaaactgcctaaggactcagagtgaactggttttgtaagttatggtatgacatatctagttttacggttggggatgtctatgtaatccgatgataagatgagggacctaatatatactttttccgaggaagtaaagctacggcccaaatggaataacggactgaactttgaacccaccggtttcttccaccgta

SEQ ID NO: 38039 - DNA, 557 bp, Oryza sativa
atgtacatctcagatccatacaatgagattccaaaaaaaaattatacatctcaatccatacaatgaaccacagattcttcatctcaatctacacatggatcacaaattctttgaaaaaaaaaagaaaaaaaaacgaagcaaagccgccggccggctgagccggccgccgcctcccctcctccccggctgccgccgccgccacgcggccctccgcgccggccgccgccgcgctgccctccgccggccgggccgcccaccccctcctgctgcgcacactggatcgagttgggaaggggagttgggaaggataagaagaaaaagagataaggaggaagggaagagataagattagagatggagggagagaggagtgggtgtggatgagaaaagagtggacgaaaaaagaggataagtaatagggattatatagtgtattttgatctttaatcccggttcgtaactccaaccgcgactaaagatcctggaggggcctgaccacacctgacagcctgtgaaccgggactaaatatcatctggtaacaccaacctggactaaa

SEQ ID NO: 38040 - DNA, 594 bp, Oryza sativa
agttttgctctttttacaacaaactttttggggctgttttgatcaattttggtattgaatcacttgaagaatcacacacacaggttaaaaatttaaaaaattataattgcccactgcgaactcggtttcacctcgaaccaccaagacatcgtcgggcggcgcaagagctcaatcaactcagctcttgccttgtacttaaatttagtgcttatatttttaagtacacattatcattctttcttatctgctattcgtttaatacttcattacatgttttattctttactctcaattaccatgaaattaataaattatattatgacatgttggagatattggggaaaaatgtagacataagtagataaattttaaacgcaacaaattcgtttttaaatatatcgctaaatgtatacaagacatattaaccgttgatgatgcaatatctgcggtttggtatgcgaacccgtcgtttgcaactttggacacttgcaactcgttcatggaggcagccataaacttcaaactcatacaaacaaagagttccagatttatttccaaaaaattggcaaataccccacagtacagtgttttatt

SEQ ID NO: 38041 - DNA, 6002 bp, Oryza sativa
aaacgttttttggtaggagtatttggttaagacttggttgatggtttttccttgacttggttgtggtgttttttcacattgcttttattttccattgtttttttttgtgtaaagcgtatttaggcgcatctgcaacacgagattattttttagaattgcaagtagaaattatggaaattccctcgtaactttgcataagaaagttgggacaccttaaattcaaaaggtcaagtttgaatttgacaacaaaaggagatgaacaattgattaaagtggtcagtttattgcatgcattggcacaactttagtgggacaccttagaagaacggtccattcaagtaatgatgcaccttgcatgcatgttccatttgatttgtctgatgttctaaaccataggtttagctttcctagtagcttgtaagcattatgtattgatcaatggcaccaaataagaaatataaagtaagatgtcatgtatgacacatctttagaaaaatgattgaggggccatgtgaattgtgaaacatggaaaatctggaaaagcaagaatggagaggggaaaaaagaaattgtgtgaaatgcctaactggtccttaaaagttttataactcataagttattgttttgattgagatgttgtggtgcttcacaagtggaagtgcaagaatttggagacaaaaatacacaaacgaaaattttcagtaggttagccatttattactttccttgaaattcttctggtgaagccaccctataggaattctttttctcggttcaaaacatccatgcatatagcaaaatgttttccgagtgattcaagctctaccaaagttctttttaaagaaaatctttgctccaaagggccctattttgttgaaagaagtatactatggctaaattttgtgtgtatattttggtcgatgcatcttcaccagccacatttaacctgttcaaatttcacaagtgctatgtccgtgcgttgtaacgggatctagaggaatatagaataatggttttatagggtttatttttctctatctggcttttttggtgggttaagttttacgtgtgaataattatcgtagtagagtgggaaggttcattttttacgggagtttctcgtgttgtgcgtagtaggaggtggaaggaagacgactgtgcctttaaaataatagagaaaactaattgtcccccattgtctttcttgatcatacctcttttggttgactaacataaggcacataagtccattgtggatggtgggagaaaaaaaaacctgtgcacaattacttaatgtggagtgagtgctaattaccctatacttttttacagagaacaatgactctgtatataggaattgaggttctagttgcaagtggtattcaatccttgagttgatttgaccttttcaaagataataagaagaatcttctgttcatactagtagatcaaactgggatctccataggggaaaaggcacaacttttctaaaaagaaagaaaatagttttaaactactgactcaggacttcactgatcatagcagacatcaagtgctaaaaagagagtagattaattctctccaggaaagaaagataatgcagttgtcaaagttgggcaacttcgtcagtgatgcttcatgattttttgtccaatgtatagaaaaatttggctatagacctatagtacctctagtggatcagtggatgagacgaagttgtgaaataaacttcattttgcatagcctttggtcatcgatcactgattgattactatgcgaaaattaacaaagagtagtggactttggtgatctgaaatagcttagggcaacttgtcaaatcatggtttcacagaagttcttttctttgtgcctgtttattggttgtttgtgcactcttcgaggtccacatctgttgccttctttgcaagagatggttttcgtttttttttctacttgcttttaaattaatttactttatatgtctaaagattttgcctttattttacattctccacaaaccatatctttttccgtcaacttgatttaatattttcataacacggttaaatcctagaaacatcttttgttggatgcataattgtagacattattttggtttggatatgcatggtgtactttcattaatcttctctttttttaggactcattaatcttctcttagggtgcgtttgaaatggctgaatgggtgaacagatggatagataatgattatacgatattacaatgttgtgatagtatttgagggtataaataaatgaattaactataacaaagttgaaattttgttttaagaaagtattctttttttctctcgaaaacgaaggagtgctgcatttcatttcattaaggggaagaaaaaacaaatacaaaaaacacaacacaaagaaaaaaaaataaagtaggagtgctcgagccctcctaccaagacccgcacacactaagctacccagggagcttagtttcctaggttagccgtcccactaaggagcttttgaaggcgagaagctccaacaacaccccaaatatggcccaaagagaaagtattctgagcaatttaaaatttgtataacaatcccaagtataattcctaagaggaaagaagtgggggtacaacgcatgagcaccacactcagctccacaaggatacatatatgtgttgaaagatgcagtctctggtgcatagaaatgagcagcctcagtgaggatgtgcatatgtgtatacctactattgtcctagagagcaaacccatatcttaagattttgtcattgatggcaagcaaagagtgcacacaaatacctcgaaatcgggtcgattgtacgtctcacacgatcacatcaaataaaataacgtcaaagctcctgatgatagagaaaatcgtaccggtcatcgaactaagtaaatagcagttaaatagttttattcaatatgtttgttcatgagaaagcgtgggtgtaatcatgaagttgtaggtatatgattgcgtgcgtcattcaaatcttaatgctccagcgataataggaatctgtcgctggtcgctagcatacgcatttttggtacaggtaatacaaggttatttttattataatttgcttgcaatttggttgcatgtgtagctgtattttggtttcatcagatacataacactaacattttggttggttgcaaactcgcaatttttaccatcagtgtttcgatggtgaatacaaaatcttagttatgcacctatctcttaaatttgcctagcatacttccacatcattctcctccaagagaatctactctatgacactgagtttatcgcatttcaacgattttccactagcattatctctttctataatataccggtgaatttatcaattgttctacaatacattattgggctagaactttttttttcaagaaacccaaaatacccttagagacatataaaattagctatcgatttatcttattagaatttttaaaaaaatacaattttttatgtggcctccttacacaacatgaaagtttgaatataagtttcaagtcttttatgtttactttgtacaaaaatatttttgtatggtacaacagagagaatttgcttacacaaaatacaatagaacaaaaataccttatatagtatatgaaagatgatttaccttaaaaataacaataaaaaattatttatatagcatataacaaataaattatatataaaaagtagaaatgcaaaaggtatattcttgtgtggtatagaagagagaacttgtttatacaaaatataatataacaaaaatgtcctatgtagcatatgaaagatgatttacattaaacaaaacaataaaaatattttatatagcatataacagataaattatattgtaaaaagtagaaatgcaaataacttgaaacttaatacaaactttcatgttgtgtgaggaggccacataaaaaatcacatttttttaagacttctaataagataattcgattgttaatattgcatgtctcaagggtatttttgatatttttgaaaaaaagacccaacccaatggtgtattgtagagaaaatgacaaagtcaaccagtatattgtagaaatagacaatgtttggcaaatcgttgaactgggacaaactcaatggcaagaatagattttttttttcttctcctaagattggcttgttatatatctccataacaacaagcaacctaaaatgatgccattaataaaagaaattctatgaattatgcttgggttagacttctaacaattggatccctacctcatataatctgcactgccaatgatggtaatatagccaatagttttagaacatgtgtgatgaccatctagaatcttcatacggtacttattagtatttggccaaacgatgggagccaattacctttaggtagcaactttattatagtgctacttgctagtactatctcatgtagtgatgtgtgcagctaaagttgatcaatgctactatcacaattatctttgatctacaaaccacaagaaagttacactcttcagaaaaacaaatcaccttttccttatgatagtttttttaaaaaaactttcggtgttacaaaatgattatgcagcatttccccttgtgcttattatgtttaacgtcttttctaggtgggatgtggctgatagctgaaccaattgtggcaatgtttcacattttgttgaagaactatatgtaggatagtttgcattggatagagaaatctttttttcgacgtaatggatggagaaatctactggaaggattgtcatattttgtacatgcaaagctgtcatattttgtacatgcaaagccaacagtgacgtctattttgtgtttgtaggtggtactagattagattgggtggttgtggtgtgggcatgtgacatgtatttcttcaattgaaaaaaaaacagaagtattttgtgatacatgataggattaagtcatcaaaagtaaattaattgtgctcttctttgataaatagatgtgttcgtttcatgattattagtctaattggtgcatttgacaatggtacactcgatgcaatatattatattgtgttttttttaaaaaaaaagttgatttggttctcactgtctaatagtatgctgataatgttctaatgtatttggcaaactagtccatagatgtaggacccacatatgggagtccatagttacagaaaccaccataacgtaagtaatttaaggtgggtcccactgaagataaaaaaaatcagccgcgacttattctcgtttccttcgcgcgggttcgagagttcgactcctcttctatcgccgcccccaaatctcgccccatcctgcgccgctgcacgacctctccgccaccgccgcaccagccctcaccaccgcccccgattcctgacaagtccccacgccgccgcatgccctgtccgccgttgccgccgccccccaattcctgacctaaagtccccacgccgccactgcacacgctattttccgccgccggcagcgcaccagccatctctatcaccctccatatcctgaggtgcacgcagcatcgctcctcccattggtcttcccctccgtcaccctggattgctcactcctcgtttatgtatttttttttcagtgcggctaccttcacgatgggctcagatctaggcaccacggcctcgcgaatttgctctggaggctgcggcggtgcacagatggagatgaaggcgaatgaccgtcgacgggtagccggagcagaagctgcagcacgcatgcacctggaccattgggtacatctggtattgttccttcctattcgtagtcaattgttcttttttttattatttttttgttatcatgatgcttcctgtagtactcaataatactcatatgtacatctctcctttgcgtgaatattcacgtaagacttaattcattttctataatgaggacaattaaacgcatgccttttacaggaaccttgataattaa

SEQ ID NO: 38042 - DNA, 568 bp, Oryza sativa
gtggttgcatttttaccaatttttttgcggtgaaaacggtcgatcgccatgggaatttggccctcacgaaggtcatatcactggccgactttgggtcatggaccgtgatggaccaacacttttaggctgggcaattatccaaatacctaatttaaagttttttttctcctctaagatggtggttttcttaactatttgtcacttttatctatgtggcatgccaacatgacaagcaaggatagaaaataatgtgggacccagtagttagcctcacatccctttcatttcccctccagcccatagatggagacggtgagcaccttggcgccggggttgtggtcctggcgtatcacgttttcacggtgtctccaagctaataacacttttttgagtgtcatgtagcaaattttaccaattcacttagacgcatgttatttacacgtgtgtttagttccttgagtgtaaagtttttcaagtatatacacgcacatttgaagtattaaacgtacactaataataaatcaaattacagattccgcctgtaacctgcgagacgcatttataaagc

SEQ ID NO: 38043 - DNA, 592 bp, Oryza sativa
cctgctaagattggcaacattttagtcacatctaaaaaccttagctgcataaaatgaactgaagagtaccttttggtttagtgctaatacgggaggtgtgtcgatcagtttgcttatgcttctgcagccctccgctgttaactttgggcgtcttctttggtgcatcctgaaggggggaaaaagaatgtgttagtgttgcagatgcaaccacacaacattggcaattcaccaactgctacaaatactaattctaatttttcatacatttttgcaaactattttttcataattcatgaaaaaaatgtttaagtatttcccttgagaggcaataaccaacaaggatacagtgttgtcctcggaaagctaacacgctagacttaaaattcacctctaagttgcaggtagcaaggattagcacaagtatcagtcgtcctggccactcatttattacatcataggagtagataatgcgagcaccttacgatgcattggcaccaattgaggtttcagaagcaaacaacatttacaaagcagtcaccatcatcgaacaggatttgcaaatgcgaacctgattcagtccattgacagtacc

SEQ ID NO: 38044 - DNA, 730 bp, Oryza sativa
caggggctacagataatatgtctgaaaccatgtgtttcacacatataacacatccaaatgaatccctattcaagataattgatgagatgacggaataccctgtcatggttcgacttgagctgcagacttatctcgcgacccatgagaatatagctgccatgttgaagggtaggccactggattctattaaggaatatgtgacccaatggataatacaaaactatccagctgctatgtaatttctttgctgagatgtttgaataattactatgcattcaagctaaatagtttaagaatgaaacatgcactttagatattatttaaataattgatatgctttggttcgaacttgtaataaagtagttcaaaaagatgtttgattgtttcaaggaattcttttagcatatagctttgccctttttactacttctatccgtattattcttgtggccaagttaactgtggaagaatctgtagtgttcttgtgacaaagccataagttaaaaaaatttgatctgtgtgcaatattatttttctcaatatgaaaagaagcggcacaaaatactctaaagagaaagatgattcgttttggaaagccaaccccaaaaaccggggcccttttaaagggccccccccaacccccttttaaaaaaattcttgcatagaagcacaccaaccaaacaagggtatatggcaagcctggcaagctggcaacgagttggcttgccct

SEQ ID NO: 38045 - DNA, 511 bp, Oryza sativa
cagatgtccgtgtacgtcctctccgctatcaaacatattctcgttcttgcaatctgcacatggacaacacatgtaatcactgtttcttcttatccgatcctcctccgcggcattcataaaatttattacgccctttcggtacttcgtagaatgacgtttcaaatttttggcatacatccaacttcgatcaattgctacaaaaaaaaaacaaattagaggcacatattataagatcagtattgcaaaagtaagacatgatgaaattgctcaattaatgatttatattactcacttgattgatccattttgatcacttttgggaatttaatttctgttttccttggaaaaaggacaaaaaatcggcccctacagcctcccaccaaaatagtgaacagtgggatacagttacactaggtggtggggggtatttatactgcgcaacaaaaatctgtaacgggccttaaacaatcaaccgtgacgagcatacaaagaaatctctatcgggccttaa

SEQ ID NO: 38046 - DNA, 695 bp, Oryza sativa
ctgcagcccagatctgtaggattttactcctatgtacaagtccattcgccttaaaataaacaactttaatataagagttgatatatcaatctgaatagatatatgtgttaatttagaattggggagatactgaagatagcactgtggtaaaaataaaatggaaatcttagtgctggatacacccagtatgtagtatctcttgttgctgtaggacatggagcatatgcagaggatggacaggacacgtgcaagatggttgtgtaatgaagtaatagatgctgcagttaaggagcctgggctactgcaaaggacggtgttttggagcaacacaagggagcacagggtagcactgcctcctcctcctcctcacttgccataattttgccattgccatgtccattgccatttgccacaatcttcaattccccaaaattttagcacatcagattcacctaactactactacggctcctacccacttgctcaactgaaagcaactgcaccggcaaccatcactgtagctactctaccttgcaagagaccatgttgtacacgcatattctacgactatatggttgtcagccactatttgctgctagcatattacctttggttttttctatttgacgttgatttgttaaaagacgaactaactactatcaaatactcagagactaagagagtatgatttattc

SEQ ID NO: 38047 - DNA, 730 bp, Oryza sativa
cagacccgcgaacattccgcctatcagagctcataccgtttacagcgttgctaaaccatgaatgcttcagttacagcgagcgcgcgaagctgaccacacgtaccccccacactcattcgcaaactcgcaaatgcagcacaattaaacggctaacagcagtagcaccaccaggccaccttaccttaccacacacaaacacacaccacgagaagccgggcagccccctccaaaggcacacctcaattgcggccctaggggacagccacgagccctaaggaggccacagggagcgtcgtacggagcaggagactcacctaggcagcccccgcgccgggggtgggctagggctagggttagggtttgcggggagcaggggagcccccacctcggggccagggcagtgggcgccgggagcacgcggcggggaggggggaggcacgcggaagaatctccgggtggtggcggcggaaaccgcggcggcggcgcccggggggtcgcccgagatcggtggcgcggcgccgcgggcttcgcgggctcgcgtgggggggtggtggtggtggtacgtcgtatatacagaagccagaggccgcgagggagggaaggagaaagcagattgtgtgtttgcgggtcgggtcggggttgcgaccgggtgaggctcgcgcgagctcgtgcggtcggacccggtcggtcggtcgtcacggagtgagattcgcggaaaggaagatgaatg

SEQ ID NO: 38048 - DNA, 590 bp, Oryza sativa
taaaatatttagatttaaaccttccttataatatatacttccatttcagttggttgttctagtatgagaaattttgggaaagagtatattagatcatttcaaattcatgaatttctaataatccctgtgtactcagctagtctggtctgatcttggtcttgctgttcaagctacccactgctctgcgaccggccatccattaccaaggctgtctgctaccaccaagcatccaaaggtgaggcaagtgcaaccgtagggcttgcaaggacatatcttactgtcttgtatagttgtaaggtgggcagtatcaatccccttatggctcaagcagtctagaacagccggaagcacaaccctgtcggttgaggatcttgcatctaaatataatcaagtcctacctttacgttcctcgtcccgaggatggacccaataggttgaaactgtattcccaatgcctccttttcccttgtatatgggacagttagaatgttgttttagtgtgagtgcggaaacctgatatcgatgccttgtgaatatgatgaaaaaatgaactaactagacctagatagcattgctgattttgcgtatct

SEQ ID NO: 38049 - DNA, 671 bp, Oryza sativa
cctgcagcccgatgtagggctattatccaacctggaggcctgaaccagtataaaatccttgtgtctttcgcctttttacttatgtgaatgataaatcgtggaaaaaccctaaggcaaacgcctgatcagcgaaagcaccggggggcgaaagaaatcggccgaagcatcgctcaccgaacgttgaaaccgcgacagcttgtttcgggaaataagtaaccgaacaccgcaatactcgagttatgtgaaaacacaagcgcttcttttagcgcggaataccacagatcgaaagcggaagtcgaaagctaaaaagtcagcagacctatttcgctaatatacgcaagggggccgacatgtttcgacctacgaaagcacgaaaggtgactatgcgaacaatagcgaaaaggaaatgaaacacatctttattaacttcaaaaaatatcaaagaatacatgccatacaacatgctataggtgaaagaaagtaacgggctttacagcctagcttacaagaaaattatatcttcgcccccaaaacaccctccactcccaaaggtgtgatttggcgaacttggttcgtcatcactactaatattatacactaccctaagaggagaagggggcgaaacacaaactaagccatagtggcgctgggcgatcgcttcctagcgatca

SEQ ID NO: 38050 - DNA, 574 bp, Oryza sativa
ctaaatcctatgcaagacttcaagtaaaaatggccgaaaagcagagtgaaaggctttacacgtgtaaaatttgagagcaattcttggctccttttgagattgcaagaactttgccgtttgttgcacaagcatgacgttatcttggataaatcaaccttttataaaagtactttggttaggagataccaaatgttgtagatggctagcagcaaagggcgatgatcctaatcctctgttgcagcaatatgtaggacatgattaggaaaatgtgactcccattctactgagcaaaagatcattctatccaatttgacaagagtaagagagtccctattatttgaccaagtataatttctaacatgcaaggggatttccttgactacctaaacgtccctatcatggccctgttgagattatcattgttggcaacttttttgacaagttgacaagcacgatcgcagcaccttaagccttgcggtgatcctagagtcgccaaccacctcgatctagcaaagagctaaacctagatgggttttgataacaaaatcggctagcggagccgatttctagataa

SEQ ID NO: 38051 - DNA, 508 bp, Oryza sativa
gccgaactggcaaaggggggcctgcgcggtctcccggtgaggagccacgagctccgtcaactttacacatagatggttctttctccataatacttctttgaacactaagatattgttctattatgaatagtgcagattccatgtgcaataccagtatttatcaatcatgattacgataagaccatcacactctaatcatatgttatacaagtataagaataatggagcaaagtgcatgctaattgctgctggagagcttttttttttctattccctctattttatattactgagtttatcctaagttaaacaaatttgtagaaaaatgtactaatatgcacaacatcaaattagtttcattaaatttgtcatcaagtatgtttttttattttatgttaaaaatgttattaattttttatataaacttaatcaaacatgagtaggattgacgcaaagttaaagtgactttgccctcagtcaaacttttttttagaaaaatgtactattc

SEQ ID NO: 38052 - DNA, 568 bp, Oryza sativa
cacacaaactccaagaaggatatgggagtattataggtattggtatttgtgtattaggggtgacattgtatatattacctcttaatttatgagtgaataacatagataaatctggaggtagcaatcacatctactatagatcgtgtcactgcaatcagctaaaggaacaaagaatgagaacacacggatcatgatttgtcttggccacttgatgtctcgacctacggagtaacatcctcggccttgagctgaccttgtcagtcctcgtcacatggacactaacgagaataaaaagttaatatggttcactaatagaacatagagccatatacaacacttatactaaatgcaatatccataggtggaacaattatcccttacaacttgatatggattagaggtctatgataaccatgtaccaaaatgatgagaaagattgtaaacaattatcatggtgattgttttcacccatcacatatccttcaaaatttgcagcatatgctgctaaatattccaacatccaactatgttggaattgctagttctgggctatgactctgattgctta

SEQ ID NO: 38053 - DNA, 863 bp, Oryza sativa
aaaaaatttatatatagaaatactatatataaaaaaatatttgaattcaaattcaaatttgaatcaggtatgtaaacttttggcttataaactttgggtctataaacttaggtgtataaacattagatgtatagacatactatatatagaaaatatttgaattcaaattcaaatttgaatcagatataattcaaattcaaatttaaaccgggtatgtaaacttttgacttataaactttaggtctataaactttaggtgtataaactttagatgcataaaaatactatatatagaaaatatttgaattcaaattcaaatttgaaacgggtatgtaaacttttgacttataaactttgggtctataaactttaggtgtataaactttagttgtatagaaataatatatagaaaaaatttgaattcaaattcaaatttgaatcggatatataaactttgggcctttaaactttatatgcgtaaacttgagatgtataaactttaggtgcataaatttactaaaatataaaagaaatatggtgcaaaaaaaaaaaccaggtaaagggaggtaaagggagggggagacccgatccgatcgcccccggcggcccccggcgatcaatcgcccaataggagtttcgatccaatacccccctcttgttgctgacgtgtcacggcgcaatggtcaatgggtttggaggtcaataggggacagagctcgctatccatcccgaatcccaattccctactcccaaatcccaacctcccattcatcgggtcgtgtcgccgccgacgaacaacacggcgagcggcgccggtggcgagctacctaccctccatctctccagatcccttccaggtgaga

SEQ ID NO: 38054 - DNA, 845 bp, Oryza sativa
tactaccacggggtttcatgctagcaaacaatcatccgggaggaatcttgtcaagagacgataagcaattataggattggagggtgaacatacagaggataaaagaagaaagatagaagtagggtaagaagatatatacatgtaggcatagtatattggttttggtaatggattgtttgttgttttatttggttgtttgttgttttatttggccttcggctgtttatatttatcagagagatcatcttgcatgaacaaagctcctcaaaatatcttattaggcttagagatgtattaggactctacaaaccctaaccctaagcaaggaaacataaaaaacgtaagtaaatttgactttgacttaggattatcgtttagatcgatcggtcatgacctccagtagagtctccgatcagaataaccagggttttattagaccgacaagaggcctaatcatacgcgtttgctaattggcatgtatgtgttgaattttttttatttttaattcttctattaaaagttttacaaaaataattttctatttcgaaaattgacagaagtagtcacccgccgtctcccaaagggcggcgaatgtgacgtggcagacggccgttcgctctcgggtgacggccgtcaatgaaatttgcaggcggcccccttgccgccctccgctagggcgattttacactgtgcggggggccgcctacaaatgggcgtttagggggggcatggaaatttgcaggcggcccccttgccgccctgggggagggcgatttttgcctcccccctatataaccctgtcccctctctctgaaatttcattataatctctaaaaatccaaaaa

SEQ ID NO: 38055 - DNA, 524 bp, Oryza sativa
gaattcctcacaactcacaaatcagtatgggatttcaggtcttttcttctgctcaggaaggcataatggattttagcacacttcgatttatcttataaagtaacttaccatgtgatattcttgtagaaaatcaggttctcttctcaagtaacctgattaattaatttgccttctcgggaacaaaggaatcaactttgattcaacaatggtcccaactttccttttctcttcataaaaccccaacacaacccatattctctaacctctttcctagtacaagactaggagcttcatttattatatatacaaaatctatctatctatctatcttctattatatactaaaagtctattaaacttcttacaaacgctcctacaccgccacgaagcattctacaaacgctcctaagccgccatgtggcgctctaataatttatagaaaaatctgtaaaaaagaaaaacatctaaccatcagttttcacttaaaaaggtggacccaataatattaaccattagatcaaaac

SEQ ID NO: 38056 - DNA, 661 bp, Oryza sativa
attcctgcagcccagatctattatatgttttccctgtacatatgtaaatttggagtcttagttgtaccaagtgctctctctacttgttaatttgtatctaagtatgtgataaattgcatcattgagactttcccttacatatataaatttggaatcttggttgtactaaggccctgtttgtttcagcttaagattattgtaatctagattattaaatcggatcactctaagctggattataatacgctgatatagaataaggccctgtttgtttcagtttatgattattataatctagattattaaaccagattgctataagctggattataataagctgatataaaataagctgtgagttgttgtttgtctggattattggaggcatggattattgggtttgaaaggctaaagtctataatgccctcagctatctgttcggttgatggcataggtgggtaatttttctcaagtatgtagaggtagtgggtctttagccactcaataatctgaaaaaagtttctttagagaagcttattagattataataatatggtttatagattataataatctgctataataatctacttgtttgtttcgcttactcctaataagcaagattataataatcctaagctgaatcaaacatggcctaagt

SEQ ID NO: 38057 - DNA, 641 bp, Oryza sativa
attcctgcagccccatctgtttaaattaaggtagaggagagctcagtgatctctatagatgattgacaatttgagtcaatggactgaacatcgagcggatctagtttgaagggaaattttcaatgaatccaacattccttggatattaatttcctggatgtttgcgacattggagccttccatggcaatgtaaatagctacatatccttctcctaagtacattaagaaaaatgactccccaaatactaaaattctattatatatatatatttaaataatactatattccatattgttctatcaacagttgtcgaataactatatgaagtagaatattttcacctagcatacccaagcatttctagatcaattgatggtctataggtacacgacgtcagtctgctggcactcttttttctttacgccatagccaacgcgaagacgtggcatgtacctctagcctcccacgttggacgcgaggtcaaaaagcgcgcgaacctcctacatacgccacgccccctgtgcgaggcgccgatctaaggctagggttcgagccgtggctcacgttgtgcagcttgaggcctctcggttgtgcagcttttcattgaacaggacacacctgtgggtattgtcttcattgg

SEQ ID NO: 38058 - DNA, 556 bp, Oryza sativa
catgaatggaatctgttgagcagcttgcacccaaatgcccatttataacgttggcgtgtaaatatggtgagcggaactctcccggtacctcacaatcctacaattgtttacaggatcaacaaacaaaaaaaaccaccgtacggtagaacacccacccaattgtgcatgttcttttaaccatcacagcaagcttacatgatctgtggatgcagaactgtttgttgcatggtttacttatacccagtcttgaaatgttgcaagtgattgggagagatcatcgtacgccgtccgatcaacgatgtgccacgcagattgtgcaggagttatccctgccatattgcaaattagtggccgtcgctcaagtaaatctgggccgcaacttctggacctgaaagtcctcatggcccaaagggcgtctgctcatacacacacaggcctgcatgtctctcctcctcagtaacaaatgaaaaaacattgttaattcatatttaatgggattttgcttggaaacctagctcaaacatttatttaactgatggtgagtatggtactatgg

SEQ ID NO: 38059 - DNA, 672 bp, Oryza sativa
cagcccaacatggtttgtaaaaaccacatcctagcgcataaacaggtgaggtttttacattcaaatttaaattccattaattgacacaaaaatagttcagctgcttccagtattttcagttagaaatatttccacccaaatagcatgagttgtcccaaataccaccgatatatgaaaaatacctggtaattgataacaaatagcatgagttgtccactcttagggaagtactggaagctgaatgtaagaatcttacaagtcagttgaatctagattcagatctgggataatttggatggtcagtcttgagcaattttatggttgttgaggaggtaccaaatttatgatagaaatagtcgtacctcatagtattttctcaaggactttaaaattcctcagcagtcttagctatgattttcctactgatggggcccttactctaaaccgtgtactttgttcacatataattcgctgtcatggaaacttaactagccctgacagccaaaaatcgtcaggaaaatgcataatcacgtaaggaaaatacatcctgacgtggcactgtcagaaaaattccatcagaactgacctatcggctggagcggagctagaacgaaatggagagaagtgacacttgcttaacttactctactttatatcgagtttaagctgata

SEQ ID NO: 38060 - DNA, 1067 bp, Oryza sativa
attatttagaccgtcctatttgacccagatgatattcaaatccaagtttagggaccggggtgacccaactcaacaaatgggaggacctaacgagtgatctgtaagtttaggaaccgggatgacatagtcgaacaagtttgaggacatgaacggtcgatttgtgagtttagggactgggatgatacaacggtacaagtttagggaccagtgatgacacaacggtacaagtttagcagaatggtggtgttgcgcatgcctgatctcactgctgtgctgtgcttaagcaaagcggaagtctatatattggaccttttttcaattaactatatactcccttcaattttattttaattgacattttagacaataatacggtctacaaaatatatctttgaccttatttctctattataataaataaatgtatgtttacttttattacaatactttgaaagataattctatatatcttgttctagtttctttaaactaaatatttttaaagctattagtggttaaagttataaaagtttgaacttaaccttgtttaaaatgttaaataatatgaaacaggagggaagtataagacattgggacagtagtatatcccgtccctgaaacgtaagacattgggacagtagtatatccagtccctgaaacgtagggcatatgcccaataccctattggcaccagtggcggtagtggtggtgtcgccaggaagaagagagccggcaggagaggtggcaccgcgctagggaaaggaagaagaagatgacgaggggaggggacgggtgggtgtttatatatatttatgatttttaggggtatactgtcagacttatatgtgaaaaaaaaacctaatgatttaaatgcaaaatgcaactgactgatatggctgaaatgcaaaaagaaaatacaggtgtggctcgtactgtgtaaagggtgtcacaagtatgatttcatcatacttggcatctcctttttctcgtagatatatcttccattggctatatgccctgagaattgctcaaacgtcgtgtgaaacatgtgtattgtggaggctatt

SEQ ID NO: 38061 - DNA, 615 bp, Oryza sativa
ctaacgagaataaaaagttaatatggttcactaatagaacatagagccatatacaacacttatactaaatgcaatatccataggtggaacaattatcccttacaacttgatatggattagaggtctatgataaccatgtaccaaaatgatgaaaaagattgtaaacaattatcatggtgattgttttcacccatcacatatccttcaaaatttgcagcatatgctgctaaatattccaacatccaactatgttggaattgctagttctgggctatgactctgattgcttatctgtccatacccctttggggcatattgtgattgtgtagattacgtgttatagacaactttgtgtagttgtctaaagaatatgttggttggcaaatcttggttggttggcaaatcttgttcgtttggcgactccgatttttggtaatgccatttatctaagctaagtgtgtaaagactagaaaatctgtcaaaaggttgattttcctttgttagctcacatcctaccaatgaaagcaacacatttaatgcataaacaaagaaaatgtaggatacatttcttcccttccccaaccttaacaaataaagggtgggcaaggctagtag

SEQ ID NO: 38062 - DNA, 536 bp, Oryza sativa
  unsure (1)..(536): unsure at all n locations
ctccaacctcaagctagttggctccattgcttatcttgtgttgatttgagattcactttgagtcttgctttctcacttcttcctctccaccgatctataagcttggatttcatgtgtttgtgagagtggttgatttgagtttattttagtgcttggtgttgacttcgtgaagatcttttgagcactcaattcatctccaagaaatctttgttgcatttgttactcttggtagttgaggacacctagacgactaggagtcaacctcgagacaccaatttgtttgtggtgtgccgagggagtttgtgaaggtacgatctcacctccgaatgggaagagatacctttagtggaaggaggagtacatttgtgcaacctcacaaggatagggttggaaaagccccggctcattatgagctcctcaacggagagtagaatcccctcaagtatttgaacttcgggagcatatcgtcttacaacaaggggatcctctagagtcgnctcggggcgggttttntgcgttagtttggnnnaaaagtt

SEQ ID NO: 38063 - DNA, 877 bp, Oryza sativa
  unsure (1)..(877): unsure at all n locations
aggataatatttacatcaatccacaaactctcatacgttcatcttaaattgcgcttgtttacttggggtttgtccggtgatgctttcacatgtctcacttctttaccatcaaattctatccatacatggtccctactattatacacaccataggttgatttttctactgcagagaatggcttaggattatgtgatttaacatcggcttaaccaaaagtataatgagcctgtcattgattatattaagagatttacggatgttagaaaccgatgttatagcttgaatataactgatagagatttggctggtcttgcttttaatggtttaattgctcctcttagagaaagactagatggccaactgtcacaccctgaaaattcaaaatatataaattgttgtttaaatggaatttttagaatttattttttaaaagtcttgaagagaagatctaattttaattaataaattccaatataaaatgggcccagataaaatttcattaaatactttgcttaattctataattcctagatttttctgggatttatttgagctaaggaagtatttttaataaatggaattacatttaagaaataatttaaattgaaaaaggttttaaaaagtcttcttttgggcccaaaacccttctctctctcctcggcccagtccggggagaaacaatcggttgataaaagtgaatcatctccaaaagaagacatggatatcaacatggtttgtatgttgcctatggagttttgtgctatggatgaagccgaggttgctcaactttcattaggtcctaaagatgcggtttttgagaagcccgatgaatcaaaccgtcatatgggtaccgagtggacatttcaaangcacact

SEQ ID NO: 38064 - DNA, 750 bp, Oryza sativa
  unsure (1)..(750): unsure at all n locations
accaaaccaagcctaggctaataagccaaaagaatcgcgctgctttttttatctaaaaaaattagttaagattgtatgcgccaaatttaacctcgtccaaatggaataagatcaagtgtaggttctttacaagagcangtttatgtcattgtgcagatcaaaggtctacacaggtagtcaattcatttagtcttcatcgttgaacaatcaagtatgacagaagcttcactcattaatattttgttccgccagagcacaagtcattacgatcctcaagcattgtgctggtaggcaaaacatgtagactacagcatttttcgtctccaactttaaggaccggccttgtattttactctttctaaattattagtcaatacttgcaagatggatatattgttgctcatttgcctggatgttgctcatttgccttgatctagttttttttatctgattgtttatctatttatctagacatttaactcagataatattatcatcacttgtgatatgtctccctagaacccgtattgctgaaagtgaacagtaaatctaaaaaaataggtccttgagaaggtacatatttttttatagtaaaattttgttacctcgagttacctagtactaacttgtagataataagttttacactagaaaatgtgatacctcctactaccttgtgaaggatgataaattatcattcttatgataatgggtaccgagctcgatantcagtnaatcaaanncacatcg

SEQ ID NO: 38065 - DNA, 814 bp, Oryza sativa
cgtgcggctattagaaacccctcatgatttggacgaaccaagaagtctcaggatgttatttgtaaatatggtaaccttctgtttatatatatttaatatagcgcagtaggagcctctcctgctgtttcccgtcaaaaaaaagtctcaggatgttctcttcgtacccaatgcagcagaggcgaagccaggggatctggaggaacccaggcctccccaggccaataacaaccctaccccacccccaccccctcttctctttttcacataataatcatctttttatcacctagtggccatgttcagctgctggttcgcggctgtggcgcagccggcaccaacagtgccgcacgcacgcggcgcagttgccgtagcaggcttgctaaacaggcccagaatgtcaagtgtaaaatttgatatggctatggtatactgttcaaccatgaactaaaccttccatgctgtaatgtacctctacataatttctaaatgagtaaaatacacggccaatccttaaagttggagcgaggctgccctcaaagtcatcaatgttaataactcaaaaattgagaggtgatctttccaagggacccctaagacgccaaaggcaataccgatcagacttccagattcccttggagatcgagcggaggacaccttttgattaggagcgactcaccatcttcttttccaccgtaacacccaaagttctgtgtggcttttaaggggaacaaacggaagcattatagcgcttaccctaaccacatgtacccaccactatttgtgggaggctatgattggcttccaccataccaat

SEQ ID NO: 38066 - DNA, 676 bp, Oryza sativa
tctctttccaatcccaagaggttattgggtccctcaatcaggtgcggttgccttaatccaccaggtctagtgatcaatccatcatgggcacttcgatctaggagctgatatcgtccctctatctaaggcatgcgtccttcttcatctatgtcaccagccacctctctcccctctcatcctagtccttttggggccagggccttgtgtcttctgtaaggcacattaaggtgggtaagaccacttttgccactaagatgatcgctcggctctgacgaggatacttaaggccacatgcaagagtggagcgttgtaaatgctcttggcttacgcttagttcgaaactgagttagggagcttattagctgcatgccaaatgagacgcattgctaactaagtattattttctccgcttcatattataagacattttgatgtcttcatctcttgtgtagatttactaacatccatatacatttagacacatatgtgaagcatatacatggatctatgaaagaatctattcaaaacccaaaacatcttataatgtgaaatggaggatgaagatattttgtgaatgctatatatcccactctattagctgtactgaacacaccacaaatgtttaattgtaagagacaggattccgtattatactctgagggggcagatttgttga

SEQ ID NO: 38067 - DNA, 526 bp, Oryza sativa
  unsure (1)..(526): unsure at all n locations
cgagagcatttgagtntacgtttgactatagggcgaattcgagctcggtacccatgtcggtgggttgcgtcttgtgggtacagttgtgcacctctggccagagtaaaactattcgaatagccgtgcccgcggttatgggcgatcgaccagattcaccgtgattagtctcacacttaataaatcgacccaatgcactgtagtacaggtgggttggttgggcctgttcaacgtggtgtagcgttgatcagtggagattttaatgttactttaattactcaacagttttactgtttgctaaataaaatgttttacaaccgcctttatgcaaatagccacaaacccctccttgtatccccttgcacgtccgcatcgttggtgtggcttgctgagtacggtggttgtactcagccttgctattattcccccttttcagaagtgtagtgcttctgagctgaagatggagttagaggaccaaggctcagaccccagttgagttttgcctgtggagtggagctgaagccccgct

SEQ ID NO: 38068 - DNA, 650 bp, Oryza sativa
  unsure (1)..(650): unsure at all n locations
caatccctacgatcccttgttatcctcttcttgttttactctttgttcgtcttagttgtgaaattgagtgaagaattgctgatttagtgtttgaaaatcttttgggttttaatttgcatgatgtaaatccttcttcttagaatggtcatcttgttctctagtctccaccatggtcaccattactttctagccttcatttgctctacgactatctcttgtacgcctttgttgtttgagatacattttgaatttgaggggaatgggagcacattatggtgaagttgaggtttgggaggaaagcggatggcatgagggggaggatggaggagatgaggttggggtcgaatgcacgctgctcactgagaatagcgggcgacgacatatcgggactatgcnnnnnnnnnnnnnnnnnnnnnnnnnagcgcgagacaatggctcagaaacacgtagcactgaagattttcgaggcacttctgaagaggtgtatattatggggttttaatactaactctatttaacaaaatattgtagacatccttttctcacttgtgctattcaggtacactctataacatccactggacaatcagtcgacatcactttacaagaaaggttacaagaaagcatcccaactttacaagatgatttcg

SEQ ID NO: 38069 - DNA, 567 bp, Oryza sativa
agaacaaaatttagggtctgttaggcacagcaccagctctagctccacctctcctggagctggagctcagccaaacagtttcagctccaccaaaaataggagcgaagctgggtggagctctctcacaaaatgaactagagaagtggggctgggtttaggcagcttcacaagtgcactccagacccaactcctggagctaaatttaggagttagagctttaccaaacaggcccttaatacctagctgtggtttcaaagggcacaatggtcacttcctttggctttcctttttgatgttgcaatatagagaaaactaacatttatacactaacaagattaaggtgtaaaagtgaaggtagcctagtcagtgatcaagacccctttgctccacatgcttggatttttttaacgttaagtttggatgttgacgagattgattttgcataaacttgggctaatatgtatatgcataatccctcatatggttaggatattcaaacacttacaatatgcaaaagctttgctgcacagattgataatcaatctcatttagagaaaatatcttttg

SEQ ID NO: 38070 - DNA, 1159 bp, Oryza sativa
ggatgaaatgcaggaagtatacagatcaaagattagctgcctagagtgcagatcagcagaagtttattgaggctcttctgagcacaatttgatttgccactcatggtttgatgaattccttcaaggcactaaaaactaactatatatgcttggtgacacgtaaggagttgcccctgttttagttgcataatggctagtactatatggcaattatcaacgcaattgtaggagtagaatatattagataaacatattttactgaagaagaggttgatgacttacgcattgtttagcctacctaatgaccaaactcaaaactatatctcaagtcatatcaggtaaaatgtagtgatcacaaaattatacaaaaaaacattatggcgcctaattaactatcttgataacataattacctgaataaaagatttacctgtaattagggcaatgcatgcatcagtacctcagagctaaaataaatcacaaagtcacaatcatgttgttagccgtccaataatcgtgctcaatcaagaacataaacttgcaatgatttgaaaacttatcttatttggttggtgaaaagtttccaagaatatatataatcagctagagccattactttttatttctccatacttatataattcacctactatgcatcctatcaaccaaattgcatgcctataattcttctactagtaactctatttgtgaaaagaacaagagaattaggtaatctggaaaccactacaagactaaactacccaaaagattgttattttgattgtgtgcatcccatgtgcactaagaaagtatgtggtaattgtgttttcttggaccattctttcatgatgcttcattgggttccatttgcttcgagttaaagcaaaactggtcctgagattacctcaaagtacctactaattatattgtaggcaccactgattggattaatgaggtgtgttgcaggccacagttcactaattatgagctcaaattaagggacattattgctggtgaacagtgagtgccgtgtgtgttttctgcattcctctaaattgacacaaatcttaattcatttgcagcttttaaatgatcgataattggttggtcgcatgcttttaatcacaaaaaaacaaatgcacagtttttgtttgttgaa

SEQ ID NO: 38071 - DNA, 644 bp, Oryza sativa
atggtggtttatgagacctctacaaagtacaaaaatgaaacccagctcacattacttattggtgaatgaacaatccaacactttggcgatttttgcacgagggataggttacagcccacctgcaacctattggggccttgtccgcaaaaatcgattatgtactattccctccattccataatataagacacaaccataatataagacataatataaaactctacaccatcaagaacttagtactagacactactctttcaatacaaacaccacttttccatacttaaatttaatgctacttatctcacacgatatcttgaatgttgtgtagaaagcatgtctcatgtaagacctagtttccttctctttcctcatttatttacttgttacatcaattttcatcgtttttatttaatgctatggacaccatccccgttattgggttgggaatggccagtcgaattgcgatggagtgcgccctcagttggatataaaaatgaattagtggccgagatcagtaacagctattaatggtagttgccaataatggaggtttaatttggaaacaaaggaaagaacggccattcgctcacctctcgatcgatcgacctgccaacatcaacatgcaatcggcctcctgtcct

SEQ ID NO: 38072 - DNA, 531 bp, Oryza sativa
tgcgccgcaaagttcgaagcgaatcatttgtcctgattcattggaagggtatgcaaaaaatgaattcatctgaaaaagattatgaaacagtaatgataataactaagttaataataaagtgttgacaaatagtagggataaaacataaatgtctcaaattttaatacaaatagataagtcaagggcgatcaattcccttcgcacgcttgctaggtcccccttcttcctacgtctaatctgctcagtgggatatgtcaaaatatcggggggtgcctctctcttgctgtctgctgtggtgtcacctcgggtgcctgaacggcctttgtctcctgtgtcggctgtgtgacctgaggtgctgcgtgccaataatccatccctgcttccccttgaggaggctcagtggaaaagaagtcctcaatgaatgctgtgcgaggggagtactcatcatctgtttgcataagagggagaaaccaaaaatggcatacttagtaatgatacatataattagaaactaaagcgtgttattgttta

SEQ ID NO: 38073 - DNA, 563 bp, Oryza sativa
cccacgagactctgcagcttactacagctgcgatgatcactttgttgtggtagacaaaactgttgactatggtagaggaggagcgatgcctgataaaactagtgccccagaagtaagagctcaagctcggccttttggaggtagcacaacatcatatgcaacgggtatgtttatttatagtcttcatatgtcattttatgtaattcagcaaatctgttttttttttattctccccttacaagattctattcacctttgtaattcttatggataagctttcccttgtgaatattatgtctgtgttaagcaaggacagcattatacttatccctatgcattaatgtttcttgaaacatccctatgcattaatgaaagaacaagctattgaacttactattcttagaccttagttcttccttagaaccattcttaactatttgcttcgagtagtctgttcagtgttttttgtttgtataggttcctcaagcaacagaaggcggtatttcctcgagcaacagaagccgaacagtcgtacctaaagagaacacggatgaaggattttt

SEQ ID NO: 38074 - DNA, 538 bp, Oryza sativa
ttcatttgcagcttttaaatgatcgataattggttggtcgcatgcttttaatcacaaaaaaacaaatgcacagtttttgtttgttgaagactacagtatcaggtcctgtttggatcaccctgtcacatcggatgtttgacactaattagaaatattaaacgtagactaatgacaaaatccgttctataaccctggactaattcataatatgaatctattgaacctatttaatccatgattagcctatgtgatgctatagtaaacatgtgccaattatggattaattaggcttaaaaaatttgtttcgcgaattaactatcatttatgcaattagttttattattagtctccgtttaatacttctatttagtgtccaaacatacgatgtgatacggactaaaatttagtctctggatccaaacaccacctcagttctcaataagtacaattttcatttgaaactctccttctgatggcagatgtgaattgaagtccgttgtatagaaaatggctaacatttcgaaatgatttcatcaaa

SEQ ID NO: 38075 - DNA, 708 bp, Oryza sativa
gtttttaaggagtgtgattcgataatagttaaggatacaaaggaggaatttgaactggaaaaatctttcaaggtatggtttgttctattattccattatatttagaagaaatgtgctgtctgaccatttgtcagccaataacttattccttttcttttgggttactcaaacaaactatggggcaattgcaaattttaccactgttttgaattgttattgcaaaactgccaccagaactgtcattccaatggcattcttgcaaaatataaaaaaccagtggcaaatttgcaaatgccccgtttgcaagaaatatttgaaatttgttgtttgttctgattaaacttttacctcattttcctttcatatgtaataacgccatttgtatatgatatgggctgtagatattacctatattatttcaactggtgttgatgccagtaacagatcaataatgtgtgaaccgtcaagccagcatgaaggtgcaggacttttctcatgatgcagtgtactttctttataatttatctaatcattagttggtggatactattcacagatttttttttactggatgcaaccattgtttcttattggcattttcacagcatgtaggtgtcttatttttgtcatcctaattatattgccagtagtacttataaggctgtgttcggattccctggatgggaactaatcctcccacacggaaaa

SEQ ID NO: 38076 - DNA, 2306 bp, Oryza sativa
agtagttcatcacaaatataatataaaaatatattcaatagtggatttaatgaaactaatttggtgttgtagatgtgtgctacattttttctacaaacttggtcaaaactgaagtgagacttatgacaaacccaaaatgtcttgtgataaggaacggagagaatagtgtgctaacacaatagcctttaacatgaaaggtagctgaaaattgatcttacttgattccccattttttatcaagctcatgtttcattgcttttgtaacacagaaggcaccatcagccatccgtccaaaatgcttctcgaacctagaacggaaagaacacaccactgtattaacacaagcgatcagtatgctatatctagcagataaacaaacaggacaaggaattaccagaagtagattttaactatgatatggcttctgccatgagacaacccgagcagtgtatatccaaagttatgccaatccacaatagacttagcacctcttagcccgctagccagttttacagcagccaatgttggaacagagggtggattctgtcagacagaagatgagatgatcaaataaaagaaatcagttccattccaattgtacgacacgatcagtcacgtatgaggttttctaattaacaaataaattataagtatcatacagaaggatctataggttatataaatctatcagttaatacggcctacaaaacgatgagactttgactaagtacaggctgcacatatcttagctgaaatgttgaattgaaaatggtgtcatgcagcatgacttgctaactaagctgggaaatactttgctaacaccatggttttactacaatgattgatgaatgatgaatcataaaagaattccacactactgaaagtgatagtgattgtagaaaaatacatattgtccatgtaattctgaaccatgcatgcaaaactgcaaataaagaagctcaatgcaattttgtgataactgacctgaacaatgaagacatcagggcgaggaatcttgaaacaaaggtaccaaatcaatatgataaactggatggcggctttaagtagcattgacagggcaccagatatctttgatattcctgttaactgcactgatttctagaaggtacaatttgtaagtactgatagtaggcaaaattagagaacagccaacagcataatgctttcgcacaatcagtaccatttcgtggatgtgaatcaatggattttctctcaataatagatgtgggtcacttcctgctcatttacccaaagcagaacataggtcaaatttcaacaacagaaggtcgaaagctgttggaaattcagcctgtctgtgtgccctatgtggtatagttaggtataaataacttcgagttacaatgctggagtaaaatccaaaagtacaatggaactttgaaaagagcaatacctccatttgcaacaatgtccacttccataccaccctgtcaagaaaaataaagaacgactaataaactaaaacatagacatatgctggcacatagagttggctgtttcacaacataaagcatgttccaatttcccaatttttttgccacttgaaggaaaaatgcttagtaaatgcaaggcaattttcttctattcacttcaaagtctgtcttatctaacaggattaatatttgcacgtgcaatcacactttcagggataaaaaagcacatttttaagggagcaaaaaactgacggcattaatcaaagcgaaactatgtcagctcacactttcaggggggcaaatgaccaccactacgttagttcatcggtgcactggcacaactgagacgtaccacatctccttcctttccttgttattaccatgctatataacctaggaccaaaggcttctctagagtagagtatagatggccaaaaggcccgaggcccgacggcccggcccatggcacgatattttggcctggcccaagcacggcacggcccgacggaggtcgggcccgtgccggcccagcccgaccactgggccgtgcctgggcccctccaccggcacgttggcccggcacggcacggccgggccggcccggcacgatgggccggcagctaggcccgatacacaaaaaaaaataggggagtaaaaatagacattatatgccatgaacgaaagaatagggatctaaaatagactttttttatctatacatatgtcagccaaagaggagggacagaaaatagacttattttagctatacatatgtcagcccaaagagaagggacggaaaatagactattttagctatacatatgaaatagccca

SEQ ID NO: 38077 - DNA, 643 bp, Oryza sativa
gacaaaagcttaactgtatttgttacaagagagagacatatggccactacttgtcagcactaatgttacaccttcaggagaaaggtacagaagctatcttggcattgttatcagtcgtcatcgtcgtcgtcatcgaactcgtcctcctcttcctcgctcagctcttccataggctcatcctcttcgttaactataaaaccactgagtgtttcatcttcctcatcatcttcgtccccctcatctttttcatccccactattcttatttttatctttagtctcagttttttccttgcgaggtttctttggttcttttgatcttgtaacatactttgatctcttcacactagaacctttccttttgggaattaaaattgaaaatttccttttttttaaatttttcccgggggttttcccccccctactctacctatcaatcttcgtcttcacgctgcccctcattcttcttgttagcgcctttaccctttaatttgccttcctcatcatcttcatcatcggagcccttccttacttcctccagaaaccaattccaatcctttgggggacgaattcttcctttaggatagttgtcaaattcgtggcccattgataagaacccgaattctgcagccaaacaattactg

SEQ ID NO: 38078 - DNA, 585 bp, Oryza sativa
gaccgaacttggaaagttgtatatatctcttggtttaaaaaagacagaatattaacccaaaatgcacaaataatatctacttaaccattaaatctcctatcaacttaaggaacccctttaaaacacgggataggaaaaaacgcataaatcgaagcgacatgttttttttaatcctatagaatttgaaaacacatgaaacaaaaggagaagctctttgattgcaccacacatcgttgtgactggccttgtcgcttcaactctcctctccctacgcacctcctcctctcggctcttgctacgtcgatgcaacagtggatgagcttgcatggttcgcaagagttctctggtgggcgagagggcaacgaggtagagaaatgaggagtgagcctatttccctcggggtcaagcactctaggtaagtattctgattaaagatgagataatgcttcataaaatagagaagttaaaacattctttttgcttttactttcaaatatttttagctttataatgaatgcaaaaacaggtaaaacacattattgacacatagaaacaacaatgttttaaccaaaataactagccgct

SEQ ID NO: 38079 - DNA, 1221 bp, Oryza sativa
gagttttttcattcaactttgtagggttgtttattcatgtgttaccaacatatatgcgattatttttgagattttcttagtacttctgtaaaaaagttttcaattttacaattaagatgtggttttcaccgtatactagctaaatgtttatgcatcgctacatatagataaaaggagaatttcataatattgcctaaaataagcaataatatattttccatgaaatgtataagctaccaacctttttctgtagggaatacccaatttaatttaattttatattgcctattcacttagatttagttgttatgtaatattaaggagttcaaggggctaatatgtaaaatctataatgaaagtaggtgagatgtagaatccctgccattatcattagtcatatatactttcccacgtatatgcatgtgtcaaaaaataaaagatgtattctatgtttgccctgcacatgtagatgtattttatttatctatattttatctttattcagctgataggatggacaccactgatagaaatgaagaagattaatgctagcagaagggctgcgggagttcgtttggtcgggaagatggaaacataccaacctctttgttcagtcaaagacaggactgcccttgggtttgtgaatatatccaacacttttagattaaactatcaggaaattgcatattaatatttcagtatctatatatttaacaaagatacattctactccattgatctatttcattgggtcacttaatggactaaactatttttggctcatcttacccttaaatttttaaaaatggttcagtttattgcttaacagtattttttttcaagtcatgttctaagacgactcttttttaaacaatggatgacaccattatcaaagttaaaaaaatatcattttatatgattgcttacttgaacttaattttgttgtgtaaatcaatcttagttgtttcccatatgtaaataatgataaaatatttaaaaatgttgagagataagttgttatacatctatttaattctatcaattttagtgcagaaatatgacagataacaaaaagaaaaatatcacgatgagtaaactgaattgttttcaatagatcatgatataaagtgacctgtaaaatagaataaggggttaagtgctccagcaaaacatatagttcggaagagttaagtaagacttttttatcacctttaaccaaag

SEQ ID NO: 38080 - DNA, 1140 bp, Oryza sativa
tatagctagtagtttggccgtactatcactagataaaactataatattctcaaggagaaaatttctaacgaagcaacattaattcctctcgtcaactatacgttaccgtttctctcaccatctttgtcgctgcatcatgcatcgatcaactattctgtgctgaattaattaaccaaggtgacagaagcactgctcttctagctactactactactatatatactgcattgggctagctagggttcttgccatcagagtacagcctataattagctaatactagctacaagatgcattccactacgataacatccactagaacgtactactacaggttccaaccaaatgatcaaagtccgggtcgatttgcactgcagtgctatgctacgacgacgcccacgatacgatcatgtactaacatgccctacgctattatggggagatctcaagcattcccgttttcgtcattcacattaggtagagctcctgcccttgttttgagcaagcgatcaaaaggtaaagatgggcgagttatggcaacagatcaggaagaagatggggcaacagaggaagaagatgcaaggaaaggcatcccgtttctgctttcgtcccaagaagagaacatcgcctcagacatcctgcaggttgatctatatatagccccttctaggccctccccgctcgtattccatttaattaggcctttttctctaagaaatactcctagattttaggtgtgtttagttcacgctaaaattagaagtttgattgaaattaaaacgatgtgatggaaaagttggaagtttgtgtgtatatataggaaagttttgatgtgatggaaaaaataaaagtttgaagaaaaagttgggaactaaaccaggcctttaaaagaatttcacgtgaattgaactgattcctaaatatatcctacaaaattcttgcgcttcaaacaagcctttttttggggtgccttaggccctgtatagatgggactaaaacttttaaatccctatcacatcggatgtctggacactaattataaatattaaacgtagattattaaggtggtgtttggatccagggacttaactttagtccctgtatttagacattatttagagtattaaatatagactattt

SEQ ID NO: 38081 - DNA, 2318 bp, Oryza sativa
ttcagaaatcgatcccgtagattatgaaattggaagctcaagagtgctaatgcatccaggatcttgatgttgggcgagaacatcattcctgtgattttgggcaccgaatagtacaagaaagccatagtgtcttttggagatccaatactcctgcagtattgctgggctgggcaaagctttacaattctaagcttgatgcattgttgttttagttatctctgaattattggtatgttgccagtcggcatgttcattattttgggcttcaatcacttttgcaattttcttgataagagttaattgactttttcattatttattatagagtatatatatagacgtatatctgtatccatatattttgaaaaatgctgtatcccggtatcttcgtatccagtaacgtaacacgccagtactttcacacacataccatactcatacgtacccacgcctacatggaagtatccctatcacacatataaagagaataaaggcctgtagtttgtacatgcactttctcacagtctcaaaacaaattaaattacatgctgctactaaaaatcatttttagaaaggaagtcgctggtatcaatcatcatatgaagatgttattggaacaagtctagcaacgtttcttgtaaccgaaaagtcattagctcctcccagagtctcagtctacacagcaatttgcagatgcatttaatttgcatgtccatgtgcattgacatactatatcggttaggtaattgtattactgtagcgtgcaagtcaggacaatattcttccttcctcctttattttctttcttttgaaacgaagcatgagttagcgattatactgacagattacttatacacacgaaattgcaagttaggatgtattttaacacttgccctatacctatcaaagttgaagattattactctctccgtttcaaaatgtttgacaccattgactttttagcacatgtttgaccgttcgtcttattaaaaaaaattgtgaaatatgtaaaactatatgtgtgcatgaaagtatatttaataatgaatcaaatgatataaaatgaataaataattatctaaattttttgaataagacaaatggttaaatatgggctaaaaagtcaacggtgttcaaacattttgaaacggagggagtactaaatacagcagatgacatgtgaatgattgcataattgagcaccagcaaatgttgattttgcatctgttaagtaatcagatggattcatcagctaagaaaaagtaattacatggacaattaattcatacttgtcacttgcgcatataattacgccgtatatatcctaaaactttggtgcatgaattttgatggagcaaagctctgaccagaggatcgatccaattggtgctaatctaaacatgacacaccgacagtaaacacaccatttgcctaaaagtagtgcaatacgtacctcaagagattggaccatgcttatcaagttgaataaataaataaataacctgcattatttcctgttatcatttcttttttcttaggacactccaaatctttgttctagcaacaggaggcaccgaaattaattgtgattacctaatagaagcactagtgatatactggttgagtcgtaggtgtaatattgttctaccctcggatacaaaatctgccacggggtaggggaatttgagtccctccagaacccacgctacatccacctatgtttatctgtgtcttatgtataatcagggaaaaaattgagtcttatgtcccaaactaccttttttagcaattgacctacgggagtggtttaggtccactaaaaagatgattttgtttaggagcaatgcactatattagtctcaatttgagacattgccaaaacgatgaaattctttaaagatctctatgtccttagaatataacaacttttagagttaatttttttttcaactatagcaacatataatacttgtaaaagatgacctttatcatttaaactatccagttgttcttttataagaactagcactcctactctcgcgacgccctccccatgggcggcttgggaggcgatgacctagccgccccctctccccctccttcctcttccgcctcgctgtcgcccgagcggttaccggcaaagccgtgcggccgcaaggacgatgatggcggggcctctcaccgaccttgcgttcgggcggccaggggagccgcccatggcggcggcggcccgcgctgcttcggccggatctggcggggtggcggctggcgctggcggcggggacggcaatggcaatggccacggggatggtgacaac

SEQ ID NO: 38082 - DNA, 528 bp, Oryza sativa
aaacatgcctgcacgaatgcgcaggctactttcttgattataatggggaaacatgttaactgattcaacccaccgactaggatccaccaagcactacagacaacttacgttaagtatggattgatgatttggcatggcccctttttttttttgctctggatcataaaagctgagagtttgaatttgaaccttagaaaattgtgacttagcaaatttatctttctgtcattggctccctacttaatcatctctcagttttgacttaaaattactgttgctgtagcaatttgtattcagtatgacgtaaatattatgattcattttgaaaatgatgagaatagcatgagtttgtttgtgctagaaaacttttcgggtatatcaaatatctcttggagctcatgccttatactacgtatgccctggcaatctggtatcatgcattgatctaccaagccaacagcctgccagtgccccgttcgtatgaggaccctaattaaagccctatgtcccaatgggtgtgttgaaaaa

SEQ ID NO: 38083 - DNA, 578 bp, Oryza sativa
tagataaatgaacttacgtcaaaaccttcttaaaagctaactaaactaataaattatatatagaagttttttcgtgggatcaaaagtcgagcaaagtgtgactatgtgactagttttaattattataggcaaaaactagtagcatactaaacatttattgatataaaaattagcttcaatccaaacaagctcgtatatagtttcttttttcttttacatgaaaagacatcatcatcaatacaatagtaagctagaccagtacagattaaataggtggaagcagaaagtgctcgaggacagttcgcgttcgcaccatgagcatcttggccctccgtcgacggcgctcataagccacggttactataggagtgatcactacgcagggccggccccaaccacggcgaacggtccactcatgtagtcgttttcgaggaagaaaaggccagccacgcataagaccagcacgccgacgacgaaccagaacgccacacaagcgacggacagctgggtcgacccgtcgagctgcaggttccaatggatctcggcgatggacgccgcgatcctgtcgacgtcgcgct

SEQ ID NO: 38084 - DNA, 515 bp, Oryza sativa
acaaggagacaatgcaacagcaagcgcaggaccctagctacacaggttcaataaaaagcaacttcattgattccttttaacggactcctaaccacttgcgtgcttttgaattcatgaattcggttcaaagtggataagtcatcatagacctcaagagaaccttaagcaacatatctcctaaaactcaaaacacaagaatccgcaagctccccatcatcttagcaccttagtgcactccataaaatacaagatcaaacactacgcatggttcatattcctcagacctcaatgaaagacttgcatgactatagccttaaatccgaaaagttaaacaaaagcactacacgaccaactcaaacaatttcctagcaaatagatgatcaacaaatcacgaacaacgcccgttccagctcaaaacaggagctgctagtagagcagcaccgtcttcaaccatccagattgataactcgaacacactctcgatccgaaactatcccttttggcaaacatcacac

SEQ ID NO: 38085 - DNA, 1006 bp, Oryza sativa
  unsure (1)..(1006): unsure at all n locations
ttaagtatacaaacacacatttaaagtattaaacgtagactattcagcatgtaaactgcgagacgaatttattaaacctaattaattcgtcattagcaaatgtttactatagcattacattatcaaatcatggcgtaattaggctcaaaagattcgtctcgcaatttacatgcaaactgtgcaattggttttttttccgttcacatttaatgctctatgtatgtgtccaaatatttgatctgataaaatttttgaaagtttgaagggaactaaacactgccggagaataagcccagcagcaattactgactgactgacagatgccttccgttttttcagaggataagaatcananaaatttttcagcgtaaagcccacttcttcagaatatttttttctccttgttcatgttcttctcgtggtactcaactggggctatttcagcaccagccaaagcaagattatggacaccatgatgggagccaacaagagaggagaaagggaggagatgccttcctacttgtcattatgacagtattattaagcttcaaatcttaacgctaacaaatattacacacaaataagtgatcttttaataaaaaaaataagactagtaatgtgtgtgtaatatttgttggtggtggatggtgaggtggtaggagcggcgacgaagccatagagattgatgctggtgggagcgagggaagcgtgggttaggcgggatgggagaactgcgtcgtggctgggttagagaagaaaagagagggggaggcggccagttagatgggcctcgtcgatgcagttgacggctttctactagccagccagcatgtcacggttgggcgggggagggtggcgccggagagcttgagctcccgtgcgggcgcgagcgggaggagaacaaataggagatgatattgtttactctctccgtccttaaaaaaagacaaaccctggtttccgtgtccaacgtttgaccgtccgtcttatttgaaaaaattatgaa

SEQ ID NO: 38086 - DNA, 1616 bp, Oryza sativa
tattacccgttcaaaatttcgtaaggttgaaaaatgacaataaaataaccatacacttggttgtttctaaatcccctgctcacattacatacatgcattgatgtgatccaacagggatgtgattatgggtctttgcgcgtaatagtggttgtgtcttacttctccgttccacaatacttgtctttatagcattaaaaaattgttttaaaatagttgtcactttgaagtactacttgtcacatcaatcactttcaattcaaatctctccattctatccccagccaccattccacatccaattatactttattaattaagaggtattatggtctttttttttcaaatctcagtatatgctaaacaatttagaatgacatgtattttatgacagaggtagtatatattaagatagagagagagtatatatcccaaatgaaattttctttttaaacctttctttcttaagaaaagctttatcctaggactcgcttcatcccaaaacatattaacctactacatcagttcaaaagtataacatcttttaacattcaggatttgtcccaaaatataataacttctctaccaatattttattaccaaccaatcaaaactcttcacccatttacttttgctatctacatccacttctcaaccaatgacaacctctcactatttaattctacatactttcttaataaccgtgtctaactctaaaactacttatattctgggacggagacaatagtattgaatgatacatattaggttgtgtttagttccacatcaaaattagaagtttgaagaaattggaacgatgtgacggaaaaattagaagtttaaagaaaaaaagttggaatctaaacagggccttactatgaatctagatatgaggccaatccaaaattgtacaaatatgtctcattcgattctgggttgctatattctgagatggagctagtggtatatactacctccattctaacatacagcaacttagaatggatcttatactcagggtatcaaatctcattatgtttaacatatagtcgtggcatatgtttaattctatcttaagttactgctctctcaattttaaaatataaggattttggttgaatgagacacttatattttggaacgaagggagtatatggccctgttcgagaacccaacagattgttgataaagttttggatttttatggcacgcttttcaaactgctaaatgatacgtttcgtgcgacaaattttctatatgaaagctgctctaaaataccagattaatcaattttaaagtttgtaataattaaaactcaatcaatcataagttattatcacatcgttcatctccatcttttatcttccgtagattcaaacagaacctacgttagaagtaagatataagaaaactaaaataattggagctactaataaatcctgtcgtagcctttggccgtgtggctcgattgagccagacagcgcgaccgcccacgggaacgggacggcctggtcgggtcgccccggccgcctctccctccctccgatctcgcaaagccccggtgagtgacgacggcgcaaggaaggagggaggacgcctggcgcccctcccgggcccac

SEQ ID NO: 38087 - DNA, 2393 bp, Oryza sativa
ttgatggcgcaatgcggcatgtcaccatctttcttttgaacgggtacgtgattgatatatgggtgtcgctatcgagcatgcagactcccttttgtcattttccatttgtgcttgcatcctttggttttgggcttttggccgtggatttcgtgaaaaaacaggatataagattatcctgttgattagttaggcctttaatttgaggcagatgatcccaatgctggcgatcagggaattggagtctgatgatggaatcaaccctgtatatcatttgtttttccttttgagatagagtaattctgaatcgtttcttctttgttgccatgaactttatcttgtgtctagttgaaacgagttaattatgggtgtttttaataatcacgcaatctagtccctttttgaaaagaaagaaaatatgtgtatttggttcctttaagataaggataatgcatgtaatacacgttgccttgacatttacttctggcattgagatttgtaaaacgtactacaccatattacaaactatttacatggttgatctcttcacacaatcacaaaggaagtctcaaccttgacaataaccgtgtatattgataaatatttttttttggcaagtcccctcttttgtcaatcagtttataaagtgttgccgaaatttaaaatttaaaatttaattttggatatttttcatcttagtttattttataatattggcttttaaattgttgaagatatagatataaaagttttaaatattttttcattgctaacaagtcgtttcacggcttattagctctaggccaaacaatgcacctgttgataaagcaagcttgaccatgatcatttggctgtagcttctaatgaagcagagattttttttccccttatcgtaaatgaaatgtgcattttggcatattaatttctgctgatcagaataagcattacatatgctgaacatggtaatcccacagcaatcaatgaagtgatcaacaagcatcatgcatggctttagttttgcagtcaacatccttagtggttaagatataattagaaattaattaaaagcacgcagtaagtgaggttccttttgttataaagaagaaaaggtagtacgtagtggctaaggttccatccacattgatgattacgagtatttgctactactagtatatcttggtctctatctgatgtgatatgtaacattatatatactcctaattaatcgtgggaataaaactttgggcaaacaaaattgtactaatggcttagcaacctactcctctcgttaattaattaagtcgctatcgcctttcctttgagaggtgttagggtccatcaagttgcatgtatttgttttaaaaagtactacctccgtcccaaaataattttaattctagattgtttagcatatattaaggtttaaatagaaagactgtggtgccccctccctaaatggtgtgcatgtcagagtggaaagatggttgagggtaaattagagagaaatttgaataagagatgattgatggggaaattagactctagagtaacaattattttgggacaaattttgaattctagaaatacaaattttgggactgaggtagtacatatcatttgtttattttttttaccgagtttcataattcaggccctcagcgattgctcatattccctaattataagccaaagcagattattagagaataaaaaataatttatagataaaccttatatatatattcttcacgatttagaagctaatgctaaaaaaaccacattaaaatattttaaaaataatttcgaaattaagttaaaaaattgaattgttagcttttgctttatcttgttagggcaactaatgggactctcaaatctcaacatctcaattagtcatgtttctctagaagccaaacccgtctaacactacaattcaaaagttggtgatgggctgcttttggattacggtgactatacaaggttcagacaaaaagggttgacatgaagacaaaatgtcataaattatattgtctggttcaaaaatgaaaaaacaaacaaagaaagactagctatattgtgtccaacctttcttgaaaaacgaaagatattatcgtaatatatcccttacatttaaggacttattgttgactaatctatagcatatatttcacctctcattgagaaaggatacctcttggacaagtaaagcatattaagtccgtaagtaaacactttggctacgatgatacatcatatatattaaggccctgattcagatttctgatgatgagtggattattgcctcaaactatctacttgattatatagattaaatattgtattaaataaatttaataaatagattaaaataaacgatctaggcaatataatagata

SEQ ID NO: 38088 - DNA, 1840 bp, Oryza sativa
aaccgaggttaagcatgcttggcctggagcattttgggatgggtgaccgactgggaaatacttcccgggtgacgttacaaaccaaggttaagcgtgcttggtctggagcattttgggatgggtgaccgaccgggaaatacttcccgggtgctggcctatgagggcagtctctgacctattaaagctgccagatgtaagtgggccccggcctggtagaggtgggacgttacaatggatctggagacctcgacggcggcccgtggctaaatcgggcgaccttgatgtagatcaacgccgtcaacggagggcttcgatgaggctattgcgagagtgaggaggatgcagcgggaggtatgaggggagctaggaggccgaggctcaacaatgagggggttggggagttcttgtccttgctgggcacttcagatctgaaggcgacatggaggaagctgcagccggcaatggcatggaccaggcgatagatggccgttcccttctccggcccctccttctcattgcccgtggttgtccacctcactccgagcaatggaggcaattgctgagaccctagcgagctccgtgcggcatggtagtcccctcttcttcccttgccatgcttgtagtctatccccaactccatctgcgctttcttccattaccgccacttgccgattaaagcttcgggccggacgggtggggggccggggggaagggttggagaccacgcgagggcgtgggggcacaacgcgccaatgcacttgcgaaccatatcctccgcacgtgagaggcttcgtataacatggcttgatgaagtgtgtgcatcctctggagggtatgctccccctagtagaggcgtgacagaggcagatgtgacgctacgacaccgtcatggtgagttggttccactcgtcatgtcggtgcattgttcatgccataaggtcgtcttgtatcacaaggttccctctagtagaggcatcacagaggcagatgtgacgttgcgacaccgacgtggtgagttagatccattcgtcatgtcggtgcattgttcatgccatatggtcgtcttgtaccacaaagtgggcctagtttttatataatagcacttgctgtagtgtacagatggtaaaggagtatgttggatcccactaaataaaaaatatctctccttaattaccccttcccttctgtgcactttttctttcaacccccttcactatctcttcttcttctctcatagtagcacaatggcgactatctagtgacgacggtggcattggtggggctctaacgggtggacaccgggaagcggtgacactggctggtgaatatggagacgatgccatcttgcagattcgacgacggcggtagctcgcgtgaatggatccacaatgatgcttgtggtggtgctcgcaaatggctctagtagcactagcgggcgactgtggcggttctagccggcagatccaaaggtggctgcgacgctcgagggcgcgtacggattcggcagtagcaactgcagtggcactcaagggcacgcttgatttatttgattttttttaaaaaaaatcatgtagaaaatattttattttcaagaagacacaatgttgaacagctcggaaagcatgttcacataagacgatgaagttgcaaaattctaactcactaccgaacaggccctaatagtacactactatggctatttcattaaaatttcccgtggaattcttcccttacaaacgaggccattccttcagaaaggtggaggtaaagatatattggtcgtttctgcagacagaaaatagcatatttgtccaaattgacacgatactagctagattca

SEQ ID NO: 38089 - DNA, 551 bp, Oryza sativa
cacaatgtcacccctacttccccccaccaaacgtccccaccccttcccattgccatcgagactcgagagaggagatcgtggcggtacacctactcgacaacgaccactaccacccgcttcccttctcggctttggccaccatcttcaatcccttccattccatggctctggctaccactacccctttctcggcatcaccaagatctggcagcgtgagctcaatggtggctcggaattggcatcctcgaacgacaaggcggtttgaagtagagctgcagcggtgaggcagcctgaggcgaatctagctgcggcaacaacagtggctagaggatggatgtgacatcccgacccagggcttaataggattaatagaatactcatatcaacaagttgcaacttcttttccggaaagcgatctccaaagaactctgagcttaagcgtgcttggcccagaacaatatgggatgagtgaagtgtgtagaaaaaacttgtgttgctctgtgagggcagcctgtgacctattaaagctgccagatgtaaatatccctggc

SEQ ID NO: 38090 - DNA, 597 bp, Oryza sativa
cccccaaatctgcaaactgtgtagtatgattttccacgattttatttctgttgatccacaaacaaagaaattgccattctttgcggttagtatttttaactactgttatcatttctactgcttgcttccaagttggatgtttggctctccttgagaaccttttgcattggatgcgtcccagctgcaagtagtccctcttaacttatttcttttgaagaaagacctctttaacttatttctctttgaacttagtcttttacccagcgggctcacatattagtgactcaaagttagaaataaataagttagaggaccctctcttccttgtagcagaggtttgttgcagacgaggttgaatggaacaggagaacaacggagacgaagagatgcaacgcacgcaccagctactagactcgcttccggtgctttactagacttgcttgtagcattgtacattttgtgtgtgttatttttatctaaaaaaaaatctcacttatatatacaagtttaagtaccattttgaacatgggaatctgaaactgtttggaatgaaggaattttcaagaaatttacctgcagaatttatatcatttgtca

SEQ ID NO: 38091 - DNA, 509 bp, Oryza sativa
attcgagctcggtacccgttcaggaaagaacttcttctacatatgtgtagaatgaaggagcctctcaagcaattagtttttgattggttacaaactatgtaattattttgtgggttcctgcttctccttgtaagatgtaaatattttccaatttttataaaagctatattgttgggctaatacctggcagtaatttatgtcaagaaaaaaatgaatgattttacaaagtttagggggttagatatatccggttttaaagtttagggtgctagacggacttccatccaaagtttaagggagtatttggattttttcctagaaagaaagtatttttttctcatcaattatggatattagtcattggccacatggttggttagacagatggactctcatagtatttggtgatagcatatcctcaaagccacttatatgctagtgagaaacttaggtgaacataatataaggcatcaaatttctaaggcatatggcatccttcaataccttca

SEQ ID NO: 38092 - DNA, 522 bp, Oryza sativa
tcatcatccttcctccctttgccatagccactcttgcaaagaaagtgcttgaatctcatgacaataaaagccatctctttatcttcactttcttcacaacttgactcttcttcttgttttgccttcaaagcaacttcttgatttttgatcatggcggcattcttcactatttgcctcatttcacgagcttcctcttcttgcatctcatgagacacaattcttccaagaatgtcacttggggtgagtctcttgaagtctttcctttcccgtatcattgatacaagagtaggatttcttggaccaaatgcacggagaagtctcttgaccacaaagtgatttgtcatgtcctcactcccaagtcctttaatcttgttgacaaggatcatcatcctatcatatatctcttgtggtgtctccttgtcatccatcacaaatcttccaagccttccttccaataattcaatcttggcctcacgaacggtgggtgatccctcatgagccaattgcaaagcatcccatatc

SEQ ID NO: 38093 - DNA, 906 bp, Oryza sativa
atggatggatacatgccctttatcaaagtcatacaactcaatcagatctacacacattataattgaaaatattttcatttcacaaaatttacatgttataaagtgagatatattttgaaaaatgaaattttgaattcttcaaacaacatcggatgaagatattttctatgtaaaagttataaaacacgatgagatctataactatttagttgataatattttcatttgaagtcatttagggcgttaaatatatgttaaatgattcagacaagcatagacaaaataataacattgggttagtagtcaatatgtgttgagtaggtgagttggtaagggagctctatatggaggttgaggtcttgagttcaaatctcacttgtagcatacaagttatattgtgtgaaaaattgagaatttataggtagtgatgtgtaaccatgtataggatggctagtaaaattcaaaatatttttttgaggttttttgttgcgtttaaaattcaaaaattgtatttcttgctttgccatcagtgacgggtcgtaagttacaacccgtcagagatgagtcatcagtgacggtcaggtagttacggcacgtcactgatgactcatctgtgacgggtgacaagttttaacccgtcagagatgatttatataccggtcagagatgggttatctgttacgggtgtttcatccgtcacaggtgattttgtcatcagtgaccactaatcactgaccaagaccaaacccgtcaaaggtgagggtttgggcccgtcagagataacctggtccggcgtagtgaagaaaactactaaattaaattttaagattcgtattctggataaccatcagcgaacaataggatgacataggttcagttcgttggtaagcccctcgcgccagatat

SEQ ID NO: 38094 - DNA, 646 bp, Oryza sativa
  unsure (1)..(646): unsure at all n locations
tatgcgtatgtgactctgtatatgcatgcaaaaaatatgactgaattatccttctaattgaaatccttccatgacttgataatggcaacttggcaatctaccctatagttcaacaaatactttcactcattctttcattctttcattcatcgctcaacggtctagattatccctgtgaaatccaatgctccagattcaccctccccacaaacgagtgcccccttcccaccccaaccgcgcccaaaccgtgatcgctcctccccagccctaatctctctcttctccctctcacgccgtcacgcgccgncagctatctttaccatcacaccgcctcgccacgattgacgtcgccgctgaccccagcttcccgtagaacgctaaaccctaacctcttctcttttcccgccgctcgaggtcgcgcgctcatcgctgctgctcgtcacccggagtgagcgatgcggtcaccggagatgagcacaaccgctggggcaccacgctttctcgatcggaggcccacaccatggaggagggtgcgggagagaccctgtcacaccctggtgatccgggttcttgctactagatcaagatgcaagcccatttttttcgaaatctgcatgtaatcctaagggtggaagaaaagcactgt

SEQ ID NO: 38095 - DNA, 859 bp, Oryza sativa
gcttgcccttgatcctctcgacctcctcggccatggaagatttcttggcgcgtcggagctcctgctcgtcgcagagccgaaacacgtcctcgaacggaatgtcgcggcccgcgagctccatggtggcgaaggcgatggcctcgtcgagctgttcggctcccatcgagcgaaccatctccctcaccgccgccgccattgcctctccgccggccatggcaaagcacgcgagatcgctcagattggagcaatgcagcttttggtggaattgggaatggttggcgccaaatttatagggaggaagaattgtctcttcttctccgattcgaattcatggcgaggaccggactcggactccgactccgattcggattacgctggaaacacgcacgcagtcgcgtccatgagttcgaaatcgaatcggagaaggagtacaagtatttcccccgataaatttggcgccaattccttctccgcgctcatccaagaaacagagacacgagtggaagcagagcttttgcttggaatcgatctttctttcgatctcgcttctcgcatcgcgttcgggttgctgccatccatggcgggcgacggcgaggcgatcccggaggcgtggaaggagcttgttcgctccctgggaaccgagcagctcgtcggcgccatctacgtcgccctcgacgacttcaacgcgcgggagcgcgacacgatcccgcccgagctatggcggcggctcggcgaccgcagcgccgcctacaggaaccctttcgtgagcgatggaggatcgagctccggctccggctccggcgaggttgagaggatcaaggtcaagctcgtggccgtgggcggggaagacggcagcggc

SEQ ID NO: 38096 - DNA, 1051 bp, Oryza sativa
ataataatcagtatccaaatgtgttctatgagcaacgtaagaacagctagagagtggccaagtaaaattactacattgaatattataagcaactgcacctaatagaagtgtaatatagctaaaccagaacaaaaaggaatctggcaagccaaacttaccttataaccatacttcgggctatcatctgtactagcaagcccttggttgcgcagctgtgctgtagcattggcatccaagacaatggaattttccccagcctgcaaaaagaaatatacattataaaaaggaaaaaaaataggtagcaactaaattatttcttacaaaattaaacagaaccactgttatcgagtcgcccgactagtcatagataaagtcagtcaatctagtcgactagagaaccacgactcaaccaaatagaaagtcgtgcgattagtcatggttagtgataaaatcggtcatagattagtcgtagcaaatcaccaattcaccatgctaattggcttattgtgtatttgtgtttagtactttagttttatttcatcttgacttattttgctgctttgctactccatagtccatagtttatactgtatacattgcttagaacagtagtatatattgcatcccctgtagcatgaccaattcgtggactagttgtggacaagtcgtcgactagtcgtggactagtcgaccaagtcgacgagtcggtccaggggtaccttgactcgactttacaacttgacaaccatgagcagaacgctggcccaatataatgaaataccagcagcatatcacactatcagagatatcaaacggagaaaacgattcaggattaacttctacacttagtaagaataaaagacaaccttgaagcgtgcattcctagccttctgcctcgcttcttccattgcagcatcaaaaccctcccgatccacactcaagccatagtcaactcccatgacctatggaatatgaaataataagaaacagcataaatagaacattgaagctttatagatctttcaggtcagaaaaaggacagctaacctca

SEQ ID NO: 38097 - DNA, 656 bp, Oryza sativa
ctaaataatattataccatgggtaaaaaatttactactctctctgtcctaaatatagggattttggttgaaagtgacgtattctactactataaatctgaacagtgcacatgtcaagattcatagtactaggatacgtcccatccgtccaaaaatcatttatattttggaccgaagggagtagcgttctaagctggtagtaattttttacgaccatctaggaatggtgccgtatgatgtgggagtattcatgcaagtaaatttgttacttttgaatgagtagatgatggaggctgggagtaatggaaaactccacagagtaaattcgttacttttttgaaacgtgggagacactagaaaaatagaaaacttggaaagaaaaactagacggtaaatattttactaaaatgcgaaaacagaaaaattggagagaagaaaccgaaaaggaaaaggtggggtggtaaaaaagaggaaaaccggaaggagggagcgttgtgtggcgctcgaactaatatactgtgcgcagcacgtggatgagcgctaccgtcattttactccttaataacaattctctctttttgttactctttgtataagttttattttaagctgaaatttattagaccatggatggcacaattaccaaagttcaaaaat

SEQ ID NO: 38098 - DNA, 590 bp, Oryza sativa
atcatgttgctgtcggatctgtttgtgtgttcatgtcccgacgatgtcacattatacggatatcttcaccaagggtttgtctagtaccatcttcttagagttccgttccagtctcaatgttcggacacccgccgggccttctatccggtgcagtcccaccgagccaagggtcttacaacaatcgcaccgaactaccatctctaatccaccactggaacttctctttaatagaatgactggggtgagagggttagtatcttttgtattttggcatgcttcatctcttgctatctagccaatatctctcccgattctgtttctacataaataagttggttgagtggttaggaaaggacgtgcttatatatgtactctgcacactgagatcaatatattgcattgagtctatcttgctctcaagtctccttttcttccctgcaaaggatcccacagacccctagttctctctcccaccctagccaccaagcacaagctgcattatgggtcaacggcaacatcaagctatttcttgtgtagagaaagccctaggtgaactcctcgtaccacaagtttcaagcattcaattttta

SEQ ID NO: 38099 - DNA, 577 bp, Oryza sativa
tatagggcgaattcgagctcggtaccctcttgcgttttcgtccccgctttcacgcaaaaaatctggattggagttaatagccctcaggcatctccaccttataagctgctgctccttagctattatactcggcgctatagtgttttcaggctgctacaatgtcacgagctgctactactgctgggctgcttgctgctgtgggctggactactagctagctttgctctcttttctttttatctctttcctttttgttttctctttttcccctaattatttgtggggtgttagcccctcacctcattggctaattttttgggtgggagaaaccctttgaaatccaaaaaaaaaacatcaagccacaacccaggacaaacatcaaggctgtggcataggtcgccaccaacctggcccaactagttcatagtatgtctatttcccttatctacccgggttgttgcttgtgcatagaaagaaatacaacattcagacaaaaaagaaagaaaaaaagaaacacctcgctaatatctcctatcactggcatgccacttgctaagttcaccatcaagcttgtggt

SEQ ID NO: 38100 - DNA, 730 bp, Oryza sativa
agataatcctttctaaatgttctataaacttggatattagggagtggtaatttcatcgctcgaatttttctttttattttattaatagtcttagattttgcattttttatgagcctcgttttgagggagattgaaatgcaatatttcaacgttgtgtatctatttaacagaaacttttaactttgtgtaaaactttgtgggaaaataaatcagaatttgtataatcttactaccacagtacgaaatacagaaaaactaagcaatgtaagtaacagcgttaacacaaaaatacctacagaatttcagcaaggttaaattacatgaaaggttcttctaccttgacattggtgaatgatgattgctgtctagttgatcaacccgcaagaggccggcaatggcggcttcagcaccagcctgtagggaagagccggcccaaagtagtacctcctgtgaggcagcctgaacaacaccatggcctgaacgtcgagagcaaacacccattcagagccatagtgtttgagaaagtcgaagccctcgccggcgtccatgatcctcgcgacgtcgtcatcggcgtccacacagagctccatcacaccgtcgacttcatgcctgggccgcgcctctgcgtcttctcgtcgcgctccggcgcgtggaccgtgcacccctactccgacgccggcaccgccatcatgcccatgctcggcgcattcagcgacgacatgcacaccaa

SEQ ID NO: 38101 - DNA, 716 bp, Oryza sativa
ccccctccccctttatgatctcccaaacacgaaaccctaggtaggcgacgagacgagacgacggacggagtggtggtggcgtgaatcgtggggcggtgagggttggaataaaaggacacagcacggcgggggtggggcgccggccgagagagggagggggcgtcacgcgcgtcacacgtgaccggcgaggcatctcgtggggtgtgtgggtgtgaccggatcggagacgtgccgccgttggatgagtttgaccgggtaaccggcgaaagcagcgttggctggcgaggaggaggtttgggataaagacagggcgcggcacggcacggcaacccaacccaccggggtccggagaccggacggggcggaatacggtggcggccgcgcgaaattacgcggctgcccacgctgcgctgcgcgcggtgtgtgtcaggcgggcgtgggattgcgggtgcgctgaggtggtcgccgttggtcggctttgcgttgcgtctcgtactctcgtctcgttcgttcggcttgggcgccgaaagaggaggagagagagagactgagacaccgaggagggagaaggccgcgaagagggggtgggtgggtgaggtggtgtgggccccaccggcgcgctggggaggcgggcaattattgttgtctccatcgagcggtggcgagacctgcccggaaaagtggacggggtgacggacggacggcagcggcgtgca

SEQ ID NO: 38102 - DNA, 2143 bp, Oryza sativa
taagaaagaaatctttatatttgagatggaaaagagttcatatgaatggcccagtgccgcacaagctgtcttagacttttgacagaatagtccttctttaaagcaaattttacaaataaccctaaaaacttatggcatatatggtccttatctcatcaccaggaatccttggcaatgaggttcaagatctcatcttggcgtcaactcatttaccgatctctgccacctacgaacttcctttttagtcctaccactctccaaatcctattgatttgctatcaaattttgcaaaaagggtatattaatgtatcataatttttttatttataaaaaaccttaatgcggtaacaggtcacttcctattttcccatccctaaattctattaatttgctatcgaattttgggggcaaaaaagctacaaatctacttatcaggatacactattcccctaatttgtcaaaagttcaaaaaattgacagcaaatcaactcgacatagggaggggagggagggactcatgttccctcttatactttttataaataaaaatagattagcagaaatgaatatggatacaatttctgaaaatttgacataaaattagtaggatttggaagaagatatgtcataggtagtggatgtccttgccaaaccgactgacgctgagggttactccctccgtccaaaaaaaacccaatcttgggtttgaatctggacatactatgtcaagatttaaatccaggattgggttttttttgggacggagggagtaggtgttagcgccaacttgtttcgtgcgccaatgaccttgatgccaagatagggggttgtatcttcaataaattttaggttatgtttggtattcatgattggaaactaatcacatgcacgtaaaacagaacggcttatttttatagaattaattaaatatcagctttaaaattttttaaaatagattaatttttctatatagtgtgaacaacaaggaagtaaaagttggtacatgtatatattataactcacccttagtatgactatttcctaaaatgtgtaaaatgtaaaaaattcggacatgttgtctgtgggggtgggggcaagccgcaagagtttgcagtttgtagtaccgaggcaccgtcgcaccgagcatattcacggaaagcaggaagatgcctggcgcccctgccattatctgcaatcattcttgcctctccattcctctgaacttatctgagtctgaccatttgttttacactgtgagaaagatcatcatcaaccgacttaccgtcggtaaccgcggttactggccttaccgtggggtacggtaatataaataccgtggtaacctctttaaattcaaataaattttaaaaataatttaaatttttgataaattttgtacggtttcgtacggtttttcgcggttactgcggttaccgtgcttaccgccggggcgcggtaaccccacccccggcggtttgggaaaccttgtcatcaaccactaaaagtaagaaatttttacattattacatactactccgtccgtctaaaaaaactcaacctagaagagaatatgacccaccctagaacaacgaatctagactattcttcgtccagattcgttgttctataaggggtcataggttgagtttttttcggacggagggagtacctccgactaaaatataaaaatctagtactacctccattccaaaatataataaccttattcaaatatgttgtattagaaaatatctcatctaattctaagttcttatattttagatccgagagagttgtatataggacacatcatgttacgatgaatttagacatgctttttattcaaatttgtagttctaggatgtatcacgtctaatactatattgttatattatgagatttatgagatggagggagtgctacgcagaaggacgatccctgctcagttcgggcatcaacagtgtgtataagggcataaacaatataagctcctcttttacgtggtcttaggtgccatgtaccataaggctactaatggcaataccacctttataatgcatgacataccacccttgcaatgcatggaagcttcaaatgaatcccatgcaatatttctatttatacccttctattttctattcaa

SEQ ID NO: 38103 - DNA, 818 bp, Oryza sativa
tccagattctgaatgtcgaggccgccgcactactttggtttatccacagtcctacatccatgcgtaccaccaatccaccatacgtccccttccccttacatctagacatctagtgatgccaatcgggtgtttaccctcttgcattttcgtactaattaacgaggcttccatggctaaatattattgggtcaaacaggccaagacccagtgcatcctcgaatgcatgttggactcaagacgagcattcatggaggaagtctaatggcgatacgtaagaaaggtaaaaaagaggtaagggtttgttaggttcaaagctaaattttggcctaacaaaattttggtagtactaaaaccttgcaattgttggcgctaccaagtaaaagcaacaagttttcctacacaagaatacggcacatcatcaaaaacgtattgaccgtcggataaaaagtttgaataaacaatggccattagataaaaaagtatatgcatttaaagaaaaacacaaatgagctaaatatatgaaaatttctggaggtttatagtgccacctcttaaactcatgaacaaagaaagagaggggcaattacgatgaaaaaacaggagccttctagtgattcatcatgcctagattcattttcctaagtggtatcaaattctcacatactatgttgtttttctttacggagggagtgtactctagtataatttagctaaatctataattggttagacaatttatacttactagataaatgaacttacgtcaaaaccttcttaaaagctaactaaactaataaattatatatagaagttttttt

SEQ ID NO: 38104 - DNA, 870 bp, Oryza sativa
  unsure (1)..(870): unsure at all n locations
ctttgatttgcgcaacacgattcactatancgcgaattcgagctcggtacccttaaaggagctagtatcaattgtacatctgcttgaacactagactgcactgagatcacttggcttgcattggctgattttaactgtgaagctcttttaccaagaagatgcctgaaagcagctagtgctcgaccacggtgcaaatgatgttccaccctcaagtctttctcctgaagagggtaataacgaagttgctagtttggggggaaagaactagaaaactataatagagcatgccaaaccaactcagagaaaagaaccccaacttcatggaatgaatgcactgttgtttttttaaaaaaaatgctagtgaagaaggttcaagctgtttgtctgctatatgtggccttatgctatttaaataagccaccttgaggccaacccacttggactaagcttgtggggtcttttggcttaagttcaagcacctttacactggctcctgctatgatgaaatagcatcccttgcattcttgattggtatcgcatataatagcacagatgcatgacaacatagcatgaagtggtcaaattcagactatagaacaataacatgggttaacagcacaaagacgaggcaagattccaaatgaccgaaacaacattttccaagaaggtatttttatatatgacgttagatgagcataccctaagggaagagtataggtctttctcaacacttttttgatggatgctttaaagacaaagcattagtttcttatacctcgcggaatgatatataatctgtgacactgtgagtaaatacttcttcggtgatgtgcatttgatagcagtgcgattccaaagggcctgatcatg

SEQ ID NO: 38105 - DNA, 571 bp, Oryza sativa
  unsure (1)..(571): unsure at all n locations
tttgatgacgaactcgatgacccnagcgcgaattcgagctcggtacccttgaggcacgaggagtaagatggtggtgcagaataatcagcggaagccaggatagttttgtgaatgcttggttcagttcagaacaggttgttcttggtgattcatctggcagcttaattaacagggataattttggctaatttggtgaattggttgtgtgtttttgtaggcttcttggcccaaggttgtgctgaagaaatggctcaacctcaagagcaaggattcggagttcaacgccgacgaggaagacgacgacgacgggagcgacgttgatgagcaaggtacatactgtttctgaaaaacaaaaaacctcttctcagatcaaattatccatctgaatttaagtgttcttgaggagaatttagttaccagtcaggagtcacattttttcctccttctgattggttcggtttcaagcagagaactgcggctgcgacgacggcgaggagcggcggcgggccgacggcgatctcgccggtgagtcttatgtctatgtgacggtttgatgacattcccatgtttg

SEQ ID NO: 38106 - DNA, 628 bp, Oryza sativa
ttttaaacttagttgaagtatatacttgttttaacttagtataagtatataacttcttttaattagtaccagtatatgctacatacttttcaattactagtatatactttttatgagtatatactgttcttaaacttaattagtagccgtacatatgtttttatagtaagttaattagtaggagtgcacactgtttttaaacttagtagcagtatataccttttttaacttagtaacagtacatacctatttttcaacttagtaccagtatatagtttttgatgaatatattttttgaacaaacataaagatgtttgataaggaaaaaaatcaaaacaacttataatatgaaatgaagggagtagtataggtattttttttccacgtaatagtacgtaccatttttgtcttatagaatagaacaatacgtaaatttagtatgtgtagggttgctaattccgaataaactgtatcagtcaatgattgataaagaagtgtcgtcaatcattggcaaagtatcgggttgctgcattctgaataaagctaaatgaatgaaatacgctagaagtgcactgaattctgaatagacaattctacatgcaggctaacaaatcggttagcatcgatg

SEQ ID NO: 38107 - DNA, 669 bp, Oryza sativa
tcccggttggtagcaccaaccggggctaaagatcaccgggattaccaaccgggactaaagttaagatctttagtcccggttggtgttaccaaccgggactaaagatcccgggggggcctgacaggtcctgacagcattcgaaccgggactaaagatgatctttagtcccggtttgtgtggaaccgggactaaagatgatctttagtcccggttggttacacaaaccgggactaaagatcaaatatgcccgttacccttttgaaccgggactaaagatcatctttagccccggtttttattgcattcgggactattgtgggaatcggccgaccgacgaaagatggtttctccaccagtgtatgtatgtatgcatatgtatatgtatatgtatatgcatggatggatgtatcaattttcatgaccgattataatcatgaaggagttactataaggtgttgattattttggttccgatgcgtgtgatgaaaagtttgagaagaatttgttttcctttggccttaattcctcgaagaaatataaaaatggcatccctttgttttcccacaccctattaacctttcgggtattacacacactttcaccttacaacttgcaaaaaaagcaacacagcccggctaaattatttccgagaggaaactggagagagag

SEQ ID NO: 38108 - DNA, 657 bp, Oryza sativa
  unsure (1)..(657): unsure at all n locations
cctacacggcagtgggtttcatctttgctgggaaagatctcattgctgtcacactgacttggttcttctacatgatgtgcaagcacccacatgtcgaggcgcggatcctccaagagctcaagggccttcaaagctccacctggcccggggacctccatgtcttcgagtgggacacgctccggtctgccatctacctccaagccgcactccttgagacactaaggtgacacatctttgatctccccattctcccccaatctcactaacaattaatctccctctcttcatcttctgacattctgaccaactattacattgcttgaattgtgttccaggctctttccccgcaaccccgttcgaggaaaaggaggcgctcgttgacgatgttctctcctaacggtaccaaggtgagccggaacacgaggatcatcttctcgctgtacgccatgggaggatagaagggatctggggcaaggactgcattggagttaaaccngaagcgggggtgtcaaaagcgggcgcctttgcacgagccagctacaagttctgtccttaacaacggcccaagagctgcctcgggaagaactcancttagcacatgagatcatcgttgcctcatattcacactttaagttgacttgttcagggcatgagtga

SEQ ID NO: 38109 - DNA, 658 bp, Oryza sativa
  unsure (1)..(658): unsure at all n locations
ccacttcacgcatagcaaatgttccccaggcacaagcttctagggtgtctgcaagaaattgaaatagtcttgtcatgtcatttcatcattttaatagacaataatataaggcttgtgcgagttcccggttaaattagaggctcgaaaaatttagaccaatatcncgaaaaagttaaaagttggtatgcgcagaaaagtttattgtgatgaaaaagctgaaagttttaagaaaaaagttggaatataaccaaaaacctaggtgaaactttatactccctcgttgatgtcactagctacttctgattatcctaaaataaatttaattttaagtaatcattatatcatatcagagtttataaaaatacatagagaataataaatatattaaaaataaataaaagggaaataattacattaagattcgataaagtgggagtattctagtctttatattttgtattggtatatatggaatgagtaaaaaatgaactttggtacatagagtaatttttttaattattacttcttccgtgttaaaatacttgttattgtaggcaattcagccttattaaatgatgtcaatatgattaggagtagtacttcagagtgacaaatattttagaacaaattttggaaaaaaaaaaagctactactttct

SEQ ID NO: 38110 - DNA, 803 bp, Oryza sativa
attcctgcagcccctcacagtacacgcacactcacctctacaaacacgcacatgcacattctatccctttgaacacctccgaaaaactgaagcagcatatcttgagatcatgggcatctcgacaggtacatcgcctaccactaaaagaataattagctgtaaatgtgagcacctttgtcaagtctactcgtggaggagttgtgcacatcattcaagctctgaaaatttgtatcacaaccgccgttgttctggtcaagaaagtaataacatatgttatgttactgtacactaaattccgttactgtcaattgtcatgggtgtctggagtagtaacagaaatgatgcgggatttacatcatccttgaagtatgaagtactcctacgttttaaaaagaaacctcacattctcatctgagttggcctttttgggacagagggagtaaagatttgtacgtcactggcgaaactaacatcaggatgaagccgcagtatcgaatccagcactgaattagatgagaacccccaacccaaaaaaaaggaggaaagggagaatgcaactctgcgctggtagatttctctcgcggcgatccctcccgactcatgccgtcgggaagcagggcaggaggatttcgctcttccaacggcggctcggttgacacccatgtatagatcaaaataaaccacgaaacccatatgttttaatctataattgaatttattggttaaccacttacactcttaaccatcagtacctaagtaaggaacccaagtgaaacaagtccagcagatcgctactattggtg

SEQ ID NO: 38111 - DNA, 722 bp, Oryza sativa
  unsure (1)..(722): unsure at all n locations
ttgcagctgatatagagggaccaggtgtgataacaggggatgattcttggttaaaccgcttgagcactggggtgagcacaaaccatgccttgagcatgattcatctcttcttatagcaaatggtcagatggagttgttactgtaaaagcactctgcaactgactcaggcactggggcaccttcttcagtgagagggaatatgatagttgtcataaccttactgtaacattctatctctagtgatgacaacactctagatgtggtatacatcattctgtctctctacacatgtatgtggaaattttggagtctgaaatgtattgagagatgagacacgtacttttaccatgcaattagactgcatactatcgagcaaccgtcataatgtgtgctccaatctatgttcaaagaccagacatgcatgctctgaatggagttgatttatcacaaatgagcatcactgtggatatatcagatgacctaaagctctgtcaaagcttaaaactgctgatagagcacataccatgccatctttgctattgtgcatacagaaaatgtgctaacaacagctagattaattctgctagagataatctagttgcggaagatatcaggtttgntcctnaactagggatagcgatcagatactgtctcgtatatactacatctctttcttgatgtcaagacagccatactataataaaagggacccatttatcaaa

SEQ ID NO: 38112 - DNA, 755 bp, Oryza sativa
tttgtgaaatgtgtaaaactatatgtatacataaaagatatttaacaataaatcaaatgataggaaaaaaattaataattacttaaattttttgaataagatgaatggtcaaatattttttaaaaagtcaacggtgtcaaacattttgggatggagggagtatatgctaagaatcataagctccttaattatggtatgctttgccaggagagttctaacgtgtatagcatatatatatatatatacatatatatatatatatatatatatatatatatatatatatatatatatacgacagtcactctatgtgtgaatctcccgcatatatatagcatctcatttatcttcagattgctcgtaatgaacttatgaactccaaactgcgtatgctaatttatatatgacaaaataaatattaactccgaattccgcggcttcgaagttgatccctactcttgtggttgcaatggcaactcacccccggccccaaaatttctcccctcgcgcacacattaaacgcaaaacacagtctcctccccctcaaacaactcaaacactccctccctatattcgcacctgtcgccaacaaataaacaaccccctctccccactcccctgcgtttttggcggcacgatctatagccctaggcccgttatctctctccccccccgaaactttccgcaaatctccccgatccttccttctttcctgtcaggccctccttttccacccccccccccttccggggccc

SEQ ID NO: 38113 - DNA, 765 bp, Oryza sativa
  unsure (1)..(765): unsure at all n locations
actcggggcccctttgttcgcaggataggaaaaacacatgaattgaaatagtatgtttctcaattcccatatgaatgaaaaaccataggaaatacaatgggagtaatttgatagtgccatgagaaaaataaaggaaagttcacaaagagatcacatctatcattatttttcctctgaaatgtgaagcacatgaatacaattctatgagaatttttctttctttcctatgaattaaagggacatgtaggaaaaaaaaatcatacaaatttgaatcagagtttttctccaaaacttacatgaaatgaggcattccataggaatttaatagggctccatagggtacattccttcgattcaaaggactatataggaaaaatcctataagaattaaatcctctaaaatttgtatgattttttttcaaattaaagggattttaaaaaattggttaccaaccagctgcttattataattttagtctccccaaacagggccaaagttttgctgacacctgngagatagtggtggtacttgaatgtacaatggccaatggnggatagctgcttcagaattagcaacgcaaacagataggtccgtgtccgctcacccaaaggatgataacatgaatcacaacttgtgttgacatatgctatcatatgtgcgatcgactttgcatccccacttgatagtagcttgcccntttacctttggccttccatggactggtaccgcgaattcttaatttaccggatttcttttggaatcaa

SEQ ID NO: 38114 - DNA, 737 bp, Oryza sativa
agatcaacaatgggattttttggtaattaaggttagcttttattttcctactccttggaaagaggtatctccttcaattttataaattcaatccgggggttgcacatcagttctgtttacagctcaagcaatgtatgcgtccacccatagagcgctaggggcacggccccctgaagggttaatctggcgtcagcggctccccccctaaaaacgcgtcgtccgcttaatgacagaggcgccggcaagttcgtcgagctcgagactccggcataattcggcggcatcggctcgagattcagccctagccagtggcggcgaacatatgtggccaagaatgacagatcggccaataacgtttaagtgttggttatgaagccgagtgcgcgccgggaataaagatacccctggatctttactcccggatgttgagaagaaccgggactaaagatatcaagatatctttagtcccggttattctcaacaaccgggagtaaagatccaggggtatatatattcccggtgcgccctcgtcttcttcaccaacacttaaacgttttcggccgatcgatctctctcggcctctctccttcgccgccactgcctagggcaaatccccgcgccgacgccgccgtatctcgccgtcgtctcgagctcgtcgtcctcgccgccgcctccgcctcctccgctgccgccgcatctctggggtgagagccgccgccgccagatctcccttcatg

SEQ ID NO: 38115 - DNA, 739 bp, Oryza sativa
atagcctataaattttcacatttatgcgtggcatatagcagctcatgctccatattgaaagacgatggagctaatgcctatattcatgctgaaaaaatcatgtgtattttatgaggagactagtgtccatttagagctacactttagaagtggttgaaattcggtgtgaccaaataatgtatatgaaaagaggagactctagtatgtattacacatgagtagttacgtaaagtgattggctagtttaaaattatggtgcgcgtgtcatatctttcaatgatattatgcgagaacatctatgctattatatcatagaaaatgtgatgatgcttgctgcccaatcagcacgggccaccgtgctagataaacgtgcattaacagtcggatgtaaagataagactgtacgtactagtgcactgaactcctatccatactactatgatatttcatgagaccgctcacgctctctagtccatttaatcatgattaaagaactctaacccgtctcgctctcttggataggtatgagctgaaaccgatcgaatattgagatctacttctagagctactaacttttgcttaataccccaccggttactgaaaactcgtctacgttatattactaggatacgtacaacatgcgctatatgtaagttattatcaccagccttactaactaacttcactatgaatacggtgctaacctaaccactgtactgcaatagtagtataatattcc

SEQ ID NO: 38116 - DNA, 575 bp, Oryza sativa
cactggctcagggtacggagctgcgactcgctataggggaattcgagctcggtacccattgataatatgataaatggggtcgctttatatataggatggactgacttgacatccaagaaactaatgttgaatataacggaaactaatctgatctctatctctagtttactaacaaacctcatatatttcccaactagataatctctagcagattaaaacaagctgttgttagcacattttctgtatgcacaaaagcgaagatggcatggtatgtgctcaatcagcagttttaagctttgacaaagcattaggtcatcagatatatccacagtgatgctcctttgtgataaatgaactcctttcaggccatgcactacttggctttggacctagattggatcacacattatgtcggttgtttgattgtatgcagactaattggatggtaaaagaacgtgtctcagacatcaatacatttcagaaaccaaaatttccagagagagagggagagagagagagagatatataccagagaaagagcgtcgtcatcacttgggataaaatgtttcagtgag

SEQ ID NO: 38117 - DNA, 540 bp, Oryza sativa
gttgatctcttcagtaacctaaatttcaagtccatactcttttagcagagactatggagccctatactttggggagtttcctctgctggagaaggatagtagtgaatgaagatgaattttagatgaaaaagtagcctgtttaatgaatcagttgctagcacacaaaaagatatttcataactaatagattgagcagcggttcgtatactgcctgaaagggaatatttattatttgcgttatatcctgccataagaagaccaatagaaacaatacttgaaatggcaattcattacagagcaccaatgctaagacctttcgactcctaactaaagaggtagccactgaagtatcacaagaacaaatatctaaatagaaagaaattgatgcttaagttgccgatttgaagtaacagcccaaatatttctcaatctaggtattgactcaagattattataatcctcatatgcagtagtacttttaattcttattgatatagttcataacctgccctatgactcgattcaacaaacctaggatat

SEQ ID NO: 38118 - DNA, 858 bp, Oryza sativa
tccttcaggttctcttccgtcacgtcggacggcgcccattggccttcgaagctttctttctcttccgtcatcgattttccccgaatgcactgatttgattcgagggatggcttgggaaaggtgaggaattgaggcggtggatcacgggaaggattttgattactttttgaaggtggatttgagtggaatggtgaacccttatttgccggcgcagctctgtactgtagcaaggagtggggaaaatggcgagagttccggcggggaagacgaagcgtcgtttggatctcgggttttcttgttaagggtatcggaggtgcgaatgggcctaggcctgaacagtacctcagcccaatacttttaacagcgtggcccattgtgttccttagggacttaggcattctttgcttcggcaatttatgtacacaatagtgttgcccaatgctgataaaatcctttttacgcggtcatataattctttggaattattgcgatgcaaattaaaaggtgcctgacagaaaggcgttatgctgttttgtacgcttttttaggctacaaaagctgtctgggttaacttggaatgacttgtttttatcatagtcatttccttggtatgatatatacctatttccattgtggtaaatagtcatagcctaggctattagacttatttgttaccataatttttataatatttggtgggtaatctttagagtttttattcggatgcctgtcaagtgtgttcattcgtgaacctttttagagtgtaaaccactcgggttctttttattatgactaaaaagcagtcggctagaatgcctctttaggcgtcgcgtatgcttttgtcatgtgatgcgcgat

SEQ ID NO: 38119 - DNA, 523 bp, Oryza sativa
tgcagccaaaagaatacgatttatgtcacaaaatgtcgagaagaaaagagaaaaaaaagaatacctgccaaatcacatcagcagctcttgcacttattacgaaaaacaatcaagaacctttgaaactgcgatctaacccatgcaaatcttctcccctgtgaaaaactagttttaaacgatcaataatgaagaggcacagatcaggcacacccaaaaaggagacaatctgaatctaatggaatccacacatataaaaaagaagaaatccatttaaatccaattattaccctgccattagtaatggatgatttagcacaatgataatgggtcaatcaggggtgtgaaatcggggaacaacacacaactgaatgcagtgagataaggcgagaggcatgaggaaggaaccaggcaatatgggagcgatccatataaggatgaaaccaatatgctattttagcttaaaaaataaaagcaatctcatatccaccgtgaaagaaggtccccaccaataacaaatagacaa

SEQ ID NO: 38120 - DNA, 628 bp, Oryza sativa
aactgatcaaactataagaaagtgcaacaaaaataatacagatttagaaatcaacaaaagaataaaatgtggataccacataacaagtaatatctacgcgaacagaaattattagacataataaaacaacctacaaaaaagatttcaaacagagaaagaaggtaatgaggagatgatgttgaaataggagattgaaaaattaatcagagtaaggcagcattttagccgatatcaacattaaggccctatctagtatggctccaactcctgaattcttttagaaattaatttcatatagtaaactaaagtagctttattaatccccttattttggtccaaaatatgaacacaaatgtttcaacctaataaccttaatctaccagcatctgtaactctaataattactgaagctagaaagaaaaaccaggcaagagaacattcaagtttgatttgtgctaaacaagaccaatgtgctagatcttttgcattgcccacatgttctctcttatcatattggtacaatttggttccaaaccaaatttttccttaccacaagtaccctattaaaatttttgcagtgataaagcttgtagtacatcacaccagactagccctaatagcacttggt

SEQ ID NO: 38121 - DNA, 746 bp, Oryza sativa
cggctttgatcagtagacgtaccatctcttcaggttggtctctgaccggcagcagtcgttcagccaggtgatgaaccgggtgacactgacgagctggatcaccagaaacgccctgtcaaaattgcgcatcatatgatccatcagttttacgtcgataacgagacccgattcagctgaacgtgctgaaaaacgtgtgttggttgcgtgtatgcatctctagttgatgcaagaggccggaagttatagtattttatattaaaaaagaaaatgtgcatgcggggcttaccctgctccgaaatgcgcgatcttccctgaaaatatgaaaattcagacgaacaccatgagcaaagaggaatcaagaacgggtgggtgagaggagctgaggagggtgacaatggcaacactgaccgtagagctggatgagaggcgaggggaggaagaaggggacgacggtgaagcccatccacagcacgatcttcgccggccaccactcggagtgccatgaattccggcgatcgtgcgtcttcctcgtcctcaccgtcgacaagaacatcacgaagaagaacagctggtgatcgccgtcgtcaaggacatcaaattcacaaaatgcaggaaaactcaattcatcccttaagatgataactcctcatttttgtatgtcacttaaaaagtcattgaaaatttgaaaaaaaattagtacgataaatcaatatgtgatgtcacttcacaaacatgtaaattcaaaa

SEQ ID NO: 38122 - DNA, 4733 bp, Oryza sativa
agaggagagagaggtttagagagagaaaggagaggagaaaagggagagtgagaggcagctataagcctataaacacacacgcggaggggagctagctcagctggtggggcccacgggtgcaagcttttttctttctttttttccttttttttctttttctttttgggtgtgtgtgcgcgtagcgtggggaggatgtgtcagtgggtggggtagggggttgcagtgagagagaggagagggcggtgggtcccccgcgattttcgtctccccacacgctcccgggggttcgcgaccgacagttgctgcgggcgcgacgcgtgtgtggttttgagtgtccgtttgtccagttcaaactgatggtggtagagttaaaaaaaaaaactactgtggtaaaaaaaagtgaacggctagaaaagtgaaaaagggtgttttaacacagaatattccctgttgattgtaatttgtggggatggagggaaatggagaacttcataacagggagatgttggtggcaacaactttcgggggttaattccatccatgccatcgtattttttttcagttttgaaacatgtgattgcaattcgcatattcgtacaatttcaatagcagtaaaagattttttttctaaaatgtattagcatatatatttttcctttaaaattatactccaaatgtattagtatgttattgtgaatgtgcccgatataaggcggaatagaaccccaaaagaaatgtgtagcattataacctaaaaatttgcttagaaatttttactctaaacttaattacttttttttcccactaatgttgtatctagaggaatatcaaagatatggaagtgaatgtaaaacttgatagttagttcatcgaatatcataaagaaataaacagagggagttcggcattatctcaaataatcacggtgcccaggcaaaaaagaaaaaagaaaactcaccggtatgaaccacggagagcatctgaaatagagtaccgcaggctacctttgaagtaaagcaacacaaaatgagtagtacacaacaaaagttaaagtggaaaaaaatatggtctttagtagttaccaaaaagcttattataaaacataatagcttattaactaaaaataatttacgtgtaaaacttttatatatgtgttcttagcgacttaaaatcaaatcaatgctaaagaaactacgttaaatatcaactttataattaaattctaaaatttaaattatgggttttgttatttctattgcaaccgatcagactttttgagcctgttcagatgacaatattatcaaaattttaatatgatttcttatgtatttttaaatttaataacaaactaaacgcaaacatatttttaacaattttttaaaagaaaatagggttaaaaataacgtcaatctcaactgccccttattctaatacttcagtaacagtggatacagtctgtactaaaatggttgtgtactgtacactggactgtctgacataacgacactgttgctgctgctgtgctacattggtcaagaggagggaggggaattaagagaggtcacggggaatcataaactaagctactagtagtaataagatattgtatcacatgattaaactaacctatccctatatccattggatttgctcatgtgcatttgtttgacttgtacgtttgttctcttgtcttgaataaaaataactagaaatgaaaaaaatatagagagcatgggggagatggaagatggaacaagtgaaggtgtgctctaatattgatcattttaggcacctttagaacgcacggatatagaattttgatggtaaacaatggtttagaccctatttgagatagataaaaattaagattaggcaaaagaatgtgaaaccaaaaggccattatcgtatgcataattaagtattaattattataaatttgaaaataaaattatttgatattttagagtaatttgtgtatgaaacgtaccgtttaacagtttaaaaaatacgagtgctaagaaaatcaaggtagaatctacatcttaataaaaaagagaatgggaagttagtttggccagagaaacatgtttgatgagttatcaaaaccaaagtaaagaatataccttggtgggtgtttgtacagtgtaatatgtgaccaggaaaatagcaaatttactgcggataagcctcgagaaaaaaaacgaaatgtcaatttttactctctatgtcttaaaatataagtatttttagctattttactgaggtagtatgtttttacagagtaaaaagtaaatgtaggaaaataaaaattttaagtttaatttgtatatactccaactgataatccaacaatagctctgcttattattaattctccgtagtttggtaacgggcatcgacgcatcgtggcaattctggtgtcgggatagccctttgggtgtttgcgtcgttctcgctgggcccacaacgccgtgacggacagtgcaggggggcccacctacgcggtcggcgtcggatctttcctttcgtgcgctgcgactgcagtgcactgcgctgccactgtatgcgtggtgggccccacgagcggtttttccgctcgttggcttgactcggacaggcgacggtgcaaatgtaaaaatgttaattggaccggggaagtacttccctatgtaaaaaggggagagagatcctctgactttaagggcctgtttggtttccagggacttattttaagtccatgtcacattggatgtttagatactaatttggagtattaaacatacactaattacaaaacacattccatatccttggactaattcacgagacgaatcttttgagtctaattatatcatgattttgacgatgtgatgctacagtaaactttttataattatagattaattaggcttaaaaaattcgtctcgcggattagctctcatttatgaaattagtttttttattagtctatgtttaatactccaaattagcgtccaaacatccgatgtgacatgggctaaaaagttttagccccatctaaacaccccctaagtcagaggcacttggtggctgatatatgggcccatagataatgggtcccacatatcagtgtctatgtcacgctgtacagtaacgtcagagaaattgtttccatgaaaaggagttaattctcacgtaaaattttttaccttgttacatcgaatggtaagatacatatatagagtgctaaatatagacaggaaagagtaattacacagattgcgtgtaaattgtgagacgaatcttttaagactaattgctccatgatttgataatgtggtgctacagtaaccatttgctaatgatgtattaattaggattaataatttcgtctcgcagtttacaagcggaatatgtaatttattttgttattagtctatatttaatacttcaatgtgtctccgtatatccgatgtaacacgctaaacttttcacccctgaacaaaacggggctaaggatgggagtacgtatttactctgctttttgaaaaaaaaaatctatagagatgttgtttgaaagatttgaataaattcatttttaagttttataattattaatattttattaattatgtgctaatgaattttcctgttcacgtgcgttgaaaaattttctcttctacttaagggatagaactcagcctaagaagcacattcgagagaaggatgacatatcttatgataaaaaaaaaatcattgccgactattgcagatgcatatttacacacatgtaacacatataagctaccactataaacattttttaagaatagtacggtatttgttaagattgataaagttatcattgagagtcgcctatcactcaaagaaatagttgtagagaagctcatctcaaaaacttaaatctaagtggtcaggttccaccataaaagatctaaccagttgagcaatgcttattttacaaaaaaaaaattgaattatagtaatgtttaaaatttttttctaaaaaaaatttagttgcttactcctatatatcttgtcatgtccgtatattgagaagcaccaaattagttttatacttttaatagcttttacctatccacctaataataataatactctttattggtgaggggtagaattcttttccacctaacttttttctttgaaatggctacaatcaaagttttttttggacataatcaattgcgcaattatagggagcagtagttggtggtgattaaaatagccagttggatttgggatgtccaattaagctgctggtttcattggtctgttatagatagccgctccacgtgagctccagtggacgtaccgtatgctaaatcgtgctaatgcatggccaattgaccatattgattcgattcatcaattgactcatcactagtagtaatagcttaatctagatagagctaagagcaggtaaatagcaggctataagccagctgcaaacatatactaaggagataaatgaggagagagaagggcagcgagctacagatttatagccagctgtagcacggactccaagacacaatgtatgcatgacaggtgggaccagatattaatagtgtagtatgtaactattgtatgaataagctattagattggttatagatgaattggagatagtagttggctacactattgaacttgctctaattacgtcatctcatttaagcttgctaatgagtaggcttaattaattagct

SEQ ID NO: 38123 - DNA, 577 bp, Oryza sativa
ttagttacaatctacataaaaaaatcaaaataaacgtcgactcaccaccaaaatatgatatttgcatagaaatgttattttgcaacgtgatgtataaatgatattgcaaaatgatatatcacttggcatttattataaacttaaaaaagtaaatgactggtgttcctacgaatatatgccattgcatcataaaatctattttttttccaattgtaattaacatagtaatgtaatataagccaatacatcataatatctaagtttatgagaatatatataacttttccaattgtcattaacatggtaatgtaatctgaccaagttgaccacggtaaagagctaattttgagatttgataatagcacttgacatgtgaaatcgaatagatctattgcaaatttgataatagctctagagcaactaactagcaacaattgctcacttaaatatacaaataaatgtaaaattaattttccagagtgaatgtcagatcctttgtccgagctatctttcgaaaggctttcaaaattatctccacagttttgtgccccgaagtgagttggagtattgatataca

SEQ ID NO: 38124 - DNA, 3355 bp, Oryza sativa
aatcgcttttgttgtccttaaacgattgtttcttagcaagtttggcagcaaactccaacagagccacttcttcctgatccgtcgatacatgtgtgcttgctgcctttgcttcacgattctatatatcaaaaacagagtcagtaaagaggcaatgcatacactttgttttcttttagcaggataaaacagtaaagtcgaaaaaaaggaacaaactttcttccccatcctcagctaactgggaacaattgaagaacaggatccgctgaagctctgactcgtttgatgaatctgtcacaattttacatacctggaaggcagaagaaagcactggaacccctagtgctaagtttactaaattggtgcacgtttattattctgtattgtatatttttcttgaatggcgcaggagagctgtgtgtcatttcattaagaagacaataaaaacaatgaacaagtaaccaaaaacaggactcttagcgccgcatactaagaaaatcaagtgtccactgcccaaaaaacacttaagcagctataggtagcatcctagtaagaagctgttgcagagccttagctccagccccaacaccacaacaaatgctcttccgtaactacagcttcaactctttggacacaaggactagcaccctcaaatattcattgttatcaacgattcaattcttagttttgttgaatttctcatattcatttggcttttgttgccccaaacccaaccaactgttgggatggatgctgactggcttatggttcagccgctctgatattacaatcatacatgtttaaacttgctgatcaggtcaactatgaaaaatgtacaatcaaatggcatatcattcctaatcaaattacctacatgaaaattttcttctgatataagagagaactataatttaatctatagtaaacatttaatctgtagaacctagttgcttcacatgtaaagcctgtgcaggaccaacctcctcgttggctagattttgtcttcagataacccactgtatgcatctcttattcctgatcactgtttgctgtgtcatctgctactctatctcattggctagttgagcataacactatgctactctctctttttgtttacttaagatcataccttgtcctcgtaggctcatacgctacatggctgttagttgtctcatttagttactgaacaccatgttactcttcattcagcaagcttttgatttaaagaattttctgatgctaaaataaaaaaaagaatttttaacttcttatatttcttatcggttcactaaagtcagtttgccaaataaagaatttgcaacagagagggtctcaagatttccaaacccacttccatttcagccttactccaagcacattgttgacggtcggtagcgatcagtttcgaccgtcaatattaccaaaatagaggagaactagttatgcttgcaatgcataaatatgttagaataataatattccactagtattaggttcactaaccttttgcggagaataaccataaagtggaggagaatcgacattgaatcagacgataaatcaatcggacgatgttgagaagtagacttatgtatgaatgggccaagaactcagaattgacacgatgaattaggccaaaattcacaagtctacgaaagagagcaatggaggaggccacctgctgtttttgggccaggttgggccgacgcaaggttcggtcgaaccattaggttcagccgaaccccccacaatgccgtttgatccaggtttctcctggacggctgagatgactccccaatgacggttggttggtattaccgacctttccaaccgtcacaaccgtcattctcaagctataaaaggagttctcatcatcacttcactcacacacctcaagcaagagctctctcatattctctcaagttagtttagtgttatcaagctagtggaataggaatagagtagaaatcaggagtccagaagtcttcggaagagttcgggtatggcttagtagctttccttttctcttttataagctttgtaataatattagaatattcttctttatacatttatggtattgaaatacttttggagtatatgaatgcctactttacattatgttcatgttattctgaatataccgctagcttatctgggagatgctttggcgcgggtataatgtttgcttatgcaattactctatgtcatgacgatgatattagagtagtatctggtagtttaggcatggtgtctagattatgagatatcattatttggggttatatgctgcggatgagaggtgggccgctgatggtgatagctcagtacgggtattcctccatgcgtgtatataatcctaagttaattccctggggagggtattcctccgtatttagccccggttgtatgatcatgacgggctgtcgtaaggaactcggcagtcaggggtggcttctcgaagtaccaggagggcatcggatagagggtattagctagtatgtcagatgactagaatgtatgtatactatgtatactagaagtatatgaatagattatgtttctcttttctttccacttagcttatataatttagtatgagaatgagtagcttaatgcttgtgtgtcactctactcttgaattatcttaacccctgtttaagatgtgattatcacaagtaatatataaattattagttaagttctctctacataatcttcctacgggttaaaataaatacggtacccttgtaatactctcggtgaaatgttacaatggtatatccgtgcgcttgcggatgattctgtaaccacaatataccaggagtatttctgcgccattgctggaaattatatttctaataatattgttaagaaataccaacacacatatgctacaatcactcagccactgatacgctaaaccctatcaatggccaaccacgcagcagaatcatcaccctatcaatgaccaatataaaatttgggaacctatacgctaaaccctagcaccccgagccagcgcggcagacacggtccggcgagcctaaactcggaaagattgaaaacatacctcgggttgcttgatgccggatttcgaagtgagcctgccgctccgtcgagccggttgcttcctcttcattttcgagtgacttgcttatgtattggggcgaattaactcaggcattggagagaaacaatggcgatttgacgcgcatagggaaccgcgattgagagtggagagaggagagaagaagagcgccggcggcggatgtaaaatgacagttgagccctgctcaacgcggcggtatgtccaccaaaggactttggcatatttggccatttggcactaaca

SEQ ID NO: 38125 - DNA, 634 bp, Oryza sativa
aggaaacattctgagactgaatctgaaatagatggaagagccaatgctcgtgctcccagaacggcctctgcttcaagagattctatccctaagaagactagaatcgtagaaagcatcaacaaaaatgttgaggtacatcttgcttacccattggaaggcattggctcaactgtcattttactgatagaccaatccgtgaattgatgtgtgagaatgcaaggggaagggatatatatatatatatatatatatatatatatatatatatatatatatatatatatatatatatatatgaaccaaggttcatatgcacccacctcgtatggctgacacatatgcacattgcactatggatgagtctagttcattgtgtactaatgcagctataatatatacctactccactctgttcctatacaaggctgcgtatgcatgcttgtttgcttggtacaagttgacttgcttctatgcttcccaaagccccccgcacctgcatgccacacctatattctgacaccaatgtcatgtcatcatcactacaagctaaaaatctcattcataaaatactttcggctctttttgttagctggcatgtctactgggtatatgatttgggggtatatctcttatt

SEQ ID NO: 38126 - DNA, 2654 bp, Oryza sativa
tggatcatgaatattcttgctgcttgctaggtcatgaatcctcgtgctactgtatttcattttcatctccaaaaacaattctactcttcattagtcattaccatgcttcgatcacacatcactaatctgctgcagtgctaagccagtttcacgagttttgtttgcattgtttgaatgaactagtagagtgtcatacaaagaggtcaaattctatgttatgttgttttttctgctcaaacactgttatattttattgacatccctatgtgctacaacattgagtgcctgctttatgatttgcaatttgttgtgtaatcatttatagatatggacagcgacactgaggttgaggccttctctaggatttgcaggcgtaagaacatcattcaatgcacttatgttttaatgtagctgaccatatgcagccccatttctaatagcatcttatatttcatatgtttcagtccaagatgttgatgaaggaagggctgaaggtccatacttcacgtaccttcatatgtttcccgtttcctatcagcgttgttgagattcttttttcataaataggaggtcatcctatgagtgcaactgcgactgcccctactgctgtgagccaggctgtgagtgcatcatgtatcatgtaagtgcatacagttggcatacattgctttatatactgcaatttctaatgaacttttgctttttttcagccaaggtcaccttaatgaactgtgccttccttcctgcaactgaagctaatgaactgtgtgtatagtactggtgtagaggactaatgaactgtgtgtagagtactggtgtagaggactaatgaactgttatgttttagcagaaccaagctaggatccttctatgaaactgtcccataaattgtgtttggacttggtgatatttacttttgttatatcttgttatgaacccaaaattttaccttcctggaacttgtgattttaccatcgacgaccacgtgattgtcggcgcgatctgggccgattcagcggcccagcagttggttgctgggctccaggcccaagcgtgagcagtggtcgcgtcgttcttgttagaaataatttagtgtgtactttatatgtaccgatatcaccaccaaagagttcacattatagggcaccaagaattcatatgagatattagcgttcatcttgctaattatatatcgaatttcttacatttgaatttatttagcccccttcatttactcttatacgaggagcaatcccgtcattagggggagatttaaccactaaaatgctaggaatgaatgtatacacattcgctctcttcgaatgagagactactgagtggtatattgcaccagtttgcttcagtccctatgtgctctggaacacgttttgctgttaagaacaaccttgatgtgtgaacgtaaagaactgcagcagcagcagcaaagaactggagcacaaaggaacttttatcattttttacgtaaagaacttggattcaacaagttcatcaaactgcagcagcagctcataatgacacaatacaagtcaaacaatcacacataatagaacatggcagtagcccttcaattcaagtctttaaatagataaaaaaaaagttccagcgggtagcaccatagcacacccggcagtcccaacagcccttcaacatcacagattcaagtcttcatctccatctccatgactccatgaaccagcagtcccagcagaacctgaagatggtttgttgtcaacccctggcccctgcccatatctcagttagggatgactcacctgcacacgctatacatcttaaagattaaagataatataggacttttttttagaaaaatcatgtaggactgttgtattctttctatcttcttaatttctaataatgtacattacctatgcagtgtgctgtttttaagttgttgcataatgaatgtcatagggagcactacacatcagtaggaagagcaggaagtcacctggagacaacaagctcccttgatagcaggaagagcaggaactcaacatcactggaaatctgggggtagcaattctggatttatgccctccactgcaggtaccttcactattccttttttccacaaaccaatgaggtgttttctcttgtcttcatagcttttcatagcaagaaaccctttcagagcagctgggtcctccaatgcaactgtaaatatataatgctcaatgtccttgcaaccatgttctgccaaacacttaagtgaagaacctaggtctttgggtgtcgtgtacttcctcttcttcgatacactcggtgcacctgtaccggtggcttcactagccgtgaataatgaagtgaataagccgtcatggccaatgagacgggcacccgagcatgtaaactgggatgcaagacaaaacttctcatcaacaatctataatcagtcaaaacggcaaagaatgagtaggagtggggcaaataccatctgttgagatccagagcctttttctaaccatgatgtttcatatctacctagttttgacctaaccttggaattagtcaaaggaacatattgattgttgagatctagcggtataaaatgatcattcgtcatctttgcaagacgtttaaagaaatcgcttttgttgtgggctgcaggaatt

SEQ ID NO: 38127 - DNA, 648 bp, Oryza sativa
tgtgctctggaggaaaacttcccagcaatttacatactgttaattagataattgcaaacaaaagaatcaacacaaataatcaatacaaatgcaccagcaaatcctatcttactataaagttacaacccactaactcctaaagcttaacatgcaaagatgccacgtcatcatccactaacaatcaatacatttaatatcatgcaaacatgctatactatctataatttaaaatttattacattttagagcttttaaaatgaaagcatgttaaatcatcatcccacataatacacataatatttcaatatatatcttcattattttttataatattttatgtacctatgtagttcatcctcacttggttaatgctatttctctcttctctaattaagccatatcacatcaattgtttttagtgcttatgtaagtttatgttttttagctatcttacacattattttttacttattgttatcatattgaactcccgcagcaacgcgcggggtttcacctagtaattaagataacaagacccatatccacaggaagttccaaaccatcaaccaaaacaagcaaccaacatatttttcagcagatagtggtcgccatatgagtgggtaatcacaccaggtccttaaacttatg

SEQ ID NO: 38128 - DNA, 1689 bp, Oryza sativa
  unsure (1)..(1689): unsure at all n locations
tattttaggttcttctccctctgccatccttatttgatgatgtctttcccttaagtctaatttagagaaccgttgggatccagccaactcacccagcaactcttcaataatgggcactgggtacttgccttttatggtgattgcattcagttgcctatagtcaatgcataatctctatttcagctacttgtttttcaaactcatttttaagggctggtttatgcctatagggtcttaaattcactggtttgtctccttcaatcaggggaatatggtgatcacaagctcttggaggaggtaatccagcgtgggttcttcgaacagctcctggaattcctgcacaattggttgaacagattctgagattttaggtttaatttactccttagctggttacaattgtatcacacatacaacactgttttagccattccattaagctggtgaagtgaggttgcttcacacaaatccagtttgggtattaagccttgtagccttatcaattattattattattactattataattatttttgtgcctgacatgtgggtcccactaacacgtaggtgtcatcgtggtatgccacatcagcgtacgaagtgggttagagcccttttggacctacataacacccatgacatgttcagagacccgaaaatgcattttcatagtttagagacacccgcacaagtttaaggatcttcaacatggatgtacgacccaaaaatttcctagcctaagacccttgtaggaaaatatagtaaaaaaataaaaaaaaacccttgtcatgtgaagtgtgaaatcgaagtgtggtcatctcggtcccgtatcgtgttcgttttttcgctttctcgccatatcgtgttgntatagtaacagtcatcatgccagatgacaatacgagtccgagacaaaggcagcaaactggcaagcaaggacgcatcacgatgtcatagcagcagttaccacaacagacaacaattaggagtacgagatagggacaacaaactagcacggcaagggcgcatcgtgttgtcatagtagtagtcatcacgctagacggcaactaggaatccgagatggaggcagcaaactagcatgacaaggatgagaggttatcaagcagtcaagccgacatgccaacaagctggaaagggcaaatgccgtggcacgacgtccgcgcctctctagcggccagcggatagcaaggtggcaagggcggcgcatgatggtaagttggagcacccaaatctcaaatcctagatacatcactgatcatcagcatacatgactcttgtttttataacggtttaggagttgaagtccggcggttcgaaatggaaaattggaacgtccatgaccacaacgtaggtcattgacaacatcaacatgcacgtatagagcaggatgacccgtattcccatgcgactaggttggggttgttagccaaaatcagccaacacactatagcgatcacctgaaccacaacagaggaggacgaagtagcataggataataaaacggtgcaaaccacatgtgcagtgcaaacaaacctgaaaactacagcgtgatcttacaaatagacgtatgatatttatccacatcattataaaaacctttatactcttaaatttaaatgggctatttaggaaagggaaagaagaagagagaattacctatcattaaac

SEQ ID NO: 38129 - DNA, 721 bp, Oryza sativa
gagtgtacctgaggtaccaatcggaccaatgcaattagaaccccagagtccgcacatcctcaaatacaaagcacttccctagttagatgtaggttagacttcccgttcgagaaactctaccttctacctgccctcaatttatgcacgattaatgaatgccacctgggtggaagcgagaggtggaaatggaaggtcttagttcggaggtgggatctctacctgatagttgcattgccattcatgatgatcccctggcattcgtccattcagccattcaccattcacccattcaactggaattttggttgaatgccggaattgtgtccacaaattgtggatggatagttggttggctggctggatggctggctggatggctggctggatggatggtgaatggctggcggcggttcggttgctttgaagcatttgttgctatctaaattccatttaaggtcgtaccttatcgcccagcatcatcttattctctatttgtattccctccatctttcagatacggatgtagccttggatgtgcccgtgcccaatgaagaggaagagcgcaacatgaaacgtaagtacaaaagtaccggacacccacccagatcccaatagaatccgccaaatcctgcgggaaattgtaatcccattcaccagctcctacatttaattaacaagagaactattgtatttatctaacacctggattatctccaccttt

SEQ ID NO: 38130 - DNA, 1577 bp, Oryza sativa
  unsure (1)..(1577): unsure at all n locations
cggcggngtgagannnnnnnnnnnnnnnnnnnnnnnnnnngtttcctctttcttgcatctctatcagaggctgttgcatctgattcttcctttatgctagcatcgccttttcgatcactgtctccagctgattcttcaccattggcacgtccatcagtctcaatataggttcttgtgcctgtatcgcgttcttcatcagatttctcactatcagtcttagtaagatcaaccatggcgaggttatccttgtgaaaccagatttctgatgcaagcaacttgcggtattcagctattatagcctgcattttaaggcacaagtacatcaggcagtttaacaaaaagaaaagaaaaggaacctatagtgtgaaatagcactaacatcatcacagtcgtctatacttttgccttcagcaattctacttgcgaaccacagcataaagaaaccacagtcattactgaaacaattattcaacaatgtaagccaaatagagatataaatgcagcaaagaacgggagaagaatttcttcaaggcagctgaaatattactagttgttttgctgcttttacagacagctccttatactcgaattcaggaagtccaagtgacttcaagtatccatcagcttttgatacttgcaagaatggatcaaggtaaagaaaaagaagtgtttatcactgagtatagggacaaatatttggggaaaaataaccataccacattttctgcagcacttctctgcccatgagattgcaatgaatcaagtatagatttacaattattcaccatgtcaaacaccactaaaaaccaatgttcgctgtggaggatgggtatgaaaatctgggaaaaaacatgtttagttcatggcctaaaagaagaaaaaaataacttgtcttgggatagggggcacaaactagttttgtgttggggcgcacaattcttctcctaagccggtatagcagagttctgctgtcgcccttactcaacaaaaaatcctacaataaaattgaatagattgtaatattggataaattaaacacaagatggaaaaatgctaactgctctaattgatactccctcagtcccacaatataagggattttgagcgtccccncctggcctctgacctcgctgccgacgacattgtccgtggagcggtggtcgaccgcgacaaccgccgacgcgtgcagcgatggggttctcggaacctgcatgtggagaggatgcgattgcttgggatccttccacgagtggctgaactggggatgtgaatcggggggaacttcttgaaggttcttgacaagaagaactgtatggactctaccactcggctttcttcagaggttattcctttgctcggtcaatgggattgggagccagagggtttaaacttgtggcaactgacgcgatgagggaatgtgggggtctaggttattattacaccgcggaatggaacgccccgcggggatttatgttgggtttaattgaaaggagttatctgggacaatacgggttctttttcttaagtggaccccaagttcaaaaccattctcgcaatcatacggcttgttttccacg

SEQ ID NO: 38131 - DNA, 762 bp, Oryza sativa
  unsure (1)..(762): unsure at all n locations
agggatggatcaccnnnnnnnnnnnnnnnnnnnnnnnngtcctaaggacttaaatctatatcctgcaagatgacttgttgccacatcagcagccaaatcaataacctgagcatccgtagacagtttgtctcctgagtataagagctgcgaagtagatgaacagccatgtttcatagaaagggtagagcgattggcaggagtgatctgggcaaacttgatatagttacttcttttggtggttggattcacagataatgcagttctctggttctcatttgctgtggtgacagcctagcagaagaaagaatacgacctataagtaccagaagcatcaaactgaatactgatcatctatgtgagtgcaacaaaattaccaaagcagatatagtctcctgaggtttatgtttgtctgcaagcagtacaatattatctgcatgtaacagcattttcacaaaaatgtaaatcatcaagagaatagcagatcagcagaaacacaatatagtaattaaatttggcagccacagcaaccggagctgcaagaaatgtctggttgtccagccaatggttgcactgaacaattaaaaaatgttcagggcttcaggacagcaacacatgttgcagaattatattcagcactcgacagctaggtgaaataggtaatttaaagaggatttaacattcaggagctggatcttggccccatactctataaatatctctcaagacttaatagtacaaaaaaaaattgaagatttttctatg

SEQ ID NO: 38132 - DNA, 614 bp, Oryza sativa
ttcttccgacttcttctactttagtctcttcctattctaatatacaataaagtacactagagtctcttgtaattcagctcatgctttggtgtgtgtgaatgagggagaggagaggggtatttataggtggagagttgccttgggagagtggagatgctccaagcatcctatgagcatattccctctagcttcatgtcctcttgacaagtgtcctcactatgacggtttccaccggtagaaatggccacaaccgtcattgggatgaggagtacaaccgtcataccgaaaatgggctggactgggccagctaggggttcggccgaatcctggttggcttccctggcccacatctttcttcaggatgctgacatatgggccccacttcatgatgctccatgttttggctccaaatgattgcacattttatatattgtagctcaaaaccatgtgagttcatcagagcaaaatatatttccattctttatgctcattctctcccaactttggtggttgatcacctgcatacaaatatacaccaacactcgtggaaattgtagaaataaatcataccactatgttggatgtttcacatttatggttttatcaggtattga

SEQ ID NO: 38133 - DNA, 667 bp, Oryza sativa
ccccgcagtacatcatattcatacgtacctacatatttgtacgttatattcatacacgtacgtacctacatatttctctaatttttatgcaagaaatcgagcatgagttaactccaataaattagttcgtcaacagagtaccatcatatcgttgcattccatgctcgatgttaagccgttagttttccttgggagagattttgatcagttggctgacgacgacaacgacagtgcgtatacggtaaaatactaatatacgtgacaaaattgttcataactatatatatatatatatatatatattgcaggattgttcataactattaatttgtagaggccggttaaatttatcatattttccaaagaaaatgtaaaaaaaaaatggtacggaattgtcgagagcttaaatagtttcctataaatattagagacagttctgaattaagttgtattggtatcatattttttatataaactttggtacttcctaaatatcctaagtactgggacctcgggtatggtaaattaaatttctcgtatcaaatagctggaaagagaatgggtagaaacacacataaggatgaaaaattataatcaaagacgatgaaacgtgtagcagtacgcctatcttgtaaagaaaccatgggaattattaaattaattaatt

SEQ ID NO: 38134 - DNA, 1650 bp, Oryza sativa
  unsure (1)..(1650): unsure at all n locations
cgcgggattgaattgactttacttcgtctgcaagtagctcatcatgcatcaaatatttttcatgatcatcactatggatttttgacctgaaaacactatgtgaactttcagattctgctctgcattgatgtagctgcaacttctgctaggtcaggagatatgtgccgatttcttcttgacgaggtaggttttgatggttatgcatttctatgtcttcatattcttattcttatggacgttggttcatgaagatagcataagggcccaaaactccaaatactgggataaggtttgatcgcttttcagagtggggcttatgtaatgaagctaggcttcactttaaaattatgtattagcatattgcttgtcatgatagagttaccttggtaacttctatatggatggttccctgctacagtaccgctgatactaattcacgcaaaccagtaaccttgaatttgcttatcctcaagggtaggatccttgccatcctaacaaacttctaatttcataactaaaccatttccttcctaactaatggtaccaaatgattagcatcttagtaaccaaactagttatttaggcaatagataattagatattattattggggaaggtaaactcttccttagtcatactgctaccgtaggcagcacccttcttgctacagtcccaatgcccataacatgtactccctccggcttttcttcaagcgctgagtccctgaccaccgatggtagtagttgaagcaccagtaccatcgcggacgcgctttcattatttaggactgaaacttggcctagcctaacagggccgccgacgcattccgatattctgttcttttgcttgtgtccagagagggtctctgccactacagctccttgagcaagctaccaccttttgcttaccctcattgccttcatgattttagaaataaatctcacctctctggacacatgcccatttgctttcaccatcaaacatatccaggggcttattggatctggtcgctgctggacatgagccatactcagtgcccttgcagttgttagatctgatcaggtactgccatttcctggtcacaggcaatggccttgaccatacagctgcctgactgcattcatcaccggtcgaggaccttgaccacgccattgctgaccattggcgctcactgtcacctggtcataatttgatgaaagcactgcactactgtcatgttgaccctggcaatggccacatgatgaccaatacttgtcgcacatttgctgtcctagccaggccatgtcacattggcgaagaaggcagcaaatggaaaatatcaggtggtaaatgcaaaaagagtttagctttcagtaacaccattcatacaatttataaacagtacttggcaaacgcttttacggcaataattgagtggtacataaccaaattatccatatttctgtaaaggccagtaaatgatgtttatctatgtaaggcacatttcactgaatgatgcagcttcattaatcctgagaacaaaaaaaaaaggaacaattaaacagcaaatactttgtctctgcatgttttgcactgtttaatttgacatcgcgattccnnnnnnnnnnnnnnnnnnnnnnnggaatctaaatcatcaaannnnnccccatc

SEQ ID NO: 38135 - DNA, 1159 bp, Oryza sativa
gcgcacgtgacgacgcacccctcattttactcgtgctcgctgcggcagtgttcctcctctttcaagttcagaggggcagctcgtcatgcacatgcaaaggcaagcatcgcctgttctgttttgcatcaactgatcaaactgtacacatacttcctatcttctaatacaaagcttgtgtgtgtttgattaaacatggccaggacctgacaatgtttctgctcgaattttttgtaagtaggtcgatcaccaaggtgcctgacactgtgttcctatgaaaaaaaatgaaaggaaaaaactgacaatttctatgcattaagcagaacaatggagcaagcgttataaaaacatcccatgtctgaataaaagcaccatagcaacagttaatatgtgacccattcaggtccagggcataggaaatttgcaaaacgaatccatatctgaaatatatacattgtgaagcagagaaaatacaacctatttgccgagaaaaaaaaaagaggaagccatgtctgctcttttgtgaagcagaaaaaattgttgcaggcctttaaatgttaattgtggttagttttatatctgactgcaatataatagttgtaatacaatagtcttagacatggttcaatctacatgctttttttattttaaaaattatagtccaatgataaaaagcaattttgcaatgacaaacagaagaacgattgcatagttgtaatgccctaacaataatgggttcctctaaattacattttactagccctaattttttgacaagccaaacatgatcaaatggctggatttaattcctcgtcaaagaaccatgaagcagagtgtccttgcaaatcaccaaccagcatgctttggagtcaattcatatgatcatcacaagaaaagggatgaacgttacctgctaggaatggtacccaacaagttctcttcctctactcttcctccagctaggtcaacatcacgatcatcaccggaggccatcatgcaagagatggttggggaacgtcgccgccgcctgcgtgcgcaagaaagacgggaggcaccgcgtcgtgtgcgtgggaacaggaaacgcgcgcttctattctcccgcgtgatcctacctaataggccacgtattgacctgccaggtgcggccagctgatgtggagca

SEQ ID NO: 38136 - DNA, 1297 bp, Oryza sativa
tgcaaaatggcaaaagaaagctgagtttattctccgcccgcacctcagccagattgccggaggggacgacgagcggccgccggctgatggccacgaggaattgggagcgatccctattttcctggcaaattttcttcgaacgggagcgcgagcccgtttggccgcctcactccgcgcgttcgtccgacgacgcagctgcgtcgaacgtccatctgagtcagaggatctggatccgaatttaagtttagggagcaaccaatggtagatgttcatgttaaatggcttataagctatttcttcaagataaattgcttttcattcacgattccaatcaatcgggttactgcccctcgcagaattaattaaggtaagcaatgctttacatttgtatttagttaaagcttcaactaacagcaaaaaaaaaaaaacatattaatgccctaataagtgaaatcgacgagatgttacagataaggaggcaaagacaatagtcccggcgtcacttgcaaactctgcctcatgaactcactacagcactgagcatatgctgtgaacaatgtgcaaagaacaagagtgacccatgcattagagatttacagtacacaggcggaaataatcctagcatcagaaatatgagatgctgcacttgcacctagctctattgtttctttctaactaaagaccaaattaaagattatcaagggcgcgcctagctagcttcttgagcacaaccttcatgtgccaccaagaaaatatgcatccatattgcagagatccagattacaaaaaaggaaaagtggacaaaaaaaaaagagcagtcaccatctgttcgccttaatgtatcttctgcccttttatgcagcaaatgttacgaccaattaactgcaagctccttatcttggaaggtaatctgtggttctcttttgtagggctgcaccaccttgatgatctcatctgcattgagaatttctttctccaatagggcatttgccacagcctgcagctgcatctcatgctgaagaaaaaaaaaatcaaatagctacctttctttttctatgttcaagtaatattcattgtgaggcaaacccctagtcctagttaagagacaaaccttcttcagcaaacgcttcactcgctcacgggattctcctaggagtttcaacacctacaagcccacattattagcacacatgacacattgaatctcttcacacgtttatagggacctatgaaatagtacctctgcattaatcgtggcctgcatttgtacacttggccatttttccagatgcatacg

SEQ ID NO: 38137 - DNA, 1355 bp, Oryza sativa
aactactataggttgtttaataccaatcggtaaaagtttattatatgttctgggtttcgattttagtaaatataccttgtatctatcatcagttgaatatagtggtttattcgtagttttgctccataggtgtggagagatcttgtgtggagggagggtggttcgtcgggttaacgtcaaggttaaaggcaagtgcatgacgaactaattgtgtgattcatggattgtttgctctatctatttattttcgatatatttctatgtgacatgtgactgcttatattcatattgttgttcacgccatttaggttttcatgcttatcctatgtttacaacgttattcttgtttcaatattccggattctggttctgggtaaataattcaagttccatgcttgccatggatgtgcaatatggtttcaatttggttctttgattctggttttcaattattcaaggaccatgcgtagttatggaagtgcaatttggatctttattcatgttcctgtgagtaagcgctgatcacgcttactcggctttgccggcaaatgttaggatgtattcactattgtccaggatggaatctactatttcaattcatgcctgcccgggatgggaactattattttctttgacttggtgtttgaaattgtgtttcttatcaaagaaagaaagttttctgttcgcactctattgctaatgatgtgtatatgtgctttctagttccatactgtacttgctgagtatttccgtactctcttgtgtttatttggtttttaggtacacattgagatcggcatgcatgggcgggaagtagcacccttatatacacatttttctgcacactaccaaactatattgcctaggtccataatgatacttaaactatatcatggttcggtctcgtaataatcttttagatatcttttagtttctttctatgggctatatggatggatcacattgtgggaatgatattattattagttcaatttataactgtttgtcgtggatgtccacatttacaggggagactttactgaaatttctaataattttgggagttagtggttttgagtgtattttagtgtggcactccaggtacgtggctacctgaggcgttacggttggtatcggagtggacggtaggtccatgggaagtaaatatgacaacttaaaatattgatatatgctcttctacgaataagatctgattgtatattacgtaaagctaggaggtataattttttttttcagttttggttcgttggtacggtgtatagtgtggagattaacgtttgcgcataactatattcggcaagctataagggagaacaacatggagttgctaataa

SEQ ID NO: 38138 - DNA, 1281 bp, Oryza sativa
tccataggacacgtacactcatgaattcatggtacggtctacacaatattggattttttttaatctcattagcattgtcttagatcgcagaattggatacacaaatggacctcatatataacaattaattaatagttttatctagcactttggatgatattgagacgtataggtgtatctctagtgccagaggtaattaattaacaatggaatatctatacctcacaataccttgtatggactaaggattggaaatggtcatctaataaaaataatgagagcagaacattacagtgacagccaaagcaagtgatacactcacatacgtgaacaaaaaaaaatactattgaaagcaacaaactaatatcctaaaatgctagtatgcaactgcaaacatagaaccttattttcatttagaaccataaaaaatgataagtatttgacagcatattgggttcaatatatccaagcgagaaagaaggctaattagtgtttatttatgtcatacttttgagaatctattttagccgaagtatagaattaagttcctgaaaatagaaccctacctgctcaatcaagacaggattatctcttgtgcggttaaagacataattccgtagcctgtccaattcatcgcgtaccgcaaagatcccatagacactaatggggtatgattcgttactggataacttcaaagagaagatttggagcgtatcatttggctcattcatcccaatagttgatgcagctgcaaatatgtactctcaagaaattaatagcacgtataagaaaagaaaagttgcaagagtgtactctctccgttacataatataagactttctaacatctatatgtatgtggacaacgctagaaagtcttacattgtaaaacgaaggaagtacatattggtagcaaagaagataaattgatcaaataattatcaatgaatcctctaaacagttggaatataattgaccaacacttactctcagaagtagtgaaggtcaggtattcgtgatgatcacagtaaatgctttttttgatgcagtgatatgatgtcttgggaaacagcctcaaaggatatcgtagaagttgagcataatcatatcccgacgctacaaactctttatatgcctccgtgtgttctgcattcctcctgatgtatgttgctagccacttgcgacttatttcctttggagtgaatttcagaaaaccctatgttttgaggctaatgtaacacataaccacaggttttgtttattttctcacataaccccgtgc

SEQ ID NO: 38139 - DNA, 770 bp, Oryza sativa
aacatgggcaagtatcacctagccaagtggcgacaagatacacgaagcgtgcattttttttcatttttttaaaaagtatattcttgcaaaatcgtgctatgaaagttaaaatgctatacaatcggctgtccatattgtatagcataatctctataagtttcctgaacatctgggaatcatttgaaccctcttcgcttgctgaaccccacgtagcccatatgagacttttgggcaatcagtatgaccagagaagtacgatcatttaatctttaacctactatttatattttttaaaaaagagcacatagacattgattaactatcatgtgtcaagaccccaatataagaccccaatattgtaggcctgaatttaagggatccagatcctcgctacagagggacgtccggcgcagctgcatcgttcgttccgcatcggacgaacgcgcggagtgaggcggccaaacgggctcgcactcgggccaagtcaatgaaataggatgggccgtttgagcagaaggctcgtttccttggccagaaaaatcggcgccgctcccaagtcctccaggacatcagccggcggccgctcgtcgtctcctccggctcaggcgctattggagcggatcccggacaaagcccctcccctcgtcgccgccctcctccccatccctcgccccctcgcgccgcgcgagagccctgcttcatccgggagatctgcctcgtccaggtctgtcttgacgacgatggcttccacggcggcgcccttcaccacc

SEQ ID NO: 38140 - DNA, 3146 bp, Oryza sativa
acacttaacagtagtattagtagtattaggctgtgtttagttcgtgtgctaaaattcttttaagtatacggacacatatttaaagtattaaatgtagactaataacaaaacaaattacagattccatttgtaaactgcgagacgaatttattaagcctaattaatccgtcattagcaaatatttacagtagcatcacattgttaaatcatgacgtaattaattacgctcaaaagattcgtctcgtgatttatattgaaaccgtgcaattggttttttttccatatttaatgctctatgcatgtgtccaaatatttgatgtgatgaaaaagttagaagtgtaaataaaaattttaaatctaaacgcggccttagtatactcctgtcaggctgtcactgcttgcgtgtgttttgttgcaggccggatacgtcttgctacagtgatacagatgcaggaggcgggcaggcttaattcgtgcgtgtggtggtgcagatatgtgtagtaggagtataccataaagtcattctttatgatatgtagaaaataaggtaggtgaagcgtcgttattattggtcaggtgtgtgtgtagcaacagtgtttacaaggtatgtactgttggatgtgtgttaggtatgtttggaacagtgtagagcataagtaatgttggtaatatgcctagcatgacagaggtagggaacatttccatcaatcttattggaggaaatttcacaagttaaactataaacatagtagccccatcattttacttatgcatatgcttatccgtattgcttattcggaaaaaaaaagtaatttgtgaggttaaacttttatatgtaggtctatcgcgattcaaagataaccgctataaaataaaccacgataaaaaaaaccacaaaattaactttaaattaagttttaaatttaaattttggcttataagtataagcattagcaaaacgatgaggctatcctaaattattgcacaaactagcaacctagctatcattttgcttatgcttatgcttataattatcgaacaacttattagtaaaagaaattatcagtaaatttttatatacgtgttcttagcgattcaaaagcaaatgttgtaaaacaaactacaataaattcacaaaatcaactttaaaattaagttttaaaattcaaattttgacttataagtcaagcacaagcagaatgatagagctctaggtatttaagattttatattgaaaaccaccaattctccgtttaaattatcacaaaactataggttttaggctttaccctcgttacctgacaagtaggtcctcatacaaaactacgcacgccaattaacggtgaatgtgatggtgaacataaaatctgtagattgtgatcgtttgagcacaaaatctgtagttctcccaatagaaactcctaaacatgtagttttctaataattttgacaaagtatttgtagttttgtaaattttagatttttgtctaggaacttttttgactttgaaaagtttaaagaaacattccttttttagttagagggagtacctcttgagtttttgtttttttttttgcgtgtaatggttctgctggttgtgcatacataactttttcaagttgatgcaatttggaagcacagcttgttaggttgattgtgaaatctgaatattgttttcgaccaggtgacaaatgatccttcaatttccatacacttttttacttggatcacaatataatactccctctgtttcaaaatatatgatgccgttgactttacacataaagtttaaccattcatcttattcaaaaagttttatattaatatcatttattttgttgtagtttgttttatcatcaaataaaatataatcttaacttataattttatatatttatactaaatttttgaataagacaaaatgtcaaacattatgaaaaaagtcaacggcgtgatgcatttttaaaattgatgtagtacaaaactctctttttattcggacttccatcttactaccaacttcttacttattgactttgtggcccttaaaattcaaaagtattatagcagataaaccttgctttgacacgaaaagagacacacctatcaattttgtttcatccaaaattgcagtcacacaaaacaacctttttcacatttgcgagatgaagtactgtacttgtacttgtattgtcatagactcatagttatgactgaaacaatcttatctataccaatacgcgcctaatcttgtcagatggaaccattgacttattagcaaaagaaataattcatacacgaccaaatttatgcgatgacgaaagcgagctgcaaaactttcattgcgacgttatgttgcatagcttattttcaaagtagtgatctcatgacgtgtggttatattattatgtgatgttaacaagcaagccattgactctgaccgacctagaactataaaagaattaggtgatgatgaagtcagagattaccttgtggcttcatatagaccaagtcaaatttatctaatccttagatcactctgtcctacttaatttgtgaaacagaacgaatacatatcactagtgaccaagctacttgacccactaatacaaaacaaggtttgtttcataaacagggaagtttgtctatgaagtatgaactgggcagtgaagcttggtaccccttctggttttaaaaccgacagtgattacgtttctttactttagtgaccttgtcctaaacttttggtattccttcgtagtatcatatcccattgaaattcctttttgacaactgaacccttttgtgaaatatatgaagtaggtcgtgttattatgatattttattattttttaccttttctaatttataattttaaaaacaaactctccctaaatttatttttccaaaatctaaatcttcttggccacgccaatccacctagcatggcgaaataacactgcacgccatctgtaatgggtgtgacagctttgttttgcacgccgcgctagtatgactggtatggttacaagtctcagatttggaaataagttttgggatagtttatttttaaagttcttaattaaaaagttcaaaaaaatctgttactatccactaccttatttaataatattaatttgaaatag

SEQ ID NO: 38141 - DNA, 1202 bp, Oryza sativa
agttgctcaccttgcctactatatgctattttatgggatatgtcgttgattaatttcatataggtgatttaatcacactagctctgttattatttgccataaacaagcttatgaccgatctatgtgtatctatattttacttacctaacaattataaggctaactctatttaaataactaataagtcgtgggttttaattatatttggacatagattagtaaatggcactaatattttcctaaacacccattaatttgaaggattgattataactaatttatttagttgctacagtgacaagacatgttaaatataattatgccactgtacaatatccattttcgatttatacatcctaaactattttgcgggtataaatattttgttagtataagtttttaatttaatctactcgagcattatatccatataatagggtagaaattttctatcgcgagctaagtatcggacgaaatcctggaaatattgtacgaattaatttagtctatgactaaatgattaaatataatacaagggaaaaatccgaatttctaccgtgaattgattatttatagggattacccaaaaataatctataataattcatcttttttgtttagtaattaactacatctaaattattaccgcgaattgatttcttatagaaattgccaagaataatccataatttatattaaattttgcaattctacgactataattaatccataattaaattctaattattttaaatcttctaaacttccctaatcttcctctaatttctatttattttttttccttctttttctctcctcttttctttcttttcttttctttttctctctttttctctcttttctctcctttctttttcctttctttctctcctctctctctttttccctttcttctctttctttcctccctcccggcttcttcctcccttcctctctctctctctcggctcaggctacccggggcggcgacggcggcggaacgagggaaggggcggcggcttaccgacaacggcggcggcgacggcggcgcaaggcgaggcgacgctcggcacagcacacggcgcggtgtggcggcaccgagggcggcagcgcggcggcacgagggcggcagcgcagtggcacgagagcggcggtgcggtggaaagggaagaggggaggaggagggaaatggagtgggggaa

SEQ ID NO: 38142 - DNA, 515 bp, Oryza sativa
aaatacttaaactttgtcataaggtgtagaatagttcttgggtccactaaaatcattatatggatatgccatgtcatcattcatgcaaaatctatgatgaattgtccaatatacccttacgtatatcatagaaaaataaatataagggtgaattggacataaccataggaaaaaaatacttatcctttttttcacccttttgaggtatatttttgctcttacattttaccttttgttttttattttcctatgatatatgtaaggttaaattggacaaatcatagattttgcataggaatgtaacatggcatatccatgtggcgattttggtgggaccaaggactatatcaacccacatgacaaaattaaaggacttgtttggacaatatgaaaaattaaggactaaaatgagccatgagcgaaactttaggaatcatattagctattctccctatttttttaaagaaaaccgtttatcagtttaaaaacatgcaagcgaaaaattaagaaatttt

SEQ ID NO: 38143 - DNA, 607 bp, Oryza sativa
tggaaattgagagcacaatgcgagtatactatactgcaaaatggccaggagacgtaaacgaaacatagacgacgtgctggcttctttctgtccttgactagtttgccaggaacatgatttcgtccggacacggttatacacaacagtgtataatgtatactattttgtattaattagtggctaattaattataactagcaactacatatactatgtgctacagcctacagattacacgtagtaaagatcatgttagtgtagaacagagtggatgaggtgcgaccaacgactaagacgacgtggctgcagtacatgcgtagctacctaattgactcacctcgctcataaggagtatacatatttcatattaagggtgttgggaacccatctcccatacacggaaaacggaacggtccattaacacgtgattaattaagtattagctatttttttttcagaaatggatcaatatgaatttttttaacaatttttgtatagaaactttttgcaaaaaaacgcatcatttagcagtttgaaaagcgtgcacgcggaaaacgagagggtagcgttggaaacttgctcttgcacacacacccttaaggtggtt

SEQ ID NO: 38144 - DNA, 614 bp, Oryza sativa
catgttcatctgctggcaattaggcaaaagaacattttcttgcagattgctatgtaaggtgagtggtttatatatgatcagtattgaaattctcaaatgtactccctccttatggttttccatcttgaaggggagcaattttcttggatgaacagtttttaagttttataaccacagctgtacagatttgttggcagatatgcagagagatagagagagagtggcgtacaccaaccactggctggtctcgtccccgtgaacaacggtctgaatgtatagaggctagcttttcagtttgtcagggagggaggggagaaggtaaggtactagtaaaatgtagggataggataggatgatggtagtaggaaggaagatgcatttggaattttgctctcgtcttgtataccgatgcagcagcaacagtatcatccagcatctcacatgcgcccatagaacacaccttcttcaaatcaaatacagcggcggctttcagcaagcttgtgattgtgaacatggaagagaatagtaaagtaggagtacaaatgaagagagaagcttccgtataatactcactacttcctccgttttacttcaattttttcaaagtcaaattt

SEQ ID NO: 38145 - DNA, 557 bp, Oryza sativa
aaggtggcgtacatacgtacagtgagtatgcataaaacatactatatttataaatttattctctactttatcttaaattcggtatgtttctaaccttgtataattgctcagtttttttatatctttctctacaatcgctatatctcattttatcttattttatctttttattgaataggtgtatgtctaagtagcaaccttctcgtatatatatttacgcagtatcctaatcagcacctaaatcaataaaattaatcgtgcatttattgtacttttgaccttagttcgcacgcacaagataagttcatataccaaaacgagtattttacaagttcatacactagattgcacacacccgacaagttcatgtacagccggtgcaatttgctcttaattatttgtcactcaatagacatgtgggccttcatgtgtctatgatatatgggtccagtgacaaattctaatcaccacttgtaagagtcgcaaataattaactcattggtttgcaaaattactccatagttaaggtgtctgtacgtcttttcttttgccagaaa

SEQ ID NO: 38146 - DNA, 1354 bp, Oryza sativa
aaggccggcgagctcccaaggaaggtggccatggcggtggcacggtgcgttcttggcgtggcgagagtgagcaagcaaagcaaaggctaatgtaacgaggatttttctggagatttttcctcgcttttttttttgggcgtcgttttgcagcgtctgttttggggcgaaatgtgtccacacaaaacaagcacggctactacacgaggcttatctgctactactcgttatctgctccgtcttgagggctacgtgccgaggcctgatggcgcaatctgacggctttccgttgtcgacaatacgtgatcataagcacatcgggaacacaaagcaagccgcattgcaaaaaagtcttaaagacatttatcttttttgagtctcacaaaaacttggataagactttcggtgctctataaccaattttgcataaacccttcccttcttaataaattttggccggctcagctatagaaccaattttgccaaaaggaaaatcggtttcattacaacaaaagatcaagacaacgtcgcagcgggcctgggcctgcggtgtagccgccaggcaatgtttccccatggaagaacgacgcttggttgcagaaccaccactacagtggtttcgtacaatatcacagcgcccccgtctcaagaaatggggtatagtaataatatggagaacaaggacgggctacaagaatgaacaagtttatataaacttacacttatcattgtcatctgtcagcacctgaaacaagcacggtcccgctgggtacgtctgaataacagcattctagatttcaatagttgacaaaagtcaaaaccagtacgtacagcttttaagatatttcaatataattaaaaggatgaactcagaatgtacggagttgaatcaagaaaacaaagcaacatagtcacacaacttaacaagatgcacatatggcagcattgtaaatgaatgaactattactacaaaacctgaaaactgggtattatgtatgtcacctaaaacttatgcaatttttcatttgtatcctaaccacctgtttatatcactgaccaagtttttacggatagaaactatctcatcaaggactcttaacgtagtatagtaacccactatgacaggttaaaacagagtaatagaacctgaaaactgggtattatatatgccacctaaaacagagtaatagaacctaacgaggatttttctggagatttttcctcgcttttttttaaaacagagtaacagaccgaattttaatttataataaactttatcaactcaaggacaattcaatagccagacgcaacggttgaaagtatagtaacccactatgacaagttaaaacagagtaac

SEQ ID NO: 38147 - DNA, 1377 bp, Oryza sativa
ctccgacgaccactgccgccccggcgacccttccttcctagctccgaccaccgccgccgctccctcctccaactccgacgccgcaccatcgccaccccctccctccccaggatccggctaccaccaccgctgcccctccctccctggctccggccaccgtcaccgttccctccccctactccggtcacctccgcggctctctctttcggctcgggccaccatcgccgccccctccctcggctctctggctccagccaccgctgtctctctctctctcccttggctccggcacccaccgccgccccctccccgggctctctggctccagccaccgccgccgctctccccccaccatcggctcggccgttgtgcctcgtgctcttgcagctgatagaggtggcactacactgatcaggtcatctctgacgggctcatacccttacctgtgacgggttaagcactggtcacagatctgtggtcactgatgactcggagtcacctgtgacgggtaaagacccgttagaggtaaaagttacctttgacggactgaaaactaaaatccgtcgtaggtgaggtcacctgtgacagaggggtccgaattgggacacgtcacaaacctcaaaaatgagggaaaaataatattataagcctagctagtcgcagaccattaggcatcacaaatcacaaaaatgatcacattcacagtcatttcgacacaagacagaatcacaaaaatcatcgcaatcatattcatctggccaaagaacaaaatcacttcacattcacaatcatttgggcacaaaacaaaattacaaaaatcatcacaatcatattcatctggcggtggtgcggtggtggaggaagcggccaacggtcaagagggaggcggtggccggatccgcgcccggatccggcggttggcggtgcggtggcggaggaggaagcggttgacggtcgggggagaggccgcgatggccggcggtcgggaggttgggaggcggcggcgaccgacggtcgggggagaggccgcggcggccggatccgcacctcgtaggccagatccggcgaccggcggtcgggaggcggggaggcggcggcggccgacggtcaggaggcggggacgcgtcagcggccggcgctcgggagacggggaggcggcagcgaccgacggtcgggggagaggccgtggtggcccgatccgcgcctcgtatgctagatccggcgaccggcggtcaggaggcggggaggtagcggcggctgccggtcgggagacggggaggcgtcagcggccggcgctcgggagggcgccatggcccgatctgtgagggagagagtgaggagggagagaaggaagatgaggggggagagagtgagtga

SEQ ID NO: 38148 - DNA, 557 bp, Oryza sativa
taaagtttcacaaatcctcacccttatgacctatgtatgttgagcacaaatttacttaaaattctaaaccatggtgcatatgaaaattttaattattaagttctttactaaggctgatagtttaactcttcgctacattgaaaaaaatgtttcaaacatgctgaaactaatcaagatttgaataaggtggggttttatgaaacattgaccataagacctgtggttaagtgtcacaaatcatagcacctgtggttttctgcaactttgaccataaaccgtaaggttttctggaatttactcataaaataaaggttcataacaataggcatggaagcataacacccagttactatagtactataccataaaagacttactttgggcaaagccaatcacccttcttcatttctgtttcagttgtttccctaccctttccagctgagaacttaggctttgcaatgcccttgtcaaaagttttggtcttgctagaagtttggaatacaggtttaggaattgatggatcaattgttgtgtcgctaagcatagtaagctctgaa

SEQ ID NO: 38149 - DNA, 503 bp, Oryza sativa
cgaattcgagctcggtacccctaatacccttttctaaagttatatatataaattataatgtagttatataaagtttaaaaaatataattacactataattataattatattgtatttatgtttaataactttttagaagaagatttatcgactagtcctaaacagaagcagacacataagctaggggacaattttagtatttacaaagccaaactttgggacaaatgcgagcacacctcttaaacacacccttaactaaactttaggtataagagcaattttcagttcacaaaccttgcagcccaacgcgtacgtaagctgaccacgcactgacagtctaaccaagcaggactgtcccacaaagtcaaagcgaaccgacttgacctaactggctacgacgaggtctctaccaaaatggaaacgtaccagacaacatccgggagacagcgaggcgaccggcgtcgtacgtagtacaaattagtcgtcgtactcgtaccctcaat

SEQ ID NO: 38150 - DNA, 2043 bp, Oryza sativa
tccgtacacgtgaaggtataccttatcggtatattctataagtcgtatgatagatgatatgccttatctgtaaccctgacagaagtatattagatcaaagttcaaatgatcaatagtgtggttttatgaaacattatgaccataatacatgggactatccgcaacgtacgaaaatccctatagttttgtgcaacttagaccataatacgcgtggttaggtgaaatttactttacaaaagttcacttactaagtaaaaatgaaccacctagttaacatgcatttcttctttccagtttctatttaggcaaaatgcttgagttcctactacatagccatgctcatctaatttggtatcattgccatagtgattatttatagacaagcaccatatatgtaccagtgagtgcaccctcttaccaaacaatcaaagggaaaaaaacaaatgacatatctctaactcgctataaccattaaccccagcaattcacgtatgtgtaatataatcctttgtgaggttggaagagatgaagtagaagaactatgtgattttcaccataggtttttttttctatacctagcaaacgttgaatatgattggcccgtacaataatcaaccccttacatggctggtcgtcgtcaacaagattgcaaaagaagttgctctttggtgcgcagtcaggagaaccgacacaacagtgatagacttcacgccctaatacgtctctttccttgtttagattgtcttttcttccatcccgtgagattatccctagcattctttctctaaggccgctttgccgccatgacgacacgtacttaaaacattctatcttaatataaaaatgtgcatttctcttgcacattcgcttttaaatacataataaaagttgatagtggtatacttgtttttagaaaagaattaaatattacatattataaacctaacccagatagcttggaacaatgggtataagaagtttttgaagaaatcatatttttgaaaataatctacaaataattggcagccaatgaactataaagaacgggccgtatctagtttcaccaacaattgggccacgttggatgtagctattgttgcctttaggtcattccaagtgagagatgccattttcatattttcaagggcgccatataagcaataaaatatttaattgatgattgaaatagctcatatagtatatggttttaaactattggaaacaacatagacatcattgcatcacttactttattaattcctttgcaacatcataaaaatattgacatgacattctatttaatgacaaagaaactcctattgagaatagcactaggagtaaacgatggcaccatttctcttcagactcacatttacttcggtgaaagtgaaacaccatttccacctaaaaatgtaaatgacaaaaatcataacatctgcaacattatacgtggactatttttttcgtacgaaagttgtatcattacgtactagcctagcggtactatttatttgttaatattctagctaattcgaatgattttcccctttgtctacaccaatagttcaccagcgtgatcaccaagttttcatcttcatcattatagtttgaggggccatgaattgaacaactgtacgtctatgtattcatctcttatcatcaaatcagttgatatcatcacttagattaaattgcttactctttggttttcgcgtgtttccccatatagatgtgagaccagtacgtccggagtcctttcggccaaagttttgtaaatattatccatcatgggtttggatatcaaatgagcattagcgattacaatgaccagctagcaataagatcgaggtttgtacggttgtatcaattccatataatcgtaatttaatcataatatatctcatatgccctcttgtgaaaaatatttgacttttaacacaagatttagtcaaaattttaaaacttttaaaattaattttgtgttataataaatttgtaaaaacctatagaatttatagtatcatgataatacttttcaagaca

SEQ ID NO: 38151 - DNA, 565 bp, Oryza sativa
cccctattaatttcgagctatgcgggaagggagccagtgccatcgccagtcaacgagcccagtagaggtcgagctcgccctcccttctatgagggcgcctcgctcagcaaaaaaagcatgcggcgggcacgcagcgttcatcccttcaaccaccacggcccattacgactgtcgccgagacaactgcaaagatcgatggcacaacgaactggtcaaaaagctcatcttcttcagcctcatggcgctggcctcaccattcgacctggaatacttgctacatgcgttcgcctcccgtctcctccattgccctcctaccgaatgccgatgcatgagtctccctgtcgttccccgccattgctcttctgctgccgcgcatcactcttgtttttgtcgctcaatccaaagaaataaataggaatacgaaccctcgtccccaaagcccgggtcctagactactacgaatagaaagatttctacggatattcttcgtatcaattttataatgcttatcacctccttctgagctattcccacggtgccttcgggtcaaagcttaatccttaat

SEQ ID NO: 38152 - DNA, 507 bp, Oryza sativa
ggcgaatccgagctcggtacccgtgacgagccatgagcaacttcataagctaaaactacaaggaagagtacatcgcaatctcctgctagaagatccacatttcagttgcatcaaaagcatcacattatctggctcgtggattgttttgagcccgatggaatcactaggctcactcacaactctttatgaactcaagctaaaggatgacgcgctccggtgctcagaggtctcatgtttacaaaacagtttccctgagctgcggtacctgaaaatcagtggactaaagaagcttagggtgttccatgtggggaatggctcatttccgaatctcacccgcttctccatccacgactgtacagaattccttagcacggttgaggttatggagcatgctacaagactgcaagttctgaaaattaaggaaatgccgtcagtcctgcctgatgttacagatttttgccacagcagaaacatcaaccttatcagctgatctggcatcaaagttat

SEQ ID NO: 38153 - DNA, 1585 bp, Oryza sativa
gagggagtgagaactctcgggtaccagacataaccgacctcgcccttcactcgttaaatcccttggcaaatcatgctcatatccaatattgtttgaaagtaatttttcccctatcaagcatatcataaaacccaaggaataaattccgagaagagccgtattaaacaaagggaagctaagacgcagtttcctttacctctgagcatacggtacgtacacatgccaagcttggcaccggaagcaccgccggtgccatcttccattgacagaaatgacgccgacaactctcatgtgcctagacatttgcaaagccagaaacgaacctgatcaaaatgccttttactaatccaaatcacaacagcatgaatcgatgcgatctcacacatataaaaaaacagtagccattaactagaggaggtaggaaatacgtacatcgagaaattacggcccatgtgccatgttaatttggttaatactgcaagcccctgcaagctgcaagcttcacggtgttctacacagacatgtggttaaaataaaatggcacactgactgtaagtggagtcaacgcaagatctgtaagaatgacaaactggcaagtgaaaaatactggcatcctgcgccaaattccagaagatggaatgaagaaatgctgatccatgaataagatgcagagatgtatgtagcttttgtcagagattgtagaagacatgaaaagaattgataaattgatgcgatcactcaccagatgcttggtgtaatttcagtggtataggtttctttttacttgaattcagtagtataatttgtccagcaattaatcaaagccccaacaacttcagtgattaattccatacttcattagtatcattaccatcctggagaacaaaaatgtatatgagaattatatttatcagaaaatacagataaaaatcagacaacttaaacatgagtggtacggcaggatgcagtaagcgcaaaagatttgtttcaatttgggaaaaatacaaaagcaaacatcagatttaactcaaacaagtgctatgttgacatttttacgatcatttaaagcaaatccagttgactttgtcccaagacaacatttgagcttctcaaagtacggatatgtgatgaacttgtactaagatgtaccgttataaatttgcaaattgtttatagcacaagttctggggttttgttcccatgagcatccatgaaaaaagaatatgagtgcacagccgcacatagggcttagtctgaaacttggaggtctgaatttactggtggaattttggtatgcatcacctcgtaatccacaactgacttaccctttctgacttgcagatcaatttgtctatggaagaacagttcaccgcgtcacttgcattagttgggtttctagaccagagtgtcggtctacacaaaaaccatcagatcaatcaaattaatccaccagtcaggagtaactcctttgaaagattcctctgaggaacgactgatatctattggagctgcacaaacctgacaataatgagggactgagttgaacaacagcaaatcattggtaactgttccgaaggcattgact

SEQ ID NO: 38154 - DNA, 708 bp, Oryza sativa
ttcacctatttcctattttacattttcctgatactatattatcatcgaccttgttgtctagcaccaattctatagccaaattttggtctgcatttcaatcacttgggttcaatcacttgaccagattacgccattgacttttatgaaataacgtttgattatttgtcttatttaaaaatttggtataaatatgctaaagaataagtcatactgatacggtatcatctatttaaaaatgagagtactatgatacgatgaggttttctgcttcgaacatcagatgctagatgacagtagatgctagatgacagtggaaacccttacggatgttaattttctatgcccttgtttagttccaaaatttggtataaatatgctaaaaaatacctgtgcgttgcaacgggtgaaggctattttaattttattattgttatatggtttagttaaaatggaattcactgtgagagttaggttggatatatatatttttagaaaatcatgagctgcagttaagagtagttagcatgcgagttcttttttaaatagatttcttatatgatttcttctgtattactaaaagcataacaataataaaccatataacaataataagattaaaatagatttcatccgttgccacgtacgggtatttttttctagtaatatgtataataggtaaagaaatacaaatattacatatttaactgg

SEQ ID NO: 38155 - DNA, 655 bp, Oryza sativa
gccctgccgctgcagccatggatgcctccgctatggaagaggtgaataccgtaccgaggaggaggaggatgcgaggatgtggtggcaacaggagcacgcgacggggaggaggaggaggaggaggaagaagcaaggcatgaagagagccaagaacacaagcaagcgaagagccgtgtgctcgatggctggaagtttcgaggaaggagggagagcgagaggaaaaaagttaatagaaaagatgtggaggagaaggtagttggagttttggataaggatgaagccgtccgatatttcacatgcgctcggacgtacgtcggaaagcatttttgaataattaaccctaggaactgtaccatttcaacaaactaagacaataatttggggagggataagtcagacttttcccaaatccaaatgataaatgactgattggagggacatcaaagaaatgtaatcctatggcaagtaaaaaaaaagaaatgtaatcctagatattattttcccctgtggctgtgttgagaagagtttaagattataagaaaaaaactgattgaatagttaagtttctaataaactagaaaagttagatttcataccttcttgcttcttgtttattttctgaattttataacatagattctaattaggttacgtt

SEQ ID NO: 38156 - DNA, 696 bp, Oryza sativa
cctatgttgtttttgggtgatctggactaagtaaccaaatttctaaaattcagcacaattattggctcatcatttcatcaatgccacaatgaaaatgcaagcatgtgggaaaattctggtttcattcctccaagctttcaagcttatgtgattactggaaaaaatgcccgtgcattgcaacggaagaaaacatgagaaatttaagaaaaggttaagaaaaatttacattatgtaattaattaaaatataaaatcacaactatacatgtatacgatgttgaagaaaagaaaggctcgtaaaaatcaaggtaaatgtggaaaaataaaattttccaaataaactatggctggatttattttttattaaattctccatgattaattacactatgtgaaatttttccgatattttcagagcaccattgctaatttaataatacaaacatcattttagcatttatttaaatggaaatctaaatgaaaaccctcctttctccctgggccattttgagcccattctttctttagcccgtagctgagccggcccattaacctcacttctcctcccttccacctcggcctgcaagcgcgcatccagcccatcaagcaaccacaaagtctaatcagcatcccttctcctcctctcactgtcgcgtgggtcccagtgctacagggtcgtcccctacctccgtccgac

SEQ ID NO: 38157 - DNA, 638 bp, Oryza sativa
ggttgctcgacatcgagcagctactgatccccatccaagaaccattcctataagatcccctcatcacatccaataacacaattacgaaatcaacactaagatacaaaatcaatatcaaagaacaatagagaatacacagagaggagaataaaataaatcatcgcagttgctgcctctcgacaaaccggtgctgctcccgcttgatccccttaaggaggatggatccagatgatgacgttcaaggtggagatgtacaggcccggcagggtgtgcagcggcacgggaccttgcgctgctcaagcccgtgctcaccgtccaccgccgctgccccagcctacaccaccgctaggacgggttactcgtggatggcgctgcgacggggcagaagccactcttctccgtacgccgcttgtctatcctcggcattggctctgacgccggcgctgtcctcgtcgatattctcggccccggtgccaccagcgagttccacgttgacaggtccttctagcggtgctactgctgcgtggtagccggattcggcggaccccgacctccaggcggccggatctagcatggcttagaggtagtggtgaggaggaggggcagaattacttggaggggcgtcaccagggagagga

SEQ ID NO: 38158 - DNA, 1339 bp, Oryza sativa
cttggtgtgtgattagaagctagtccctagatcatctttttctttgtagcgaatatgcaagagatgttctaagtgcatcctacctaaaagtttgcagactttggccctgctatttgaagtttctgatggctgagaagaactaaataaaccaatgcctattgagtgttgacttaaacttcaagaacactgaggatggtgtctcggcagcaccagctcttaccagtcgaactagcaaccaaaaaaaactatcatgacttccgattggcgtcaagcttctggtcatcattagcatgcattatggcatcgtgattaattgcactctgagaaaaatggaaaaaaaatatcattttcagaaacaaaagccgagacaaattatttgtgttagggataagaaataattgcttacatgaatccctgagcatcaaaaagactcttcaaaatgtgagattcttcattcatgccgagatgagctatggtctattttttttccgcattccatgcctggatgagtttggttcagtctcggaggtcgtctgcacatacctgatcttgccgctagtcatttggaaccttggtattcacatcttcagacaactcgctgaaaatattggatgtttcagtcaaacatctactgaaattattggatgatcagtctatatactatcacatctcctctcctaccctatcttaataatgtttgaagacattaagcttctctctctgcttatgaaacggttttcagattattgtgcgcatggagtatgttgtatatggaggagtgttacgaagtaatcgaactatttttgcaattggttcaattatcccatgagtagctatgagttcaacaggggaaaaaaatctaatgttacaaatttcaaaaagccaagcgctagtgtctagcgctgcctccaccgagagacccgactgtgtgcctctatagggcatctttttggcagggggtcgcctgccgtgccccagtaggggatcttttcactgctttttttttttttttgcagctgaaacggtagtgcggatacacgccctaccgctgcccattgcagtcggggtgggtgcctctggggtggcgatggaatggaatcaaatcgagctaataaacaggtcgtgttgtctcagaatcggcgatatggtacaaaactaattgttggatggattcagtcggagccaaagaacagcggcgcagaccgacctaggagtagaggcggaagcatacctgctctccacggaagcccggcggcgaggggcgccatcgatctaagccggtgctgaatattcgcgccgccgatgtaggcatgccacggagactacaccggagatccac

SEQ ID NO: 38159 - DNA, 1228 bp, Oryza sativa
ctcgccgcccgcggccgtgtccgcgcgcgccgtggccgccgtcgccaacctcctcgccatccgcgacacggagatgagcaggtggagggggctagggttctcagtttttcttcttcttcttctgcgtgcttaattctcgaatgaataagactatttgttctgccattcgcattgccagtgagagatatgaacatctaacaagtcgatctgtttagcatatgcggttttatcctcggcattgggtgaacttcgatgaagttgtaattccagtaggcagttctgttatgcgtaatgctgttagtttagtaggccaaatagcaggaacatgtaatatgtctggagcacatgctagtttagctttcatgtttggttctaatgcagacaaaaacttagtttgggatgcattattgcaacaagaaacaaacaatttgatggtggagaacagtaatgttaggcttcatactttcatagtgagtgttctggtgattctttccttttgttttcattgttctctgattactttgaaatggtggttgtgcagctttgttgtggccagtgcggacctgtcgctgaggagagcagaggtggaggagaagagggacaaggtgcataaggaatcaaaggcgcttcttgattacacaaggaaggccatcaccaagcttactgagctcaagaagtgagtggaaaactattcactttcagtatacttaaggagatttgtgcaaccacttatatctcttgaggaaaatataatgaacaatgtatcatttgaaggatgctggaaaaatttaaaaatgatgtggagaagcaacaagcagaacagatgacggattggcagacaaagttggttatgatggactcaaaggaacgccaatatatactccaagtctccaattataaggtgactagtttttcttcttttgcaagtggtgtaatcagtatatggttttagttcttcttttgacctgatagttttggccgactaccactaaacaaagcagtttctgttgctgaagcagcatatggtgtttgctagagattgtcaactgttagaacttagaagtatatagtcagttatcatttatcaatacttgtgcttgtgagtttagcaggatgctgcaggacatgacatactattatcaagctaaccgtacaactttgaaatcatttcaatccacatatttcctgaatcttgacctgaagaggctgttgatcagatgcttatctg

SEQ ID NO: 38160 - DNA, 651 bp, Oryza sativa
gacaatacaacaatatcttattagcatgttttttattgttggagctagatgacaccatgacaaagtgagaacatctttaggaaatgttctacatgaagaaatcctatagtattaaatattcattgccaattgtgctttctagttatgttgataaatatgtaattatcttgtctatctcttcattaaaaagtgaatgctgtcttgctaacttgctatatatatattgaatcgaaagctctgttgtctgttgctatgttttctggtagacccaatagctaaaggcaattccatacagaatattcaaaattagaacactcaggtagaagctgacataaagaagctggagttgttatcaagtggacttgtgcttcccacttcccagtaggatctaaatattgcaataataatatttttcagaaattgttctttgtttgaatagatgttcttaagccctgactctgaaactcttttcagtcggcctgtaaattgggaacaatgatctgtccttcaaatgtgccttcgcctgattagcacaactggctcatgaacattaaacttggcactcggcagccatttagtgtaacatgctaacacattacaaaaaccatatttggctatagctgataggacactgcaaatctgcaatattgt

SEQ ID NO: 38161 - DNA, 1519 bp, Oryza sativa
gggcgaggcctacagtgacatgcctatatgcattcattcatgaatatatacatatatattcgatcgatcgatcttgtcacattcaacccgtgcagcctgcaaatcaatcacaagctgcttttgctttggtctttttctctctattgcatgcatgtatccctcacttgagaacccatagctagcatgcatgcgttcacgggcttttggcctttcttctctcgcgcgtggagggacgccattgccgccaacaagctcgcgagtgaacctcagccggctctctcgcctctccggcaagaagggcgccaaggccgccctgcccgacgacgacgattacgagccccccgcaccgccgctcccacccggggacggcgacgatgacgaggagcccatcaacctcgtcttcaagggcagagatgaggccggcgagagagggggtggcacgccgcatcggcgaagaggtcgccgccgaccgctgccgccgctccacagccacacttgcccctccgccgctcgccgaccaagccccccgctccgtcgtaatcgcccgccgccctccgcccaccgctgcttcgcctaccgcgctcgtggaggtcaaccaacacgacaacaacaccggcggtgaaaagctagagcatgacaagcgccgccgttccgctgccactctcgcccgctgccctgcccgccgctcccgccgtcccagccgcctctctccccctctcccgccaccgctggcgcgctcgctccacgccgcccaccgccgcgcccgcctcctctcccctctctcgcttcttccccacgcgccgtgcccgcaccgccgcctgtcgccacgccctcatctgcccggccgcctcactgaagaagacgagaaaagaaaatgtgcagctgacatgtgggccccatgtactttttaattttttttttgctgactaagatgccacgtcagtaaaaccgggcaaaaatactgccgagggacctccggtgaacggtttgagggagtttaggggtacacatttctgattttgtggttaagggaccacagaaaatctcgctgttaagttgagggacccctggtgaacttattccataaaaaatctatgggctggccgactgggccttgtcgagtggaagttttgggctagacaatggaggggggttccttggtttgggctagaggggtgcccatgtggtagagatataggggttacaagctatttcgaattttggaccgggttcctgggcaccccctggtcctattgggctccgcccctgcttttacatagtatggttcgttgtttaccactgccgctacagccaataactgcaaatcactgttttgtactgtagcacaagacacaaattactgtgctactctgcctttagcaccgagaggcagagaagctggatctctttaaagagcactatattcttacccaaatgtgctggtaatatacataaagtgctaatatttgctaagagaataatattcgctatagttatgctttgtgtattatttatactt

SEQ ID NO: 38162 - DNA, 651 bp, Oryza sativa
cgcttccaaaacctctaatatagagtagcaattaaagatgaaattagccctaatttagtaagtacgaatcagcctgttatttgacctaacctaatgatatgaatttggacaagttaatacgtagtaatctggataggtaatcaatctcatcctagataattacctgcctagtttgtgatagtggtatcccatccttaattgctactacaattctgggatagatgaagtatgtcttaattcttgtagaaactttatatataatattgatttctcataaaattattttaaatctattattaactttatattatttaattaatgtatttgtaccatcaactatttattacaggccatatattcagctattcatccatttagagagaaaaaaataacgcatataaatagtaagggcccctttgaattgcaggattgagaaaacgtaggattttgatagaaatgtaagtgtaaaatagatgattgtaaaacgtagaaaaaacataggaatgaccatttgattgaaccgtaggaaaaacacaggaattagatgagagagatagacccaaagaaaatttagtaagaggttgaagctattcagaccatatattcaactattacagaccatatattcagctattcatccattcagagaaa

SEQ ID NO: 38163 - DNA, 594 bp, Oryza sativa
attaattaagtggtaacaagtacaacatgtcacttctagtacacaaaccccagtattagtttactctcatatcatcttatatttttcttggagattgtgtggaggttgccccttgcatatggggtggttcattctctctctcctaacttctctcctccaactcatcatctaatcctatatgtcaaatttaggggcaatatgtaggggtttatagtacttgccctaaaaagaaaaaaaaagaaaccacgtccctcccggaaaccgtgcgaaaaaaaacaaaacaaaaaaagaaaccgcatgctgcccgcgctcccctctcctcgcgcggcgactgatcgcctattagctatttcgaccaagtaaacagttgggttcgttgtctcatgagtcacaaattgccttcggtcggaccgtactaagagcaagtataatagtatagtcaactactacctccaaatcatctatagccaatgtaatagtcaattcatacaatagttacttactatatgtcagggttggggataccacatacctaatagtagttgactaaatctcgacaggacccaccatataccatgtcttatacggaaacaa

SEQ ID NO: 38164 - DNA, 639 bp, Oryza sativa
tgactggacactacccctcttcttaagtgttgaagaattataattcaagctttggcatagataaaactagggtcagatttaaatcataatgtttaattgacagtcatcttcattttgttttggcagaatgctgaagcagcaggcaaggttggagcaagcgccaagggcaagcgtaagcggatgagcagcaggcaagctggtaggagcaagtgccaagggcaagcgtaagcggatcgaggagtgctgaatggtactccctcagttaaaaaaaaaaaacaatcctgagtatgaacctggacacgtgtgtgggctcatacccaggatttgttcttttctttttaggacggagagagtagtatatttctgttgcttatcatgtgcgcctagcatgtcgcttttttggcttacatcctgtgagatgtaatgttagcatgtgtttggtttcgggactaagtgggatgggatgaaaccatccctgattttggagttgggatgattccactcacatgtttggtttgtaggatgggacaattctaattttttgtttggttgaaaggatgagggagaaatgggatggacgccgtttgccatcaccgtcaacgaccgtcgcttgcgccacctgcatccacgcgtggaaca

SEQ ID NO: 38165 - DNA, 684 bp, Oryza sativa
ttcaatttgaatactcaagacatcctattgggttttactgacatcaggtttataaattgcaagaggttctgtgccaatttaccaagtgctaagcagaaaatgaagaagtacaggcacaaaagttcttaagcacattttaagccttgctgcacgaaagcacatatataagcttgcttggatttgaataactgcagtacaaacaccagctccatattcctgccttaggctgtattcttttcccctctttcccaactcatttccctcgttttccgcgcgcacgcttttgaaaatgctaaatagtgtattttttgcaaaagttttctatatgaaagttgctttaaaaatcatattaatccatttttcaagtttttttaggttagtacttaattaatctcaccataatcgtgtgcttcgttttccgtgtcagttgggaaccttgcctcctgaatacaacctaatcattgactagcgatgatataacaatggagacatacggtaaaataatccgagcaaaatattttggaaattccaggcaaataacttgaattttaacaaagcagacacattttttaaacttatgttcatatgggaacagtgtatacaaaacattatgctggttatttaatagcaaagtcatctggcatggaacttaaatagataatgtgtaggcaactacaaaatgga

SEQ ID NO: 38166 - DNA, 570 bp, Oryza sativa
caaattttactttgctccatagcaggttgaaaaattaaaatatcctcttcgttcaaaaaaaaaatcttaattgaagtgtagtggtagtttgtatgttagttcatttttcctcaacctgtataagataggatgtgcttattttaccctgacgataggatgttgctttcttgtttatataaggagttttttgatgataaaaaagatggcgtaaagtctataatctaataatctcataatttttcaaatgtatggaaataattgaacaacctgtgattgtgattatgtttaatttttattcatctacatattatgatgatatcttcactttttttaataagcaacatgattgctcatctttgtattaaaagaaataatttatgtgcaaaaccaaaaagaaatgggggagagggaataaaaaaaagaaagaaaagaaagactgcctatgatctaatctcacgatgactttaaaatgaccacgccatacagttattacagcgataaggtcgacatcggagaccaggatatatttgcatttgctttagagtttttaacgtatatgatgaattagta

SEQ ID NO: 38167 - DNA, 686 bp, Oryza sativa
catggtcagggtaaccgaggaggtcgccggagaaactcgaacgtcgccggacaggtggcagacgattggccttgcataagggaagccttcatctttactcttatcatcacaacttatcttactcttaggctttggaacttcactctctgaaactgctggaacagaagggaaaaaaattcagagatagaattggccagtatacttctatggctgattttactggggatttaatcatgtactaggaactattgagtgtatcaagaaatctctgaaactgctggaaaagaggggggaaaacagaaatgaatttggccagttttctatgctgattttactgagaaattaattaactaggcataaaataagtgcatcaagaaatcttttgtattattgttggtaactctaacctgtctgtggtgattttgtcaaagattctttctttccaggagggggatcattctctgtagagattgcaacctgtctctctgatcttgatttattctctgaatctgtcccattcttaaaattttcatttttaaacacggaacctgcagagcattttgaatttgtaaagatttttttaaataaaatacaacctctccctcacctcaactaaaaaacaatgcaagaatcctttattggcaccctaatcattaactgaaagaaaatttagcagattgtcacta

SEQ ID NO: 38168 - DNA, 690 bp, Oryza sativa
cactgttggttttagtcttgcacttcagaatgctgcatcttttagaatctacttaggcttgtaccaataatgcattcggtaattgatttcaaaacctctctatattcattaattaggcaattcactcagggagactctgaaaataatactaaactgagggactctgaaaataattcttaatttgaaagttacaactatcaaagttcaacaagagccaggtaattttcattggttaagacaaaagaaaggaagcttgtattggataagtgaaaccactatgaaataattctacaccaaagaaaacataacaccaaccgtgtatacattcggaaattgattttgaaaactctagattcattaagtaactaattagacaattcactcaggtttgtattgaagaagtgaaacttagaagactgtaaaaataattttctagaaaagaaagcgttccggaagcatggatatcttaagcttgtctcagattggaatatgttgaaagcatcatagcacagggctataaagtaagaaaggtcaattaaaaatagtattgcgccaaaacagtgagccataaacgcaaatgggataattgataagggtattgtactttttgtcaaaaataacaacggaaggctacggaagttgctgattttttttttcaatttcagtttaaatttgagcctctgcatactg

SEQ ID NO: 38169 - DNA, 514 bp, Oryza sativa
accacagcagggtttttatttttaaataatgacctcagcagggtttttttttttgttgtttaagtaaaaaccgctcctctcagatttacaaaaaaccaacaaaagggacaaagcttgacaactttcgatcaaaaccgtatagaaaccaactaatataataccgatcggcttccacaaacagagaatcaccagtttcacgaaaaccgttgaatcctggacctcagtccgtttcttagtccactccctcttcgtctcattactaggctgatccaacagggtcggtgctgtggccgctaccccgatttggcgcagctaccgtcgcccgtcatgggtaagcgtcgtcgaatcgcgcctccgtccactagctccccctatctgcctctagccctctaccaagaaacaccatcgttgtaaccttcgccaagccaccgtgtgtgcgggtcatggggtgggttgggagggaaagatggagagagagaggaagaagtacatagattgacatgtggaacccact

SEQ ID NO: 38170 - DNA, 576 bp, Oryza sativa
actaaaataggaaagtaatgcggtgtcaaaaaagaaagccagccatatggggaggggtgatcgcccaggtaagggtgggcagaaaaagaccaaaccgaaaaaacggagaccgagaaattcggtcagtacttcggtcttatgtgctagatgaccgaattttattcggttaattcggtcatcaccctcgattaaccgaattgaccgaatttcacagaaagcccaatatcagcccaagaaagcaagtccaacattaataaaaccctagctccctctctgtttccttctcctcatccacccagccgccacacccgagcgctcctcttctttttaacgctctccccacctgagcgctcctcgttttctctcgcacatcggcgtcctgttccgtcgccggtgcctctgcacgactgcagcgtcccagcatctcctcctcctcctcctcctcctcacaagtgacaccacgacgacctcctcttcttgcgtggcttcagtggacacccaggccccacagccagcccgagccgcgtggaggctccccccgggggcacatccgatggtgcctcctccactccgacg

SEQ ID NO: 38171 - DNA, 501 bp, Oryza sativa
atacataacgcatttcaccaacccatttgggttctcacgtatagccatctcgcattagtcattcttcagtacttagtagtattaggtatggtggaggaaacaaaaggtgtatcaagtgggatgacgtaaggttcgattacatttcatacatctttgatctttgaaactaattaatttaataatgagggtaatgcgtcaaactaataacataatgctttaatggcctattttggcctgtgtctctctctgtattgctttatgtaaaatagaacgagaaacatgtgacaacattcgaattgtgaaagttatttttttaattagacactttggtttgatcgctgacgatggtcaatggatataataattatcttttcgaggcaatatgcttccgtacgtcagggtgcccgattcatggagatcacaggagtagcttttggttcatcatttatgggattattgcccacatttggtgagataaattcatttctcataaagtctggt

SEQ ID NO: 38172 - DNA, 579 bp, Oryza sativa
atatagtccctttggagtttttttagtccggttaccataggaaccgagactaatttgatttttggccaacccagcaaatatggtttctccagcagtgaacggaactccaaatcggaaatatttgccgggagtgaattgtagtgcttccttcataaagaaaaccttaagcataagcatatttcatttttctgtttctatataaaatgagatggtcatttatgtggtttttgtgtattcgagacttagataagaaaatgtgtttaaaaaaatcatctttccatttcgtttaatagtgctattaaattattgatcgaaacttgtacagttatttattttattacttgttttttacatttatgtacaattttgttttcttcattactcccccgtctctaaatatttaacgccgttgacttttttaaacatgtttgaccgctcgtcttattaaaaaaatttataaaatatgtaaaactacatgtatatataaaaaaatatttaaccatgaatcaaatgataggaaaaaaataataattacttaaattttttaaataagacgaacaatcaaacatgtttaaaaaa

SEQ ID NO: 38173 - DNA, 543 bp, Oryza sativa
gatatactgcaggaggaacctacaatttcacctcaactgagccattgcaacatccaatcattactcaagttgagagtgatcaagatgatcttggtaacactgagattatatttctagattatgaggacaccttggcttatcaagtacaagatgatgtagatgcaactgaagatgataatgcaaatgctgaaaggcttaaagagatgccgcatagaagggttgttgctgtaccaagaaacaaagaagaaaaagaacccaagaggcaaaagaagagtgttggcgtagaaggacttatggaaaggtaccttgatatgaggaccaaacaaactgaagatgaggctgcacaattagcaagagaaaaggaggctcatttagcaagagaaaaggaggctcagttagcaagagaaaaggaggctcatttagcaagagaaaaggaaagtaatgatttttcaatcaagaggtgcatatctgttctgaattcgatggatgtgacaaaggcagaaaaggtcaaagcatataccgtcttcaagaattcagagaaca

SEQ ID NO: 38174 - DNA, 637 bp, Oryza sativa
tgcagcccaattatgagaaaaacaaaatataggttataccataatttgatgcatcacaaaatatgcataactaaataatatttacttaaaaaaatatttgagtcatatcctagctgtttgtccacctatatatcattccaaccttaagatagaaatgacctattctgcaccgaattctacttgataaggcaatataaattatatggaactaaagataaagctattttttttctgtataacatgataatataacggtaatgttcagcttcagaacaagcaagcaaaagctgcatgtgtattgccctatgtatctatatagtatatatgaaaaatccattaaacttcctaaaaactctcacaccgtcaggtgagactcctaccaatgctcctaagttgccacgtgtcactctaataaattagataaaaccttacaaattttgcgaaaaaacaaaaaaaacccaaccctcgattttcatttaattcagcggatccactatttttaaacaattagattagattcatttaaaatacatctcatataattatatatatatatatatatatatatatagagagagagagagacgcacacacacgtactttctgtctatactactcacggcaaaaaagggaaaaa

SEQ ID NO: 38175 - DNA, 505 bp, Oryza sativa
accaccaccaccaccaccaccaccaagaaccggtcgccccggtgcgccattaccccccaaaacgatcaagaaaccacaaaaaaaaccagaccaaaaaagaagaacaaatctcccccctaatctacacctcacgacatgagagagagcttgcttgctagtgagaagattactttgagctggagttgcttaagccgcaccccagctcgcatatggagctagacgaggagatggatcgatcgatcgatcgagcgagcggaggcgttgctgctgctactgtcgccgctgctacacactcgctcactctccggtagtagtggtattaatgtgtttttggctaaaaccccggttgattagggttaaaacctcggtcgatttggtcttatctgcgcgtctcgggggttggaggaggagtatatttaatggagcctatgaacttatgatatgagaggtcgtctcaagctaggtcggggggctattgctaatttgctactgctgctgatgggat

SEQ ID NO: 38176 - DNA, 547 bp, Oryza sativa
tcccccaaaaacatcacatcaaatcttggacatatacatgaagcattatatatagattaaaaaaactaattgcacagttagggggggaaatcgcgagacccatcttatgagcctaattagtccataattagccataagtgctacagtaacccacatatgctaatgacagattaattgcttaaaagattcgtctcacggtttccaggcgagttatgaaattagctttttcattcgtgtccggaaaccccttccgacatccggtcaaacatccgatgtgacacccaaaaaatttcttttcgcgaactttaacaaggaaataacaaacaatcgatgacgttggatgacgctgttagggttgtctattggatcacctaggtttagatctagtcaggtagaacactttggatggatgaacaacaatagatgaattaacaaagagggagtgagagggtttagggatgtgatcggtcgatgttgaggaggaggaagtgcggccggccatcgtcgttgtcgtcgcaggcttgacgtggacggcggtgacggtgaa

SEQ ID NO: 38177 - DNA, 565 bp, Oryza sativa
gctgtgcgtaaagtactttagataataaagtactccctccgtccaaaaaaagacaaaccctagtttccgtgcccaacgtttaaccgtccgttttatttgaaaaaattatgaaaaaaattaaaaagacaagtcacgtataaaatattaatcatgttttatcatctaacaacaataaaaatacgaattataaaaaaatttcatataagacggacagtcaaagttggatacgaaaatccagggtttaccttttttttgggacggagggagtaagtcacaaaaaagtaaataataattccaaatttttttgaataagacgagtagtcaaaccgtgcaagcaaaaactcaaaatcccttatatcataggacggagggagtagttcagtagaggttgtacatacaagtgaacaaacagccaaaccaacaagggaagaccctaggatccccaaatcgttttcaaattaaaatacatcttataacgttttcaaattatgtcgttttcaaatgacacttctggcacgctccacgaaggccgtcagattacgatccgacgaccctcctttcccta

SEQ ID NO: 38178 - DNA, 535 bp, Oryza sativa
ggcaccagactaaacttcacctgttgatcacccttgtctttcattctcataactatataattagctagctgcctagctgtgattaacaataactacagaatgcaatggaatgaaataaaaagcataactttccttatcactgcaggccttaataagttaatatcttctcttactcctccgtccaaaaatatatctatttctggttataaatttataattactcattctatcttaaaatgcaattatttatagctaggaatttagattatctaaaattgtggctaaaaatagctacattttaaaatggggaagaaactattatcctcttgatcatcagctacactttgcagtttgctgacttcttctgtggcagatacaaatgtgccttctagcagttactgcattgtcagaaacccatgcatgcaaggaaacaaacaattgtgtggtgagctcagttaattgctacagtactctatcaccaatacaaagatcaaattggtgacataagactctgggccagcatagtcactgcttg

SEQ ID NO: 38179 - DNA, 540 bp, Oryza sativa
cgtaccaacgatacaatttacgctagaattactcaaaagagtatactatgagatgtgcttctatgctcttcaaagaaaaaattgcacaatttttaaagaagatgagaggttcagattagaagtacttcaatagcctaaaccgttttaacaagggcatttttgtctttggagaaaattaccctgtatcaccgcccctttctcccgccgttcttctccacctccggcgccatcactcgaccattttgtcaaaatcaccatggcggcgctacccccgaacaaagttgtcgtaggcgccagtatctactctggtcctctcgatgaagcttcttgcccgtgattatgtcatcgtggttaggactgcactgcagcctgatcccaacactgagcagatccattatcatctctgatttggttgctttaatcaatagcatcacgattaagtaattcagctagttctctcaggtttgatgcagaggctacaaataaaaaaaacagatcggcttataacttttgatgctgtttcaagtgatgaacgatttg

SEQ ID NO: 38180 - DNA, 552 bp, Oryza sativa
tttgggtcgctattacagatgtctgtttgcctaccaatgagacagccactggggggaacttttcatatagcaccctctttcatcagtcccccacctcctgtttgaatacctatccggctcaccatgtctgtcatcaatcccatgttcataatcaagcctcacactgtttcttgagccatcagttggaaagccagtttctctgctagcatgacaggatcgtaagcagtccttggaatgagcttcattatggtttcttgagccaggagatcttctagaatgatattccacaatggcttcatgaaaagcatgatctgactttgctggataatcatgctcttgagatgggtttctagctagctgggaggtatgcaactcatttacatgtatattcaagtctgcatcggagttatcaccatgctcctgtattagaaatgaattaaaatgtaagtcaccatagaagagaaaattcaaaagcacgacgtgaccagttaaaaagggagcaagggagatctccctccttaacacaatgttcattgcttatgatactacaaa

SEQ ID NO: 38181 - DNA, 529 bp, Oryza sativa
aattcgagctcggtaccccagatcatgatcgcacgtggttgcatgtgattgacgtggaggataggatagacttcagaagtagtgtaacacatccggcggcatggaggtggccaccacggcgttcaccagccttgttgtcgctgtgttgtccgacgatggccaccacgggtcggacctaagctgtgccaggtgtggagtggttggagaaaaaggatagagagaggagaagggcactgcaagtaggccctacattttttcttatttttcccatcacttacatgtgggccgaacttctattttgtgattgggctaccacgtcaacacatgcggaccaagtcaacacgtcacgtcagtgaaaactgctgatgcgggagtccaattatacatgttttaggccctgtttctttcagcttgggattattataatctagattattgagtcagattagtataagctagattgttataatctgtagtagaataagtggttagttgtttcttttctagattattagagcctagattatta

SEQ ID NO: 38182 - DNA, 533 bp, Oryza sativa
tatttttattgttgttagatgataaaacatgattaatactttatacgtgacttgtctttttaattttttttcatattattttcaaataagacgaacggtcaaacgttggacacggaaacccagggtttgtcttttttttaaggacggaaggagtatatcggaacctttgatccgtacggataaggtttttttttcatttttcatttatttatttatgaaaatatttataaacataatttttatatttttcaaagtattgcagatttaaagattctacacccgagcttcttgatagggggtaatatttgaaattacaaattatttttctaaatatttcaataaaaaaattaataaaagaaaaaaatctactacgttgcgaacccacagcttaggaaaaacgctaaggtcacccaaaaacggcgcgcgtgagacgtaagcaactcccgaaatcggcaaccggctccgccgcggccgatcgattcctccctctcgtataaacacacgagcctccccgccgtcgccggcgccccccc

SEQ ID NO: 38183 - DNA, 604 bp, Oryza sativa
aacaagtaccatgagcatttaagcacaagactcaggattatcacgtataattaaggccttctttagtttctaaaataaaaacttttcacccatcacatcgaatgtttggacacatacatagaatattaaatgtagacaaaaagaaaaaccaattacacggtttgcgtgtaaattgtgaaacgaatcttttaagcctaattgcgccatgatttgaaagcaaataaataaataaaattattatgttgtattacctctgttttttaatagataacaccattgaattttgggtatatacattagattatccatcttattaaaaaaaatcatgtgatcatttaaatcaaatgatctactcactctatcgaaaaaaaggcaaccttccagattcattgtcctaggtgatgtcaaatcaccacctatgttaccctttttaggagagggagtaaaaattaacaacgccatctattaaaaaacagatgtagtattcgagtggaggcaatgtgttatatgcattaccccttaattaataactactccataagattattggtgattatagctccgatatatgagtttttttcttttattcgctgatggatgagtc

SEQ ID NO: 38184 - DNA, 517 bp, Oryza sativa
cacacccccccttctcctctcagatccgcgtcgcggcggccccaaatcccacacgcgcacagcgcagcaccaacgccggaaggagacagcgcccctcgcccccgccaccccaaccctacgagagggagggagccagccagccagccagccaggcatggccacctccacttccactggccaccgcgccgccgacctcgtcctcccctcctaccccgaggcacgctctctttctaaaccctagctgttcctggccagatgcccagatctgtggcggaattgaccgggtttcttgggttgtcttctccttctctttgctgcagatgatcgtggaggcgatcgcgtcgctggcggaggagaacgggtctagccaggccgccatcgcgcgccgcatcgaggcggcccgcggcggcggcggcctcctcccgccgtcgcaccccgcgctcgtcgcggcgcacctctcccggatgtcagccgccggggagctcgtcgccgtcgcgggtgggaagtacgcgctccg

SEQ ID NO: 38185 - DNA, 539 bp, Oryza sativa
gtcgtcggagtacgtcgggtatatatcgcgtgatacctggcacgtgatacctacctgataggtatcacttgacacctggtaggtgtcacctgatacatcgcaagtatcaccttctatgtggtaagaatcacatgatacctgataggtatcacctgatacctcgcaagtatcacctgaaacgtggtaaaatcgcctgatatctgatagttatcacccgataccgaacctgatgttaggtatcatcccgttcgaaaacgagatttcattatatagcatccctcttacatctacttcctccgtccaaaaaaaaaagctaacctaggagaggacctggatagacctttatccagatttgttgtactagaaagggcacatcggcagagggagtatagtagtagtatctcgctgtagctcgcattaataaaggagattcttacgaccgtataaaagagaatttgttggtacatttgggataaacgacacaatcgccggggactcaaaagttgctgacatttgggatgaaccttcatatatatgac

SEQ ID NO: 38186 - DNA, 527 bp, Oryza sativa
attgctagacacggcgacgagctgatgtatatatggtcaagagcaagggctgtttagcagggtgtgttctttatttcttcactatttttttttcacgaacgcgcaaaaagattgcacgtcaatatattagaaggaaaagagttcttattacacaatgcaatcagctatataggcttatgccaaggggggaagagagaaaaaaacaaaacaaaaactgcagctaggtttactatggcggctaaacgcaactccgatcagcgggaaaggatagagccacactacttatttcttcactataatctggttgtttacccagagagacatatttgccttttttttcaaaaaaaaatgttttaaaaagttttactcattaaatagggaaaaggaatcaatctacaccgttaggtcgtcatactggaagtataaattagaattgaattgtactctagagttatcaccaccgtaccgtcatgttaaggtgcaaaagagaggcatggaaagtgtttaccgatgtgatgggtgttgcc

SEQ ID NO: 38187 - DNA, 549 bp, Oryza sativa
ttatttatttttccttcaatctctttgactctagtaatattaaacaagtgaacttgcatcagattattcttctttcctccagccaccattctttggaaccttgaccctcgacacccccccaccccccaccaatgttttgaacaaccccaacatctttaaacaaaggaacaaactgaaactactcttgtatttttacttctatcactaacagtattcccacggtctttgaacaatcaagtcaaaaataaagggataaccatcactgccagcctgccatgtcaacatcttctagttcctcctcactagagaaaaagagcctccaaacaaaaaatcatttagcaatttgattggactaacagctactatctccgtcccaagacataaaatgttttaaaattagacatgagtattataaacataggtgaaattaaatatgaaaagattgtgattggtgaggatactaaaaggtaaaagatcgtttacattttgaaacaaattttgaatgctataaattgtaatatttaagcacgaaagtagatttaacaaaca

SEQ ID NO: 38188 - DNA, 523 bp, Oryza sativa
attgttaatccgagcaaattcctttttttaataataaaaatggattacatctccggcttctgtcataagacacacagccataaatttaatagtaataaaaaggtaagataaaagtaaatcaaaatgagaaataaggtgatgggacaagtccccaagcaaattcctttttacaaagttattcccgactagctagctagcctagctgaagccagacatctgttgcagcaatcatccaagttgccataatcttgaagctcgcctctacctgtacagtgttagaaaatgtattttttttttaaaaaaactaaggcagcgttcgaaagggtgagagagtgagtttgtttgtttcgttttccgcgcgaacgtttcccaaactactaaatggtgcgttttttgtaaaattttctgtaggaaagttgctttaaaaaatcgtattaatccatttttaaaatttaaaatagttaatactcaattaatcataagctaatagctcacctcgttttgcgtatcttcccaatcaact

SEQ ID NO: 38189 - DNA, 727 bp, Oryza sativa
ggagacaagaagaagaaggaagagaaaggtgcagcttaactgatggctaactgaatcttcttcacttcccatctgaattttcatcgaattcatcagctcggatgattggtttaatttaattcgttttcaagacaaaagttattttcagatgcaaggattaattaattaagctagcttgcctctttcaatatttgaaagttcatattgtttcagtattaacatgtgagtggtttttgcgtggaaatattgatatgatgctgctgcagttctgcccaccgtgctggacgtcaccgttgagacgccggactacacgcagctgacgctcaaggtgagcgccggggcgcgtattatctccgtcttctcgcatggatattttcgcgtaattaattaattaatatggaccacccagtattctgaccagtgaccactgtaactgaatatgtactgttccttctattcgatggccttaattgtgcttgcatgttaaacgacaaaattaagtaaattcttctctagctttcacttgcaacactttcatcttgttttttttaaaaaaaaagaaaaaaaaactttgtttaaagcgaaagtgcctaccacttttctcttagaaactcctatatttatttttttcaattgcacagaaaacgtgttttacttgggctaattagcaatggcgagcgaccgagcatagccgcacttaacaaagctggcaagaatgaccccactc

SEQ ID NO: 38190 - DNA, 698 bp, Oryza sativa
gtagctagataagagtttgccaatagttgttcaaaatctcatgctaatttgactatatattcattagattagactgcaactcatatatatgaaaactacagttaattaatttatcatagcacgcacgtaaccatcaatatggccaatgtcataaaaaaatgcaatatgacactcatttgcacctgtataattctccaagcgttctgcaattgggtgttggtgtgcaggtaagggtttgtagtgggaagccggtgaccatcgtggcctccaaagctggattctatccagcagggaagcgagcgctcatcagccactcccttgttgggctgttgcagcagacgagccgggcgtttgatggagtacgtgtgaccttggagattttgtgatttgattattaatgaatggtatctcattgatgtggaaatatgtgtgcgattttgtaggcttacaaggctcttatgaaggcttttgttgagcataataaggtgaggtcttgctaatgcttgatttcttgattattttcagacatgcctgaatatgtgactatttaaaaattattaatttcaaagctaaactttaggttagagatcattttctaggtttattggtcaatgcatttgaagagacataccctattttccacggaaacaattgaattcgtggaatggaaataagctaatgcattttgtttcactaaa

SEQ ID NO: 38191 - DNA, 554 bp, Oryza sativa
aacagagtaggggaacatttaccttgtgaagaggtgttgtgctaattttttcacaatttttttctattttcactttatgcaactgtacaataagaaatgccatatcccaatttttttagcacattctaggcccaacagacagtgcatgtacatggatatgttattgttagtgaaatatagggaaaaggtatgataacccctcttagaaaaatgcgataacatcaaatgacaaacctctagccagatgcgaaaattttaagtatagctgaagcaaataagggaatatctgcaacctatccttcattatcctgaagcatcccagatatcttatgcaaatagctacattttgatggaatctagctgaggaaaaggaaatagtcatattgataactatatatctttatttttctgttcaaaagtggcatccctgtgtgaaactgaaataagatgttctatctatatgacttctattaatggttagattagattcttagcctatgcaaagaatctatcaagtacaaatctactatctactactactacttaaaaatact

SEQ ID NO: 38192 - DNA, 632 bp, Oryza sativa
agaaaccaatcaagcgagacgggattaagcggcagctctacgttggccttagcattgcagaactgcaggtcgcttagcttagcgcttaggcaggagatagcgagcgagggaggcagtggagagggaagctagagggtgagaggcgataagaggataagggatatatagctgcttctagctagctagcaaagctgagagttgcagcttctactaactctgaacctcaagcactgttttctctgcagaacggaataggacaaagggtgaaccggtgaagtgtttggtgaattattttagtctaaattaatactacctctgcttttttaatagatgacgtcgttaattttctgccacacgtttgaccatccgtcttattcaaaaatacgtaattataatttattttgttgtgagttattttatccctcaaaatactttaaacatgatttatatcttatacttctgcataatctattatattattaaaacagccttaaatgaaggcaccactttgccgccgtgggggctagaaattcccacattaatcggagaaaaagaaaaggagagtccaaatagaaatacaatttaaaaatagctgaattcggaattaaaaataagtaatattgaaagaaaac

SEQ ID NO: 38193 - DNA, 613 bp, Oryza sativa
ctaaaaaggtgtttagcatatatatttcaatagaaatttagtggggttgtagatttgccatcgatgtgcctagtgtgtgtgagtgtttcatgtaaacacaatactataggaaatttttaaacaaaagaagcagtactaaaatactatagggttacagcgatgttttgttttgggatttgaattcttggtagatatagtcaaggctactattgcatatagcagtgttggttaatgggtgctgtaaaaaaattgacattgcaaataagcatttcctggagagcaagtaattgaggtgagaattgtgtgtgaaactcgggcgctttctaaatagatgttgaaaacttgcacgcaaaaggagaaacgtgattggcatataatcagtttagtaagaaatgatcaataaatttatttggatttttcaaaacaacttctatataaaaattagaagaaaaaaacacacactgtttagcagctttaaaatcgtgctaatgaaaatcgagaaagtagccaagccgaatcctggtttagaacatggcgtaattaattagtggttcgtgtgctgctgatggaggtagctaaaccgaggctggaaagggaaagagagaacaaataa

SEQ ID NO: 38194 - DNA, 660 bp, Oryza sativa
aggaagaagataacctatgcaagtcatgttggattgtttagtgacagatagctaatatctgtagtgtatattctctatctgtgattttcccatttcacttctattggttcataaaatatggggacggtcataggtagcaactaggttgcattttagtgctgttgttttcatgtccatgctttcttttcaggcttgtaggttttctgccattattgagcttttccatggccactgcaaacaatccaggtccccttgacttggttccaggtttttcacctgaagacatggacaaccccattcataatggtaattgcctttgcattttccctgtccttttaggttgtcaaaacattgaagtaatgtttgctttcttttctttttcacagctgccttatcctacgtgtcatatgatagatatgtgttagatacctctgaagtgtattttgatgattgcatcccattggagtcttatctgaatattagaccaatggtgacttctgattcgtatcagtttcgttcatttggggaaactaatccaagtgtgacttatctggttgcaacagagtcatgtaagaaagtaatcagaactatgctgaaaggactaaggacaaatgagtcgagaaatttgcgttttttggatttaaacatttcaaacatctt

SEQ ID NO: 38195 - DNA, 1665 bp, Oryza sativa
ttgcctgcctgttttcttcttcttgaagagaactgcctccatcgcgcgcgggcgatggcggccaggaacaaggaggaagtcttcttcgatcccgtgtgagggtagtgaggtcctcaagaaggaggcctctctgggtgtcgaggaatgtcccggggtccatggagtgctggttggaggagtctgggaagaaggtggtcaagtacaagatgcctaatgttgttatcaaacaaatgatgagctacccctacacctacccggagtacgcctacaccgaggaggagctggcccaacgttctgcctcaaactcagaaagttcatcgatgaaaagatgaacgcctacgagcagaacctcatcgaccagtacctcaaacatggctatgcgttcgacgaggagcacaagtagcaacctgtctgtgttgtgctgcaagatccatgcatcgtgtccctgtgtctgtgtgtgatccacctatcctaattccttcctaagtgtaagtgtctgctcaccaatgactatattctagatgatgggcctgcacacaaattttgtaatccattgtttacatggtttaataacgtgcaataatcagaaatgtgtgctaaaccaaaatcatatagatacaaaaccctgagtatcgatgataaagcatatggtgtcggttttgaaccctccatctacatgccagccagtgtccctgaccatttgaccaaacacaagtaaaatgacaaccggtcagcaaaacattatattttccatagatgccttctcaaatagcttgcaaaagagtcagtttctccaaattaattgctagactgattgacttcatttttcttttcataaggagcaattgtaaagtccatcttgaagcatcccagatatcctatgctaatacctacactccccctgaaaggcatgcatgaatatggtaactctgagatcacacaattataacttaatatttctgcatgattatctctaagtctcttagcgtgattagaagatctttacttgttccttggaaacctcatgaacaggtgtgcaacattctgtttaatttgaatcaggcaatgtgctctggaactaaacactcggtaatgaacactgaaatgcagccaagagctaactaatcaacacaatacgcacaacacgtctatgataatctgaaacaacagcataaattcacaagaaattccttcgagtgacgtatatttataacctgtcacctaacatcttccctaaaaaaatgttatatcttccctgaaaaaataatccagtttccacaccaaaaactttcaaaaaggtttagacgaatttcccctctattgattttgcatatcaatttagacactgtacttatttgaacccaaccaaacaactcccacgggtcctcgagcagtacaactatctaaaaacttcaactgtgtatattattatgccatggtatattgaatggaaattaaaaataatgtgaaaaatcataatcccttcatgttgaaatgcatttttgaccctaagatataaatgctgggataattcaatatggttagaggtaaaggcaagcttcacatggtgtggcaagaaagctgggttgtaagccatggaatctagtttcagcttccaagccacgtgtattgaacacgttaattgactgcaaaaccacgcagatt

SEQ ID NO: 38196 - DNA, 570 bp, Oryza sativa
ttcatttttccatcttgcctgtactgccacatttgtactgatgaacctttattgaaagaaaaacgtgaacagcctgaactaactgaatgttgatagggtgaaatggacgttgtaacaaaatagaagtaaactcacgccactaaatgtacttcgagttgttcagtgctggttgttttgtatatttaatgttactatgcaatctgccttgatttttgttgcatgcagtttgtgagaagcatagtggattgaaagacaacaaccaggaaatttcaatcgggagtgagatacctgagaatgagcagggtgctgtaaaacaagaattgctttgcgtgctgacaaatccgagggggaatgaatttggtattgacaatttagaaggaaatactgagacagttcatcaggctgatctcaataatggatggaattcgatgccagtggaagctggagtgcatgcctctgaaacttcaactgagaacaatgaggagtggattcagccaggtgagctgagccagaaatcgaatctgatgccgatatactctagggagcatgctgatgaagaaattaaagagg

SEQ ID NO: 38197 - DNA, 522 bp, Oryza sativa
cctattgggccactgctctttattttttttcacttttttttctttctattaaagatcttttttttttcttgaggacagatgatgctttggttgtgtggaaagaaaaggatcgatcgatttggagatcgtttttgctactgtttgagtaaatttgtccaaagtcaacggtagatccgtttttttcaatacgtcatgcctgatgcgatattgctaacggatcctctctgcaagggatatttcagtgtgtttgaacgagaccagcacccgtaggccgtagcccgcgactccacgacgtggctttccaaaaatcaaagtgaaatgacttctcaagattgccgtcttgaattcatcggcatattggcaattggcatagcatttcgttcttttttggagaccacgagcacggacaactcgaggtttacgtttggaatgtctcgccgcaacgagatgtgctatttctgttcttgtctaaaatatataggtacctaatatcttggtgctacttctgtctaaaatatatag

SEQ ID NO: 38198 - DNA, 525 bp, Oryza sativa
agatatgaataaccttgtaaaactgcggcattttgttgtccaagatgataaactctactctgacattgctaatgtgggtaagataaagtgtttacaagaattaaggagatttgaggtcaaaagacaagttaaggcatttgcactaagccaaatagggcagctggatgagctaaaaggatcgttgggaatttatgatcttgaaaatgcaaaggcggcagaggaggcaaaacttttaaacaaaagtcacttacacaagttaatattagattggaatgttaaccattctacaaaggattattcacaagaagaacatattcttgaaaatcttagaccacatagcaatcttcgggagctacatattcaagggcatgggggtaccacttgcccttcatggctgggtcctaacttatctatcaaaggtttgcaatcactttgtataaacggtgtatgttgggacaagtttccacctctaggggggttgtggttagttaacaagcatggtgaaaaattcctggcttgtgcaag

SEQ ID NO: 38199 - DNA, 506 bp, Oryza sativa
acaattcatcattgcttttatctacattactagtagacgctacagcactactataaagagtagcaaatctatccacttctgaaattttaatctggttaatggactcctttatttctaaatcattctttcctagagaaacccctaatttagaaaaatttgcagcaagagtcttatctggaattgaagcaacagaatttgtggtattaaacttgttacctgttagcgtctcgaggttatgaacctttttaagcagctctgcccggtttgccaccggcgcatctgcatttgccatcgccttctgtctttcactttgcctagttggaatagggtccactgggcgacgaggtcgccttcttgtcggggatcgagctccaactgcctgtgctgcatcggtgggctttagatgtggcagcactggaggcactaaggtggtcttcattggttgctagtgctgccgtcaaattgttagtcgatgttactcttccatcgcctgcaagctggctatt

SEQ ID NO: 38200 - DNA, 4461 bp, Oryza sativa
cggccccggccctggccgccgccgccgacgcgaggccgcggatcggcgcgcgccacatcacgcacgcgaccaccgcgccgcgcgccgccgcctccccgccgctgccgctgccggcgtgcgtgcgtgcgtgcgctccgcgtggtggcgcggtccgcggtgaagcgacggtgcgcgaccgcggccaaggcagaatggctatgttgttgggccgttgcgcggctcgttggctgggccgcgtgttgggctctggtgaacgcgtggtgcagttaggccgtgatccgtggactttgactcgagtcgtgtgatctgaagaaaatcgcgggggaatatcctcgcgattcgcgaagattcaagcggagccacgcgttgctgcttggtgagcagcacactcgcgcttggcttcttactccactcgacgactgatggaataagggcgagtactgtaatgccccatatattatctctaatggtatcacctatctattttataaataaggtgtagatcctgtgtcagtaggtattagttattgttgtagtcacaatagtaaaaaacaaaagtgggtagtaagctggaccccacaatcgctcgctacgagagaaatcatttgtttattccttatgactaggtagtaagaataatgcctggtattagttacttaccggaaatgctacttggcgatcgctagcttagagtgaccgggtagcccccccctcctcccttaccttttttggcaccgcattacttttctattttagtaaatatatgcacctaaagtttatacaactcaagtttacacatctaaagtttagagaccaaaagtatataagtcaaaagtttatatatccgattcaaatttgaatttaaattcaaatattttttatatatatagtatttctatacatctaaagtttatacacctaaagtttatatatccgattcaaatttgaatttgaattatatcctatttaaatttgaatttgaattcaaatatcctattcaaatttgaatttgaattcaaatatttttcatatatagtatttctatgcatctaaagtttatacacctaaagtttatatacccgattcaaatttgaatttaaattatatccaattcaaatttgaattcaaatattatatatatatagtatttctatacatctaaagtttatacacctaaagtttatagacccaaagtttataagtaaaaagtttacatacccgattcaagtttgaatttgaattcaaattttttatacataattttttctaacttttgtttttttaaattttttttgtggtgtactgtaataggaaaggaatgggaggaggaaggggagaagggagcgggaggtgggaccgatcgttgggcgatcgcccattaggccccccgttacttaccactcccacaatgtatacaacctggtagtaaggagtattttattccttactacccactttagatgcacattatggatgccctaagagtgtcatattggattgagtaataaggtggagaaaagaagtgaggagagagataatgagccacccctaaaccaagagacaacctccacacaaaattcaagaagggtgtgagagtattagatatattggtatttgtgaactagatgtgatgtatcgtatgggttgtctcttagttcataagtgaatagaatagataaatttataggtgttagtcacatatatcatagcacttgcccttaactagggtatttgccactcttacaagtggttctagatgattttttattggacccatatgttatagacacatggagacccatatgtcatggacaacgagagagaaatcattaattggcacatcttaaagtgacaaataattaaatctcccacgactgattgtcattcaatagcggttttatcgcgggtgcatttttcaagtttttaaacggtaagaaatttaaactatatttctatatattttcaaaaatctatttttaaaattttgaatatccaacttattcgtttgtgttccaggcaggagtactgcatttccgtgccgaccggcgaccggcgaccggactgggcaccgctctgtttgctagtggacggcgccataccgcttgatctagataagctttccaggcgaaacggcagagatggaagataagcaaagttggatagatcgatctgtggaatcgcttctcagctctcacacgtatgcacataagtcaccagctcaccatgggcctatttggctttctaccctactaattaattggtagtcctaaaatctagtcaaattttggcactaccaattttttgatagggcaaagttaactagtctatgtttggtttaataccaatataaaaccaaaatttagtataagagtgaagaagattctagaatgtagccaaattaagcgtgggccctattaattatttggcttcaattcaaactaacatgtttactattaaatttaccaaaattttggtagggtcacgttttatcttcgatataaaacttcacggcgtattgttaagaaagaaaaatcttccagtgatacctgtcggtagtcacgctatatttcaaaaggaaaaaagaaacaaaaacgtgcatcatatcattacatttccagcaaaagaaaaaaaaaaggacaagccaaaaccatgcatgtactgtcggccactatacaaaggagagggaagagaaaaacttggcatcctcttcttcccgcttgcttaagtgcaaccatcgcggttaagtacagtgctcgacaaggcacctatttacgtaggacgttgcacacacgtatgatatcgccgtcttgtaagctttatacaagagagagcgcgcacgcattgaccaactttcaatccccggtcttcttcgcggctaggaagatttttctttcttaacaacacgccgtgaagttctatattatagagcaataagaaaaataatcttctaaacgacgtctttgaaaaggatacgatattgagaatgctgccaccacacgtattagggtgacaggatgtggttttcatctaaaaaaatccattagagggtaggaaagatcactcaacaacgcctcaagagaaaagctgtaggtgcccgtgagcgtcggcgttgctggcccgaagagactaggctttcacctgtaaccctcctaccccttgtgtcgagatcgcttactgtacacagaagccaccatcaactacactccttcgatgcacagacactgcgccagcacctcaccaccagccgaccatcaaatagaagctcgacattcgacgcgttcaaatccatcaagataagtagaagagggagagggtgagagaaaaatagaaccctctccctcgcactagttttcaaacgtggtcattttgtgatgccaaggcaccgcctcaagagaactagcgtcttgatcgggactcaccataggcctgcaacgtccacgtcacggcgctattgtcatagccaccttgactagactgcacgtgtcatcataggccgtctgtctacatcgccgtcacctcgacctattgctccttagcgccactggaactacagccagagcaccgtctgccactctagctcagttgccgttggttgcggcctcccgtcgcccacgcctcaccactctcaacgccgtcaccgcatcggcctcttaccgttgatgggtgtgccaacctctacgcatgtaggaagatcgaccaaatcttctgttaatatagtagtagtgactgatatgtgaatccgaatccatatgttagtatgtactattgtaccaataatactgcagataatccctaccaatttttcagtgttcgagaattgaaaccggaaaggaggacaagcgaccagaggtgatggcgcagagccaacaagtggaagataacctgctgatcgatcgatcaccgggcggtgttaggttgcctcgttgaaaagcttctggaatttgtactgtctagtccatctggcgtgtactttagaccggccttttcccctgtctcgatggttccgtgatactactaataatccaacatgctaatctctatcagtacaaagattaacgcgtcactaaaaaggccagctcattcaagatgagcatcccgttgtcttatcaatcgatcggttcatcctttgccgtgcatatccgtcaggtactagatcttgttctctctttctttcttcttttctttccattattccatacaattaagcagagaaaattgtctcgacattcaaaagcttaaactacccacgaatacggacagcaagtagtagtacattcaagtcccattttttgatcaggtggttgccgaaaagcgaactgaagttggcacaaaagtactactcctatgtacgccactgactcatcgtgactgaggacaagacaaaccgtacgcgcatcatccccaaatcccgagattttcacagcgaaagtcagcacatcaaagaggcacgcagcccacacc

SEQ ID NO: 38201 - DNA, 654 bp, Oryza sativa
  unsure (1)..(654): unsure at all n locations
aatttgctcaaagcttctcggaattacgaacggggcagaaaggcgaattactttcttttgaaacttcttgttagaagcccttgttttctgctgaacattttgtccctccatttctccctctcaagaggatcttgagacatagcagtcctaccgccaatgatgggaaaaactttcaaggaacttgntaatccttttttattgggggaatgtttttgtcactgtggtaggccccttcctctcgagctccagaagtctgaatcttcgtcagacaatgaagccttatttgcaagaatttgcctcctcgattggatgccatcttggataaatgaaatagcagaatgcttattatcatctaagtcacgttgtgattcaatactgtcttggttgttcaatgattttggtcttttccacccacatttcaaacagaatgcattcctcttgaagttcaaataattacacctgtcatgaatcaatcgtatagttatcttggaaaattttttatagtaagcagaagataatcatgacactgaaagaccagacaaagccactaacatcattttgttgccaagttctcatattgatactaactattaagagaatgcaaatatgcagtgatatgtaacaaaaatgccactcacgagacacactcccatt

SEQ ID NO: 38202 - DNA, 876 bp, Oryza sativa
tttttccctaaagggggtagttattgcccagagtcgtgggggttaacaaaggccctttgggttttattaatatttgaaaaaatatatattgtgggacccctttgtcattcgaaaaaaaattaggacccccattttcatcctctccagcctctttcgctcatgcctcttttgtcctttgtagccggtctccaaagggccagaagttgaaccaaccggtgctcttttgtccgcaacccaagtattctgcatcgggcctttttgacttgccaatcacgttcttccgcttgactttggatcccaaccaccatgttctacagatccgccatcacgtccacacttcccacagtttccagctcgccacactcgcgtgctttctagatgctgggtagggggctcctcccaacctcgcacacctgtgccgccgccgctgctccagccttgctcctcgcatccgtccaaaggtggaaaaggggagacaaagggagagataatggagagagagggagtaggaagaagggggaggagaaagatgatggcatgtggcccgatagggttaatggactcttctgtcagatatggatcatgtttgaggagacgaagattctaaaagctagctggtttggtaggtagctatagcctctaaaaacatgaaaaaaaatggttcctcagcttgtaattttcagttattttctaaatagattgtatagttatacatcacataaaatatgtacgctttaaattggatcatgctttaaattgtaagtgagtttctagtaatggtaacttctcttacaatttctagctcttaaattggatcatgttttttttaaatattttcagcttctctacataattcaaattgtcaatcatactcta

SEQ ID NO: 38203 - DNA, 608 bp, Oryza sativa
attattgtaaaaaacactaatgtgcacttactgaactgaaagggccccgtatcactgatgtagaaccatcaaaggttaagctagctaagccaatcttggataagtacttgcattagacttattattcatatttcaatggtagaatctctaaaaaaaaggcaagggaaccctttttaaagatttataccccctataaagtatttaaattcaataaagatcgtattgacggctcacaatttataaaaatatattgatatggttaaacatgtgtgcagtgggatggtctttaaaacaaaattgagtagtcaatgcgtatttaataaaataacttataatgtcaaatgttaaggtttaagtgacttatggatgggttttgtaaatatctctttcgcttgacgagttcggcgtctactgggtgtgacgtgcacaaaactggctttacaggtggacagaacattgtatttttccccttgtaagcacaccgccacagaccaatgccatggtcgatgttttgcctttgacgaacctttatcctagaaaaatataccatcggcggtaccccgatccattttttttctgaatgccccaaagtgtctcacataacgaac

SEQ ID NO: 38204 - DNA, 629 bp, Oryza sativa
tagctgcctctatcttctttggtccatctgctttgcattcaaggcagtgccgatttcgagcaaaatttaagaagttgcaactgccaaaatgagaggatgttaggacagggtcattcacaaggcataaccaggcatcaacagtccagcacacacacacacacacgcccacgcacacacactgtggatggggaataaaaataataacagtgaagtaaacgataaaagaggccaccataatatcataatcttctaacaccatagttaaccataacctgatatcatctaagaggtgtgcctctatgatccacaaagaacattacaaatattgtaaagtccatagtaatactagaggttccttgtccaaccatttaactcaatacttactttaagcaccgtgcaattttctttgttgaagcaaagacatatttacactataaatgtactccctccatcccaaaatatagaaaccaagtactatgaatttggatagggaggtctagattcgtgtactaggttgggtctaatccagtactagaatgctattttttaagaacgagggagtaccaaagagcgactaccagccgaaacccagattatttggattcactcattgagaactggtacaacca

SEQ ID NO: 38205 - DNA, 599 bp, Oryza sativa
cgactctagaggatccccatgtaaagggataatgagagcgtttgttttgtttttcaattaaactataatccagaattaacaatgccgaaaaaaactagatactgacatatcttgggtgcctggcatttccaaaactgatagcaaatcaaataaccataattaactaaaatttaatgagtcaatgacccagccaaaaaccagatatggttcccaaggcgtttccccaaagggcaaacctttcccccaagggtgaagtttccaaaaaacccctttggggggggggggaaaacttgtgatgttcatttgtagaacttagagctaaaatcacattatttgttgaacacaaaataatggttcaacacaatcaacaactaaaacaaaaccgcgttccgagaggaccaagtgaaatggtgaccgcagagcgagccgaacaccccccccccactaggacaacgatttggacaaaccaattggccatatataggtttggatgcaaccggaccgactaccaaggacaaaaacaaccggcaagcacagaaggggaggactattaggattttaaatgagcaaataccaataaaaagaggttttaacatagg

SEQ ID NO: 38206 - DNA, 615 bp, Oryza sativa
  unsure (1)..(615): unsure at all n locations
ggccgactctagaggatccccgatcttcacccaaaggagaaatactcatttaaatttctgacaaacaacattcagggatgtcgcatttttgcgtaccagtttcgttgagcctcacgatcagctgctccctgcttggaagagtgtacatcccagcaccaacagccttcctgaccgcccagctgtgaaacggcgcgcaaacctgccccgtaaagctgttccgttaggccaaggcccaaattccaattaacccaaggccgggaaaaaacccaattttttttttccccccccctgaaaaaaaaaaaaatgaatgcaaaaggcgaagctgtcgtccattagagcaacagaactacctgtcaactgtgtcttatatgagttacngatgccaactggcaataattgtacccacttagcaccatcggcatccatccgatgatatatgnagnactaacaattggcgccggccagccttgcctcagaggaggacaaaaggcacaatgaacaagttgatgaatatttattggtacgagacaagtttcagactgttctggaatcggctgaatgcttcagatttcatttcgaattgaaaaaaaatatggtgtgcttgggtgagaggga

SEQ ID NO: 38207 - DNA, 1203 bp, Oryza sativa
ttgcccgttagatgcaccagcacctttgtgcgggacccacctgcagtctccggaaactacagaagtacatatttactcaaagcatccacatgctgatcaggtcaaagcatccgtgcagaggtaacacaaaagcatgtaggcgcatatagctaacacttgattatagaagcatcaaaatgcagaaatctaatacctaattactgatcgcttcatgagacttcaggtgggtcccaaacatcaggtgtcaatgcgtgtaatgggtaaggctaaaactgtagttttgtgataacggagacactcaatctgtagttttataagacaagttcttaaatttgtagtactgtgatagactagcataatacctgtgagttgcaacagatatcttttaagaaaaatagctcatcgtatatattctaaagcccacaataattgttcttattgcctaatattatcatcatgttacttttgcagtcactttctaggtgtctattgagctagagttctcagggtctgtggccttgggggttgggaaataggcaaagtctccctgtttatgggtcccacatggttattgggtacttgggtggtgattcaccaccactaccactaccatcttttacattagcacagatatagattgtgcaaagtacctgttgtcttgtgaaatttaatcattttcttttatggcagcctccttatgcacattatcctactgacatgtgggcccagacccaccttgtgagttgtgagtgatgcaacaaatgatttgcaaatttaagtttgcatttatgtagttatatttgtgagtgatacacaaatgatttgcaaatttaagcatgcatttatgtaattatattttttagtttatatagaagtaacacttggggtaatatggaaagaacaagataagttatacattgggtctggaactctaaataacaataagcaactttttattgagcaggttgaggatggaattgtatttctcacattaatattaaatgttaactactaatctttttgtgataaataggtttattgccaagtactgacatggtgatggtagtttggcactgctgcaatggactccagtgtaaaggaattggtgggatgatatctgctcattccaccactcttctgttatcaaaagcatacccataagtccagagatgctgtgattcagaaggaaggcatgggaggatg

SEQ ID NO: 38208 - DNA, 595 bp, Oryza sativa
tgtgctctgaaaattccactaaaatttatttacacattttaggcttttaggaaatataaaaaaatcctcccagccttatttgacttttaactttacacattttaatttttgatagatttgactaggattttaattattctagacataatttataatttaaaggatatattttagggtacttctgggacgtgacatcacttcactggcgtcatccgcgagcaaaaccgtcatcgtcgaccaatagttggacagggccggcgccttgttcttcttccccacgccgccatcgccatgcccttcttcccctcctcctctgcgaaccgacatccgccgcctaaaaatagccggcaaagccccttcttttcccccacaactgagcttcgagctcttcttctctctctctcctccccatgccggccatcggctgatctccctcgttggagcattgccgaccaagccctcgcgccaataccttcgcctcgacgaggcaaacccattccctaaccttccccttcctttctccttccgatattagccaccaccgttacctcccataccggccggagctaagtccttgccatcgccgttccggcct

SEQ ID NO: 38209 - DNA, 677 bp, Oryza sativa
taggttttgtcattagtctacgtttaatacttctaatgaatagcaaacattctatgtgatttagtccctggattcaaacaggacataagtccaggcatgcttctctcaggtagcaaccaaattaaacatgctcggagtaatactactactagcaaggatccatcagaaggaagcaagaaagagagattaacttacttcttagcaatggaaccagaaggaggttggaactgaaactgcttttgctccttgcgatgaatagagagcgctaattgttgacgagagaaatagagaggagctgaagatcgaaagagcgtgagtagggaaatgtttttattcgccaaggacaacatatgagggttgatgcaggcaggggttaggtaggagatgaagacaggacagaagaaaagaggcgtggcacatctcagactttcagatacacctaccactccgaaagttccaagctccccacgaacttaaggaaaaaaaaacaagaagagcagctaaattgctaatagaaggggtaggtaccatgttctagatcgtggccaaaacatatacaggttcacaccgaacgatgcatttagcttcagatgtttagctggatgtcattttaaatcatatctttttttaagttgttaaatatgtacattaatttagttttttttatcaaactttag

SEQ ID NO: 38210 - DNA, 705 bp, Oryza sativa
attcctgcagccctactattgtctacatttatatatatattaaaataaatctagatattttctagcattatccacattcatatatatgttaatgaatcatatatatctgcctagattcattaacatctatataaatatgagcaatgctagaaagtcttgtaacctaaaacggaggtagtacaagatatagttagaaaggtatacttcaataaacccttctcttttctctacctgcgtaagcaactagccaactacacgtaaaacacaatgtatcaagagaaaactcaaggaaaatcaatagaaataatttcaattctaggaaaaatctaataaaaaataacaacaaactacccctatagccagaaaattcctacatattccattgcccctaaaaacaaacaatcaagcgtaggaaaaagcacgcaaagtccttcaatatgactagctaactcaaatcaatgagcaaaactagcctgagaaatcaccttaaaaaatgcttaaaaaccacacggaaaactaataaaaagctcgccaatccgatttgccaccacctcgaaaaagcctcaagaatggcccctgcgatttctccacctcaagttgagttggttttccacaacagcacaagtcgctgttgaccacacggaccgatgaccacatggtgctcaccgctgatgagccatgatggtgagaggggggaaggggggg

SEQ ID NO: 38211 - DNA, 671 bp, Oryza sativa
acagtcgccttgatattactatttgataggtggtaaaatttggataggatagatatgctatacatgttattataagacccttcaaatgtaaaaattaaaatcatatataaaagtaaatttaaatgttaatacaatgaaattattttatcaaataaaacttaatttgtaataaaatattattgattaaatatttaaaaagttaaattttagacacttgttaagagaatatttgtaagttgtaacaactgagatgggttagaatatatccccatatctaattaaaaaaatgtgacacaatgaatcgaaaataatctaacacctattcaacttctcctcataggagctacaaaacacctacaggaagctggggtggggggcacacgccacagcatgccttagtgggtccacactagggatgacaatttcccccgcggggccgagtcccctgcggggacccgcccctacgggggtaggacgggggcggaggagattttcgacccacgggtgcgtcgggtatggagccccgcatttgggcggggaggggacgggggactaatttcacccgcgggtgacccgtggggcccgggggtacatataaaccttaaagtataggtcaaagaaagccaaaaaacccatataatagctaatgtaaacttacagctaattccttg

SEQ ID NO: 38212 - DNA, 2413 bp, Oryza sativa
ggaggctgaggtggccacgctgacatgtggggctcacgtgggtcccacgctaagtcagctatcatgtcggttaaaaccggagtcaaaaccaccgagggatctagtttgcactggttttgtaagttaggggatgcgttgtatccggttttgtgattaggggacgattttgtaactcgatgacaagttgagggaccttcggtgtactttttcctttggaaaaaggatttctttggtttattgcccgtacaggtctatacagattttgacgaattttggtaaaatactatattcaacgaaattggtacaatatgttgttcccaaaaattttggtaaaatactatattcaacgaaatagctgattggaagtagtttcctttcctgtttctttgtttttgcaccacaaaaatgtaatagagtagcgcatgctttagcagctttgggttgtaaatgtcctcggaataccgttgaaccatgggacagtatgcctccgggcatggaggacttggtggccagcgattttgctgagtccttaagttaagaaaggttcttttcctctccaaaaaaattgagacgtgcggagttcaaaagaaatagaaatgtttgcgttttaattagtggggtttgtattgacgggttatactcgcctactgtatttatagtatggctgtcgttgtaaccaaggtatatgcgagattacggtaaaaagagataggagacagaattttatataggttcgggccccttaactgacaggtaatagcctcggtatcacatgagtacagtatttaggatgacctaatctagtctaccttcagtatcacatgagtataatatttgggatcacctaatctagttttttttgtcggtttgacatcatgtagctctcacacgtagtcgacagctagtgtagtattcgtctttgaatatgaactcatcgagattgcaggtagctctaatccctcatgtcagccttcatagctcttatctgtattggcttgtattttgttggtatgttccctctccttctagggtcttgtattatatcgaacatcatcttcctctccaagaagaattcggagagatagaatatgatacggactaaggaggcattatcttcccgactataactctaacgcctcctattttaggaagataatttccttctctattcatcgtattttcttaataaaaggatacattcacgtatactattggctatatggtatttccatataccgaaaggcacaaactcatgtataggaggtatgcttagactcaaattgacagtttgttagccaattttttggcaataaattcttttgagtaaattttatagattcacatgtatgtattatattattatggcttgagttgtaaaagaaccttgttagtttggacatgtcacatatataactgcagttattatggtcttaaggtttcaaaaaaccgcaccattaactagttttactcgatattgtagcataagaaaaaatattttacttacatggctatactccaatattttggcgatggattgaacgaactcaaattttgaatataagtatagaattcaaatgtacaataggttaagaaaatgtttgacaaactatataaccataatactaatatatgtggttatacactgctacagaaatgtttttttggacgagaccctctttagatggcagacggaccataactagtcgcatctacaaaaatcgtcctctattttggtatacggcttcttaagaggaccttgcggaaaaatcaattttcgcaagcgggtctcttaagggtccgcacgcaaaaataagcttatttttgcaggcggacctcttaatgggccacacacgaaaatatattttcgcagacggacctcttaagtaatcacctaaagtccgagttacctcctcatttccctcttaacatttcaaaatttttcattcttatccattcatctctcttacctcctttccactaaactctctcgcctctttttcttctctccactcctctgtcgcgagcggcgctcctctctcactcttctctcacggccggcggtgggcggcgcggccgacgatggatggcggcaggcggtgggcgcggccggcggtgacgggcggatccgcctccaccgggcccatgacgaccagatccgcgggcggcggcgggaggatctgacggtggagctagtttttttattattatttggatttttatttttgcgtgcggacgacataaagcacccacatgaaaaaagagcgatttttgcatatcctttcggatagacaggctagagttccacatgcaaaaaccatttttggtacgtctggaaaaaaatgttttttattaatgatacgcaatattccaaacatttagttttgtactacttgaaacaaatatactaggtttt

SEQ ID NO: 38213 - DNA, 699 bp, Oryza sativa
gagtaaagcaatgtttcattgtcactaaagttaatactatgtgaataaatgttttggattttggtttgcaatttctctctttctaaatatacatattgtatccaggacttgcttttgcgaattcatgaaattttggacaatgtttggatcaagtatgtaagaacaatatttttttcctagggtagagatcgaggttgttgaacaagtccaacaagctaacacacgagacacggggctctttacttctcaaagggcaccatggtctagagcatcatgactcattgcaagggagacaaaataagtttgtttttcaccgaactcttgcatactaatacaaagcaaaaagactagaataccctctactttatcagtcccctacttacctaattacaattaatgcatttgtcccctactttcataaaatccaatgcaatgatgactcaaagatgaacttattttgggacatacaagagggggcaaagataattatatttcagaacagagggactagaagcttgcgacactatagaaaaacatgaactgcctctccatcgatatggatataaggaaaagggaagccaattatttgacctcatcaccttgaactcttgtaggaggataatggcaccagtgaaagacaccatctaccaatactgcaaggatgactctcagacggaggggagtgggtgtggaaaggga

SEQ ID NO: 38214 - DNA, 2157 bp, Oryza sativa
  unsure (1)..(2157): unsure at all n locations
cggcccgccctagtgcccttgccgtgcctgccgctggccaccggtatcgcctactcctaccatgcccaacgttggccaacagttcaccgttcgccaccaacttcaccaccgtaggccgcagcatcaaaatccaattgataagtcaagtcccgttggtcccctctttcaattttgctagaccatccataacccatgattattgattaagttagtgtttgttgcttgcattgaacggaggggagtaggatgacagcaagtggctagttataagatggtttcttcattatggtacgcatatttttaatttttctatgtattttcttgttatatattgccatcaattagagatatgatgcttatatgtattgggtacacaactatttagtacaatatcactttagaattatacataccggtattacacagagaaagtcaggaaccccctcatcttttctctagctccgtccctgtgtaaaagtattgttcatgtgttaatgtaatgtgctgtagcgatcgatcccgtgcgctcgctgtaaatcgggcggctgagattaccctaaagtcaccgcactgtgcttctctgacttcactgtgtaaagtaagatgatctcaatctctttacagaacatttggcagagtaagacttcgatctgatctggcaacaaatgaaggttcttgttgtgatgagcgaaatcctagcatcataaggcgtccgtctgccagtccatgcgacggcgatctgaccaatggacaggtttgacacaaagattctcttggtctcgatcgtgcagcttgtacgagtaattctgggtctctacttcaattcatgatgtttgttcttcattcagaactcattttgagtaattcttgtgccaactgaaaatcaatcaataatgccgattggatgttccatttcattcgagagtgatctcttatgaccacttgggctctgtctgttcccgttaggcaggagaggtgagaatgtaattaggttccttttcttcattnntgcatatcttattatgctattccgtttttttaacataggggtatgaaaaaaaaagggagaattgtgaagatggtccctaaaattttgctcctgggtcattttagtccttaatctttcatattgtccaaacaagtcctttaaatttgtcacatgggctgatatagtccttggtcccaccaaaatcgccacatggacataccatatcaccctcctatgcaaaatctatatgatttgtccaatttacccttatatatatcataggaaaataaaaaacaaaagaaaaagttaaaaaatatggtatatataagagcaaaaatatacgtcaaaaaggtgaaaaaaggaaaagtattttttttccctatggttatgtctaattcacccttacatttctttttctatgatatacgtaagggtaaattggacaattcatcatagattttgcatgaatgatgacatggcatatccatacgacgatttggtggacccattctaggccttatgacaaagtttaaggacttctttgaactatttaaaaggttaaggactaagctgattctacatagaaactttagggactacagtagctattctcccgaaaaaaaaagtaggtactactttcatcgtaaaacagttgtcattctggagtgtttaagtatatattaaggtttaaaaaagactacaatgtccctaattaaatggggatagttggggacaaaagggaaaaatttaaatggaaagtgtttgatgggatatttagtacaaactattttatgataaattttaaatcttagaaaaaacaattgttttaggacggatagagcaaatgacaaaatatatcctacaagtgggtatccacaattgaattagtataaaattgtcaagattgaatacataattattatatatcgagcttaattaagacactacgtatacatataagtgagcgttcgtgaactaatattatccgttgtttttaatatggtggcatctaaacgttcggccgccaataagatcaacaaattaatgcagtcaaaatattttaggtaaccattggtgaaacattaagttatttggttgggaaacaaaaattttaaatcattgaaataattgaaagatatgcgaagcccaataaaatgtgtgatacattt

SEQ ID NO: 38215 - DNA, 722 bp, Oryza sativa
ttttttatgtttatcgaatttgtagtgttgtacctcatattctagctaagtctatagtttatgaagttgatgctatatggactgtaaataatatttagtagggcctctattatatcccctaagatagaaaggcatcaaaatcacccttgactacagcccctattcttgaggctctatgccacagtccctatacactattcattagcgcagaaagacatttttcctcacctatttgttccctctcctccctaccatgcaccgtacctccgccatgctgccgccccaccgtccaacatcctcactattgccccttcacccctctttcgtcgatgcatgctagaagaatagatcgatggttcattgtcatccccaatcttcgttgtccttatcttcaagctccctagatgttgtgttgcaaccaggttccacattagccttcgagctcctccgtcctagtccgccgcaactcttttatttgtcccctatgacatcctctaccgacgccatgttgttgcttggatagacttcaaataactatgaactatgtggtgtcttaaacatttgctactcgtattttgtcattccatatttaaaagttttaaatttaaatttgagttgtggtctttgaaattgtgaatttgtatatgatcagattatatgcattagaaatatttatgttcaattattctatgttaactaataatagtaacataaagtgtatg

SEQ ID NO: 38216 - DNA, 837 bp, Oryza sativa
acgcaggaataggaactggcttgaagttctcgatgcgccatatttccaagcctctgtagtgtattaaggataatcgtggctttgtacattgattggactaggaccaataaaatagtgaactgaacagattgtcaattgtaaatactcaaaaaagatcaagagtttaatgaatatttaaagaaaaaaaggcttctgctaaatcactacagaccctgtgatcattgttatctcattaacttctactctgctaatgctaatgtctagcatattgtcaagaagcttgcacctgtcaggatacttcatatgtgtgcacagtagcattgcaaattcatgatcatctagcaaacaaatgcattttacttgttttagcagaagtgtacaattaaattatcttcttaggaccaattaattcaacatggtagatagtgttcactcaacttatggacaaaaaacaactaaaccacaaattcagagtttcaacatgcacaaagaagttttcctggttgacttaagtaatgttatcttgcaaattaagtgacttcaatcaaggtgaagataatgaaagcaatagaggaaagtacactaaggtgaaattaaaaaaaaggatactccttttgcccagcaccacgaaaagctggatccaaatccttcatagaaaccgacatccttgatgttaaagaaacctctcaattcttctctttcacaggagagctaatagtatgctgtaaacaggggtagaaaaggtgggcagtaattaattagcaaacgaaaatgcacttggttttccttttttacgaaaattaaactagatagttcagttgttaagaaacacgaccg

SEQ ID NO: 38217 - DNA, 580 bp, Oryza sativa
agtgccttgagccacgtcgtccccgacttggggaggctggcgaggaggacgtcgccggcgcggggcacgaggccgccgcggtgcatggcgaccacgccctgcgcccagctctcgaacacccaggtccccccgtagcagcgcatcggctggccgtaggagacgcccgccggcagggcggagacggcggcggcgagctccgtcggagggcgcaccggcgtggcgtcgacgtcgacagcgtccttgaacgcgacggggcctccaccatggcgcacagctgctcttgctgccggctctcctcccttgttcgccatggcggcagcaagagcgagtatcgactcttataagaccctagtacttactatactccgtatattggtttgctgttgagaaaagatttggtatgcatggccagatggccttgacagccggatgagattctctacaatactttatttggcaggttactataggcactatctggacgagattttagcggccacagtttctccaaaaatttctagctctcgaatgatcaatattcttatccggattcttaggcccgtttagtaggactccaagc

SEQ ID NO: 38218 - DNA, 618 bp, Oryza sativa
tagaaaaacttttgaccatggatttatcagaaaacatacttttcatgacagcagtactaatgctgtgtaaaagcacactgtaaatctattggtataatatttatacaactaacaatgttcaagctatgcgttggagattattgagtcaacaacacgatcaagtcttgaaaacagccactctttaacttccatgagtcctacaataatgtatggagcatgcgaccttatggactgaacgaaccaagtatacaatatatgttttatgttgtctgcatagaaacttttagaatatttagaggattcaattttctaatttttttttctatagacccctttagttcatatagaaattgtaaatattccatagaattgcatttctacggactaattccacaggattacattccaaaaaaaaagcaagagataagaccttttgattttttttagaaaaaaaattatcctgtggtgtagttaatttcttctcttctcatttccggtgtttttggttactatagacttttttaaaaaatacaactttattcttgtgtgttttttctatcctacctttcaagggcgataattttgcaataggcacattataatttcttagaaagctcc

SEQ ID NO: 38219 - DNA, 730 bp, Oryza sativa
tgtgctttcagtggtaggcgacatacccgtcgacggtgagcgcctgtggtgacttcgtcaatctcaaggatttgccggcttagtcttcaaagatgcttatagaggtagggtttacgtgcgtatgttcataggggtaagtgtgcgtgcgttgtgagtgtctgcgttgtaccatatgattaaaaaaaaggtgtgtcatatattaagagcctgattagttgcccatattccctgataaaccaaaacggcttattagagattaaaaaatcatttatatgtaaaacttttatatatattttttcgtagcgacttaaaaatcaataataaaaaaattacgtagaaaatatcttaaaatcaataccaaatttaaattttttgctttgacttatttggcgaaacgatgggatctctaatccccacccatccgaactcgatgaggcttctttaataatgccccaggtcataggagctgcttccctccgagctctatataaaccacataaacctcttccaaatcaccccaattcccaaagcaaccgacacacacacacacaagctacaaacatggctgcttcttcttggtgggttgtagcggcgtgcgtggtgttggcggcggcggcggcggccgacccgagggacgggttcacggcggtgagcctgggcgatggcaacttccagctgcagtggccgtacgacgtggagagcagctcgaggtacagcttcgacggcacgg

SEQ ID NO: 38220 - DNA, 729 bp, Oryza sativa
atcgcggcatctacccaaatagtggctaaccctatagaggagagagacagacacacggcatcgcgagaccgcgagcggtggcagagcatcacgctccacccaccgccagcgccccgcgccacccctggtccgccgtcctcggctcctcgcgacctcgcccccaccatcttcgctgtctcgtaccgccgccatctcgcggcgctgtccagccgtttcgcggcgccgtctcgcggcggcagcgccgtcccgccgtttcgccgccgctaccaccactgacgacgacgccacagccacaccgacgagccgacgacgcctcgcctctgcgactcgacagcagccagcagcccagcggcagcagccaacagcccagcggcagcagccagcagcccagcgacgagccgacgagcctaaaccattgatttgatttcttttgtgctgcagatttatgatggaatcatcaaatgcaagtagctattttgtgattgaactaagtactgtactaatggactgatgtgtgttgctgttttgtgatgactaatgattgatgaactatgtactgatgatggagtgatagctcatagcagattagcagtatagcactgaataatagtgtatactgtataccttataccatggtcttttgctgtattttttttagaatatttgttatgcaaattatatgaagttatagaagaatagtattttgctgttgaaacgatttcatataat

SEQ ID NO: 38221 - DNA, 1266 bp, Oryza sativa
aagagccaccctgacctcatgggagagttgtgctatggctagattattaaggatccctagtggaaggaccccacaacagcacccgactcggcatgaggctactcatgatgagtaggtaaggacccccgcccagtgttctgcttgaagagccctaggatctagaatcctagtcggcctgagcccatgaaacacgtggtaccctgacccatcccatggcaggcgagccatgaccggtcgccattccaccgtacatgttgcctaacctccctacggcgtcatatgtcttgaaatctagaataggtccgatgcactagggatgcctcgatggacctagattcgatcaccaaagctactagagcaatggctcgtgtgcctcatcattgaacgaaagacttcaatcgaagttctagttgaaggttgtgctggaggacgtggccacctcgccacacactaaaccatatgtaccttggtaaccgtaggtgcaaacaggcagcaatgctaaagcagtgcaggccccgacggccggagggatgaccaccccctggaggggtgaggatggtgaagcctacgatgtgttaaagggtactggctcaagacacaagttaaggtcgtggcataagcaaagccactaatgtacatacaacgtgctagccagaggggcagaactgtctttttctcatggtttccccctccattaagcccaggaatgatgaaataatgactgtggtgtccactagtaaatcacgtgtcttttaggagtcctagagccatgtcacgccttttaggagttcgttaggaaataccagaaaatttgaccgtcctctagcaaatttttcctatatattatgtcgaattgcagaaggtaagaaaaaggatagtctggaggccaaacagtaggcaaggctaagccagagagaaggctacatgaagagaaataaaagaaacagggaacacagaaaaaaaaaagagagcaaatttctctaaactacatgtactttgacaaaactatcacaaaactatatatttaaggtgtatcacaaaactatagatttaggaccaactttatcaaagaactacagatttaaggtggaagatcaccaaactacacatttagtaataatattatcacaaaagtacatgttttgcaacatgttaagtacaaaactacaacatttatcactctaacatagcagtagtggtagggatttaagttgtaaaatatatagttttgtgataactctagtattaaatctttagttttgtgat

SEQ ID NO: 38222 - DNA, 942 bp, Oryza sativa
tctgaacgaggaagctcttcctgaaaggctttttcctccacgcttagattttcattcagattctgttgctaccagggtttacatttccgacaggatttcgcgaaattttgatgtttcgatgaggctcgaaagtataaaccgtttaagatttcgagaagtttcatccaaattcaaatttgaattcataaaaaaaaataaaatcaaataaaatcttataaatactatgatattcatataacttattgagatataaattttcgaaaaacattatgtattatgtgtatttactgaaacttacatcagaaaagaaaagaataaagaattaaaaaaaggaaaacaaattactgatcgaaatttcgatgatttcgatcggaatttcgccaaaactgatcggttttcgaaaatttgtcggtaaacttagggaatttgtattcaaattttggtttatgaaatttgttcagaatttaccggttttccaccggatttcgcgaaattccgaattccaccagtgcccgaaacggaaaagcctgtcggaattgtaaaccctggttgctacaaaccaagtttcccaaacagggcgtagaaaggaagcaatatcatgatacgcttgaagaatactagctatcaaatttcaaccgtttcacttcacaggcaaaatccgtaagctgaatattagctgaaccaataccatgatactatcttcatctatgaattatctcatctcatcttcaaagtgacacagcagttcaaacatagaccctagaaaatggagcctttgccatctctctgcctgctagtgagactattgactgctaatttgtaagctgaatattgttagcagccgggttgatgatgattgaccaacctgcacaatttttcaacacacctgtatcatccttctcaattgacagctgactgaggccactcttttattaggcttag

SEQ ID NO: 38223 - DNA, 555 bp, Oryza sativa
tggtaccccaagttttgaagttcttggaataaccggaaacagaggtagccttttgattctttcacagacaccactggtagatgtgattttccaagtatgaaatcgaagactcaatgatgacttacttgttatatgatctttgaacatgattctttcaagtatgttctttatatgttcagctacctgtagttgctgcatctaatttaatagagaaaatctcctgtgtacgtttgaaagttcacctaatcccttctgtatccctgaattttgctcaatcccttacatacccctgaattttagtttggatcccttccatgccctttccgctagttgaccattagttgactattaaattcttatgaaaaagtccattttgccctttggtataaagaagcatataaattaatagagtatattgttgaagcatagaaatttgttatatgagactactatgtttatgagatagttatgcaccatattatttgcgataaatatacttttagatatgatataaaaaattaatatttatttattagtaattaaaagattttttag

SEQ ID NO: 38224 - DNA, 957 bp, Oryza sativa
cttcgagtttgacctaacacgacaaccgatgttgacaccagtgaggcagtgacctttcacagtcaccaggactctggtagcataatctggtattatcctttttcgatgatgatatggttcaaattctggtatccatatttcgctttttggagtgcttaaacttttttataaaatatttgtggcggttttctgaacggtgtttcaaagtggtcctaaggttgtattcttccctctcttttcctaactcacctccctcatttttttttgatatactttccaaagtactgaacggtgtgtttttataaaagttttttttatagaaaagttgctttaaaatatcatattaattttttaaagtttattttagttaacactcaattaatcatgcgctaatgcatgctttgttttatgtgcaggagagaagggttcccaatccttactcctaaacacagcctaaatagcatcttgagacagagagggcaagactaatctcttttttttttaaaccttggagccagccagtgaaagtttttactcttgtgtttgatatttcctcattaagtatccctgagagaggcaaatcattagctgtcactagtggagatttctacatcacaaagtggtgatcagaggttgcaacagtgacaatgactgatgtttccctatcatctttctcctctgagaattgaagggcagatgtgaaggggaaaagaaagaatgtcatttctcttctttcaaatgcttagttatgtcttcccattttttttccttttttttttgagagaacatgtactacctcattgctcatccatttcatcactaacccaaatggacaaataaagcttgcttttggtgtaccaactgccaaaaaagatacatacttttaatatatagagttataacagttactagtagatttgtgatgtcagtaactaatggttcgttgtccatttctac

SEQ ID NO: 38225 - DNA, 654 bp, Oryza sativa
cagtgctgataattggcccaatgtgaaagacagatgattcgtaggcagaataagtttatttttcctccctcatgtcttgctctagtcgaatcgcatccctcaagcataaaactaggtataatggtctccctcaatttcaaaaaccggtacaaatcgacttctttctgtgggtttgggaaacgatttatgcttatgtgataggttgacttggtcccctgttctaacaaggtaacccattcattaaagaggttaaaaatagaagtgggatccatatctaagtgataagagtaaaattttttaaaaaatacagtgggacctacttttcagcctactcctctctcgagccccaaacagcggcacctccatgtgttgctctggcgtcgcctctactggaggggtccgtcactgcgccagaggacgcggtcgacgggtagaagtgggcagtgatgggcctgacacatagaaggaacacctccatcgagagcgtgatctcgttgacctctggtgacgcatctggttcctcccagagaggcggggagagagccacagggtatcaccatcgcctgtggcgacgacacccaccgctgtagcacatgtcgccacacgctcgtccttgaaagaggtcccccattgaagtcgggtgcagatacaatg

SEQ ID NO: 38226 - DNA, 570 bp, Oryza sativa
ttgatttgaagaaatacctcaagaacgcgaagaacgagtgaagaacgcggtgaagatcaacgatgtaagtgcccacaaggtccccaaacgtgctcccacgaggatgaagtggaggagagcgtcggagagtcggcggagaggaggtggtcgccggggaggagtggatgggggagaggaacccgtggggaaaaggatagcaaagagagagaagaagagtccatgggttggaggagagttttatacccccgagaattttcggaagtttccgaaaattttcggatttacagaaccactgagcacgcttctggatattttcggaagttccgaattttttttcggaagtttccgaaaatatacagaaacacagggattgtttgtactaaggcagtaaattttcccctgcgagattatttacagcacagtgattgcgtgtgttcttttattttctggtttcctgctttacttgaaaaccctataaaccccattgaaattgataggttgtaatttttctgtgtgtcgcaggttttattttttgacatagttcagctaaaatttcggattcttgcatga

SEQ ID NO: 38227 - DNA, 1258 bp, Oryza sativa
ggtcattggtagcccgtgagggaaagtactccgccatgcctaggtggacctagaaatagattttaaaccaattcaatgatttggtcacccttccttacatcaccttattagggtgacaactagctaattggagggtggaaaagtgcttcacggagccttgcctgttgtccacccacatgtttcactcatagatggcgatgtgagccatggcgttggctgtcagtattaggagctcgacaacaaggaagaagtcgagcacacccaccaccaacgaagccatggtggactcgaagctcgctgcacataaggcctcaagcaccactatctcatcatcccggggggggggggaggggggcaactcgccgcgagacaaacttgtatccccgtccgtgcaatattcttctccgctacgtctagcttgtctacgtgccgctgcttggcctatgagcggcccggcatgccagattgcaaggggtaggtttggcttccctagtaaaagttttatgcattcttggcattcgtctcgccatcgtccccatcacccggtgccatggctaggcacactgccggcggttgtctgaggcgtcgataccatctcgttggcccactcgatagcatatgtataaactttatatacacatatatacaaagtttatacatacgtatataaagtttatacatacgtatgcaggaatagtagtggacttggttgacacgtgtcccgcgggccacgggttgaggagagtgcgcccaaccgttgattacaccaccacaaaaggcaaaaacattattgggaaccgctcagccatcgtctctcactagattgatctatctttctgtttttggctagatttttattttcggcatatgatctttctattttgagctacacacatgagagagaacggccgcatgcctggggccgatctcgactggaaacgcatgcagagcgacgagagtgctgattcgcaattaaagttcatattaggaaaatgcaaatcaaagtctattttttcatttgcattttaaatttgtttcgaacttatacgtacaagtttgtaagcatacgtacagacttctaattggtattattatttttttgaaagttaattggtattattattgccatgcattgctgtatgttttgctactgttattgttattactcatgaatggcccaaggcccaacgaaataaatggggtaatatatagttagcttttcaaccctttcaattattcatggcctaattgttagaaa

SEQ ID NO: 38228 - DNA, 655 bp, Oryza sativa
tttaattatcaattaattatcataacacgattaaccatcatgagctaccattaaatataaccataaataataatgtagtatgattcatcccattaatgagctaatgtttctaggcatggctaagcaattatatatatatatatatatatatatatatatatatatatatatatatatatatatatatatatatatatatagcttttagctgaaccaaaccaatatataaggttcaagctaatcaatttattacccaaggtaacaaggaatagagtaatcaatgcgaattggccattacaaaggaatatgttcacagttgaaataaatacacagttgaaataaatagagaatttaaatataggatcaacatgctcaaaggaactgtgtttaggatctgtgtgacttgccttgcaataatcggtcttcaattagtcttcagaaccacttccgacgcactcgcgaacctttcgcaacgacggaaacaacaagctaacacgcaaaatgggaaaaaagactaataaaaaccaaataaacagtacataaaagtaaacaaacatgtagatcatgattttagataattttagatgaattccaattaaacctattaaagaaaatactattccaaattaattaaaccatttacaaatgatttata

SEQ ID NO: 38229 - DNA, 663 bp, Oryza sativa
ggatcccctttggcatgtgggtgttacaggatttgttctagtaatttggcacatgtaataaatttggcacatgtgcgtggatatagctaaaactgctgatttagatgacaaatcaagatgtattatggtaaaccttttttaacatgctccaaaataaatacatcaaatacaaaaatgagagagagaaaaaaatgatgatcgaagtggaacggaggaagtacggtggtaattaagctagttacaagctccagcatacgctgcaagatccctagaacacactactagaaaaccacaaattggggacatcctctatctacaaggcctttcctatccttcgtaaattcttaaattaaaaatcaacacctataacgtgccaatttttctaaaaaccaacacgtataatacaagtgcctgattttctttaataaaagcagtacaaataaagatgtcatatgtgctaggttttttggcacattattggagcagcagcaccagcggaaaaaaaatcacatagacatacgccatatctcctcgtgacctcgtccattcctttcttatatccgtctctctcaaaccctctaagcctccacctaagataatcttcatcttttctctcattgtctctcactctttactcctctccacctctcagcatcctagcct

SEQ ID NO: 38230 - DNA, 695 bp, Oryza sativa
aggtagactttctctgtgagcttcctttactaggccggattgaaggagggaccaaaaatggactttggaggagggatcaggccagccgaaaggaagggagaatgagccgaggactaaaggtgaacttttccagtttcagcctgaaaaggaaaaagggattttaattacttttccaattaaattaatcactgaaatgatctttgaattgttaaaaatacttccaatgctcaaataatttcaagaaaaatcctgaaaatacttggacacccaaagtacttaacaagattataataagaccatttaatgattaatttaatatgtggataattactgaaatgttctttatattattaaaattaggaattgagctccgaaaaatctgagaaaatttcagggagtataattaatcatggagaattaaataaaaattaaatcccgccatgatttatatttagaaaattttatttcctatatttaacttcacttgtaaattaatgaacatttaatataaattctaataataatttattaaataatttataaatcctaaaacgaaaatcaggatgtgacatagcagctagtgtgggagggagaatattaaaggtgccggtttttggtcgagaaccgacacctttgtcttgtcataccaagaaccggtacccttgtgtagggccccccgtcggggctgcaggaat

SEQ ID NO: 38231 - DNA, 674 bp, Oryza sativa
attcctgcagcccatcgatcaggttaattaagaaataagcacggaataagacaagcatataaacatcaactgtatagtggtggcagaagtattttaacacacaacgcacgcgcaccaatctcatttctagtttactccaaattaaagaccagtcagaattttcgcctttgcaaaactcctctcatttcatttcctcccaagagtcaagctagcccttcttgcttgctccgttcaacgcctcttccccagcttcacagtactccatgtctggacctggaggaggaggtcatggcctctacgaggatcatcctgcagccgccggcttcctccccttcgaccacgacgacgacgtggtggccagcttcttctttggcagatcggcggcgtccggaggaggagccggcgccggcgccggcgctggagacgatgatggtgttgggctcatcacgccctactccagcatcacggattatctgcaaggcttcctgcaggaccccgtgtacgcgtcgtccccgttgggcggcgatgctgccgtgaagcacgaaacggtggtggatcatcccagtcaggccggcggcgtggcggcggcgccggccacgccgaactcgtcggtgctgtcgtcgtccagcgaggcggctggaggggacgatctgcgccggtgcaagaaaggtcgt

SEQ ID NO: 38232 - DNA, 530 bp, Oryza sativa
ttagtcatttgaccctattacatgtgggacccacccgtcagttctctcttctgtcttcttcttctgacgtcgcctcctttattcctccgcgttccctccggcgccagctgccgtggcgccgcccctccctcccttcttcgcgcgccaacctccgcctccctccctgcttcgcgcgccaacctccacctccctccccgctgcacacatcgccgccgccgcaactcactggcaggagagagacatggagagacatgtggatagggttaaagatgggtatggtttcctcaagggtattttgggcattatgaattttaattatatttctttttttttaaatcaaatcttagcgatgtagtgaaacaggtcagacggaaggttcgtttttgaaaattgacagttagacttttccctgacttttagcatcagttcctcgcgagtcgcgagttcagcgcattttttgggggaaaaaaatgtactccaacaacacacccccttcaattctcaatagtcaatttcatcacattaatccc

SEQ ID NO: 38233 - DNA, 648 bp, Oryza sativa
tgatatgatcttgataagttgcgggtaaagggaggcatacctttttatttttatattttagggagttaaatataagccatctattggaaggaagtatatacctatacaagttatccccacctactaatctcctgcactgtggttgctccacgtcatcaagttgatcacacccattcgatcataagagacatcttgaccatactctcacaatggccaattacagtactactaggggcagtagaataaaaaccacttcaaacaaaacgccaggcaaaaaaaaaaaaacaccaattctcaagagtggattttaaactctagagggaacatgtatatcactcgaataattatgaaaaaatttcaaaacaattaagaaattgtattaacatgtagtataccactccaaaagcatgcaagttataatttaacttttataagtaaaacacatataaaagagtagcaaattaactacaactagttaacatatattcacattaaatttatttttttcgttgcaacatataaaaaattaaatttaactttacatgtttatgaagttataattattttcataactaagtgtcatacaaataacgagatgacgtctcgagttcttcctgcagccaggttttgaaatttcggttcgaaatt

SEQ ID NO: 38234 - DNA, 636 bp, Oryza sativa
aaatgtttggagggacgtctctcccctcccaatatcgtttttgaccccccgccccctcatttttcttttgcacaacgaacagattgctttctcttcctggctccactagaacaatcagaaaagttgttgatgtcataagatgaagctagatctacttctgtaaaacaagttctgtaaaacaacaaaagaaactagtgagatttggaaacataacatgcacattcattagagccaaactttgtaaagttttaatgttatgaatcatacctagatgattttatccttgaatttgctgtagttgtgtttagagaagcctcggcatcttcagaaagtatattctatctcgtcaaaaaaaaagtatattctagaatgttttcggggcttcctgacttgagcactgataaattgagattgatgaaaaacagaacataaattatcgttttttttgtgctacacactcaactattagatagatttgaaaaatgaaactaaataaaagctgtgcctcacagcgttctcatcacttccatcaacttcggagtgaataagtgacattaagtaactggatataggatttaggcctttaggggtcagcaggtcgctctgtttctctatcaaaaagttggattgaaaaat

SEQ ID NO: 38235 - DNA, 713 bp, Oryza sativa
gccacggccacggccgccgcgaaggccagcgcggcgcagagcacggtagccaacaccttcgccatcgaagtagggtgggaggactagcaaaagtagaacacgagagcacgagaggagggaaacaggggaacgaggaggaggagatgatgctgtggcggccatgggaggcggatataaatagggtggtggagtggaggtagccgttggggtattcgaacgttcgggaggggaggcagtagagtagcatcgggtgccgcgaagacgcgtggcgacagcattcactggcattgggatgggatgggatgggatgggatgggatgggaggagtggcaggctgttgctggcttgctgctgctgcttctcagcactgggaaaggatgcttctgttttggaccttaccgttgctgttttggccttttgaggaggcactgggctggatgggatggcactgttctggtgtagggctgtcacctatggcccgtggggctggggaggcttgggaccagtggagtggggtccacagggaagtgagtgagaattgtgtgaaccttggagttaatattcctcctggaagaagtgtttgtgttgtggcaataaaattatcattttttttaaaaaaaaagtcacatgatcgagtggactgttgggttcagcctcgttatcaaaaccctcaccaaattagaccctgtttagatgggactggctgcaggaat

SEQ ID NO: 38236 - DNA, 682 bp, Oryza sativa
agctctgtttgtgcttagcaaaaattattgttaattaacaattactgtagaagtcagtataatacctagagtgtttaagaatagaaacataaacagtaattttgcttgccagggcacgccaacgctgtctccagtttcttacttgttgcaaagcacaatggacagtgcattttaagttaaattgaaaattttcaataacaaaaataatgtcaacaaaaaagatagtagcatggcataccgcacacctctaattctttaatctgtcacaccatacaattgccagtgtattttcaagttaaattggaatttttcaacaataaaaaatgatgtcaacaaagatgtattacattgcgttctctgcggcgagatccaattaaccaaataatgcgatccagaatggagagcttgtctacaaattgctgataatacctcccagtagatggatggtataaccctgcaacaagttgtaaggcaatatcaccaactagcgtttcataaaaaagaagtcatcaagtggagcatccctttcttcaatattgaaattgtgtacattgctcaaatgtgtttatctgctgtagatttctagtcatgtacatcttcaacattctagtcattcacaaaagagaacatatgagggctaagtttatgtgcttcccaaacaagtgaactgggctgcaggaat

SEQ ID NO: 38237 - DNA, 608 bp, Oryza sativa
gctcgtgcgtcccacagacttggtggcgctcccgttggatgtggaggcacccatctggtcctccctgcttggggatgacgctcgtgtattggctactatgatgagatcaatggagctaatggagctgcaatgtgtgttggcctagtaggtgcctccctctgtccttgtttcttgttgggtttgttttgagtaatcagagtgcccttctccttccctcaggccatggtggtcgtcaaagcactcctcaagcctgggggaagtgatgcaccaacacaacacgcggagaggcttcgtctagacgagattatagccctaggtacagcggaggccagtggtgcagcctcataggtggaggcaaaatggtgacggtgcaactggccctcttgcaggtggaggtgtctcggtcataggtggagaaatggttgtgggatgttcataccgaggtggcccgcctgtccccggagaagaggcgttgtcttaggagattagcatggccaagggagagtcggagactcattcgcttgatgcccgcacactagatgagaatgccgtgcatgtgccctagcggttacgtgggctttgggctccgacttcgtggattgtggatc

SEQ ID NO: 38238 - DNA, 604 bp, Oryza sativa
gctgctcaaccgatattaagtctaaaagttttaactcattgattccagcaaagaagtaatcatgaaattgcttcttaagatcggcccatcctcggatagaatttgatggtaatgatgaaaaccatgtgaaagccaatccagtcaaagatgatggaaaaaaaatctaactttcagagcctcctcaaccgatgcttcaccacattgagctaagaatcggctgatgtgttccattgtagatatatcatcttgccctaaaaacttggagaagtctggaaccttgtatcggtgtggcaataggaccccactaaaacaaaacacccccaaagaagacatttttataaagaatagagacgttttgtttcatctctagtagatagttgaggcatttttataaagcgttataggaacacctcccccaggaccgtctcaaaaatatagagacattttacaaaacacctctacaaaatctgagacgttcactggacacgcttgaagcacgtctccataaacacatatagtcgttttagctgtttctctataaataaataatcatttttagaacaaacatttgcgccataactgaattaacgtggagacgctctta

SEQ ID NO: 38239 - DNA, 1025 bp, Oryza sativa
tagaaatcaggagtccgaaagcctttggaagagttcgggtatgactctactagctcttctcttctcttttgtacgctttgtactttcattagaatactcttctatatacatttatggtattgaaatactttctgagtatatgaatgcctactttacattatgttaatgttatactgaatatacggcttttgtgcgggtataatatttacatatgcaattactctatgtcatgacgatgatattagagtactatctggtagtttagatgtggtgtctagattgcgggatatcattatttggggttatatgctgcggatgagaggtgggccgcttatagtgacagctcagtacgggtattcctccgcgcctgtatataatcctaagttaattccctggggagggtattcctccgtatttagccccggttgtatggtcatgacgggctgtcgtaaggaactcggcagtcaggggtggcttctcgaagtaccaggagggcatcggatagagggtattagctagtatatcaaataactagaatgtatgtatactatgtatactagaagtataggaatatatttcctttactaatttctttccacttagcttagataatatattatatgagtagctactgcttgtgtgtcactctacccttggattatcttaactcctgcttaggctatgattatcacaagtaacatataaattattaatcaagttctctctacatgatcttcccacaggataaaattaatacgatacccttggaatactctcgggtgaaatgttacaatggtatatccgtgcgcttgcggatgaactctgtaaccataatataccagaagtatttctgtggcattgctgagaattatatttctgtaatgtcgttaagaaataccaacaattgtaaaatagcaacgctctgtatacaataaaaaaatgtagttaaaattaaaccatccagcacggtgaaaaaaaaaaaacagaattgctaaacttcagtcgacagaaaaaccacctccaag

SEQ ID NO: 38240 - DNA, 706 bp, Oryza sativa
ttaacagttctaccttttttgtaagaataatatgactaattattatacttgttgtcacatttgccatttgaacttttgttaaacatatcaaatgcctaggaatgcatctcagtatatcaaattaggtacatatacatgtattgatatgatttttactcaatgacaactgtccagacattatgtttcttaataagtaaataagaatctggtaccaatttcattaatttacttggcaaattatgtagtagcttacagtaactgtttgtcacaacatcttcatcagcactgtaaatttttctatgtaaaatccatctaatggagcaacttttttgattgattatcgcaaaatgttaagagccatcatcagaacatatgcagtataatatccctatttaaatagattcttgtgtcaattttgacagtttacctttgaatcaagctgtagcgttgatgtgctgtataatcgcacatcactgaaaacgtggtagacattaacagccgctggttgtggagaggagcaagaggaaggggtcgtcgttgccgtggctgtcggttgaaatgctgtgcagtgaccagatttagttctccagacctctgaatggcgggatccagaggtgcacgccgacggggatgacgtcggggggtgcacgagaaggatagcttgttttaccctaaccatccatttggggggagggggggggatagg

SEQ ID NO: 38241 - DNA, 636 bp, Oryza sativa
aagcgtaacaccctaccctgagagcccgaggggtgtgacgtggcaccccgagccccctcagccacctcagcgctatccgaggggcgggggaaggcgaggcgcatggctacgtgactaaacgggaaggatacttccctttactgtgtgtacccccgggcctatatcaccgacaattatagtcacacttttgtgcaaccacaaccgccatctatatttatattatttagcttgatttatatgttgtatatgataacaaatcacccaccataatatattgggaactttaaattcatatgataatttaagtttacataactttatcattatttttcactgtcttcaccgctgcaccagtcgccgccttttcaccacctccactgttacatgacccttattctccccttagtttccattggtgtctgttttatagcttaagcacatagatacatttcatcctgtatatttcaactaatacaatacatcaaatcattagtttgaaagtcatcctcaaaacagagcaatttgaatggtatttccaaacattggttctgctctttaaataccaagcaaatcaaactgactactaccaggcctagaataaagccaatcaaattggtgtcacaggctgtttgctat

SEQ ID NO: 38242 - DNA, 571 bp, Oryza sativa
ttagtttttttctatatttaatacttcacacatgtgtcaaacattcgatgtgacagagtgaaaaatttttgtttgggaactaaacatggcccaagttaaagacatgaatttcacccgacattgaatttcactgatcactgctttctgttcccgacatggcctactttatcaatcacaagcagccacccttattgcgagtaaagaatagtagtgactgttttgttttacaaaatcaaggtgtcaaattggcattatcaatgaatggtacctgacctaatgttttttcctgggtttcggatctgtgatgtgaagaaagctggatgtgtagctccggaattcaggtattgctttttgttcaggggtgtaggaatgtttagaaaacaaaaatctaaatgcactcgcacatacttcatacaggagttgataattgattagctaagcaaatcatgtggggattctgaagcacagattgaaaaagagcacacaaaaagtccatttgggaggttctgaagcacagattaaatctataacatgcggggatgaagcaatcaagaggatgaggatggaagaa

SEQ ID NO: 38243 - DNA, 555 bp, Oryza sativa
gttcacgaaaaggaaactttttggtgtcacattggacgtttgaccgaatgttagaagaggtttttagacacgaataaaaaagctaatttcataactcgcatggaaaccgcgagacgaatcttttgagcctaattaatctgtcattagtacatgtgagttactgtagcacttatggctaatcatggactaattaggctcaaaagattcatctcacgatttcccctataactgtgcaattagtttttttaaaaatcaatatattaatgctccatgcatgtatccaaatattcgatgtgatgtttttgggaactaaacatgccccaagataagaatcctatgcgcattgatgtgaactggaatgcattgaatttaatgagatataaagctaagatgaaaggtgcatacattcactgtcctctggatgactttggctctcttcttgggcctctgaggaagcttggatcctttgaacacccagaagtcctcttctttctctttgttcgtcagggcgactgcaaatttgggccagatcgacccctcgctccctgacgacga

SEQ ID NO: 38244 - DNA, 578 bp, Oryza sativa
ttataccaatcccgcactaaagatcgctatcttagtcccgggtgaaataaccgggagtaaagatcgatctttagtcccggttggggtcaccagccgggactaaagatacagctgacctgttttgttttgcatgcccctgttgctgcatggtttatatatatatatatatatatatatatatatatatatatatatatatataaaccatgcatatatatgtttcaatacatatatatgcatacatatatatatatgtatttatacatatatatgttatgcaaatgcatatgtatatagatatatatatgaacaaaatatatttacattatagaaaatgtgtgcacatgcatatagaaacatatgtagtcatatattaattacaatccattatatgtcctagctagctacgatttctacgtattagtactcgtctgctagctcagaagctaatgaccggtgaattgtgttttcgtcgtagtagaattcacccttgggatcaaggattttttctttgatgattcccatgagttgttcttgaaccgccgcgataaattccttgtgtgtggtcaggttatcct

SEQ ID NO: 38245 - DNA, 664 bp, Oryza sativa
gcattaacaaatattgtcatagcgttagcacgggcaaattactagtatttctagctatcattcataatattagatctgttttgtctttccttgtagtgtcaaaagccaagatgtaaaaggctaattagtagtattatgttttattcatggattcatctaagtttagaagtccatgttgcaagtcgacaatgaactgttcaaaagtagggttgtagtgttaaaaggagggttgatgaccaaagtaatcaatagaggtgtagcaaaaaaaaaaagagaaagataagataatatgccacttggagttgtccatttcaatccatatattcaactcaccagtcagcttcaatgccgagtcaaacctttccaatataagagtgtcatgacccgagagggaaatacccgacaatccttgatgatgaagaattatggtgttgaagttcctccacatgctccacttgaacgcttagcacttgcagcacaagtatggtcttgtagtttgcggtatcgatgactcctaaaatctccccatcatcaatttccatctcaggaacattggtttcacatagaaggttagcagcaagagaatattcttgctcaacatcactagaacttgcatatccaccatcatccgtagcgatgtatgcatgctgacttgtacaatcct

SEQ ID NO: 38246 - DNA, 743 bp, Oryza sativa
tatgcattgatttaatttgatttgtgcatgtggtgaattcctctatgcaatcgaagggactaaatcagattcatacgtacattgattatcattgtttatgacgcagtgaagtcctcattatcaatcaagtagaggtcctcattatgactaacaagtggtatcttcttgcctttaatttctttcaaaaaaaaaaaagaaaaagacaaacaagtggtatgcgcactagatacaatgaccatattccctccggttccattttaattgacgttttggacaatgaaaattgtgatctatctaatggcactattaattagcctaaataggatcttttatttggtcttttgtttaggttttcattgtttgtgcctagttgcggttgcggattttcgtcgatcagggatttctcgaagattcgtgaagatcaagaccctgagcaaggcaagccacctttgaacatcttgagcctataattgaacttaattatattacttgcaaaatattatgcattgataggattgcacataatatgtttgccccgtctgcgaggcatattagtgggcatacctaacttgttgcatttgatccttccgttgttaaattgttatgtcatgtttccttgtaaccacctggtcgcgcctcagtattcttgcactcggtgcgagtatcgacggtcgccgtcaaacttaaaaatggtaaacatcttgggtaaaacttggttacaaaacgatgggaaaacagacgcc

SEQ ID NO: 38247 - DNA, 722 bp, Oryza sativa
taaatgatttcttttatcaataaccaatctactccatcggttagttatcaaatctaatacaatcaattagcgattatctttattatttttaatcttatattgcctcggttatgtccaacctatcaagattatgattgataaggaaatattcctaacgattgtcttttatttgatagcgacttatgatgattcattaaattgtttattgaagttattgacagttatttcaatgcatcggctttatcaagattgactttactaaagacaaatcattggaaattataatgtcaagttttggctaatatattttttcttatgtttattaatattccatcggttatagccgttgatccgaaatttcatcgtctacaactaggcagaggtactatattggccctatagctaatcgactccatgatctatcttttatttctatcttgttattagttgcaggatcaaactaattgcattgctctaaacccaattttaaaacatgcactagagctaaacaaatctcttaggccttcgtgtgtttatgcgaaattcgcctcaacacctgttcaagtctcaatgggaaaccacccaagccaatagttcacctttgcattatttgatagataatcaaaaatttttatggatctatacggctatgattgagttgccatcttgtcaacatactttggtagatggttggtctatttgggtaatcatttatgttaaag

SEQ ID NO: 38248 - DNA, 673 bp, Oryza sativa
ccctctgttccatatatagatggtgtctttttcctatgaaagttaagttttttacgcaaaacaacgtggtattagcgtacaattgattgagttttaattactaaaaatttgaaaaatagattaatatcatattttagagtaattttcatatagaaagtttttacgcaccgtttaacagtttgaaatacgtgccacaaaaatcttaatcttcatataactcttattggagaaaataacatgaccatataaaggatttaaaagagatatgatatattctagtactacgaatttgaatactcagtctgtctagattattgactctctcacgtcatctatacagtctgatgttcgtagtccatctccagtgtgcctggaaacaaatcgagagaggcaaagaatgatatttggttggatttgtacactggagcaaccgaacaccaataaaacgcaaatttcttcggttggaacaagggggacaacaaaaacaaaaaaccaaagtagttcaagcagcattagctagcaaccacacctcagtcctgttcgtggtggggagccgaggaggaggagcagtgcccggcggccagggatcgaggcagggagccagccagccaccccaaccgaggtagccatggccgtgaagcctgctgcttcccatgactgtcgccgtcggatc

SEQ ID NO: 38249 - DNA, 714 bp, Oryza sativa
ggccgagcacaagccagttatgctggctcactccgtgcgttcgtccaatgcggaatggacgacgtagacgtccatctgacgtcacgagtgatctggatccaaattatactggatgtatatttgagggactcaaaatggacttattctgccaacatgtactgtcaacacaaaaggtccattttgcctcttgtaggtagggatgaaaacggtacggaaacggacggaaaccatctttatcgttttcgttttcatatttttttcggaatcgaaaagcccggatacgaaaatggaatcgaatattatcgaaaccgaaaacggagcgaaaacgaagtggcacaaatacggtaacgaaaatttatcggaatacagaaacccctcaaactgataaatccaattctcaagtctcaacggtcaacaattcatcgtaaaacacaatcatataaatccaattgttaagtctaaacaatatatcacaaaacacaatctatgaaataaattatctatgtttaagagagtaatgttgttgataaatcccaacgcagaaaaaaaatattcttatgtaacttcatatttacataacaaatatttttttaaaaaaaataaaagccaaacaccatcgtattcagtacttaaaaaaagaattcaaagtatttcagtcacaaaatttccggaaattccgagaaaatttctagaaagttctaactgattccggaa

SEQ ID NO: 38250 - DNA, 667 bp, Oryza sativa
aaaagagggctagcaggatggtaaaaaattaaatttacaagcataaaagtttctcgagtcttcttaaggaaaaaaaacttaacaatgaacattcaattaaaaatgaaaaataccctattttactttcaacttactttgttagaagtattttcgaaataaaataatatggatgcccgttagaagtattttcgaaataaaataatatggatgcccgcgcggatgcgcgggctaccttcttagttatatgctaattgtctttcacttaaattggcgggtccaatattataaaccattagattcgattaatctgaaaacaaaccatacactacatgaacggtaccacctatcctccttccccgtaggaaatagaatccaacttttaatctacccttaatttagttgtcacccccatcatgagttcgttagaagattcaatcacaggaactttgagtcccttgctcttagcgattttcacttgtaaccatattgcaaggtatatgtgcagatggtatgcatgataattagctaggagtagtttattactttgttgatacaaaagcaattcaaaacagttatcaaattagtctttcttttattcaaaagtcgatgaatggttgttatatatattaagaaaaaatataacccatgaatcattttaaatgacatt

SEQ ID NO: 38251 - DNA, 731 bp, Oryza sativa
tggctagttagctcgctcggttcatagccaactcggctgttatgttttcaacaagccgagcagctgttttagctcgttacacataaaagctgctcacgagcttaaacgagctagaagcataggcagagaagttagtaggccaaggcccatatgtagaaaaataatccatcccacggtaggtccaaagaaaacagtcaaaaaggaaagaccagaacctatttgatcagtgtagcttttcatcttcctctttcccctcatcccgaattcccaatccagatcgaccttccttctgccacacacggccccgccttgttgctgcgcctcacgtccttgcatcacgctccctccatcggcggcagctccgccgacccctcgagcgcctcgaccacctgcacggctctcccgttcttgtcttggtcaagtggtgtaatggtcgggcaggaggaggttgcaggcatggggcaatggatccaggaggttgagcacttgtgctcgatctcgtatatcgccaccagaaaacaagattattgttaaaggtagagctaccatgaatactgattcatttgttgaacacttgagctagcatgtgatttcttggtttgatatggagatacaattgccttcgtggacattttggttgtataatatgtatttgcatctgttcgatgtattggctcgcgagctaaacgagctagctcgagctgagaagcgagccgagctgagccagcatt

SEQ ID NO: 38252 - DNA, 774 bp, Oryza sativa
gatatgattcagagcaaacctttaagctttttaattgctccctgcaatggacacacaaacaaacatgcattagaaatgcagaagtggtgtgaagtcggttgtaaagataatgccaaactcacttattagcactgttgagaaaagtcaagcactcttgagctagagatttctgtgggacataaaaaacaagagagaattcatcaggcaagatgattataagaaggtacaattaaacacattaagcgaataaaatgagtcagtgaattaaaaaaaaacaggttaaccttaatcccagtgctgtgggccataagtttatccttgggatcttccgcttgctcaaattacaaatgcacttcaggagtttttggctctggtgcaatcgtgttgattctccggacacattctatgttccacttttctgccctcacgctcactggccgagtgctaagaagcttcaatgagtttgaaatctctctcagtcggtcactcaactttggggaggatagggtactgctggcaggagtcttctcaacaaggttatctgggaatgccagtcaggtaataatgtgatcatactttgcattcacgtaatgaacttggcaacaaataataagagtgatgctataacagtgatcccatgtcaatacatgaattcctatcggccagtcaggaaaaaaaattggggaactaaaccaggccatagtcctgaacaaagtaacaggggcactacgtatttaatacagaactgtaaacagataatgagtattccttgca

SEQ ID NO: 38253 - DNA, 597 bp, Oryza sativa
aaacaaactttacataaccaatcataccaaatttggactccttccaaattcgactccgcatcccatatgcacacaatacctccatcatatgccatatggaatgttcaccttccacgtgcattgaattctagccttagtatcccgcatgatctctgaccactacggatgtcgtcttatccccgagccgactcccgatccatcaccgcaaatactctcccggcatcttgagtcacctacacatagaacaaacaaaagaaaccatattccgagaccaaactatccccaacttgactcattagtagcaaacaacagtattacatacgcatagtatccatctagaagccataatcatgaaacaatcacggatatctaaacaaacaacccgaaaccgaaaccgacacagagtcggccggtcaaaccgcgggctgcgccggtctgaccgcgtgatacatgccggtctgaccggaccacatccagcagtacctgtagatcacctgtgaaatccaatcatctccaaaaccacttcgtgaataaattccaaatatcaaaactaataatctccaatgccaatcgttcatcatagaataacaataaaaa

SEQ ID NO: 38254 - DNA, 770 bp, Oryza sativa
catgtggggacgttatggcgccacatgtcagcttgtgacgttggaggtaggctcgaacgccaccactagcattatttaaggtaatatagatacacctagcttttatcattcattgagttcaacaaactttatgtatatttaaagaaacaaatatatctagagacataaacactagtactacagatttggacatctatgatgggtcatctgagatgggccgaaaagtatcccatttaaaatatggctactggggagggcctgtcatagatgcgacgtcatctgtgatgggatagttgtaacccattacagatgatctatgacgggtcacaaccaaggctcgtcataggacatgccatctgtgacgggtgtagtgttatgaaccatcgtagatgagatcactcatctctgatgggtcttaattgccttatgtactggtggtagttacgatcagtcatttccaaacaaaatcccggatagagatatgccttatatataagttgtagttctggatgatatctacaactttataactaaatgtttttattagagatcgtttacatccccaaatatgtattacagtgatgagatctattttgaagaacaatatttcaaaaatttcaaattacctcggatggaaaatgccccatatcaaagtcatagagctcaaccagatgtacaccattataattgacgatattttcatttaaatagtttgcatgcccgaatattgattataagttgagatctatcctaaaaacgaaaatttgaat

SEQ ID NO: 38255 - DNA, 777 bp, Oryza sativa
ttcatgcatatttctattgtccgctcaatagtcaatttcactgcattcttcatttcccgaaagtcaagatcagccatcttgattggcatttggttaggacgaaagcagtgtatatctgatatacttccataaacgaaatcaagctatataatattaattacttattacaattttaccgttaatcactaagaatcaccttagcttctggattcacaaactttttatgaagaggtgtactgactactgaagcacattaccagagagaaatgaatgtgctgatttgaaaattactgtttgtcaagaagaattgattgtcgtaaagtttactttgtattctgtttggaacttataaaatacatctctttgtgtaacttagctgtcttaaaaaatcattacattcagttaagtccattcactaattcaatgtttgaatcaggaacacatgtgggctagtatgaacagttcatcagtaaagaatatacaatcttttataggctaactctggcacttctctctatattgcagtttggaacatggaactggtttatcttttaggtttgttgttggacgaaccaaagataaagaaaaaatggcagatcttcagaaagaggtagacatgtatcatgatttcttgtttgttgatgctgaagaagatacaaagcccccacagaaaatgtaaactctctctcctcttatgtttgtacctttttacatatacacgtgattaatcttaagcctcccctcttgttgcccatgtgacaggttagcgtttttcaa

SEQ ID NO: 38256 - DNA, 5514 bp, Oryza sativa
caaccgggactaaagatcaatctttagtctcggttatttcacccgggactaaagatagcgatatttaatcccggttgaataaccgggactacagggaggttgcgaaccgggaggaaagatggtttttccaccagtgatacgaaagaggtataaactacttataggccatgtaatagacagagcagtatatgaactacaaacacaatcaaataaagaagataattttattattgagctcatagtcttacaacaaaagtaaagtactaaaagcatgcatgctcgaatctatgagaaaactaggaaaccgaacaactattctaagcctaaactctactaaactagagagtatacaaatatagaatagagaaattgcttcttgagtgtgtgttatgaagtgagaaggatttctccttctatagtggcaccgcggcccgaggtcgctgagcttcccgccacccaccgccgcctgctccctgctgcctccttgttggcgccactgcccgctgcccaccggctctcgctcggagaggagaggaagagataggggagaggagaggaaaatatcaggagagagagagacagagagagaggagaggaggtgaaaaaaaattgaagttgtgagaagacaaagagaaaggataggagaaaaaactgtggagaagagaaaatattttcgcaccccacatacgaaaataggcttatttttttatgcagctgcgaaaatatatatagttttgtatgtgagcctcttaaggagccgtatgcgaaaatagagatcgatttttgcatacacgactagttacggtccgcccgcaatttataggggttctcatatagaaaaattatttttatagtaatgtatgttaaactatctataatgataattattttgggacggaggaagtaatatacaactggttgtatacaagcacgccatcagtacccagtatcacttagctactatatattaattccagatgaccgtacgattatctattatatactatattatatactaaaagttcattaaacttcctagaaacgctcttaagtcgtcatgtggcgctctataaacactcctaaatcgccatgtggcgctctgataaattagaaaaaatcctagaaatttttttaaaaaaagcatctcaccattgattttcacttaaatcagtggacccattagttttaaccattagatcaattttaaagcaatatatactcaatccaacatatgggcctactagatcgatctcacagaatatgtacccttcccttcccctgccgtacatgccaacgtacgtatgtacgtaaatatgtgatacgtattccatatgccctccccttttctcctattttctaacaactcattacaaaatagtttaaattttaaatagctaaataaccatgattctcaatttatatacaacatttgattcatttgtactattttcatttgtaattaaataaatacatcaagatcggtattgcatatattttgcgaaggtaaagaaaaaactgaaatacgtttggacatagaccctagcatgtcagtcattaaacaatataaaaaaaattgacaacaactatatcatcttaaatcattctatatatacatatgcacattaaattaaatatcatgtaggacacaaaccatcacccttcacatcttaaaaattaagaaatatcgttgaaattctatgagaaataaaaagcaaaacatcctactatcattttacacttaaatcggcagacgtattaatttcagccattagatatatcattctactctcataagccgctacgtatcacatcttaaaaattaataaaaatcacataaattctaaaagaatgaagcatccgacctcaataaaatcattatttcagtcattagatctatatttaaagaaaaactataaaaaaacaaagtaccatcccattccccctccccctcacctggattaacaaagctccatctttatattctgaaattataaatatatagtaaatgaataaaaatatcgtgggagtatataagcatactaacaaaatcatggagtagggaaatcgtcaataattaactcaagttgcacgcattagatttttaacttatgtggtatgaaaactattctacatggaccaacgggagtgctagaaaggtccattaggacacttccaaggctacacgtggccgtcgatggagacaacaattaataaaaattcatacggaaaagcgtaattttgtagtagagagagcatgtctaatatcatatcacgaaaagacaacctttcatgagaaataacatataaactataacttaaatgattatctcaactctcctttgtactatgttatttgtaggagtaaatttgtctactgtggtcaatattgtcgatggcagtaacatccttaactctcctaagatttatttcgaggcctaacaaattagagaacaagtcagagcacaatggggccatagtaagaatgcacggggtttgtgcgagtcaggaatcccgacaatggaattgcctaagcatcaactctattttatactgacaaagaattacattggactctagcaaatgagagaaaagtccgggcatggcaggcgttgtgcgagctaggcattcatggcaatgaaattgccaaagtacaactcgatctattttgtattaacaaagaattgcataggaactaactccactgttgaaaaataagtttgtcgtaaattcaagattccacaattttggtgaattttaatttagattttctatgttttaagggtcgttacaaacaaaatcataaccaaatttcagagcaatcccaaatagatttttgagagaagtatcataagtttaaaatataataaaaaatccaagtaaaaatcagccaaatttatacattcataaatctattatatactaaaagtccattgaatttgctgcaaacgctctcaagactactacaaatgctcctaaaccaccacgtgatattctaataaattagaaaaaattctagaaattctgagaaaaataaaaacgtacggctcttgattgtcacttaaatcagtcaacacgttatttccaactattagatctaatctttataaactaaaaaaacaaattgagaaggatatgtgcttcaacggtgattctcaccaagactagctaatgcgggagccctttaattgtttatatatggtgagcttgagtggtcgtgtaagtgctgaagtgagaagcatggtgatggtgaagttggtgtgtttatatacattggagccataacttcaacgtattggagaaaaataaggtgagccaatgtggggccttgattgttgtgtatgtgagtagcttgagcagctaagcggatgcaaacaaagtaattatacaagatgttaaattcttatttgttgataatatattatagaagaacttaatggtgctttggaaataccttatatttattttgagaggtgactggagtggtggtgaagggtttccatataactaggagcagcaaccgtggtttataagtgaacaacatatgtattcttattatttgatatctgatagatccaagttcatgacatatttgacagcatatatagctctttcttttctgtctccgataatgaggtaattaataataaaaatttaaggactattttatggtgtagatcatcatagaaaatattaaagacgctcgcgcaaatgcgcgggtttccttcctagtttcttaatttctttatccaatagatcgcagtagccgccatagtagattaatttgcactattaatcagcaggtttgacgatatattttctgttttacacagctggtccgattagacttctgacctctatggcttctatatatgtcgagtttccattcgagttggatactctgctaagatttttagctacacataaaacgatacgaatataaaattagatgggttattagaatataattaactaaatagtattaattatcatagattttaaatatatttatttgcagaagagaactaagggagtagtttacatggtgttttaactttcaactcatgtatataaatataaataaatactgcgcctatagtcctactttttgattgatctgttcgtcgttgcagataattttagagtgtcaatcttgcacataaatttacatatattctctactaaattaattttcgtataaagcatgtgcatgttttgataaattggaaattgaaggtaaaggagcgaggtagctatagcttcttcttataatttaccaattcgacaatcttaccgtacatgttttcatcctgtagctgatgtatatatatatataacctgttgatgttgacagtcaacatgcatgtgccgattagttggagttctaagttccaacgttaaagaaacatgtaattaacagtttcacatactaattaatactagcatataacccggttacatctctcgtcaaaacagcagcgtttgcccgttctagttccaaccttcaaaggagacacgaacataaaaaaaaaaaaagggacttacctgtactcgcatacgtctgaatatttcagtaaacttccaatatcattttgacattggtatattttaacctatgtatccatcaatgattaagaagcagagataataaatctcaaaccttgatttgtcagacgagctgagagatcaattgcttcggctcatcatccgtggagtatttgctacgtaatctttgaacattcaactgcggggaattcaatccaagaagtgacatagtactaatgaaaggtaattcaggaataatagttctctaattagcgaagctgctaggaaatcctccactgaataatcatgtgcgctatatatctgcaactgatgttgaaacgagccagttttcaactgatgttgagatcgctttcccaattattggttgactcttgagttcgttcatcacgagtctatgggaatttctttgactagccatgaagctgtaacatagacaaggacaatatcatattttaataattagctgatgcaaatgaaaggcaatacaggaattaataattcctgattcatgacgccagtcttctttatgaagaatttattttttaaggcttcattttcacccaagttaactactttgtcagacgtgcgttatttttttaatttatccgaaatatttctttgggtagttccatgatagaacagaactagatgttgtacaaaaacgacacaagccatacggaatttccatatatatagaaaacaagtgcagcaaataatatatgtttatcacgatgatttgtgtaccatttctttctcaaattattggtcgctttgacttttttcttgcaatgtttgaccgttcgtcttattttaaaagttagtgtaaatgtaaaaaagataagtcatacttaaagtgcttttgataataagtaaatcacaaacaaaataaataattatttcataattttttgaataagacgaatgatcaaattaaaagttacaaacaaaaac

SEQ ID NO: 38257 - DNA, 4186 bp, Oryza sativa
atatacaaatacttgtacttatgacacttctaattttttacagcctaaacacattttttagatgggtagagcatccacatggctccaaatatctataaaaattggtatttttacatgtgagcatcataactgtacatgaaaacccatttttacaaacggccaaggcacctaattacgatgatttttccccaaaacattaaaaaataaaagcaaatccagaaaccctagccaccttccttgtgaagccaccgtcgttgttgccgtggcattccattgctatcgggcgccaccgtcatcacagctagcaactggcaggtcacggtcatcattgtagccctcatcgtgatcgaggtcgttgtcgcaggtggcggatccactgctttgccgttgtcaccgccgctacacgaaacccggcactgccaccgcatgaagcctgaggccactactctcaccatcaatgacctccctggctacagatccaccgctcccatgcatgcaggcggtgtattcacccaatcggaggccactacactcaaacccacgccgctacccatgagaggcgaggattctggtagagagtgggagagagaggagagggaaagtgggactaggggagaggagtgggaaagaggaaataaatggtaggggtgggggagctgaaaagattaaaaaaaaggaaaggagcggaggagggcggccggtgcggagacctgaggtagaggagagagaaaccaccgttcgtaaaaatcgatatttatagactgaacatcaccagtatatttttgcaggcgaatctcttttcagtccattcgtaaaaatataaaggagtatcagtaaaaatcattttacagaagaaaaacacaatagggaattagagcggtacgcatgggattctttaaggttatgggctatttaggccctatttattttagcttaagactattgtaatttagattacagtaaaataataagttgttagctgtttgtttctctggattattagctggttgtttggtgttagctatctaataatctaaaaaaatcacctttaaagtggattactagattatagtaatctggtttatagattataataatctagattataataatcctaagctgaaacaaacagggtcttaattaagttgatagctgatcagattaaggacgataaatgtatggcgaacgcatgcatgcagttaagccacactagcagatggtcaaactgggaactgactatatagagtgtttagtacttaatttgctaattaagctataagctgatataccgttgttgagttgccttcagcgacgacgacaggtacaccgtatttgttcaaaaatctgagttggataggagagaaaagtctaaactgaatgagggccatctccaaggcccaactataatataccggacacattattagagatccgagtggtcaattgtttaatatagagaagctgtagaaattttagtactttttttatactccctccgcccctaaatattcgacgccgttgacttttttaaacatgtttgacgtttattttattggatcctatcatttgattcatttccggaaaagaattaataattacttaaatttttttaataaaacaaacggtcaaacatgtttagaaaagtcaacggcgtcaaatatttagaaacggagagagtagaacttagtgatttgagtacctagatagactcacttgcttcaatatgtagtgcatgtatttcaaccataatacgtgtgatgagttaaccttttcaacgagtcgtatttgttttactaggagtagtgttataccaatttaaccactacttccaagcaagctaaggtccaaccctttttacactaccattttgtctgggtgacgcattacctgtttatatgggcattttctctgctccacctgtaaccaaacgtctgcagaaaatcatggatttttacaggtgcatcataaattaaccaccctagaaaatatattttacgcagacggatatcctttctccgtctattgaaatatgttttgaatgggctattactaaaggcatccgcccgtggaaacattcactactatccaggcgatgaataagctgttttcactggcattttccactccgcatgcaaaacaagggcctatgaaaatcgtggacgtttgcaggtaccaagaaccaccccaaaaaaatatatttacgcaaatggatatctgtagtctccacgtatggaatacgttttgtacgggctgttatttcactagtcagatctaaactatgaaccgcgtgcattgttttattaattacgtatgtcgggttgatatatgtcgccttgaattgaatgtgaagtttgattggatcaatgcgttactgctaccccgagccacggggaacgagctcagggatagagcccagagcacagcccatggagggccgcacccagaggcgagcatgcctcgaccatagcccacgggtggcatgcccaaaggtggatgtgtcctcaattctagggcaaatgtgccccaagctcagcccaatggggggccgtgcacgagggcaagcgatagatatgcctcgagcagtcggagattggactttgcttcccgtttcttcgacagtaatccctagccttaaccctataatggatccacttaggattgaggttgaggcccttcctaactgacatggatttgaatatcttgagcattggttcgaccagttccttgcccacccatgtgttggtatttgatacggtcagagataaatccacaagcgcacgaataccgctgtagcatttcatttaggagtattccatgggtatcgttatttgtttttccacaggaaacacggtggtgtaaagagtaggttgatatattcataaccatatactataatcaatataccatagtccaaacatgggtaaatgataatgatagtatttgggtaatgtgacacacaaaataatcatcccaatgtattagctagctagtggagaaagaactaaagaaatagctatggtttcaaatgtacttctatatactaatcatgcttagtcgatacaacaaccatatacatacacatggctaggacatagttaattataggcaaccagaatctaccaggaggccactccctgttggtctgccagtgtggctatagcattttatgaactcttacatcatacccgaacgtggaggaatatagagaacaaataggggttgtcaccacctgctgcctatctcactttccgtgaggaacacccgcatccaaacgacatttaattaatccaagcaccatgcttacattaataaataatgacactaattcctccgggacttccaccctatgaatggagaggtaagaactagtgcaacccgttaataagatcattagaccgataatatcgtatcatagattgactagcccaaaaacatatggtatacactggtggagaaaccatctttggtctgtcgacccaaatccacaatagtctgggttctattaaaaaccgggactaaaaacgatttttagtcccggtttataagaataacagggctagataatctttattcccggttggtgttactaaccgggactaaagatggttccctatcagaccgtgtcaggcgcctaggatctttattcccggtttgtaacaccaaccgggactaaagatataactttagtcccggttggtgttactaattccgggaataaaaatctaacacgtactatataatccctattacttatcctcttctctcgtccacacaacaaactctctctatctctttttttcctctctaactccctccctctttcctgccttatctcttttctttttggatagatcaagcgagagcgctgagagcgagagcgggccggcgcggagggccagcgcggcggggcggagggcagtgcggaggcggcgggcagcggcgcagcagtgggctagcgcggcggtggccggcgggcgcggagaggaggcggcagcggccggctggcgcctctgtgatttttattttagaatttgtgatttattgcatgatcctgtgatgtattgatttgtgtgtgatgtatttgcgattaattttgtagaacttgtgatgtaatttgatttgtggcaattttttttaggatttgtgatgtatttgatttgtgtgtataagtaactttaaagatttg

SEQ ID NO: 38258 - DNA, 1193 bp, Oryza sativa
catatacatatacatatatacatatacatatatacatatacatatatacatatatatacatatatatatatacatatatatacatatatatatatatatacacatatatatatatatatatgttggtttgatctataggtgttgggtcagtatgcaccatatatatgtgcatgaatcaccactcaccatcgatcgccatcacccatatcaccaccattcgtcatcctcctttcctatcttccttttcttcctttctttctttctattcttctttttaatttgtggggagcaattgcaattggaatgcattttgctggaccggcatgcatgtgccaatgttgatgcaagcaatgtcgacaagtcactacatatagtgtcagccggcaatacgttttggcatataccgatagaagaaaaagggtacacatattggaacaaagtgaccatcatcgatcgagatcgaactggcaagtgtgaattatattaggtgatatgatctttatggaccagatgctctaccaattggggggtgtgtgatttaattttgaggatgggaaagaaagcttatagcatcggaataatctgatgatgatggacgctggcatcatgtacgcatgctccttttgggagtcttattatactaaggatttcgtttgatgccggccgtcagtgttatggaaggaattaaagagctacctcatatagcaaagctacatggctacattatgccatatatatgtacgtgtgttcgttgggctagagcaattgagttgtagtccattaatcaacttagggcatgtctagtttccaaacaaaattttttacactatcatatcgaatgtttggacacatgcatggtgtattaaatgtaaaaaaaacaattacatagcggctggcagcaagccgacggcggctaggctgcgcgtgggcggcggcggcggctaggcggcgcaaagtcccaggcggcgggcagcaagctgacggcggctaggtagagggggaggcgcgtcggccctgcgatgaacctggcgaaccgccacatcggccgaggaagaagaccacgacgacggcgacgaaggatgcgggcggcggcggctaggcggcgcaatgtcccaccctgccttggcaggggccagtggaggtggaggcgcgtcggccctacgacgaacctggcaaccgccacatcggccgag

SEQ ID NO: 38259 - DNA, 10884 bp, Oryza sativa
acgtcatgggagaggggtggggcccagtggtggcgtcacgtggatcgacaggcgcaccggccggcagctagcttcgatggatggatggatggctttgatggggaagacgacgatagagtagagcgagagggaggaggccaggtgaagccattttgatcgccaaaaccaaccaaaatagcaatcaaaacgggacttaattatagccgacaaatcattactaaccactgttcaaaacttattgagtgttccatcatgctttcggatacaaccaaaatcctaaaataaagattcatggtgctaaaaatttaatttaaaacagattccatattcagattcttagtagtagaaaattactttctaataagataaattatgtttgtttttttatgggatggaataagtagtatactttctccatcccaaaatataaggctcaaccacacctaacataaagaaccagaaaaaaattaatcaccttaaatggatcatatccatacatgtaagcaatatgattgggagatgtaacggtagaggattcaatataaaccaaatttaaaagcccaataggtgataattaatatatgtatgcctgtatgcacgtcttatattatgagaaataaaaaatatattgtgtcttactactatttaaaatggagatagtagtaattgtaaatttatcccaaaagtaacaaaaaaaataaaacgacgtcaaccatttcaatagctacgtgtggtcgagtggtggagtgcaaccgcgggtagttgtaatcctgttcccggcggcgagcgggcacacacacgtgtcatcaccgcgtgggggcccactggatcgtccagcccatcacccgtggtctactggtctccctgctgcttctgcttcacagtgaggtcaccctctctctttccggctggctgcaacgtgggacccaccgtcggggacgcacacgtggcggcggcggcgtccgttgacgtcgctgttccggggcgctggggtggccgtccatctcggccgcgcacacacgtcacacgcccaccatgcaaacaccgccgggaaaccgacggccaggatcggatcttgatcttctatggcggccgagcgatggatcgagatggacagtggaatttttttatttttttagactttttatttttttaattttattaatagaccatttaaaaaagtatttttgaaaaataaaccttctaaccatggccacgccaaccgtgcgtgacataataaagttatttgaccataccagacgggctgacgtggccaaagatacagatttgtaaatatttttcgaatggactatcaataaactaaaaataaaaaaagtctaaacataaaaaatttctcgatcatgtggtggtggtcgtcgtcgttttgtcagggtgcgtatgaagcaacgcaggcggttgaagtatctgccatgcaccacgcggtttgtaaaatcattgtcatgattaatatttgtgatgaacaattggctttacaaatgatttaatcaacgaattggtttgagagcatgtgtgaatgttggtgtgagtgcgtgactaatgtgggtcaggttgtgatatctgtgcccagaaattgttgttttgtctgattgtgtgcaggtgacttgaggttagccttggtcaatggtgaggaccgggactatgctcagggaggagcagaggtctagtgcggtcaggatactatgtgagaaggtgactagagtctggattcttggaggtcaacttcggtcaacggtggggattggaactaaactcagaaaggagttggggtccagacggttaaggatatcgtgtgacgaagttagatacgagatggcacacggtggatagacatcgtgtgagagagatcttcgcaacggacttcatgaggtgtgcgtgtaagcgtcagtgtttgcgaggaggaatgagaaaagatggagatgtacatgtacggtggagtgcatggttgctacagtactcgatgtactgtagcgtgtagtttgcctgtgcgtgatgtgcatgtgtgctgtgtgcatgctgatgcatgtatgatagttgtacgtgtcctggtcgatggcaggcttgatccatgcagaggcaagccgactcggctcaggcggcaagcagcagcagcgagggcaggagtctgacttgggtgcggctgtggatccggagaaaaaggaaattgaggtattgagttctactgtgaataggaataggagttctacacctactttgagtagggggttttttatgtataaatagagagggagcgtgaggcttcccggtatcgctttgagagcaattgagttgatagtttagttagggtttcgagtttagtcgagatttttgtaaggagtgctgttgttgcactttgtaaacatagagagaagcaataaagttgtcatctattttgagagttcttcgatttgtgtttcttcgggttcaagcggcagggcggcgatctaacccgcggcgtgcgagcagtccgaccggcggcgataggactacgtcgagatttccatcaatttaagggtaacttttattttccgctaaaagtttttgggtttttggttttccctaccattcacccccctctggtaggcttggttgcttgtgttcgatcctacacgcttcactccatgcttgcctaattattgacttcattaccatccttctaatttactttctccaactactccatgttgtaggccgtgtttagatgccaaaaaaaattgacaaaaatatcacatcgaatctttgtacatatgcatgaagtattaaatgtggacgaaaaaaataattacacagtttgcgtgtaaattgcgagaaaaatcttttaaacctaatagcgctatgatttgacaatgtggtgctacaataaatatttgctaatgacggattaattaggctcaaaagattcgtctcgcagtttacaggcggaatctgtaatttgttttgttattagtctatgtttaatacttcaattgtgtgtccgtatactttcaaatttttacaccctttaaactacacacccataataaaaaaaatcaacaatttcaaatttatcatcgtataactctttgacatgtagctttattatatctatgtatgcaaattgagaatatatacatgcatgcatgcaaacatttaggggtagttaactgctcgtttgttgtgtggagtatatgaggagttgaagtctacggccttatttagattccgccccaaaatttttcaccctgtcaaatcaaaatcgaatgtttaaacacatgcataaagtattaaatatatgctaagaaaataagtaattacacagattgcggctaatttgcgagacgaatcttttaagcctagttgctctatgatttgacaatgtggtgctacagtaaacatttactaatgatggattaattaggcttaataaattcgtctcgcggtttactaacggattctgtaattacttttttttactagtacccaaacaccccatgggacaccctatatgatactcgagatgtgacacatcaaaactttacacctcaggatctaaacaccccctacatgcttcttggttcttccgtatcacatgttcactttgatgctatttttaaccataccattttttaagtaaagttgccaaaaaaatgtccacgtttagtttgttgccaaatttggtcaatacataagaaatcctaccaaaattttggtaatattaccatcttgccaaattttttgcattactaaaacttggtaaggtttattttagttataatctgaacatgcccttaatcttggtgaaaaaaggtatatgatgacagagtactacgtttaattacttggtccgaggaggaaaaaaaagaacataagtaaaatgatgtaagccattagcacattattaattgagtattaattattttaaacttaaaaaataatataatttttaaagcaatatttttttttaaaataacacaccatttagcattttgggatattaatgttaagccaaaactgtgataaactgtgataagtgattcaaaaaatgttaagccataagttatagtacatctatcattatcctactaaattacaatgaaaacacgacttatatatagagaaaaggaaatgatactaggagtatagtgaatcgttttttttattgttttaggtaaagaaaacaaacaggaaaatagtttagtaggtcaagtgctttggaaaaaatagtttgagggattaaaatgtttttctttcaaaaaacacgactacacgcaacaaaaaacctagaaaatgactctctttttacatgcacactcatacatttaaataatgataaacagatatatttaagtatatatgtatagaccttagtctacatagatattttaccaaccattcttacagaaaataaccttttgaaataaataaaatttgcttatgattagcttattctccacggaattaattagcaaacctcgcaaagaagaaactttaagtgtgtactacatgctatggtaggtaggagtatatatttgtagggtaacatgtaacatatgggcccaaactttaagtgcatgtacgacacactatttaaatttcaggtattttacaaaagaagaattaggtacatcgtacggaaaaacaagataaatgccggagtacagatgtgcacaccatgacagccaagcagggcaaaagatctggaaacaatagaagcagtagtaactcttatgttgattaaaaatcgatgggcacttgagccatctgacatggaaatatctgattctgacggccaaggcaaatgacgctagctgcagctaaaaacatggccaaaggggcttttcgccacgtcagcctcctagggacaccgggcccacgcggccacgagtgcgtgcccacttgagaaagcacctgacgtggcgtgacagctcggcaaggccaccacctcaacaaggttaagggatgtaaacggttaaaaacggctcgaatcagtaggatcgaaacgtgaaaattcccgaccgatcgagcttcatttttatataagtggcaccatttccatttctaatgatatacaaaatttgatttctctaatttatttcaacatagtaggttgttggtactgaatatttaaatttataatatggtcaattaccgaccaaacaagaattattttggctcagttgagaattgaccatatttatcaatgtatctattcactattgacaacaatatggtgttaaaacaaaatagagaaattaaattttatatattgctaaaactgaaaatagccagaaacggtacggctaattccagtaacaacgctatgcgatttgttgtcttaattttgctgtacaaatggactctagcaaaactataggcatacaccaaattttggagggcactatcccatccaactcttcttgtacgttagagttgacatgtctctcccccatactatcctccaatgcctagtcatccgcaagctctctcgccaacatccgaagatcaagagtgagtcgtgtggttcagggtgtcggatccggcagcacatgtggtgggggtggggtggagggaaggtggatcctacagtgaggcattaggaagataaggatctattggtagaggggttcggggaatcaaaaataacggtgcatgaaagatctcgtgttggtcggttgtagctaatgcccttcgagagtggcgatctgatcaactcgagaatgacagaggtaattgagagggtgaaacggggaaggggagcagtccgttccacccatcttgtcatcaagacgaggtccggggctgtaaacgagatgggcacgttgtggagaaagggagaaaaggggaaaagaaaaggtattaacttctaaggatttattttccattgaagtggttgtatttcaagaaaatggagagtttgaatagcttcccaatgtttaacacgaagaattgggaagctattcaaacattaagaatttgaatagcttatcaattcttcgtgttaaaccttagaagttaaccttagaataaaccttagaagttaataccctttcttcgcgtaaaaaaagatgattatatccattagaaatatagtagttataatgaaattataaatataggaatagttagaaatatattagaagagtgaaacatgaatagtttgttagagtgggaagtattgagggagaaatattttcagatatcatccgtatggagatatggatattatggagggtcataaactcataattggctagtttgctgcagatggttgaaggcctgttcagaatgaatgaaattaaaaatatttaaatatagagccctgactacaggctacagcttacagctagtttccttaattaggagaaaaaaacaaattaagcatccctagaacgtacacataagaattcgcagcaatcagtttatattctcatatgaatcagaaaaagaaaatctagcactccaagtttcttctaagcacgtggagagtttagtatttaaatgacattataaaaaaattttcctccatcccataatatagcaacctagtcccgattagatgggataattcatggtacaatgaattcgagcatgttttctgtttagattcgttgtgctataaaaacatgtccagattcgttgtattatgaatatcatatccgattttaggttgctatgacatgggatgatggagtagtttattttcacgtcattccaaatgctgttagccaagcaagggaacgattgatgtgatggatgcggctagcgataataaagcagaaaaaaaaagaagtgagtctcacgcacgaacgcacgcacgcatgcataaaccaacgctcgctttcgttagcgatgatgtatgcaattaagcgaatatcctattgatccctgattaggctccataattaagaagcaagcaacttgtcacgttctgattactggtttgttaatgaatcatgacttcacgacgtcaggtgccacagttcacggcctctattaactgatcttgaatttaataaacaactcaatttttctttgatataaatcgatcgagcatctttttctccttaatttgacacagatatattattatattccctccaaaatgtaaggcgtatattttatttcatgaggacaagaacttaaccaacaattactctatgactacctctactctcaaatataagagattttgcctatataatttacatggtcaaaacccattatatttattgaggtaatagattgttttttgaaaattaaggttattatattcatattcaaaagtaattattttgtagttataattttgttccctataattcttgtattattaatgcaattattagttaaatctttcataacaaaataaaaatatgccttatatttttatacatagggagtatatgaagaagcattagtagtaaagaggtaaaatcgaaagacattattactctagctatttacaagagtttaaattttggaacttacaaatattacaaacatgtggcacacttgcaataggtactgaatgggatcaaggaaattaaaaaatgtaagaccatgtatttctctatctttttaagcatgtgtgaagtgattacgcatactcataggtgcgctcgtagcgatttgtattcacgtatctttcatgtaattgaaaaggtatattgtaacatgttactaaataaataaagttggagtgatatgatgcaaaaaaataataaaagtacctaattattttgggtgatgagtgtggccacctccaacgatagtggggagggacaaaaactggttgaaatctttagagatgaccaatgggggattgggtggctgaggtaagttggcccccaaaactaatggccgtagttttcttatccgggggcgacattttggtggaaagaatgcacttttgcactgcttactagtagttgctccatggtgcatgccaccctttctttctttctatctctctctctttttttttctctttgtttcctcatgctattacgtacgtctcctcctcttgtttaatcatgccatctggtgctttttgttgtgttgtttttttttcttgtcttgatgcaaccaataccatgtttaaatatattgttataattatatttgtccatattcatcctaaaataccttacattttcgaacgaaaagagtatatagatattgagcagactcaagaatgattttaattatgtataaaatatatatgttcttttattcctcaaagagatatcatggtaccatatatagcttatagtgttatatttgtggttcgatctagtggcgtagctagctaggtggcactgtgagccatggaccacctaaaaatttgatcaagattaaaactatagtatatatactagttaatataataaaaatagtataatggacaaccattttaattgacatagtacatatagatggaccacctttactttaagagcctatttagattatagccaaaataaaacttaccaagttttggcaatgccaaaattttggcaacatagtaatattgccaaaattttagcaggatttcttatgtattgaccaaatttagcaataaactaaacgtagacattttttagcaactttgctaaaaaatggtatggttgaaaataacatcaaagtgaacagaccctaaatcctagctacgccgctggttcgatcggggtattattggtatttcataatatgtacctcataaggtttcatatggcatatgcttttcttgttgtttggtgatcgatcagtgtgctagggctagaattttgtagaaaaattaaaatttggttcagtgtgctaacttgggttgtcgtggtgaataatattactaacataggagacttgtcctgagtgctccctaagcgataaatggtcactttgtgtgatgtggatacattgtttgtcacgtccatttcccccattcctctagctatgtcaaaagcacatatgcatcaggggtgcctgctaatcgagtattattagataacacggtacctgtctatctagcaaacttgtcgatctcgtcattaatctaatctcactttttttaaatagggatatccccggttctattcacgaaggaaggcatatatattagttaccatcaattactcctcatcgtttattcctcaaatacttagtttaaagataaaaaggtaagtttattatataccttaaagagtgttgtcataatattataaacttattctaatataaaattaactgtcagaattttagaagttagaccaaatcttgttttaaatatttgtatttattacccgaggaagtatatctctctgtctcttttttaattagtgtgatgggaagacctttaatctagtattctagtttaacctatgccaaacatatgtaacctaatttacacaaagattttgatggtcactattacttgcttctagtttatgttgatatagattaatttagaaaaaaaatcatggccagagacctcaacctctatgctagcatcaaattaatatgccctatgtttttttggctgatttttaaaatcaatactaattactgaacatgtcaatccacatatcgaagcagtttggatgactacgtacgatggtgtgtacactgcttaaagtaatatgtatttttatttggaaagctacataattactgcctctgcttttagataacttttatcattacctacgctttgacaactaataactcttattaaaagattcgattacgatgcaagaaagttttattcttatgttcaatttggctgatgccgctttaaaatatagatgaggcggagaacaaatatattcattcggtaagagcaatcgaatataacacatattgtatttataattcaattgcataactgcatcgatcattgtttgtggtgtgtgcatgttatgaacagacgaactaatctgttgagcgttcacaccttgttatacctaattttgatagaatatgactactgtaaaggggtagagggtcttgagggtgtggggcgacatgggtcgtagttgggtcggtcgactcaccctacctaataggtagatccgcccaggttcaagatgaaatacactttaataatatgttattttcttttcaagtattgtaatttcttttgcaaaaaaagtaagacgagttgttaaaatttgaagatgaatacatataattccactgtcagtcatttaaaaacggagtatagcacactaatatattcatcatgctacaacgatttaatactcacacaatatttagtgagtgcatctcctctcctctcctcatcatggccatcgatctatccatctatctatctatcatcatctccatctcatgcacaccacacaggggggacctaatggcgatcgatcgcctggggacgggggatagcgataaatccccctccccctccctccatccacctggttttctttttttgcaccgtattactttcctattttagtaaatttatgcacctaaattttatacatctcaagtttacgcatctaaagtttatatatccgattcaaatttgaatttgaattcaaatattttttatatatagtatttctatacatctaaagtttatagacctaaagtttatatacccgtttcaaatttgaatttgaattatatcttattcaaatttgaatttgaattcaaatattttctatatatagtatttctatgcacctaaagtttataagtcaaaagtttatatacccgtttcaaatttgaatttggattatatccgattcaaatttgaatttgaattcaaatattttctatatatagtatttctatacatataaagtttatacacctaaagtttatagatccaaagtttataagtcaaaagtttacatatccgat

SEQ ID NO: 38260 - DNA, 1659 bp, Oryza sativa
gggggggacatgtgggaagcaaatgtcgacatagtgtggtgagagagaagggacggtgatctgatctgattgggttgggtggtactttccgtgtacgcgcgggcgtggttgctgggcccactttggtttgggcttttctgtgtgtagcggctcctgttttacggcccatggagttggagtcgtgctcccccccgtgaattagtgggccaccttggtaacaacattttgtggttgttctgccgttaaccccgccaccaactcaattttttttctttaggccttattcggttacgctttgatttaatctagaccaagaatgataaatatagtaagaaatttataatagatacaatgagaggtcgggatttattccggaccagaaaccaatttacttatgatagggacaataagagaccgtgattagttccacacctcttgaccagttgattgattcccggtctcttattgtccctattataaataaattagttccctgcccagaataaatctcggtctcccattgtatttatcgtaaatttcttactatacttgtcatttccggtccgaattaaatataagcgtaaccgaacaaggtgttaaggaaaaataatatgtgaggctgatccacgtaccaatgattcatggtatgagattaaagggtccacatgtcaataactaatatatacagcaattaagatacagtaataatatgttaatgataattttttttgcaacgtacgagcaatatgctattaactagtaaaggcatccaatatttcaacgtcaaacaaagtcacagatcaaatgacgataaaaaaagtcacagatcaaacttttttttccaatcaattgcataagtatctatcctatgtactacatctagcatttgaaccctccatatataaccgtattatcacctttggcacctagccatttgtccgccatttctcttcttttgacaaaatgatattgtttacatacacacaagagaaaataatatgtatgattgcgctcatctttacacgcattcgctgaatggaaagattcatacacttatgactaattctaaagttctaaaaaaaatactaattctaacacctaaattaatggaacataacaaagacattgtggccattataagttttatactctgccatggtgagctacgactaaacaaaatgacattacacatgttttattttttgctaattgtaaaacaaaattaaataggggtttgaaacaaacaagcatgtccaaaaggattaagtgtatttattttaccctcaactcttgctcctgattaaatcgtctcccttaatattttcatccaatgtggtgttgggacccacaagttaatcctcccttgctcacccttacctcttctctccctaccctccctggtctccctttcttctccatgggggactaattgacagagaccgacgaggaagcatagggtggcgaccgtcggtggatgatggagacatacgaggcagcctcggagagcatgaagatcagcgacatccaatgctagttggaaaagcagtttgcgagcgatagctccatcacgaaccagagagcgacaaaccccacagggggaggacgcggacatggcagtgagcggaagcgccagtacgcgcatgaggctagcgagcccca

SEQ ID NO: 38261 - DNA, 742 bp, Oryza sativa
tacatagactttgactatgagcatagttttggattggtgccactgaaatggtgttagttaattgaaatacactgaatggtggcctgtgggtgtatggttttgctggtcgcacccatggcaattaaggaccggttcacgggaaaccctaggagacttaccgtgcttaccacaagcgggagtgggtaactgcttgatctgaagtatagctcgaccctttcctagtcaccggtggcgagggtgggcgtgatggagttgggtcggccggggtgtctggttgtccagctgccggattcaccgcggcgcaagaggggaccgcccactgccttttgaggggtgggggtgaaaccttagcatggtgtggatggttaggggagggttatgcggagggtcttgtcacgattttcccctttgcagtatcatggtgatacttcggggcatggcgacatgtgtggaatcgtgtcttgtgggtacagttgtacacctctatccagagtaaaactattcgaatagccatgcccacggtaatgggcgatcaaccagatttaccgtgattagtctcaccctagtttagcttaatgaactggtgtagttcaggtggttggttgggcctgttgcaacgtggtgtagtgttggatagtgattggttaatattgattaattactacaactgttttactgctttcaactactgctttgaaatgtctgctttatgcaaaagtacatttagcctcctttggatata

SEQ ID NO: 38262 - DNA, 2143 bp, Oryza sativa
gaacccaaaacctccgtgcttccatggagagcctcaaccactagtctatgcggcttgctgtgaaaccaatataacaaacatctatttgaacctgtttaaaccggcggtttgaccggtccgaccaataaacgaatgacccgagtgccttaccggtttgatcacctgtccggtcttaataactatggcccaaagtgaaggaggggagatttaattgtttttctttttattaaattggttaaatgatctttgtgactttaaaattactacttgagctccgaaaattcacagaaaaattcggagagtattttaggacacaaagaatattataaaatattcccggccaatgatttttaaaggaattttttaatttccccattatttcacttgattaacttgatttaatttttattttatttctagaaaatacattattaattgatttttaatcccaaacgaaaatcggggcgttacaaatctaccccccttacaggaatcttgtcccgagattctgggatggctagaaagaaagctggtgtgaggcggtctgactgatctgcttgatctgcacactgcattgttcctttctgtttcgaactgactgattgtccgattgaccaaacctgcatgactgaactggctggatttgactttttgttccttagctttgcaaaaactggaccgattggttatgcttgaactgacccagacaaggactgcagatgctcatggaacttacatatcttagactgaactgttatgctggcaattttggtaacctgacaatttgtaactcattgaccctacgtccgcttgaactggacctgactcgaatgacgagtaattccaggaaacctgcttgacctgtctttcgtctaaactgtaaccgtccctaatgttgcttctctaggccgaactgttgacctgcttcacgagtgtaacttagaattgaatctgtcgacttgagattggggtaactctgctagtggctcgcaactgactcctttaactactaaccactttgtttcacctcgtcgatccttcgactgaaacgatgacgaggtaagccaaaactcatctctgagacctacccccccttacagtgggtagtcatactttcgcctgactgggaacaattgaactattgtccttgagaaaatcaccaacacttctcgaattacgaagagccctgactttgaaaattgaaaacttgaccagtcaatcaaaatgaagcaatgacggtgcactttcatcccggcaagacctgtaacttaacccttagctgatgataggaaattccacataaaagtgactcccacttagctcatgaacatactgactcttgactaactttctcatcagttctaattgttggtatgattgtcctgcttctggcctgacttcggtgtcgagttgcatagttgatttctgaaaactaacctgaccgactctgcattggaactgatgcaacttgaggagttggggtgctgcaaataaagttgtcgacctgatgacactaacgccttgccgttggacaacctacggaggagtgacatgtcgtacatcttccattaatgttgaacaccttgaaagaactgcccttgaaaaccataaccattgtaggtagcacttgttgctcctaggattagtggtggcttggctgtgctggtctgctgagaacttggtggtgtactgtctgaggttccgggtgcttgctcttggaaaacaaaactggctttggctctgatccaaaatcccgcttgcatcttgagcttgtacttgttgttggagacactgttgttgcatctgttgcatcggactctgtgggtgctacataatatctggcacatccatcttccaatcttggctaaccagagcgaggtgctctaactaagctggtagcttgttgtcttgaactgatccactgactctgaccgcaacacactactgctggagtttcttccgctgcattcgaccttgcattgagctttgcatctcctgcatcaacatccaacacctaatcttggacaccaaaaattgatgacgagcaggggttcttctggcattggggcaccttgcagctttcaactgaaccattgatttgtgaccttaacacatcgttattgctgttgttgttgttgttgtt

SEQ ID NO: 38263 - DNA, 584 bp, Oryza sativa
tctattccataccccatgctaatgcttgcctctggacgagcacggttacaaacatacttcttcagaacgcccatgtacctctcgaaaggaaacatgttgtgtaggtgatgtgcactagggttcccgatcttccgaaaggttctgataaacaatgatttggacggagtcgcgacacaaatcgatccggcttcttgaacgcgcacgctcttgagccccgcaatcgcagcaccacgtctcctctggttatcacccgtgtcgaaacgcggatgacctcgctgagaaggctattccctgtttgccaatcaaagaacacaaacaagaatgagatagaaaaacaaccaaaattgcagatgaatgattaaaaaaaaaagttggggtcttactaaccgatctaacaaaaaaactgttatcgacagattaatctaagcaaaacccaaaaacctaaagatggcggcgggtactgatatatagagtttagggtcatgcaaacccctctcgacgcaaccctaatgggttccaacacgatacacgggccaaaggcccaaatacggtgacgcagaaccgggacagattctggatatcac

SEQ ID NO: 38264 - DNA, 541 bp, Oryza sativa
gatttatacaggttcaggccttcttattcaagaagtaataccctactcctgtcccgggatggatccgccgagtgtattattgattgtatgattgggagaaaatcaacctatgccccaagaggcacccggaccctccttatatatgggaaggagtccgtgttacaaaagataatctatatccctaacggaatatgcagatacaggtaaaatacagtcgtaaccgactaagtctcaaggtgtttccttgatgtacaagttaagaaacgaacccgagatacaaataagatattctatatatattcggtatcctatatccagtccaaatatcctcgccgtgtagatatgggatatccataatctccacaggccttttgctctaatagtagattgaattgtttttgaaggaacagaaactattccgttacatattcataattataggaacagggagattagcttctgttgcatgcgtatacatatttatgttatgcagatgtagcttctaccatatttttagcctgttttttcatttgccggctag

SEQ ID NO: 38265 - DNA, 1268 bp, Oryza sativa
ggctgattttgatctctaaatcggctccgctagccggtttaggttttgtttctacaaaacccatcttgatttggccctttggctagatcgaggtggttggcgactccatatcaccgcaaggcatttaggtgttgtgatcgtgcttgtcgacttgtcaaaaaaattaccaacacgatttttggcgactccactaaggaacgatctaatcggccatatcacggctgaatttcgtttaatacagtagttttcgtcaaattgagagtttgggctaaacagccgagatcaatctgtacaacttatcgctgctgctacgaagttttcctcggatcagtatattcgacggcggtactgtttggtcaccaagtggaattaatctacatagctcagccgacgctatttggtttcatctgccgcagtcagccggcgtcgccgttgtctgtgttgaggccgatcgattcaatcggtttgggagcagtacgctgtccttctattttgctgtgcacggctgaaattttgagtcttcgtcctattcggtttgctatatacaaattcctaaaaacagaagaaatcaggctatcaaagccgatctgccactgcccacataccgaaaatcaggctattagagccgatttacctagaataagacaaaaccaaatcggtttctgttattgtgcattaggcaactgttaccgagaaaaaaaaaagggatcgaagccgattcatattgtttcggctgttattgtgagacatcgattttctgaatttttgcctacacacgagacagaaacagttctgttcttgctgcacgctgttaccgaaaaaaaaaatcaaatcaaagccgttgcagtgcatcggctgttattgtggaacatcaatttccaaatatttgctagctatacacacagtagcataccgaggaagttaagaccgtatattaatttattcggtcaaatatttcggctattagctatatggccggatttaatcaagaaatgtcttcatcaactattacgagcgggaacgggttaaacaatgttactacacaatacttcaggaccgatcaaggcgtcgtgagaggaaacgtcccgctacctcaagttgtaatttcaccaaaggtaaccttcgtttcgcctaacccgtcctttgctattcaaaacgttaataatcattgtgtagatgcatatgctacttctagttttgctcctatacaatatgcttataatgctacgggggagtcaatggatgattatacgccaattacacagaaa

SEQ ID NO: 38266 - DNA, 591 bp, Oryza sativa
aattgagtgaagagtataaattgaaattttcttagcacaagagcaattattcacaatatttgcaataatactattcttgtgccgaagaggaaatcaagccacataaattaaattggtggctagatcaaaaggaggaatttggatagttggatcgagaatcaaaggatggttttaagatcaaaggatgggctaacaattaattccaatgagattggaattactttggtttaggttcaagggcaaaattggaggatttcttggaccataattcataatagtaaaaatggttttcaaactaaattcgaataaaagagttttagtcgaaagaaggtttaatattcgaaaataaaatttcaacaagaaataccaaatatgtttttaaatgaaaaacacaaaagggattaaataccagagaggttttatgcgagttagttctaggaggtccagctaattatattttcctaggtctagaaggttattaaaaacataagaatcagcatgatgcaagattagaaaatgacacattttcaggatgttacaaaacaagaccatgcaacttctcgctaaagtatgcaacaggcttaccatctt

SEQ ID NO: 38267 - DNA, 1106 bp, Oryza sativa
ggtgggtcccactaccaccggcgagggcgcgcgacagacggtgctcgattgcggcctacctagtcggcaaaaacatagtggtttggccgactttcggcccaagccaaaagagtatttaaaaaacctttgtcaatttaaattattcatacaatgcattccatttgattaagaatacttccttgcctcaaataaatcccagaaaaatctaggaactatagaattaagcgaagtatttaataatattttatctggcacaatttcatattcaaatttattatttcaaaatagatcttctcttataggcttttaatatcatttctaataattccaattaaccaacgatttatatatttcggatttttagggtgtgacataggtgacgaatatttgtcacacgaacgttagatttcacaacatgacttaaaattcaattttcatgacgtaaattagcatcacctacactagtggagaaaccctttttcctcccggttcgtaacccccctttagtcccggttatccaccgggactaccaatccgggactaaagatcgctatctttagtcccgggtgaaataacctggaccaaagatcgatctaccaatttttttcttatttgcatggccctattgctgcaaggtttagagtttatgttacaatacatatatatgcattatatatatatatatatatatatatatataggacggctctttcgtacactcaggtgtatgtacacccttttattaatggatgatccaattagcattcaaattagctatgaaaaaaattaataatatgaatttccaaatgactgcatgcatgtggcatagctgcacaccggattgagtgcacatttgaacaagattgttggcatgcatttgctttcaaatttgataacttaccttagatatccccaccttttctagtatgcaactgtcgcgtcccaaaacgactctaaaatgcatcctcaaaaatgtgcatagaataattaaaaatccatgtgagagcctccaacaattaaaatgtgcaaagttaaaagacgaataaggcttggaggatttttgtatattttctaacagcctaaaatgcgtaaataaattttagtgg

SEQ ID NO: 38268 - DNA, 681 bp, Oryza sativa
aacatagaggacgactaggggatgctttatataggcttggattagagagatcggaccctaaccaagagggatcgaagccggaaaaaagtagggttagtttggagagataaactcaaaacgaatttgatttggtttattcgggcaaaattgatctccgaaactttagggggaagggagaggataaggaggagatgatttcccctcaagcaatcgaactcggagatggccggttgaggcggaatcgaaggggaggtggcggcgctcgggctcggctcggccggaggtggaagaagaccccgacatgtgggccccacacgtcggcggcttgagaggagaggggcggcggcttggcttgggccggcgtgggccgcacgcagctaagaggagagttgggccggaaacggcccaacagccttggggagggttttaaagacgttttcaattaaaataattcgtgaaatgatgtttcatttattaaaaataccttccttgctcaaataattcccagaaaaatctagaaaatagataaacaagcaaagtgtttaataaaattttatctagctcaattttatgttgaaatttttcctagattattagagtttaacttgtaggcttttaaaatattttctaaaaaagcattaaataatgaattattaagttaggcgattttcagggcgtgac

SEQ ID NO: 38269 - DNA, 1462 bp, Oryza sativa
aaaagggctagggtttaaggtataacctatatcttagggattatggggcttgtatttgctagtggtaggtttaggtggtataatacctagggtttagttatatgggagtcgattgtggagtaggatagcatataggttaggctctatattttatgtggaggttctagaggattggaggctagaggggattaagcaattattgtcgcttatattttatgtgaaggctctcgtggtttggatgataggaaatatgctggatagttgatatggttaaataggcatgtggctaatatgggtcaaggttgtacttttgtagaatagtggctagggtttagttgtttaggccgatatcaaggtaggataaatatcggctagggttttgggtgttcgctagtcgtcgctagagttggacggcatgacgactagatttggtatcatttctagccatgtcgatagacagcatatcagctagaagaataggaggtgggtgcaggtttagtggggcggaagtgttactccgacaaccgtgagtggcggcggagcggctaggatcacacagagctcaagagctaactgtgcggcgtgcaatggaggtcgaggggatagtgaagctccgaccgatgtacgcatcaaggcgtggggtgccaggagcagcacttcgaccttgggtttggtttatgccgggctttacaaccaacggtccgacgttgaggtccgtagaccgtgaacgtccccatggaaggcgtaaagttccaaccggcggctttttagtggctaaagggtattttggaaataaaagaaaatatttgaaaagcaaatataagtttaaattgtaaattcaattataagattaaatcaaatatttattcaaatggtatttgaataaattaaagaaattcaaataaaatcttaaaatagcaaatttgatatcaaaatgaagagtttgaatttagatgaatttaggtccaaatttcactggaatcggatctacggtttaggagatatgggcttctaaagattgggatttgaattaaatctagaaaatacgaaaaggtactatttatgggcccacctgtcaagacctgcccttcttctcttcttcttttgttcttcttcttcttcttgccggcaacagaaaggaaggagggaggtggggcgccagtgctccagtggccaaagtgtggcgacgttagcggtatatcgtgttcccgggcgacgcgcacttggggattgcggtacctagccaagggaaagaaggagatggccggaacggcggcgacgagagctcaactccggcgataagaaaaagtggtggtggcggtttatcttaagatggagggagaggggaaaggggaaaaatggaatcacctccgtgaggcggaattggtggcgcaagggtttggctttgcaagctccggtgagggaaattggccaatggcaaccatgggccggacatgggaga

SEQ ID NO: 38270 - DNA, 1141 bp, Oryza sativa
aaaaggtaatttatgattttcgctgtctcatcatgattatgccaaatatacatatacctaactcatgaatttttctatgcctacctctcaccatttatgctatgtctaagctagacgattttgttatggccatacctactcttaaatttttttatgtcggccttgactcagccgccccaatagaagcgacaaaactgctgttgttgcaagagttggattccttcaagaaagtgatagatgaatctgaggcatcaagggagcagtaatcaaagaaaattgaaagtttgattggcctaaatgctccatattttgctctgaaatgttgatagttatgttaccaatcatgtatcattgtcattttcatagccttcatcatggcgttgcgaatattatgaatataccaatggatcaacctgcacgccctaagtgtgcgcattcttaaaactccaaggtaaaaagacaaaaatgctgaagtgtgatgcatgcatatgtacatattgctcctcccaaatggacatcatgcaggatcgggacttgacaacacattaaaggctctcatgctacacgcttcttgcactgtagttaaacaagggcatcgagcggtagttcgataacaataagattcattagcaccaacataaccccatccattccaataaatatggcacgcatgtattttaagatttatctttgaccaagaattagttttaatttacaaagatatttgatagaaaattagcatcatttcaacctgtttttcaatacgaatacaacaattctatgtatatattactagtcatcaacctgtgcacttgcatgggctagaaaaattacgtgacatcaattaactagcgtggaagctttattggtgcctccaattactagatataagattttttctttgtttctcaattctttcggtcaataacgagcatgtgtgttattcatagaaacggaggtaggtagtatttgtaagaagtacggtatcgaatttcaaaaaagttccgaccttgtccgataatatacacacatattaacctacataggcaagctagccagacctagaaatataccatttctaaacctattcggtcacttactcacgttggggagcctaactaaactaacatggactcacatg

SEQ ID NO: 38271 - DNA, 1253 bp, Oryza sativa
atctcgtattgggtacttatatggaaacttatttcaatattctttatttttaattccgaattttagctatttttaaattgtatttctacttggactctccttttcttttttaattttggattttattttatttttatttcgaattttaattaatcttgtattgggttcttatatggaaacttctctcaatattgcttatttttaattccgaatttcagctatttttaaattatacttgtactttgactctcctttttcttttttttttctttttctccgattaatatgggaattatttgtattccaaattttaattaatctcgtattgggttcttatatggagtcttcttttaatattccttatttttaatttcgaattttatctatttttaaattgtatttctattttgactctcctttccttttctaattttggattttattttatttttatttcgaattttgattaatctcgtattgggttcttatatggaaacttctttcaatattgcttatttttaattcagaatttcagctatttttaaattgtacttctacttggactctcctttttctttttctttttttctttttctccgattaatgtcggaatttctagcccccacagcgaacgtaatgtctcctttcaaaaagttattttaataatataatagatagatacttccaccgtttcacaatgtaagtcattctagcatttcacacattcattttgatgttaataaatatagatagatatataaatgtctatattcattaacatcattatgaatgtgggaaatgctagaatgacttacattgtgaaacggagggagtagatagatattaatgtagtgacatccaaaaccacaagcatagtgtctaattgttaaataaaaataaaacatgcaaatgttgtgtttagtttaccgattgaaatcacaagactactaccaagtgtccaagtctgatcactgtttcacgagatatgcaaagcaacgtttatttagctgcttagcttcgacttgggcttttggaaggtcaaacgagtgacggaggatcacacgtcgcatacgccgtgatcgtatgacagtcgaacgtagtagtcgtttgtctagcattttcaaaagcaacccgcggcgccggctcctccagagattcagaatattcgccaggtcacttcgctaccaccgttcttttttttcgtacagaagcttcttttcctccgtccttttggagaaatcgccgagtaaaag

SEQ ID NO: 38272 - DNA, 801 bp, Oryza sativa
ataagatttaattgctagaagttgttatatttagaaagagagagtacttatgaccataatttaagtaattcaaaatttaaaatttgactaaaaatgtaaataaggaaaatctttcgccctgtttttaatctttaaaaaattcttatagtaatatttatgaatggttggagtagcatattcttgagttattttgcttttgatggtgagttcgttcgaagataattagaaaaaaaatcctcgtctttcccacgcacgcctctgttttataaaaagtttagtgtttaatttattgcttaccttattttacttattttttcaatcctatttgttctcctgctctcagtcactgagctagttgcataaccatcgtttcgcggaataagcgaaatggcacatttgtaaaagaaaggtaatttgtgaataaaacttttatatacgtgttcttaacgatctaaaaagaaatgctgaaaaataaacttcgataaaaaaaaccttaaaatcagctccaaatctctaaatttaatgttgaaaatttcaaattttggttgataagcgcccttagcctgtgcgtgtagtgtatgccatgcattgggcttgaaaagatcagcagatcgtgtgacgtactacggccggtctgctgccaaaacaccgttctagggtcaccaataattggatggaatctggcactacgttacatcaaattattggccagatttttttcccctttctttctctcctcgctttcacggtcgacaacagccacggccatggtgctggctggacccgtcgtctcgtccctgt

SEQ ID NO: 38273 - DNA, 4771 bp, Oryza sativa
tcctataaatatttatatcatgtacaaatttgaatcatgcaaatatttaaatttgggaccgaagggagtaaactagttgagtttggtctccatggctatcgatcattgatcatggtcgtgattttcctcttgtgatgcgtgccatttgatttggtccatgatccaggaaaatattgtttgtgatggaacaggtagcacatgttaagctgcagaagctgaactcatgcatgcttgcttaattacctgttgattaatttcagatcttgttatcttgtgctcccaagtctctgcttagcatcattttattgaattattgttcaaataggagcaggagatttggttcgtgagctggaaagatctcgaaggagttccagagggaaatgctgccactatttttcagtaactccagatcattgaattatttattgcagagacctgacgacaagatgacatatcttgtggccaatgtagatcttgatatggcctggccccctcattgtgttgttgttttcaaatcacaaatcactctctggtccattgattcttttatgggatccctgcaataatttcagaaaatgaaacttctgtctgcaggttttctttcctaggctaagcgcttcagttgcactgcactaggacagtgctcactgatcagtttttttcttcacttctactcctagctgaaatgcttgaacttgccttcacgatctcaatcataaaaccaaaaccttatacttccttaaaaacggagtcatccgctcatcccctttcacatctcacatggcgtgcaaccatatccccaaaaaactgaataaccacgcttttactctatcacgctaccaacccatttccaatcgtataggccattggcctataaaaataattattgttagataattaaagtttttattaaactcaatcgattacattaaggtaatacaatttttgtgatatctgcataactaagatgcacacaagcgaacacacaaaattaaccgcaatagtaatttaatgtccgcaacagtaatatacgggtatcttattagttatataaaagtataacagcttgctttcacaattctggaaactcttgtgaaaatatctcggatcaagaaagcccctgattggagcacgcacgttctttcttgagttttcagtttggactaatgacaaaagaatttggccgattatcctttcaatttggaggactgatgacagggaattttcggactgcggttttaattttggactaactagatgggtacctcgcgtattgttgcggaaaaattatgtgataatatagtagatattaggtctgttcggtagtgctgaactgtggttgtacagccgcagcgctgctgcttccctagtatctttcttgtggtgggactgtggctgctggctgcaaggcagccagctagtagcgctaccgaacacacccattacttctaaaattttctttcttacctactatataatttttctttcatgtgtttatatttttttacctttatcaattatacataggttataaatgattgggttgtatggtgtgtcttttggagggaataaatgaaatttataccttttatgaatcatccaaaaacttaaaaacagttgaggtgatgtgaagagatgtaatttacacccttgatgaatcatccaaaggctaaaaacaattgagatgatgtgattttatgagagaaaagagaattagcattaactatacttagtggggatgaactttatatatatatatatatatataggatgacaaagaggtttgctcattatggcttccttattagtattattgcaagggagaatcagttgacacagagttagctcgtatgagtaatcggcgtcagattttgacgtatgtttttctgccggtgtttggtcgtcatgtcagttaccaaattaaaaagcgtcagttgcttctggtgatgggaacacagcttatttctttcgtcagactgcacgctactacgcttctattagatttcttgttagttttgcattcggcagaatggctgttgctgaaccttttgcgttttgttgttgccgtcactatccgctttacagatattcatggagcgaaatttgaagctgttgtatgtatggccatctgaagaaaccatatgtcatttttttgttgatacctctgcctaaaaaatgcaaatattatcttagttattacctaccgtcaatacaactaatgcaaaagccatgatatcataacaagatgttgtcatctgatcggagtttatcatttttgacatcttcatctcagctcgtattattatttaccccgtctttttttttcaagaaatggacacatagattaacggaaacgcttcccgagctcttaagggtgattactagagtaaatttcattaaatcccacctatttatgcatcaagttgcacgaaatgttaggtattttggcacttgacatataacctagctttatgattctaaagttttagaaaaccacacggtaaccattttgatatattcctatattaaaatagaaaaaagaatggatgtagcatttataggatggataaagtgctaataaatttgagaaatttgagaagtgattgtaactgtaaagtacggtatatcaaagttaaaataattattaatgtggttttgtgaaatgttatgaccttaatatctaagcttacgtgtcgcataccaaatttcctgtggatttgtgaaacttaaataatggatgtgattttatgaaatttactatggattttaaaactttctatatatgcgcagaatattgtttaaatttatttttcaactttataatagtcaattcactcatacgtacccttaataattattataaaataaggtcaccatatcaccaaacaccaagaatttagtgagaccagatatttttcatccgtccccatatttttgagcgtgtataaagtgaaacaaactgacagatgtttatgtgtacgtcgaaatccatgagaaaacatatgaaaggtttgaccgaaaacagcaccgtcatttattttttgttctcctggggttgtaataacatcgtgattctttctttcaaaccaaaccgtactaaaatagccaccgatttcgtcattctttctgaccaaagagagtttaaaaacccataaatttcactatggtcccaagagatttaattagcgaggaccatggtctgttctatactactattttgaaaccttgccacgttgtgacgatctggaagcacaacttctcttcccctgtcattcggctccacgatccaagatctccgaaaatttgacatttttactctttctaaaaacttatttaaaatgtatttcctgaaaaaacttcaacaataaatgaacctcaacccaattaccaattacacaaactataaaagaagttgaaatgaacgtaactcaactggttagatttcttatggtgaaactagcccatccaaattcaaattatagatttaacacgtgcttgcatttatgactattttcttttagtgctagttaacgtatttgtcgatagcaagatgtccgtgattgcttcatcaatctcaagatatactcttttggagatacttatatagataaattacatgcgtatatgtttatagggatgaggttttgcgcgctgtgaacgttacatttgtagcaatgtttctggaaaaacaatggaataagatttggccggattcgaggggattccatcagctcacatgcactgttgccacgagagcgaatcctgaccgtccaatccggtggcgttggtggctagaaaattagctccgcagggcgtcttcgaggcggcagcggcagcagcagcttgcctgagctgacagatgcatgtctgagtatttgagtattggcgtttatgtgtgtacctatttcacgtaatccttccgtcgtaaagattgggctacatatctcatcgtagtaccgaggttgagttttttttaacgggaggagtaatcacgaggaaaaaaggtttgatctaaaacaacaccgccatttttagcgattattagcgctttcaacgcgtgtacactcatctctacaaaaaatacgcctatctctataggcataatttgtacctgcatatcataaaaaataattacccataagactaaaagaaacccataaatttcacaatggtccgaagacatttaggctcagtggaagaaacggctgggttaggaactaatttctcacgaacacacaacagaatgacttattaacgaatgattaattaagtattagctattttttttaaaaaaaactaatatagttttaaaacaactttcatgtaattttatttttaagaaaacatattgtttaacagtttagaacgagacagccttattactgtacaatgtaaggaccctggtctgttgtacagtatattgtaatcttgccaagttgtaacgatctggaagcacacactcttctctcttccccgtatcatccggctccacgagacaaccaacaagaccaaaaactttttttttttgggggaaaacaagaccagaaacttgatgagaaggcaaaaataaacccagaaaaaaaaacaaagggaaagatttggccgagttcgagtggattccatcagctcacatgcgctgttgcccgccccacgagagccaatcctgaccgtccaatccgcggcgtcgctagctagaaaattagcggcgcgtcgtcgaggccgcggcagcagcagcagcttgcctgagctgagctgacagatcagtcgtggg

SEQ ID NO: 38274 - DNA, 616 bp, Oryza sativa
atcattccttggcttgtagattcatcactccaacctctgcatccgtcctcacatagccttccgcctggatgtgtctcctccccttctcttctcttctaaggacgcttgtcatttggtttgggcccgtcctaatccaggttgatctcatcctgagatccttaacttaattacatctgcaaagacccctatccaaataagagcactgtcttagtccgcctgggctgctatcacacatgccgcagactgggtgtctaaaagaacaaagatttatttctcccagttctagaggctgcaagtcccacattaaggtggcagcatggtcagattctggagtgggcccttttccaggttgcaggctgctagctttacactgtattatcacagggtgaacagcaggatctccgatgagcagaatgaggctcagagagggtgggcgacttgcctatggtcacacagcaaacagctggaatttaagccctgctcaggagtagcccctgagctcaaactctctgtgactctgtgactccctggaagacccacccgttggagacccacttgtctccactcagtgcattagatttagcttagctctttggtttttggttttttctctttt

SEQ ID NO: 38275 - DNA, 1495 bp, Oryza sativa
cttacaacgatggaaagttcatttgtaataatcattttactacctcaataggaaaaacaaaacatagagcgagcttttatagcctgaggctgtgtttagttcagcgcaaagtttggattttggttgaaattggagatgatgtgactgaaaagttgtgtgtgtatgacaggttgatgtgatggaaaaggactgaagtttggatccaaactttggatctaaacacagcctaaatgtgaaactaattctgtgagtagatgaggttctgtgataattttcttgagcataagtgcacgttttgatgttctctatctgcattttcttgtatgctttccccttttgtgcagataaataactggcaagatattggaatgcctaagaatggtacaaaactaagagcaagaactttcggtgccaatacaacactgccagcctttggtcatgaaaacattagagaatcaacttagacatcaccatgtacgttgttattagtaccatcaacatcctaattaactcatcttaattagctggcactacaatactatatttttctgagatatgttatctctgttctacagaatttaattattgttgtatagtgactgctttcatttgttgcagatcttacaggtgggcttaaagtatataataaacaaagtggaacaagtcatgaatgtcatgcctaattgttgttgttttaaccaggcaacaaactcaggaaatcgagatgcacacttcaaatgatctggtagaaatccccaccttaaatcctttatactctacaaaccacaactatctttaatcatttgttgcccttattttgcttatatctacacatggccatggtgcttcatgtttattttctgaaaatgccaacaccaaagattttgaagcacacaactgacaaagtggacatgctacaacaatttctacaacaagaagcaccatttatagaacaaaatgcagtacacatgtatgttgattgcagtgctaggagtgcagtaaatttttttacatgggtgtattttttgcaatgatggatgttaataattgagggatatgatgagttagatgatataaacaaggcacaatgaatgaattgaggccatcctgatgttgggttgcacatgtattatattttattggatttctccttttatgcactatgtacaatagttggtcagagaggaaaggctagagctagaagactttttcactttctttttttccctctaaatatgggctgttagacagagttttactaactgatagcaataacaacactcctctgaaaataagagagatgtgttcctctgtttgctagatgctactggccagcctaatggtaattgattaattccatgcagcaccatatttatcttgtatgtgacagtttataatatactgcattgcatttgtccacagtttgatcatgcagagttataaaaaaggtggcgtggtggtcttgcataggtgggtttcaaagtttctatatcag

SEQ ID NO: 38276 - DNA, 784 bp, Oryza sativa
cttacgaatctgttgaccataaataaacaagccagaagaactaccacacaagaaaattgttggtgtttctgacattttggctatggtagctattatattttataacttcattagaaaaatgttttaaataaaaaccataggtcatgttttattcattaggttctgtccatgccacgtaattatgttttatgtcacttaacgtattttcaggaatcaatttagtctgagcagagcatgatagcattaatatctaaacaaccagatccacagtatttattccagttttttctccattttgatcactttagttagcagtgcgatagtgcatgctagttatattgtacctccatgcggaaaacagattttcacctgaattatttatcattgattatctacttaattatacagacaaattaaaataaacttaacaaatagtttgcaataagtggactaaacaatggtagaaaatatttaagaaaacctatctctaagagacgtgaagtaaataatatgcaacgacaatatgatgaagtattaccttaaaacagcgcggaacagtgataaattatgaattatctatttagcttggtttgtaaatcttaataccacatcgtgtgacgaaaaacagcccgtaaaaataatagggatcgaattgtattcatattattatgtttgttttgttgttatccactcatatgtatatattaattattcttattaatgttttgcagcagcagatcatgacctaacgaatcatgtgtgtatcacaaaaagggccaagttg

SEQ ID NO: 38277 - DNA, 8928 bp, Oryza sativa
attatatttctacttttttttctccttttatttttttctaattttgaattttattttatttttatttcgaattttgattaatctcgtattgggttcttatatggaaacttgttcaatattgcttctttttaattccgaatttcagctatttttagattgtatttctacttggactctccttccttttttgacaaaaacttttggtaggctacagaattatttccagtgatctatcgtgtaggtgttgatagcaagatggatgaatgcacgtgattttagagtggcagcaagattatctgggcaagtgaacttttggtagctacaaaatactcttccgtggactgtgcatcttttttgttttcctttccttctgtggattgtgtttttttttcctttttgtccacacccaatcggacatacccttgcctagatactattaggactctgacatgcatgatgcatgctcgttagaatttttgtttcgtacttatacctttcctatttatgtattatataaatagagtttgtttcgtaccaatagaaatattgcccaacaaatctacaccctttaatctatatgcactatataatctaaaggtgtagcttttttctctttttctccgattaatgtgggaatttctagcctcaacagcgaacgtgatgcctcctttcaagactgttttaataatataatagatagattcctggtaaattacggaaactatatgttgtctaaaatttttatttttgtttgttctacaaaaaaaagtgaatacactgaggaacatttagttgtttccaacaagcaggttcgtcaaggatgagcttcaaacaattggagcatttcttggtgttgttgaaaacatgaaggaggattccccgaagtatcagatggctagagtttgggcggagcaagtgaaggatttggcttatgatatggaagattgcctagaggaacaaatcactgccctcactactagaaattcaagttggtctcaatatgtaaccaattacagagctctccgtccttttgctgccaagttaagtgatctcaaatcaaggatagttgaggtgagcgagagaaatatgcgttatcatcttgtcattgctgaccaagtcatcgacaatcatatgaattttatggtggctttgaacaaagtgttgtctcgctctgtggaaggcactactgacaattggacgcaaaatgtggttacatgggctgaagctcctgaagaatctgcatcaaacgacaaaacctgtgctcccaaagtgactgcagtagttggcatgtttggctcaggctctactcgtgtttctgagatatacaagaggcataaagctgataaaaaatatgattcctatgtgtggatcgaattgtcgcaagatgtgaatgtcacaaaggtattcaaggatatgatgaagcaactctttgatgattcttcaagtcagcctgaatatactggagaagatgagctagcccatggtattcaacacgaactcaaacaaaaacggttcttggtcgtgtttgatgagttgtggacgacacatgcatggcatagcataaaaaaggcactccctcatgttagtagaagtggcagccaggtcattgtaacaacagagatcgttcatgttgcaaaaggctgcaccgaatcagatgatcatgtttattgggtccaactgttatcaaaacaagaatcatttgagcgttttaagaatttgattcttgtaacagaaaactcaaaaatgactcatgaagatagagaggacttcgaagacctggacctaaaggaactagacagactcaaggtacttgaaccgcccttcaatacaattgaacagatactaagaaaatgtcgtggactagaattggctataggaactgtagccaagttacttgcctcagtctcctcacaagtggggaaaactatgtgatgatcttccttcattactctacagtaaccacccaatgctcaaagatatatggaaagtaatgattcagaggtacaaagatctaccgccttatctcaagccatgcttcttatacctgagcattttcccagagaactctgacatcaatgtggagactataatagaccgatggttagctgaagggcttgtgagggatagaactggaatgagccctaggactgttgcaaaatggtatttgttgtggctcattgatcgaagcatgattatggtatccaacctgagaaagaacagatcatttaagacatgctggatccatcccatgatgcgagatatcctggtcatgatttcacaagaggagaaattttcaatcactgttggtccaagaaagagttcaagtttgttagtaaagcgtttgccccatgtaacacttgatggtgggagtggcaggaagttagctagatatgtggatctttctggcatcaggtcactaacagtgttcaacgaaccatcagaatccattgctgcacttatttgctcctctaaacttagagcagtacgcattttagatttgtcaaatgccaatgagtttaaaatcactagaagagatatagagcgcgtaggagaactgtgtcacttgaggtacctaaatctttacaaaacaaatatttgtgagcttccttcgtcaataggcatgctcccgttcctgcaactgctaaacgtgagaaagacaaggatcacaaaacttcctaatgaggtcactcaactcggcaagctacaactccttcgtgctagcagaagaacagaagattcctgtcacaatagaaggaaccgatgctgcattgattcagctctaacagtgcctaaagggatagagaacctgcaggacatagaaaggctggatatcatggatatcaaggacaacagtggctcagaaattgaagctttggggaaacttgctaggttggagcaccttggattggcaggcattacaattggcaacagcaaacaagtctccaaaaccctaaaaaggatttcttcttcgctgacctatttgtacctcggagcatgccaaagtgatggaacacttgcttgcctgcccatctctgaaaagaaaaggaagaagccactggagtttccacgcctccaaaccataaagcttgacggtcatattggaaaaatgccatactggatttctaactcatggacacttgcggttattaaactttacaggactaatctccaacagaatcatataatgtcccttgagaaactaccctgcttggtcacacttgctctcctagacaattcatatattagcgagacattggttttctatgataaggccttcagagagctcaagaccctggagattattaggctaaccaagttgaaaacagttatatttacagaagaagcagtgccccagcttcgaagtttagccatcagatgttgcgaattgagattaaaaggaaaaaacaaccttaaactccggaaggttgatcttgatgatggtgtcgaagaggtataactgaaaaggagaatgcactgtgattctctagtgatccgttggtcccgaaagtcagtgccccgcataataataatagatttggctgtatttctgggttcctttgttttggggggtgggggaagagttgattgatgttttgatcttgcagaaagtgtgtatggtcttgcttttctcgggggctccattttttttttcttaaagtgtgctttgtgtgttgtcaagctgcatttcgttttagtgagtttcatggatttctcttgatggtctgtaaaaattactggatttgttttcaatggccctttggccctctaaaagagaaaccactgaccgcaacatcagcgcaaatacaatgtgaccatcatggttgaatgtccggagcattatgcagaagttgcttcatgagaaaagggacagttatacaaactgaagagaaaaaataatttggtaatgggtacagcttgtgatacctattccactggcatatttacttttcctttttcttgttactgtgataaacactgaaacatcaacaatatcatgctttattttgacaacattgtacatgcttgttgcaaaatgtactgtcattatttatgttagttcgtgcacacaaattagtaggtaaaacaacacatttcttattccttgcaatcaaattagtatttttctactagttcatatcctcaagtaaaatgcatcacgaaatagcctactactactttcaacaggaaaattggggtttcagagaatcatcatgtatcttcagaaagaacaaccacatgaatttgagatacgataaaaattctcgaatcacttgctttatcaatcctaatgcgataataatatttttaatcttttttgcggggattaatgcgataattcgtttagctggaataaaaaaaattacctcatatccacaagcatattgaagtacacttggaagctgttcatcaacttgtcagcctcggtgggactgatgagctctggattggagagccccggcccggatacgtacagagcattagttcctccgctagattcagatcgatagatgcggctactcgagactgcagctgctagctagattcaagtgagcgatttggggatgtgcagatggcggctgggatagggtggttggcggcggcggcggcggcggtggcagcggaagcggaagctgaggcggcaacgctgcaatggaggcgtaggacggaagagaggttaaagagagagagaggatgtgatatggcaatttttttttagaatctattcgaagcatattttgagtttagtcgatgatttatcatcgaactttgttaaattttttctacaatataccaccaaggtggatgcgttttaaaaaaaataattaaaatgttctccaagtcattcaaagttgacaattacttggctcaagatatgtcacccagtctttcggagttgcttacaaaggtaggtgtccgtgtgtatgtttataggggtgagtgtacgcgcgttgtaagcgcctgcgtttgtactgtgtttctaagaaaatgaattggctcattaaaagtttcgaaagatatgaaagtttgtttaagccttcttacccaatatatgagttcagtttgtgtgtgtatattaagatttcttccatgttttattttgaaaataaaaattatgtggtatgtgaaagaggaaccatgtacttaaaagatagccagagaagaaaaataattatgtggcatatgaaagatgatttaacattaatacaagaatattttattagcatatgaaatataaattgtattttcgaaaaaaaatatatgcaaatttaaaatcttgaaatatacccacacttatatgtaaaagtttcatatctttttcgatatttctagtgagtccatcaattgcccaacctttatgtctttaagagtagtttaggttttttttttttaaattattcattccaatagcatattgttaaaaaaaaagttgataaagtcgatgtcatattatagagggagataaagtcgatggcaaatctttaaattggagtacatgatcatagaatgattctctcttttttttcatgaggaggttgatcattttgccattttcttttttttagacttttgttatattttttaaaatatagtacaaatgcatacgctcacagcgaggcaaactcacccaaatgaacaacacgcacactcttccatatgagcacttccaaaagactagaccagcctatcctgaaattgacgaaataaccatgggcgtctcattatcgatgagtatatcgtctattactgaaagaataactagttgtcaatacgagcatctctatcacgtctagaacttgaatctagatggactggttccaccgtaagaaacctaaccaaaccaattgaactacactcgctttgctttttaaaaaaatctgtaagaaaagaaaatggtgtctaacctttttcatggacgcatattttaagatgtgattttgatcataattttatattatatattgagcttataaaatatagtataaaatctacgagagagattatgagaataaaacttattcagatcactcttacgttttcaaactaggttaatataaaagtatcgaaagtttgataatatttagccaaaatgtaatgaatttcttatatgtgagaaatagaccaatagtagtatccagcaattatggcaataagggaaaatcacgacaggtttataattggacaattttgtagcgttaaatatgtagaattcctaaataggcatcgtcacattggcttcgacgagccaaacttgtaaatatcccatgccaaaaattgatccatcaatgtgttacacgaaagttgaaactctgctgccctactgggccatcaagcaatgacaaaactcagcccatgtgcacccagaaagcccaagaggactgtaaagcccaaccttcgccaacaaataagctactctttctatgaaacggtacgggcgttttgatttggaggaaaaacataggaatattataggatttctatggatgcctttgaaacaaaggattaaatcctatattattttgatttgtttaagtatgcgctctattcaaaagctagctagctaccaactttcaccgtaaccatagcaatctgccgcagaattgaatcaggatcagtgaagtggctgcaacaagtgcaacttttgcagttgttgtaaccattgttggatcgagatcgaatagtttagatttctgtaccatcactattcatatgagtatgtaattaagtaggtattataatatactatattaattattatcttcgtcccaacataagtttatatataaaagtgaacttatgtataattctcttgaccaaaggattctccctgcttccaactactggatctagtggccccaatgagtaaagtttaaaacaacattaacctttccattacaccgtgcaacatcaaatcatctaccatcaacccaagtataaccacaatcataactaagagcgagtacaatagttggctacaagtcatacaagtcagctataagcacaatagttggctacaagtcatacaagtcagctataagcacgtgtggaggagagaagagaattgaagagagagaagaaaagcgggctacagatttaaagccaatacgttggaagtgtataagaggtgggaccatatattaacggtttagtatataattacaggtaactattgtattaatgagctattagattagctatagataaattggagctagtagttggctatactattaaacttgctctaatgagatgacggacataacgcgtctgtgttatgcggtatgggttgggtccgacacgtaaaatgatgtaacggtttagcacataattaattacatattagctaaaaacttgaaaaatagattagtatgtttttagagcaaaattcttatagaaaatttttaataaaaacactccgtttaacagttggaaagcatatgcgtgcgaaaaacgaaaaagaaaaagttgggaacttgcacaaaagaacacagcgatgtaagtctcacctctagactagaaattgtcttcaaggacgtcctcaatacttatctatctactactacttaaaaagtacaagaaatttccatcgtccgttaaaaaaaaaagtccgactgaaaataaaaagagagaaaagaaaaactactgtcgcaaaaaaggaaaaaaagtatcgtccgttaaaaaaaaagtccgactccttttaaaaaagggaaaaataagtcttgccgttaaaaacaaagtccgactactgaaaaagtgggaaaaaaaacttctcatgtcgactcccgtaaataaagtgaaaaaatttttcgtccgtaaaaaaaattgactcccgtaaaataacagataaaatttcgttcgtaaaaaaaatatgactcccgtaaaataagggatagaaaacttctcacatccgactcccgtaaaaaaagaaaacatggcctcctatgtaaaaaaagaaaaaaaatctgactcccataaaaaaaatagaaaaccgagaaaaaaagccatttataaaaaatccgattcgagaaaccatccgaactcaacacgagaaaataatctaccatccgaactcaacacgagaaaataatctaccatccgacacaacacgagaaaaaaaaccatcgtttgtaaaaaaaacggtttgaaaaacatccgactcaatacgagataaaaaaaccactgcaaaataaaccgttaaaaagtgttgttaataagaaagcgaatcggaaaactgactgaatccacgcgagaaaaaccggataaaaaaattgtccgaccctactcgagaaaaaaaaaccgtttattataaaaaatactgctccaaaaaagttgtccaacccaacacgagaaaatacacgcatttataaaaaaaatccggttcggcaattataaaagaaaaaaaatcatattccatgagaaagaaaaactgtgcatttataaaagtattgtttgtatagtctaccacgttggtttggtttttccaaagcggttgctgaatgttcttatgtgcgaatgcatgggcttgagcttggttttatcggaacgagatcaaattgatctgatgcttaggtcggataggatccttaattttttccatctgctacgtacatggattgtgttgctcctgtattggagaccctacacgactctgtatgcaattatcagactatttagataagtatagctaatattcttaatagcgtatcatataaaataataataataaataaatttttgattgttgttaagagaagaatgcactgtgactctattttgtctagacttcaccatgccagacaatgtaggatttgattgatcctattattagttacaagaatgagattgaaagagtatttcggattatatgtgtacaaccatataaataatacaactctttttgtaaagcatgcattggtaggttgccatcgt

SEQ ID NO: 38278 - DNA, 625 bp, Oryza sativa
tgggaagatcggctccgtcatggtacgggcacaagactgttcgagctgggcctacagctccacttgtgggctgagccgaagagaggtaggccgagcaaatagaggtagcatactaggctaggactagagctgaaaaggaaggaaggaatgaacgttcggtccaaaaccaaggaagaattcggtcttaaatcaagggagtataatgtatagatcaaatcctggtgcaaaatgtggggtgctgactgaggaaattgagatatctaaactgtctgcagggttgggggatcagctaaacaaacaagaggtatctgtgagtcaagagcaggctctggttgtttggcagaccgaggggatttcatctcaaccggtagacgatcctgattctcaggaggagggagaggattgccaactggaagctttgatggattgggatttgcaaaaaggttttgtgaatcctattatggaagatgatgaggaagggaaatgtgacattcctacagaatcagatatcgagaagatgagggctgaggaggatgagttagaggatgataatagttctaagcagtcaccttcgcttgggggggggggaagtttttcaagaagtcaagaagaagaagctaaggaa

SEQ ID NO: 38279 - DNA, 680 bp, Oryza sativa
tcggcggccatgacggcaacggcagctgccggcatgaggttgggtatgaccccgacaggtggggccgcgggtcccacctgtcggccaaagaggagagggaggccggctggggaggcaaagtagacttcggggaggagagggccgagcggcgagctgggccgagggagagagagggcccgagagggggaggaatttgggccgagcccgaaagcaaggaaggggaaaaatattttcttttctttttattttaattggttaaatgaactttgtgactttaaaactatttctcgagctccgaaaattcacggaaaattccggagagtattttagggcacaaagaatattgcaaaatattcccggccgatgatttttaagggaaaattttaattctcccaataattcacttgattaaattgcttaactttttatttaatttgtagaaaatgcattatttaatgatttttaatcccgaacgaaaatcggggcgttacaaatctaccccccttacaggaatctcgtcctagattctgggatggctagaaagaaagctggtgtaggcagtcggtttgactgatctacgggtatgcacactgcactgcccctttctatcttgaagtgcctgattgactgattgatccaacctgcaccattgaaatggggctgcaggaattcgatacgag

SEQ ID NO: 38280 - DNA, 680 bp, Oryza sativa
gaattcctgcagccccggctttatagtggaatgaccgtggtaaacccagcatgcatgctttgacctgaaagatgtaaagtctggttcatccatattggaagcgctatcctcggaacaactatgaaactttgtcttttctgagaaacaacaactatgaccctagaaagtgatgtaccttatgctaaccttaataaattcgatcggggcacttcttcaccaccaatgcggtgaaaaaaatattgctacctccgactctcctttttttaatatatagaaccattaacatctctaacatgcttttttatgaatgaatctagcaaatataaaaaaaataatgtcatacttaaagaacatttaataataaatgatatcacaataaagcatatgataatacacatcataatttttaaacaggataaaggatcaagctatctcaacagatgaaaagcaaatgatgtcggatattataaaggatagacttacaaccggtttggatgacttgtccattgatcacactgcaacctccagcaacaaaatatatctataatgcaacgaacaatcgatacactggcgagagagaacttaaatgcacaacttgaatctgcccatggagacagccctggccctggctctgacctgcttctcgatgtggcgccacagctagccaatcatgtccgtgc

SEQ ID NO: 38281 - DNA, 4834 bp, Oryza sativa
aacatgaatatagtaaaaccaggttttgccgaactctgtcttttaaactagggatttgtcattcgtctctttaaccgtctgttagacaagtagctaagtttgtgcgttaatcgagaaaaaagactaataaatttattactgatctatgtctctttagcatgtgttacacacttgcgtgctataatggaaaaaaaaaactagcatgtcggagtaggattagaaacatataagtatcagtttacttcgttgttcagatacaattgagacttgggacatggggcagatttaggatgtgttcgggagagaaggttgacaactactcttctgtgcaagtaaaacagggtgtctcattagcacacgattaattaagtcttagctgtagaagccttaaatgaattaatgtcatttttaaaagcaacttattatcatagaatttttttttaaaaaaatacaatatttagcagtttgagaagcatgtgaattaatgtcatttttaaaagcaacttattatcttagatttttttttaaaaatacaatatttaccagtttgagaaaaatgtgcatagaaaactagattgtaaaagttggtaacatgtagggtctcttttgtttagacttagacttttaagttgtttttttttttttgcctgtatgatttataattcgatgaatttatagtctcaagtttaatgatggaattatacctctacctcatatatgaggaaaaaaacgtttttaacttaacttttggattatcagtgtaatagtacttatctctaatacttaaaaaataagaggtgcttccatcatccgtcaaaaaaaccggacgaaaaaaaccaagtttgtccgataaaaaaaccgggcgaaaaaagtgcgaaaaaaaaagaaaaaccaaatatgtctgatctagaaaaaaggggaaaaaaccgggcggaaaaaaaccaaaattgtccgatacaaaaaaaaccgggcgaaaaaaaacgtgtgaaaaaaagaaaataaaaaacaaaatagcgataaaaaaaagtccgactcggtcccctaaaaaatagagataaaaattaaaaaaaatgtccgactccttattgcgattccctcttagaaaaaaaaagtctgactctagatccgagtcccactcatctcggtttgagtccggcatactaggcatcacttctctcggtttcaatctataccgtgatattccatacatcttggtgaaaaaaaaattgatgtgccatattaaagatctgtttgcaaaaacggaacctacatgtcgagagcattccatttttatatgattttaaattttgggtttgtacatttgcatttgagtccctgtaatttttatatttacatttgagtccctataatcttgcaataaggtgcttttggtcttttttttaaaaaaaacaataaataaaagggatagaacaaatgcagaaaggtgcatgaaaagaaaaagaaaagccacacaaaaaagaaaataaataaaaaacaacaacaacaaaaatctatttcccctaagtagcccaaaaaaaactgtagatgcaaacgaaaaaaatccaattcctataaaaggcaaaaaaaaaaaaaagtggtgaaaaaaaaacgctagatccaattcctttaaaaacgggaaaaaagtctgattcctgtaaaggcaaaaaaaaatccgaaaaaacatctaaaaaagttcatccgattctttaagaaagtggcaaaaaaatggttcgtataaaataaaaaatgcacgtgagaaaaaaaattggaaagggcgaaacaaagtccaatttctaatcagtaaatctcttctctatctctaatctaatataactatttaaaaataaaaaatgcacgagaaaataaaaatggtaaagaaaacgtgtgaggaaaaaatcagaaaaaagcgcaaaaaacacgctgaaaaggtttttccatcttcttaaaaaaataaaaaacgcgtgagaaaaattatttccattgtcggcaaaattttttttaaaaaaaatgcgaggaaaagactatcagaaaaaatgcgccatttctaaaaaaaatggttcgaaaaaaccacgcaagaaaaaaacactatctatataaaaaaaatcgctctgaaaaaactgtcagaaaaaagctaaattgatggacgcttaagtcggataggatccatcgattttttaccatctactacacggcttttattttgccgtatattctcatgtattggaaaaaagcaaaaaataacattcagaaaaaacaggcaaaaaaaaccacatgagaacgtaattgtcagaaaaaataggcaaaaaacacgcgagaaaagaaaaacaaaaaaggggagaaaaatatgattttcgtcatcagtaaaaaaaaaggaaaaaacatgctaggaaaaaactgttagaaagaaatgcgctatttctgaaaaatggtttgagaaaatcgcgcaagaaaaaaaacaccgtttataaaaaaacaagccgctcattaaaatcaaacattgtcattgacatgattatgtatgaaaaacgtatattatcattagaattttttcacccgttgcaacgcacgagcatttttgctagtgatttgaaaaagacaaatgaaaaaaactgattgttgtttagacttagactttttaatttactagaaaaaaatgcccatgcgttgtaacaggtgaagtctattttaatcttattattgttatatgatttagctaagataaaattcactgtgtgagtttgcttggatatatatatttttagaaaattatgagctgcagttaggaatacgatcgtctcaagttagcatgcgagttttttaaaacatattgcttatgtgattccttgtatattaccaaaagtgaacaatcttaaaaaccgactcaaatacggatatatatttccaaaagcaaacgaacttaaaaaccgactcatacacggatgacgtaccaaaatactggcaaaaacatttttgatttttataataatagagataagctgacttagagcatcaccaaaagatatccaaaaatatatcccttaaatctccttttgtgattctctaacaaaaaattaaggcatcaaaatacccttctttccaagagactttctaaatatgaatctctaaatagaaagtgggccaccttgaaaaactaccaacaaaatcaatctatcctgtccttgtcgtgtgcatgttgcaaccagggtttacattaccggttgagcactaaatttcgagccccatcggtatcacggttttcgataaatttcgatcggttttcgataaaaattgactgaattttgaccaaatataatgtttaaccttcgaaattccaattgaaacttaatttcgagccgtgtcgaaatttcacagaattcgaccggttttcgtcagaactgtgaaccctggttacgacccctcccaagtggccgcgcaatagattcttatgatgcacccttctcctgcgtgcaaaggaattgcagctacgattgggagccaaatctcgctcgtatatccggattccggagaaccaaaaaaaaaagggtttgggatttcctagtattgggcgtgtaagtagggactctgtttttgaacgaaaatgagtttcatttatacatacctactatataaaataaatttttgtagtttacttgtttgatgtggcagatgttttttaaggggatttgtggtagatgttaatactcttatctataaacttaattagtcaaaggagtaatttgaattaagataaaactggaaatgtttatatttggggaccaagggagtatatgaatctatttgaaaaagcaaaacaaacaaactttggttatctgtttttatcaaaccatatagatgtggcctgatattatatgaaaatatcatatatacaatagtcgtcaaagcattattcatgctctataaagcgcgatgggggttatttagcataaaatgatttgggctgattaaaacaagatttactttgttcatgctaaaaaaaatgcgacgagaaatattcagcaaaaaaaatgatttgggctgttatttaaacaagatacacattttctttctgattgtattgaaaatgcacatatacatgcatgagagaccaaagataactatgaaaaacatctgaatttggatcaggatgaatcaaatcatcgtcattcagtcaaaacaacacatcagagactactagtaatacaaatcagacgggagtggattctaatccctcgaggagatatcccctcgtatacctttttcttacaaattcgatacaaatagttgtgaaaaattctgaaaaaaattaacaatgtagaatgtagagtataatgatatctattagttcaccaaaaatcatgttcatattcaatctacacatcgagaaaaaaaaaagacaaatttagatataaacagtatgctactattcatacgctgaatttgtcttttttatatctcgatgtgtgagttgagttggagttgaatatatgtgttgtatgaatgttgtcaaattttttcagaatttttcataaccgtttagatgatttttaagcaaacgaggaaacatcccatcgagggattagaatagtttccccaaatcaaacaaagggaaactattagattcaacaacttcataccaagtactgtaaagcacggtaacaactcaattatttccaagcaattagaggaaattaaccacaaatctaatgagaggtaatgccaggtcataattcaagcagaaccccaaattaaggacaaactcaaaccctcaaaccgtcaactcaattaaccactagacctcaaaccaaagtttaaaatttaatataaaaaaaaggga

SEQ ID NO: 38282 - DNA, 535 bp, Oryza sativa
ccctcctgtgactaggggtcgggctcccccgaccccctctgcgggttgccacgtgcggtgggttaggtggccaccttcgagcgctcacctacccgcattaatggcaacctgagcaggcgcgccacgccacatttaatgtggcgtgcagcgcgcccaaattggtctgtgaccggtcgaatgaccgataggacccggggtgtcaggtgcactaccgcatgggtcagaaggcgtgcaccccgtcctatcccatcagtcatgatggcgaaaggtcttaacctctcatcctggccagggtcggtccatcctccctggtcaattggggtttccatttcccggcgtaagcaggagcccagaagtcttcacccattaatagcagctgacatgggcgccctcccatgtcaggcggcaagatttgacatgcccccaacatcaagatgacgtgcgcccgcttcccaagtcaagaaataagacatgcatttaatgcaaagaatgtaatacttctccaccaaagctaggtttttgggcccatgtggta

SEQ ID NO: 38283 - DNA, 530 bp, Oryza sativa
caaaaggatagcgacgtgacgtgacgcacgcacgccgccagccacgcctcgcccacggcccgcgcgcgcgcgcgtgtggcattctgacccccacctcaactggtcaacagggagcctctaataactccctatttaggttgagatatttctcgcttaaatcctgaggtggtattattatccttaacatttattatgggcctttgagatttaatagaataaattgggcctagcccaattattctaacataaaagaattagaattaaaaaataatttattattatcaacttaaaagagtatatagaagatatatatatatataggaaagagagtaatcacataaaaagactaaaattaagtgaaaaatatatgcatggtgtcataattttagcaatcccgtctaattttgcaggggccaaaacgcataattttcctctggagcagctatatatatgagactttacgtgctcactccatcgacactggccatccatcccgcctatgggtagcacgggagaagtaatgctggcat

SEQ ID NO: 38284 - DNA, 507 bp, Oryza sativa
tatataatagtaacaggaagcttagtacgtggcctttttttttccatttgactataggtctgctactatgcttcctttctctagatcctttcccaagacctgaaccctgacctgggtcatcttttactgtccaatcctcactctagatccgacgttatctattgaatgcatgttgcatccaacggctctgattattctgatgacgtggcaaattgtgatgatgagaccacttatggagaaaccatctttactcccggttggaaacccccatttaatcccggttttccaaccggaagtaaggatccaggactaaagatgtctctgttaaaataaccgggactaaagatacatctttagtcccagttggtaccaacaactgggactaaagagaggggatctttagtcccggttgatgttaccaaccgggactaaagagacaatagcggcagtaccagatggtcgccttttctttttcttttttcctttttattttctctcgaatcaagt

SEQ ID NO: 38285 - DNA, 575 bp, Oryza sativa
tcttatactatcatcaaacctcccaatcactcccaatcacattgcttgcattcatcaaggtgatccaaccaagaaagtgataaaatgttttcttggtctttgtgttatgggtggttatgccttatattttgggatggatcgagggagtaaacaagttcaaaagcaaacaccaccataggagacaaagagacaacaaagacatccagatcaagtctcacaacaaaaaatttcaactaacaattcaatcttcccctacaattccacctagattttgaataaaattccataacagtatcaagaaagattgataagccgtttgatttcatatatcatgttccaacccatcccagctcaatcatcccctctccaatatgctactattgacaaccagcccagtccaactaatatgtgtgagatgcttgatttagaagcaggctgtaagaatctaggggttcaatttctcagcttctgacttctaggtagattttggattttacaactatagatcttcacatgcactcacatgcactcccacttcctcagtgaacagcgtgagctagctagcagggttcaat

SEQ ID NO: 38286 - DNA, 2771 bp, Oryza sativa
tcgatccacagctccgttgatcccagccaaggattaatggacaccgtacgttttgtacttgcgagaaattaagcaataagcatttcgcaggcggatgtatggttcaagaaaaaaaaaatccgtctggaaaaatggaaggacctcatctgcgaaaatagttttgctagtagctagtgttcttgcatctccaccaactatagatactccatacagctatactttctaacgtttgcattttctatcggcctctacctgcttcctccttgtcatatgctatttcttaaaccagaatcatataatatgtagtcatttgacagtaatgaaatgatgattaggtcgatcatttcctcctgcaaaacttatgtcaaaatataatcacttgtagcacgaatactactgccaacaactctctcacccttaccctcccttatttaacaagaggcaccaaattcttttcttataaaccttaatctcttctaagcaaccaacaaatgattatatctcataatagatggatgtgaagataacatatacacataagattcatgtgcatactccgtgtacaccaactaacaaatatcacaataaattctagaaaaaaattgtgcatatactgaaattcagtatgtattattacacttatatgtaaaattttaaccccggagacattatagtttagacgtaacaaacatatttaatagttttaaagctataattctatctgaattttgtattttttctctttatatatggtgaatttaaatatgcgactttacgtgtagatgtgtaatattactaaaagtatttgtttctaatgtttttagtgatatttgttagttagtgtgtacgatgtgtacacgtgaagccctgtgtagatatggtacattttcaagacaaagtgtatatatattccctcagtaagaaaactatatatgagagcaggtacaatagcagactataagccagctataaatatattttaaagagataaaggaagagagtaaagagtagcaggctacagatatgtagccagctgtaggacggacttcaagacgcagtgtgcatatgataggtgagaccatatattaatagtatagtaagcaactattatatgaattagctattagattgactataggtgaattggagttagtagtggactatactattgaacttgctctgaaccttgacttataaatcttggggagaacattgaacgttcctcgatgatggtatatatgtcatctgttgacatttagcactgaattaagtttttttacacggttagagcgaggatgccgtcttgttttctctactaccaacaataatcagaagtcatgtatgcttctgtaagttatcgacagccaccattcgaaacatcgtaattaattaagcgatacaaattattttgtgatgctgattgcatacctgataaatcattaaattatatctctactattataaaaattgaagatgtttccgcggtcattcatccgtgtttgagtcggttataaaaaattatagatgtttccgctattcgtcatccatgtttgagtcgattttaattttatgttttggtttaatctatatctcttctctactattataaaaattaaagatgtttttgccggtgttttggtacgtcatccgtgtatgagtcggtttttaagttcgtttgcttttgaaaatacatatccgtatttgagtcggtttttaagatcgttcactttgggtaatacagaaggaatcatgtaagaaatctgtttaaaaaaacttgcatgctaacttgagacaatcggactcctaactataactcatgattttcaaatatatatattcaagcggactcccacagtgaattttctcttaactaaaccatataacaataataagattaaaatagacttcaccccttgcaacgcatggatattttttctagttacggtaaatgttaggatgccatctcagcgagattgctaatccgcgcagacgcaccagattagcaactcgcgcgcactccgagtgcgtagcgcctcgcgcttcttttttttatcgttttctgtattttcggtaccgcttcttgcatgggaggttaagcgcgtggacccattagtcattagcactaataatagtgctaagcgtataaattaatttaattatagattttattatcaaaataatatacaaatagttaagttgaaaagtttcagaaatatgatgaacattttcaaaatttgagttgaagtttttaaaaaatgttttgaaagttaaaatttcgaggtgacggttttgaaatttgagttagaaatctttcaaattcaagtttggaagttttcatatttaagttaaaagttttcaaggtttgagctaaagttttcaaatttctagttgaaagttttcaaattcgggtcaaaagttttcaaattcaggtagaaagttttcaaattagagttgaaacttttcaaattttgaattgaaagtttcaaaatctttcaacccaaaatttgaaaactttcaagtcaaaattaaaaactttcaattctattttatagaggtgtgtgaaagattgaaaaaaaaatcgaaaacaaacggcaaaaaaaagaaaaacacgcctaaaataaaaaaatgtgcaaacagtaaaagaaaaaaaagacacggggagagggctagctaccacgcgcgccagctaaatcgctggcgcgtatgcgcgcgctagcacccccatctcagacacatgagacatgtttgttacaagctagtttcgcgcatct

SEQ ID NO: 38287 - DNA, 575 bp, Oryza sativa
gccgtccagcggcagcgcaggtggcactgtgcctgcaggcgtcggcgcgcgcgtggtcgcggacaagcaaggtgctggacctcgacgcgctgtcaacccacgacgccactgctacggtcttctgtcggcgtgcccttcctctgggaggaggcgtctaggaggcctaaggttgtggtcatgccggaagacgttgcgccgccgctgcccattccggctaccggcgagaggacacctgtttctcacggacgcgatggcattgtccagcagcagcgcagccgctaggttgttgtaccctaaggtcaaagagataatcagacgatcagacgatgaagatgaaaagaagcgaattaatcgcgcatttagtttctctcgttgcaacgggaagaccgtgtagtagattttctgtttcttaaaaggaaaaataatcttataagaaacacccaactagacattaagatatggtagcagaggagatacattaatgttttgatatgcccttattgctagcaatgtcgccgtaagacgcaaaatttttaacctcattgccaagttttgactggatgctagtgatatgc

SEQ ID NO: 38288 - DNA, 1131 bp, Oryza sativa
ttataagaggaatggaagatgaagagtaagagtcatggaatatgaagaggaatggagcaactaattgtcatcaactagccatgaaccatcctccactacacaaccatcaaccaacaatcaattaagagtaattgatgtaagttaccaatggaataggaagaggaatagagcaactaattgtcatcaactagccatgaaccatcctccactacacaaccatcaaccatccatcaattaggactaattgatataagttaccaattccttaatcaaatggattaattctcaaaactcttcatcccattgatatcccatagaagaatgaattcacatgaattcctagcataatgagccttagaatttatttgatttaattgatttaaatggattaattacccaattaaatctaacatgcacaaccaccgtattgcaattttttatgtttatcttttttttttatatcggttacatacaaaacaaaccttgtttttctttttttttcccgattgcgtggaaaacaaaaaagcaaacacactacacgtctgcacataccagtgagtggcttttttttaacaccataatagctaaaggtgtggattagtcggcctaggttcgagctttatcactctcttaataaatttcgatactttcctatcattcatatctggcattattttaacaataggcattttgtttgttcttttgctcgtacaaatgcaggtgacgtgcatttgctactatagttatgagatgattatattttgataatgactacaattttaagagaagacctgcatgtataaaaagatgtaaacaaaacttatttgcagtctatcattaagaggataatgggctaagagtattcatttttgcaagtacgcagacacacagtgcaagtatagttgagatgctgtgacatgaatacactgttttcactgtttgatttcttgataataatactgacagtatcactaaaattatctttaatctaatccataaagttcgcttgctcccatggcatttttccactgatcaaatcctaatcggaacaaaaaaaaattcctcaataaaccaagccaaaatattgcaaactttagtactacccaacacctattcagattgggtgacata

SEQ ID NO: 38289 - DNA, 662 bp, Oryza sativa
gcacccctgagaataattatggcgtgtttggttaagtgtcaacaatgcgggcacatatgtctttactgatcgaacgtcccatgtgtcgcatgctgtgtcactgttatatccgatggggactacatcagacggataaaacccaagtcagctaacctttgtggcagaacccggatgcactaccaaaaagtccagcaatttggccataggcctgcagcttccaagttcttcgctttgactttgcacaataattgatgattgcgtaggtagtaaaattcacaaattttatgagggaagaaatttaaatgacccattaaccatttctctttgtaatcctgcctccgtacctatataagatggacatggagcccttaaataacatggccaaaactcgatcgccatataaatacaacaccagacggatacaatatctaaatatgaatagggtaatacttcttatcgagaatgcctcaacctttctaaatttgtgtccctttacttactcattttaaatctcgggataccccttcttactaccgatttatagaatcaacaaggtcaactactataaattaaacatgatgttgaactcataaccgctgggcttgtggactgtcataaactgatgttaacctatatgcgtggaaggaattcagactcataga

SEQ ID NO: 38290 - DNA, 797 bp, Oryza sativa
  unsure (1)..(797): unsure at all n locations
ctgaatccatatagaaattagttttgtaccatatcgccgattctgagacaacacgacctgtttattagctcgatttgatcctattccatcgccaccccagagacgcccaccccgactgcaatgggcagcggtagggcgtgtatccgccctaccgtttcagctgccnaaaaaaaaaaaaaaaaaaaaaaaaaaaaaaaaaaaaaagcagtgaaaagatcccctactggggcacggcaggcgaccccctgccggccagctgcaaaaaaaaaaaaaaaaggagcagtgaaaagatccctacggcaggcgaccccctgccgaaaagatgccctatagaggcacacagtcgggtctctcggtggaggcagcgctagacactagcgcttggctttttgaaatttgtaacattagatttatttttttcccctgttgaactcattgctactcactcatgggataattgaaccaattgcaaaatagttcgattacttcgtaacactcctccatatacaacatactccatgtgatagtatatagactgatcatccaataatttcagtaaatgtttgactgaaacctccaatattttcagccaattgtctgaagatgtgaatatcaagattccaaatgactagcgacaagatcatgtatgtgcagacgacccctgaggctgaaccaaactcatccaggcatggcatggggaaaaaacagaccatagctcatcccggcatgaacgaagaacccgacattttgcatattttttctgatgctctggattcatgtaagcactaatttttgat

SEQ ID NO: 38291 - DNA, 563 bp, Oryza sativa
gaggatattacatggaagagaaagcgactgaattttcctgtcaagaaaaactcctaccagcttaactgcgccacttttctgttatctgagcaaacgcgatggaagacccttctattccgctgaagctagatattccaccaggttgtgatctctttctctctttctttcaatctttggcttgatacgagcgaaaacaaagacaccaatcagacatatattatactcgtattgcataggggataaaaccaaacttctgcaggcacaaatttactcccaaacattgacagtgaaatagcaatcttttactaaatttactcccaaacattgtgatttcatagggtccattgcacgcacatggtaatctgtgcagccactatcgatctattaaaaaaaatcctaagttaattttaatttttgagaggcaccaaacatagagaataacttgggaggagaaggtaattggctatggaacagaggaattccacttaccgctacttcatcgtcaaattccggtcgctggccttcgtcagccattaaaatctttgccttttcgcccacagttg

SEQ ID NO: 38292 - DNA, 714 bp, Oryza sativa
tacactggagtccattgcagcagtgccaaactaccatcaccatgtcagtacttggcaataaacctatttatcacaaaaagattagtagttaacatttaatattaatgtgagaaatacaattccatcctcaacgtgctcaataaaaagttgcttattgttatttagagttccagacccaatgtataacttatcttgttctttccatattaccccaagtgttacttctatataaataaaaaaatataattacataaaggcaggtttaaatttgcaaatcatttggggttcccccccaaaaaaacccccaaaaagggcccttttttttcccaaatctttgggggcccccccccaaccccaaggggggtttgggcccccattccaggaggaaaatgggcaaagggaggctgccataaaagaaaatgattaaatttcacaagacaacaggtactttgcacaatctatatctgtgctaatgtaaaagatggtagtggtagtggtggtgaatcaccacccaagtacccaataaccatgtgggacccataaacagggagactttgcctatttcccaacccccaaggccacagaccctgagaactctagctcaatagacacctagaaagtgactgcaaaagtaacatgatgataatattaggcaataagaacaattattgtgggctttagaatatatacgatgagctatttttcttaaaagat

SEQ ID NO: 38293 - DNA, 708 bp, Oryza sativa
  unsure (1)..(708): unsure at all n locations
aagtttgccgtggaggtagcaaaaaccaacgaggttgaagcgattgtcaccacccatcctggattggtgactgtcgatgacattaaaggttgatattctttctttgttgctgttgctgaaatatgcatgtatcatctgatctactatagggttgcacaggaatatatagccattgttttcttattccaaagttcgccgtgacatttcacgcagaggtcaaatgccccattgagatcattggagctcagaacgacacactgacaccaccaaaattagtgtaccagtatgttcaggccttgcgtcataaaactgaccgggggagntcccctggtaaaattcttttcacggggtatttaccaaagctccccacaattatgccctttttgccccccggaaagggggaaccccttgttggtttcacaaataaaatattttattttgcacatatacatgaagcacaggattcaatagaccggaagagtgagaacacttgaactgaaaaactaattaagtctattttctgaaaggaaatgagactgtagacacacaagagaattttccacggatgatgatatgataaaagatcatgctggctatattttccttttgagggaatgctggctctaattgctggtcaacatctggcaaaagttagagctgatacaatagcataaaaatcaaaagatttactagcatattgtaaacggg

SEQ ID NO: 38294 - DNA, 574 bp, Oryza sativa
tcctgcagccctgggactaaagagaggggatctttagtcccggttgatgttaccaaccgggactaaagagacaatagcggcagtaccagatggtcgccttttctttttcttttttcctttttattttctctcgaatcaagtaggcaaatccccaaatcaatcccccaatcaaagcaacatcccaaattcatatcaccaaatacacatcacaaatcataaagttacttatacacacaaatcaaatacatcacaatatcctaaaaaattactcaaatacatcacagatccaaacaatgaatcacaaatttgtatatctcagtgaatcacaatttttttttaaaaaaacaatgccgctgctaccaccactcgccacgaccgccgggcgcggcctcaccgcccgccacggccgcggccccgccgcctgccgcccaccacggccgccgccgcccgccgccggcctcggccccatcggccttcgccccaccactctccaccggccgtggccccgccggcctccgccgggcgccgtcccgccgcccgccgaggccccgccggccgcaggcctccgccgggc

SEQ ID NO: 38295 - DNA, 631 bp, Oryza sativa
tggtagacatgataccagcatatttaaacacagttttattagtatcatgtttaatcaaaatctcaccacttctagcaccaacacctaacacaacaggaggatgtctagaattatgagcataaggataaaaccaaaaccacggttatgtgtgctaacctttgattgatccaaaatcatgttgaggttctttttaccatcagaaaatcttagcaaagaatttttcaaataagaaatctctttttccaaattagcacaattttcacaatctaccatgacacctttgcctttacgacatttggggcaagaaagcacttcattgtttttcacaacatcttccatgtactcaacacgacctaaagcatcttttagtttcatcttattcaaattacatgttgagcaatccaaaatatcatgaggttgttttaattttttagcagaaatcatgttaaacatcaaactagcatgaaaagctatttgatatttttgcaacaactttttagttaaaaacaactcatccaaagtgcgtgtgtgcaaagcaaaactgcaagcaagagaagatctatttttcaaatcatgtgcagcattaacatctctaatttttgaaatctcattcattaaaacctcacaattt

SEQ ID NO: 38296 - DNA, 525 bp, Oryza sativa
agggcgaattcgagctcggtacccagcttggtctgcgcgactcgcttcggctcgcactgaatccatcccgcaattagttttgtcccacctggctgattttgcgacagagcgaccgctttataaactctggttgattctgttgtgttgcctccccggagacacccacaccgactagatacagcggtaagatccccaccgtggccacggtttggcggacaccttctgctgtaaaaattaaaaatggagcagtcataaggtcccctcccgttacggggcacggcaggcgcctgccggttaggctgcatccatataaatacgttaagatgtcaaatacggcatacatacagtcgggtctcccgtggaggcagcgctagacattagcgctttgctttttgaaattttgtatgatcaaattattatttttctgttgattaattacaacagcagcaatggaggcctgcatttgaaccccctatgcgtttgaattccaatatcctttgcatttgtatttgaataccatactta

SEQ ID NO: 38297 - DNA, 513 bp, Oryza sativa
tttactttagaggttaaaattttgtcttgattgcccatgcagaaccttattattcagctttgacgtctcatttgctaatttcagccatttctacaattaatccctagttagctagatatgtcctccccatgtcttttaattttacagtttcctaatgctatatagcctctaccatcttgtctagcgccaattctgcagccaaactttgttctgcacttcaattagttgggcttaaattgctctcatattatgtaaatttgcaagcagttcttgttgagattgacgccattgcttccatgaataattcctctgatgtcataacttcacgtagtgctccctgtagtgtttatgggtctcatgtcactgcttttatgtagtggatcttttagttcccatacgctaatatgatgaggtttcctcctttgaacatcatatgctagatacagttaagacccttacagatagtaattttctatgccatctaacattacctgtgttgctactagtctccct

SEQ ID NO: 38298 - DNA, 524 bp, Oryza sativa
cggcgctggcctttatactggctaaataaaagcaaaagcaaaagcaacaattaggtttggcttagctcagtggtaggtatttgaaaggtggcgttacagtgaccagggttcgaaccctctcctttatgtttttactaaacttttttttttacttagttctcaacttgcggttttaactttttcaaagctcaggtatttttaagtccattcttttatttttaaatatgtactaaatgtgttattccttttaaatattttttaaaaaagtgatatttcttttacaagttcaagtgttgttttaattttattaaaacacgtgacattttagaataaaacttacccttagttctcaacttgttgtttattttttttaaaaaaaaactcaagtttttttaaatccattcttctaatttcttttttataaaaaagtgatatttcttttaaaagttgtctctaaacttttttaatccattcttctactttttaaatttgtactaaatgtgatatttctttttaataaaaat

SEQ ID NO: 38299 - DNA, 592 bp, Oryza sativa
tgtgtatgcatcatatcgcaaccactttcccatgtagctctcgatcgcgagatcatcaccaactaacagcaaataattaaatggacagcaccaaagctaagctccaacataacaaccctgcattatgcatgtgtgtacatgtactctgtctactgcgtgccaccaggaagatcattcaatcagagatttttgtgcctaatcattgggcttcttccataatgcctgattgccttgctattagcaaagctagctccatgctgtatgtgcgtatatgtccataaagatcaatctacagcacaactcctgcactaatcgctttttggataggcaaacaagtactgcattcaaacctatacgagaagtatatgtatagtgcacattactgccaaattggttagcacatgggtcatctttgcagcttgtgtccagttagttttgaaaatgcatggaacattcaacaaccttaatttatactctatgcaccgtcacaaatgaatgttctgtcaaccttttcattctttgacactaatataatacttgatggaagctggaaagtcttggggttttaactatttgccacctttagatttgg

SEQ ID NO: 38300 - DNA, 616 bp, Oryza sativa
ggtacaaaacactccacacaagttcattttctctttcaacttttcacctctatccagttttcagcaatttctcatgccttatgggtctcccattaagttgcctcttgacaccaaagctacttttcattttgtttttgcttttgcatgctttaatttcaccaaagatacggcgataaaacatgacaatgacctcaaattattagataaggcgtattaaatcttatgtccaataagagagaacatagggtcttaattcgctcaccatatgctagagaaatcgctaaggagtgcgatgagaatcactaaaaactagatagaggagggaagttacaaaactaatttgtaggggagattgaaaaggtgcgttatttggatttttccctaaagttattatcctaaacctcggcaataccttctgaaacaaaattttgaagtggaacaataaattagtattcctttgaaacacaagaacgtcttttcaaaaaaagaaagttcatggaaaattagttcaattcttgtaggaatcctacaaatatactctgttcaaaaagaggctcactcttataaaagaaactacatacttagcaaagcatggaaatgtcacataattttacaa

SEQ ID NO: 38301 - DNA, 1020 bp, Oryza sativa
tttttcttgatattctttttggagagtaaattctatcactaaatagcaggtactagttaatcacggaaggggtctaaaccatgtaatggttgatcacagaatgaagggtgtggatggctgtaacggcaaactttgcctttggactcaaaggcagatgatgtgaaccccctctactaaccgatactagacgagaagcctgtaactgcttgcagttagtactaattaatccataaattctcctcgcctaacaattggaggcccctcaacttctcttctgtaaattaaaccatggtagctgagaagcctgtaacgactgaaaatactgatatctcaaataccgaattttgggtatgctatcttgtattttattgggccacgtggcaacatatattttcagctagaccccatcccgaaatctgccatgtgttctcatgagggtctctagcagtttccatccaatgtgctagagccagtgcacctacagcctgtaggctacaggtcacatatactactagagctttagagcactagacaaccagcgtacaggtgaagtgtctagagaaaaattaatgagttaaattacttggctcctggagaatataaaggggcaactcctttatggcaattttaagggtgaaattaatccccttcaatccctttttcattggaattaagcaaataaggcctaaacaatttttactccatctcagtttgatcaaccccttatcaaaaggcgtcaaagaccaaagacaccaaagcatttaacattctgaaattaatcctaatcgatcaagatgttctgtcactttgtgtccaacagaaagctagtaattcgcttgcataggttgaacaatataaattaatcctagctggttgtatacatgcgtgctgattattacatgatgcatatttactctatgcacgaataaataaagagacactttgttttgttttatgatgatcatctttaaaaaaccttaggtatttatcaaactgggatataaagaaaacctcaaagag

SEQ ID NO: 38302 - DNA, 719 bp, Oryza sativa
cgaaggcgcccagtaggtcttagttacggtcgttgcctgtggcaatggcgtgccgttgcctaaattccgctgccttatctatttctgcttttggaatgtattccggaccgctcggttcgatgatttaagaactatgcctgcgggcttatgatgtaataagccgtactagacactcgtgtatgtgcacttggtatttcagctatgaattcgtgtgtaccagactacttgatccagggaaatagtactgtttacacgattgattcctgttataaaaacgggggtccacaccattctctctgagagaggcaagtcgcatcatccttgtgatagcccagggccgaaaaccacacctaacattgcaactctctgtgtttttcgtcctcactttaacgtaaaaattccggaatcggagttaacactacccaggcaaatatccttataagctggtgttgatcactctcaactagcgaggtgggatcattccagctacagtacccagctgctactactcgctgctctgcgtgctgtgctgctgctaggccgcatgcatgggtaggccaaggcccatggcctgcacgcctgcttgccctttttttcttatagggttttacatgcacccaccctcataagagttgcgacgtccccatcgaactaatctatacctgtgctttcccaaatgaccaggaacaaatattatcttagtgtacgaccgtacgtgc

SEQ ID NO: 38303 - DNA, 835 bp, Oryza sativa
tgggggatatgtgaggggtagtgttttatttattgcgcatcctaggtgtgttttagtgcatctctgtatagtactattatactttttttgcgttgctacaatgtacttgtaataatcataatgaattctctttattgagaagtataattgatttctttcaattcggccgaatagactcttctaaaatattcccaataccataacttagtactaactagaaacacaacatgcgccagcccaattaggccaaatagaggtattccctgttacatttatatgaacaggagagaatggcaaaaaaaaataaaaatcacaacaaaatacatgctactatacatgaaaaaagaaacacaacgcggctttgtcgcgcggaagtgtacatgcaccagcccaattggaccaaatagaggtattccctgttacatttatatgaacgggagagaatggcaaaaaatgccaagtaatggcatgactattttcgatgaattttctgcactaagtaagaaatgtcaaagttagtacatcagtagtgataataccatatgctaataatacattgcaaataaaaatggtatcaatgaatagctataacagaactaaaagaacaaattcatgatacagatcatcaagcataaacctttagccttttgcagcccgaaaagaatccctttggctatcaactattatcaagcacaccatatagtagcatcaaaagggataaaaaattggaccaacaaaatggctgcaaagtgaaaatggaaaaggggataacaaattgaaatatgctttttttttaatctccagaggcacaggtggtcctaaacgaagaacagca

SEQ ID NO: 38304 - DNA, 763 bp, Oryza sativa
ggcgcaagcgcggcggcgtggcaataggagggcgccagccatgctggcgccgccccagggaggagccgccgcctctattcctgtttctctgtatggagttgcaacggtgtcatttttattttattttttcggatgttttttcacactcaggatcacgatacaaccaaccacaaaaaaaatttaaactcaaactaccacttagctaagtctgaaaatatctagcataccacttagtctactttgcaccttcactaaaattagaccataactcctttagtaaaaccctttgatcagcatgttaaacataatgcactctaccactatatgaaattacttaatctaattcaaaatataaccacatgaaatgacatataagttaaacagtacatagagatgcaatttttttatttttatttcatttttttgatatttttttcacacttaggagaacataggaaccaaacggacaaaatatgtgacatgtataattttccaaaactctaccgaaacggacaaaatatgtcatctattaaaataggcgtaactttctcatacggactcggaatcaggcaaataatatatgcacggacatctacagaaaaagttacatccgattctcccccgctttgccgggttcggcgatattagaacctccaaattccgcttgcaagattgtgttttcgaggagagaagtttttcgatggagctttggaaaattccacatgccacatatttcgtccgtttgagtttattttttacatgg

SEQ ID NO: 38305 - DNA, 1296 bp, Oryza sativa
gatgatgtgaatcataggacactgcaagcttttgatgtcacttgcgacggggcctcctatcaaattaggagaataaatgatgcgggcttataggtacatataatttctttatctatttatgacaaaaataaagtatatgccaattgcagtgatgtggtatgtttcaatatatattcatggtgatatttgttatgcaaaaaaaaatgcaatcgcatatagtcattttccatgtaatacttttaattgcttattttgatattatgaattatttaaggttttcgaaaattcttaccaaagtcatactgtcgaggcgtaaacctctctagcgggagatcgtggtatccccctttgtgagttcggccgggggaaagagctcgcctctagaaatcacgtatccgccctgaaggctgctaggcagcgtgtacgcgacaagattatataggttcgggccgctatgaagcgtaataccctactcctgtgcgtgggatttaggttgagagttacaaaggttcctaaactccggagagcgttctcgcttcttttctcctagagctcagttttttgagagtcatcctctttctcggtgggcgaggtcctccttttatagctcaaggggataccacatgtaccgcctctacctactcttttaccggatggtgacccaccctaccatgatcggatatcgacccgtgccttcgcctggaagctaagccacagctcgtccttgagtagggcccagcgccgtctctcgcctgacacaggggacagtcctatcattccctcattaatgggtgaagacttgtggtggccgctctctcgtggagagagctccaaatgaccctccgatggaacgggtcatacctacctctactccgccggagacagatgcgacgtggtggcacggccgtccgtccagtcagacgtgaccggcgacaggccggtcacagaccggtcattcctgaccgacgcacgccagtcgggcacgccgcacgtctgcccctaccgcattgaatgcggcaagggtcagttggggcgctgtgcgcattaaaggtggttcagcctgggccccctccccgcttgctccccccgccagatggcagctgggcgagggcctcggggcaaagcggcacgagggcccgaagggcatgacgtggcaccccgaggccccccggccactcctgcgattcgcggggtgtgggggtagggccaggctgtaaggtcacgcgacaggatggaaaggtaaattcccctcacttcgcataccccgggcccatatctctgacacatacatatttt

SEQ ID NO: 38306 - DNA, 595 bp, Oryza sativa
agcaatgcaatggattattgggtctcgaatgcatattgctttccaccacctgcattctgtcaaatatacgaagtaccgcattctccaccatggagaatttctgtcctggtttctacatgagtgaaaagaaaccatagttataatgaatcaaatgcacaacaaagctcacaagaattaatataaaatcaaaagagtttctacattaaacatccatcataaaagctgcaaaattatgctatgtacatcacgcaatgaaacatggtgcataaaaacatttatggggaaatgttcaaacctccaaggctgatactgttatcgcacgttccatgcaccgatgaacaggtccaccgacatcaacagaagcaccagagttaacttcaattgctttgataaccatgccattctttcctatcaaacctccagcaagagttacagggcagagtagtctaaatgaaaattgcatgacacattcagtttgttcaattcctgtagcaccctgtggacaatcaatatgaggaatgctggtgtttgcacgctcagttgacatatctgaatacaaagatcccatttcaggctcaggcactttaggaaatgt

SEQ ID NO: 38307 - DNA, 645 bp, Oryza sativa
  unsure (1)..(645): unsure at all n locations
cagccctgctagaaactctttgaaatataacgttaccatctgtgtggtagggcggtagttctcaactcttttggctgtgttttttaacgactcgtacaagacaatacgaagttcatagtgacagagcaggaaaaaaaattacaagatcgtaaccaggaaaaagagaaaagaccaccactcacgcaccgacagctccaacatatggacctcagaggaggctagcaccgaaccagtcaccgctaagcgtgaccggccgcctctggccaacagagggactacaactgggatcgcccaagcctaaccctaacaaacaaacacagaactgcactctaaccacaattttgtgattgagggagagagggtgcaagannnnnnnnnnnnnnnnnnnnnctatgccttctgtcgtggtcaacttgtataagctagagcgccgacacaagaggactgaaatctagagcaagcttgcactggttgtctgggcggttttggttaggggttgcctagacgacgtctccagggaggagtcatggaaacaccaccggcgttgttcggtcaggcctcaaaggagagccgagactgaatttttacccggcaaaacccctagaggtgatgggacgtcacgacaacacccttaagagggaatgc

SEQ ID NO: 38308 - DNA, 604 bp, Oryza sativa
  unsure (1)..(604): unsure at all n locations
acgcaccgacagctccaacatatggacctcagaggaggctagcaccgaaccagtcaccgctaagcgtgaccggccgcctctggccaacagagggactacaactgggatcgcccaagcctaaccctaacaaacaaacacagaactgcactctaaccacaattttgtgattgagggagagagggtgcaagannnnnnnnnnnnnnnnnnnnnctatgccttctgtcgtggtcaacttgtataagctagagcgccgacacaagaggactgaaatctagagcaagcttgcactggttgtctgggcggttttggttaggggttgcctagacgacgtctccagggaggagtcatggaaacaccaccgccgttgtccgtccaggcctcaaaggagagccgagactgagtttttacccggcaaaacccctagaggtgatgggacgtcacgacaacaccctcaagagggaatgcaacgctcgaaagcgatgttgttgctggcccaaccaaaaacaggctgggttttcacccatcgtccgccacctgtctatccaccaatgtcgccgcaatgctccgccacgatcgaaacctccatcagctcatgggcactgaa

SEQ ID NO: 38309 - DNA, 532 bp, Oryza sativa
acacaaacctaggagagttagtagctcaaagctagcatcatgcagtgcagggcacgtcttggcaaagcatgcgagcacgcgacacctcttactcgtgagtaaatttactctttttttttgcgaaattcaatgtgatgacacgttggatcagccattaaattctaatcataatcgcaggatcagcgcgaaatctgaaggcgacatgatcgcacgaaggttctcgtgcaggggatttcctgtgcacctgtttcagttgcttactttagaagataaatttcggccgaatagggcttcggtaaatcgacattggatgcaatttttaacttgtttttgccttttgaggtttatgttcttgttaatttgtccttgatgaggcactattttttttctataataaatgattcaccggattattttctatgcttcgaaaactacgttctcttaaaaaactttcttctactttattgctataagatcacttgacttgagctatttatttagcttatttcttataaattatataacattccta

SEQ ID NO: 38310 - DNA, 1071 bp, Oryza sativa
cccgtcgccgtcgccctgggccggtaccgcgccgcccatcccaacacgccgagccccgtgctgctacgcgcgtcgcgtcgccccgcctgtcacgccgcacgccgcccgcccgtcgcgtcgccgccctgagccccgcgccgccgcgccgtcgcgtcatggcgcgtcgccgtcgccccgagccctgtgcgccgccgtcgccccgagccctgtgcgccgccgtcgcgtcgccataaagcggccaccccctctccttcttccccctctcccctataaatacccccaccctgtccccatttcttcctaccccattcccctcttttctcctctcttcctctctaccacgccgctgcgccgccgccctcggtaccgtcgcgccgcgccatgtgccgcgccgtgcatcgccccgccttgcgccgccgtcgccgccgccatcgtcagtaagccgccgccccccccccctgtttggtcgccgttgccgcccgggtaggtagagagccgagagggaagggagaagctgggaggagagaaaaagaaagaaaaaagaagagagaaaaagagagaaaaataaagaaaagaagagagaaaaagaaaaggaaaaataaatagaaaattagagagagattaaggaggtttagaaaatttaaaataattagaatttaattgtagattattggtagtcgtagaattgcaaagttttatataatcgtagattattttggagattcttaggagtaatcggttcgcggtagatattcggatttaattactaagaattgtattttgtgttgaattttaaaggaggtacttttgaatcacaaaatgacttagggtgaatgagcttaaaattggaataaagtggttttgcaaactttgtagtcgatatagaaagatcgattcgcgttcgacttttatttgagtttatttggattttatttgaattctaactgaattcaaatcatttcttcgcacgtaattttagagcccgagggagttgcggatccgagcaaggatcaagacccgcaggactacgagcaaggcaagtcatcactattctttgacatgttgtatccc

SEQ ID NO: 38311 - DNA, 637 bp, Oryza sativa
gcccgggctttggctggtggcctcctcttttgctcccatgtgtagacttgtgaattttggaccaattggtcgtgtcctttctacattcttggcccattcattgataagtctgattctcgacatcgttcaattgatagatcgcctgttttgatgtcgattctccttcattttatgttcattctctgtaagaggttatgtcacgtcctgataaattcatcccgaattaaaaatcattctctaaaaggaataatagaattaattaaaattcgaaaagaaattggcaaacactaaaatgcgtacaagaaaaattcaaatgtggcccggagaattcttgttaaattctccttggtctaaaaggagccctcaaattttagtggaattttcagagcacaagtaataaatgaaaagaaataaacaaagttaaaaaggtttataaaaagaaaaaccctaaaagaagtcttctttcccccccttcccttcatgggccggctgggcccaattccatccctctctctcctctcccccccccccgcggcccatcggcctcctctcgcgcgcgcgccgatgacaggcgggcccgcccgccaccctcgctgacgggtggggcccacctgtcatcgccttcctcccgccgctc

SEQ ID NO: 38312 - DNA, 585 bp, Oryza sativa
  unsure (1)..(585): unsure at all n locations
ccaggaaaaagagaaaaagaccaccactcacgcaccgacagctccaacatatggacctcagaggaggctggcacggaaccagtcaccgctaagcgtgaccggccgcctctggccaacagagggactacaactgggatcgcccaagcctaaccctaacaaacaaacacagaactgcactctaaccacaattttgtgattgagggagagagggtgcaagannnnnnnnnnnnnnnnnnnnnctatgccttctgtcgtggtcaacttgtataagctagagcgccgacacaagaggactgaaatctagagcaagcttgcactggttgtctgggcggttttggttaggggttgcctagacgacgtctccagggaggagtcatggaaacaccaccgccgttgtccgtccaggcctcaaaggagagccgagactgagtttttacccggcaaaacccctagaggtgatgggacgtcacgacaacaccctcaagagggaatgcaacgctcgaaagcgatgttgttgctggcccaaccaagaccaggctgggttttcacccatcgtccgccacctgtctatccaccaatgtcgcc

SEQ ID NO: 38313 - DNA, 4360 bp, Oryza sativa
  unsure (1)..(4360): unsure at all n locations
tggttaggctggtaatctcacgaacttatttactgtaaaataaaatgtggcacatacagtactagaaacttttctaaaaatgggtatagctaataaagcctgtatatacaacttataaaattcataataaaatcatgctaactctaaaaatgatgacactaattttgttgaactcatgagaacgtaaaattcactgcagtaacctaatacttcacaaaatttgtacctaaaatgtatcaaaagcttaataagacataattaacctagagctagcattaaactttaaaaattaataactcataaatgcaaagtgataaaatagaaaattccttcactaaaaatcatatgcacctatacacagtagtgaactcatgcattttagagcattttaattttttacatgttttggcatttatttgattactgttatttcttttagaggacaaattcgatatcagtgaggaaattggatatattgctgacctcagtgaggacattgatcaaggcaagtttttcctctccctttgaacatattgaatcccatgtgtttcgggctaaaagtgttcttttatagagatgcatgtgtaattataactattagtaatatgcccgtactaacgctacgacgatatttagtaatatgaattaaacaatcatatgctaaaagatacatattttagcaaaataagttcaaatgtctcaaaagctgaaaaaccaaacaatggtatatatattgttgtaatatatttggtctaaaaataatttcatattcctgcaaattatcgtacatgtcgtagtaacatggtaaatttgaatttaccaaacctaggggactgtgatgccaggatctactggaactctagcataatgttcatatcaagcagaacatggtgaaattcttcaactacttgcatacacaaaatgctcaaatctgttgattacttcaggtgatgtaatgcaatcacggaaaccacaaatctaactgtagatgcatgatttaccaacaagtaaataattgattgtttaaagaatctcaagaacgtgtgttagcttgctattcgtctatagcacatgaaatttactacgatggtgggaacaaaaatcatgaaatttatttgttgcagctctaatttcctaatgaacatgtacatccatcaggtatattttagttgatgcagacacacatgaaacatatattactcccttagatatgcacctacatagtgaaagtagtagaaagaactatccatgtgacaatcattaaaaccttgagaacaatctaatcctaactgataatatttctggtcatgcaatgcagtttgaaaatcattatctangcagactttagtattatgggtagcagcagcacaggtatagcaagatagtgactaaattagtacaaaatccccatctctgaaggacacgggaagacaacaataacctgaaaaatatcttcaagatattttctttggcttcattagaatgaatcctaaaaacctacacagctccttgttcaaatggtattcacatagacactgcttagaattgatcatccgacacaaattacttgtgcctgaataaaggaagtcagcaagattcaccgagcataatgccatagtagcatgaaatgcaaattgcagttcatgtacaatccaatcgtcagacttgcaggatacaccaactctgactctatattctttctgtttctgctctctaattagtgatagtgaaagcctctgttttgaatattatacaatggctaaatctagcaaagtaatcctgcaaatcaaacggcagaaaagttaatcaaaacaaaacgtcattcctccatcagaattaataaaaatccaacagggagatcgatcaatttgtcatagtaagtaaaaaaaaaagctagctagcaatagaacagagctattcacctattcttggccactcgtcttcatcagcacgccggcaccccgtctccactttctcctctccacagtgcctttcctccaaccctaggattacatgcagattacgaaaaaaagtgggactgcatcctgatctagtagcaaggaaccggatcaacagcgtgtgacggcgtctctcccacaacctcctccatcgtgctggcctccgatcgagaaagcatggtgccccagcggttgtgctcatctccggtgaccgcatcgctcgctccaggcgacgagcagcagcgatgatcgaacgacctcgagcggcggggagagaggggaggttagggtttagcgttctacgagaagctgggggtcagcggcgacgtcaatcgtggcggggcggtgtgatggtgaagatcgctggcggcgcgtgacggcgtgagagggagaggagagagattagggctgggggaggagcgatcacggtttgggcgtggttggggtgggaagggggtgctcatttgtggggagggtgaatctggagcattggatttcacagggataatctgaaccgttgagtaatgaatgaaagaatgagtgaaagtatttgtttaactataggtagattgactatcttcaaaattcggaaaatgatagctatatcctacttggtgcataaccaccattaaaaaccttgctaacttgctgtttgtagccataggaatatttagagtacattgttagtgctcaaatgaaactatttaagttttatgtgtaccctgcttagccatgcctagagcttttatgtgaatcacttctatattctgtttggacattcttaaaccttatggacagaggtgatgctctgaatatttgtgcactaaaatgatgaaaaatgtgaattttagacttgggcggtaaatggtatgcatatgacggtagttgcataccaataagaggattgttcgcatgagttgattaaggatcaaactacataacactcactcagggctgcagccaagatttagtgactgggggtgtgggtcagaattcaccagtgactcagccgacattggtgcggacgtgtggtcaacactatgtattggcgattagctataatagaaagaacgagaacccactggttaaggccctatttgttttaacttaagattattgtaatctagattattaaatcagattactctaagctggattataataagctaacataaaataagcagcgagttgtttgtttctctagattatgaaggcatctaagggtagtgggtctttagccacccaataatctggaaaaagctcctccagaggagattattagattatagtaatctagcttacaaattatgataatctacttgtttgtttcagcttactcataataatttagattataataatcctaagctgaaccaaacaaggcctaacattgggctctacaccttagcgacttggcttttgttgatggcagattggccctatccaatcacttcatatttgcaataaatgtgtataaatttgatatgttcacccagtcgtttctcgtataattatattttggattatatggttatttgccgacagcactaatatatgcatgtatgtaggttagtataatataaaaagaatcatttttaaactaggtcattaaatagttgttggtggctattaaatgtcaaatttatgccgccaatacctgcttatcttcttgagtccatttatttggctttacaatatatataatgctggtatgtccaatttatccctaccaagctccacctacacagcctagggacaatttggcaaaatgtgccttggtgaggacccacaaaatcaaaacaccagagtaattcgagagtaatttattatgaggagtatagccattttgtgaaaatgcataaaacccccaagagtcaggcaggaattgagaccgttccatttatcaattgcccaagatggtaagttagccactgttaaagttcacaggtacgagaatggttttgaataatttatgtgcttgcattatatcttggaaatttttattctacactagcttcttaaccttggatgagtaaagagctaagtgtgggcggtttgttggcagctataaaatgccaattttatgtcgccaatacctgcataatacttagataataaaatatataacatagtggtagggcttaattctggtatattccatgagtgttggtgtatattcggatgcaggtattaaaccgccaaagttgggaggaaatttagaccaaagtgaaaaagaattctatccatacaagagttgggctcctaaactccatcaaaacaccaaaaaatgggcccaactaccggaaaaagggataaggcaaagcaaggaggagacccagaccaaatctgggggccatctggcctagcccaggttcggccgaaccctggggatcgctgttgga

SEQ ID NO: 38314 - DNA, 2330 bp, Oryza sativa
gtactcatatactccgaaagtatttcaataccataaatgtatttagaagagtattttaataaaattacaaagcttacaaaagaggaaaggaaaactgctagagccatacccgaactcttccgaaggcttccggactcctgatttctactctattcctattccactagctagatactactaaactaaacttaagagaaatgagagagctattgcttgaggtgtgtgagtgaagtgagaaggtgaagtccttttatagctgaactatgacggttgtgatggttggaatggttggtaatagcctccaaccgtcattggggcttcatctcaatggaggcgagggaggttcagccgaacctggggccggttcaatccagcccaatttcggctggcggccttctccgttgttcttctccgcagacttgtgaatttttgcccaattcatcgtgtcaattctgagttcttggcccattcatacacaagtctagttcttgacatcgtccgattgatttatcgtctgagttgatgtcgattctcctccactttagtgtcattccctgcaagaggttagtatacctaatactagtggaatattattattctaacatatatatatgcattgcaagcatcactagttctcctctattttggtaatattgacggtcgaaactgatcaataacgaccgtcaacaaaaccccccaagcttgaacctttgctcgtcccgagtgaaggacgaaaggaaacaaaaacttggttgttgatcaggagttgctactatgctgcatatctcaaagatacatgtgtaaggtatatgtactctatctcagattaaataatctttggcacggtggcttacccttacccctgattcccacgagaccactgcttctccttgccttgggcggttgaaagacagaacaacaattagagcaccaatcacccaatttttattcaacttttatttcggaaggtttcaaatgattttgcaaaagaaagccaagttgctcaaatgattcactcagtctctccaagtgtatcaatttgaatttctcaccaaatgttgcctttttgattcctactctaaggtttgatatgtagagctcggtaggaatcagacatggcatacttgcattcacacttatcactaagtcaaaaacttagactagagcagataactaaacatattcaagatcaagatcgtgcaaaatgtgtgtgtggtatatggtggaaatggtatatgaggaaaaataaaagaaaaaatgcttctcatttgtgcttactttcttctcccaaaaatccttcttttattgattaggagagggcatggttacaatttttttttcatcatcatgctcatgtttgatggagcataactttatttctcataaccacgcctttccctccctttttttttcttttcttttcaggagaagaaagcacctgaaagcatggagaatttattttggtggtaatatggaaatggaatggaatattgcttagctcccagtgtaggaatttagcatgtgcataaatgtgggtgtatgatcttgatcatagagcatgagaagtatctacacaagtcacaagagtttgacaaagttcaatggaatgacaagtaaccaaaatgtatatggtttaatcatgatagcacatttttggctctggtaggaatttatatcaaatgaggaactctcaattttatcattttgaaagacaaaacatccggaattcaagtcaaactagtatccggatcacaacaactcatatttactatctcatatctcgcaacaacctagacttagatcagcaagtgtagctcatttacctcaggttcccggataattgttggctacttatatttaacttttgagagagcatttaccaagaatccatatataatagatataaaacagagcaactattcatcatttcaacaaagaggactagcttgtcttacctagcatgactcaaacctatcctatttttttggtattttctattttgcaaatttttatgttgttttcaagttttataagatgcaattggaaagcaaatatgcaattggaaagggaaatatgcaatgtgatacaagttacctcagtagggggagcgatgtctccctcccaagcttgactttcgctcagggtccttgataaggattgaacccctgaaaacgaaagtacgcctgaaggtcatcgtgctgttgctgcatcatgttgttgatgttggcgaactgagcattagcagattgttgccattcttgcgtttgagttatgtgttctgcgaggttgtactggatctcccccgtctgcatatcaaaggtgtccattct

SEQ ID NO: 38315 - DNA, 944 bp, Oryza sativa
  unsure (1)..(944): unsure at all n locations
attgattgatgaactnctnnnnnnnnnnnnnnnnnnnnnnnnnnnnnnnnnnnnnnnnnnnnnnnnnnnnnnnnnnttttaggcttgggtatgtggtatttaaaatgtatgtggaatgaaatgtgagaatgttgtgattggttgagaaaaaaaattagatagaaaatttttaaatgctgaaaaattgttattggttgaaaagagaatgtagatggagaagttattatattttaggacagtttgaaggctaaaaattgttatatttttggattgtgtaacagtagcttttccgaatctagattataacttgggagttttttattctgagaaaagttacggtggccggaagctcctccaaataggttcttgatcacacttcaaagtccaaagatcacgattcctttgaacttcttgatcacacttcaaagtccaaagatcacgattcctttgaacacatgatttttaaacaaggaataggatataagcataagaatagattatcacaagctatgtaatattacaggattttaaaatactatatatggacactataggtaacattttttgatggttcacagtaaatagaggaattttggaggaaatcatacgtggaagagtagagagaaagagagaatgtgcattggacttagcaaagaaaaataaaatatgaaatgtgagctcatgctaaatttcctaagaaatagggtgtaagaattgcaatacgtaggaatatttagtcctattcctttgatccaattttttgcgggccagacgggctggcatgcttgcctctggctcaacacggcccgccaaagtgttgggccgttcgtagtctccctgctcggcacgttgggccatcacagcacggcccgtttaannnnnnnnnnnnnnnnnnnnnnnnnnnnnnnnnnnnnnnnnnnnnnnnnnnnnngcatntcaacgct

SEQ ID NO: 38316 - DNA, 742 bp, Oryza sativa
  unsure (1)..(742): unsure at all n locations
gcatgtgttgatgacatgcagatgcnnnnnnnnnnnnnnnnnnnnnnnnnnnnnnnnnnnnnnnnnnnnnataacgagataaattaagtaacaggcctataaaagagtagagtgatggcggttgatacgccatataaaaaatgttaataaaacaacaaatagaatcctaatgacgattataaggagggacgtcgggcatgccgtgaagcaaacaagtaaggcagtagccgggacttctagaaagtaaaaaaatgaacccaaacgatattattgttcgatttttaaaatctcaatgacattaaagagaaaagacagtggacgggtcgtaaaggagtttaatggcaacgttggacgggccatttagaaattttaaaaacgaaacccattgggacattaaactttaaaactttaaaatccaaattttaaaggttccaaaaaaaatgaaatgggtctggaagctgttaagcaaactaataatcgttgtcctcggttaggtctaatccttactgcggggttcccggggcgcattttttttattaatttgcagctcaatcgttttggaattgacttaaaatcttaatgctaataagtaataaaaaatcttttttttttaaaactttcatacatgttgtgtaaaataaattttgacgtaggaactaaaaacattcaaataaactttaaaaattaaaaggtaaaaatcaaattttagctttggctagaagctaaagaggaagggatcgac

SEQ ID NO: 38317 - DNA, 733 bp, Oryza sativa
  unsure (1)..(733): unsure at all n locations
ccatgaaccttatgagccnnnnnnnnnnnnnnnnnnnnnnnnnnnnnnnnnnccagagtttcaaagaatatgtgatcatgctgatatcccgcaaacatgttacaggaagcacaattagttctctaatgcattcaaccttagataactctcgtgtccatcggacactctgccatattactggtataaacaagactaatgctatctattcgcatcacaatgattgtataccttgaattgaacgaaggatgcagattctaaccaatgtccatgcaatattgctgctgccggagctctcatttacagcgacatgagatatttattgctgatgtaaacacatgaagctttgcttctgacagtggcagtagcactagcactagtgcttaatgggctacatatacctgccaacaatgttattagcataaaactttaattgaccttatatggcattgtgattataagcagaaatttatcatgtgcttgtgcacaagatcatgtgagattggcacgtaaatagtgctagcccaggatcaaacagacactgagactctctttcacatgcgatatgttagccagctggcaaactattggtgataaacattattgagcactaagtatttagatttttgggcacttgccaacgatctgcgttacattatttacaactgactgagagctcgttactatggggctaatagtacatactgtcaagttcttttccaaggcttaatagaag

SEQ ID NO: 38318 - DNA, 719 bp, Oryza sativa
  unsure (1)..(719): unsure at all n locations
cgcggattgaagattgtataacnnnnnnnnnnnnnnnnnnnnnnnnnnnnnnnnnnnnnnnnnnnnnnnnnnnnnnnnnnnnnnnnnnnnnatatacagactcacgattctatattggttactgcaaattccgagctatagctaattttgaactggatccctaccagaactctgcttacagtttatttagctcagtcccgaattagcctaattgtgatcacgagatgtaatataagctcgcgcttgggaccgtacatgggccgtcgtacatattttgacatctcctatatttattaataccaaatttcagctatttttaaattggattcctacttgaactctcctttccttagctgatacaggagcataatataatactatctcgaacttagaataaacgagaattgggctcttatatggaaacttcgtccactagtgctaatcaataaatctgagaaacagctatttataaatggtgactacttgggctctccatgccctttataatcaccgatttatttttaatttaacataaattttaataaaaacacgagttgggaacctatatggactcttctaatgacatatcttattaaaaagaacgagtagtagctagtaaccaacgggacatcaacttggactgatcgtgtcttcgctaatggggatcatataactgatataaccaacttgggtaacaaggtgtggctgtcatacgaaac

SEQ ID NO: 38319 - DNA, 752 bp, Oryza sativa
  unsure (1)..(752): unsure at all n locations
agtatttcaggaatttagacattctccacatatttgagtataaccctttatttatcttcagaatgtacaacaaatgtctgtccaaagagaaaatttgggttggataggtcagtcaatggagcagaaacacatcagccggtaaagttctcctgcagcaatattataattttcagtttagtcaattctcaattaattgtaaagcgaaatttgtactaattaacagcacaaaaatattgtacgcgagctccccgtcgtcggacagcacgctggtgatgccgccgctgctcttcttcctctcagaagaaatttccagcaagccgatgcggatgctgttctgctgccctcatatgccccttttctttatgaagatagctcagagctgcaggactaaagagagtaaattttcagtccatttttgattcattagctaaccaaaggtaggaataaggaggaaaagctcagagttgtaggagcttaactgtctgcaaagatgacattttgattcgtatgatgatctgatctcctagtaggtcatgaaaaatgaagttattttttgatggaggaagtagaaaatagagagatagatggtgatgtaaaaatttgtttttaaagtatactcattcacatactttttttatgagatataaaccaataataatcatgggttccaaatcataagcttgtnccgnnnnctcccnnnngangannntgcntnccaggtttnnnggcattaatggngatcattaaccact

SEQ ID NO: 38320 - DNA, 736 bp, Oryza sativa
  unsure (1)..(736): unsure at all n locations
gcgcttnnnnnnnnnnnnnnnnnnnnnnnnnnnnnnnnnnnnnnnnnnnnnnnnnnnnatactattttttagagctaaccaaatgagcactttaattttaataggaatcttgaatctccagattttcttaaagggataaccactatcttgcaacttcattgccaattgagatcccctgcagtactgcatgtgcagtactgtaggctgacagggcccacatgtcagcctgcagtattgcacgacctgtgtcccttcattgcatagtaaaaagatttgacagtaaaaaccccactttttgtaagtgtccaaatgagcttgtctttcccattttgcaaaattttcccattacaaagcttttattaatggtctcatttcacagccatatccccacctagtgtccttctgaattcaaaggcattccaacccatcttaaagacctttgctattgttactattttagggaaagttatattatataaccgaaaatgctgcaagccgggcgcccgacgggggtggagcaaatcgggcgcttcccccgcgcgccccgttccccacaccggtgcatgcaggcgcctgggccccaccatgttttctgcccccacccgcatgtgtcctcactatattactcatttgcacaaaataaccccatttgttttttgaaaaccctttattaaaggaaattgcgttaattttttgttccacaaaaaaggtgttaacaatgggccttaccaaggtg

SEQ ID NO: 38321 - DNA, 724 bp, Oryza sativa
  unsure (1)..(724): unsure at all n locations
gcggaatganttcgtataagccnctgacannnaccccnnnnnnnnnnnnnnnnnnnnnnnnnnnnagcatctttgngccaagtatccatattgatttttgacgcggtcaccatctgtagactgcagtgttgtgaggggactaacctgacatttgttttcagtcttaaaggctccagctcacgtccactattttttagtgtttatgtttttttttagatttcattaaccttttgagatgttacgatttattaatgcaagcttcataggcagatatcttttttcctgaagtaaaacaaggttttatcacagctcggctgtatttggactgcactgcacttaatctcttccatatttttggttgcacaccgttgtgtgcagctattccatttgtctgctatactgtgcagatactacataattcatagaattggcccctttcgattttccccccttttggtgtggtttctgccttctgaaaacagtttgtttgatttcgtgaagcttatcatgagtggagatattgattctgcattcaaaaaacttggagaatggcatacacaggtgataaaaggtacaggtcttttctaatttctttgggaatttctaaaaaattttttttttttaaaaaacttattcatttactcattgcagttttcacaaacttttaatgtgaattgataggggcagactccaattctcgccctgaacttgcattttactttgg

SEQ ID NO: 38322 - DNA, 662 bp, Oryza sativa
  unsure (1)..(662): unsure at all n locations
ccgcgttgataatactnnnnnnnnnnnnnnnnnnnnnnnnnnnnnnnnnnnnnnnnnnnnnnnnnnnnnnnnnncttccctactaattcactactgttttttaggtcatgagaatcaagctgcactaggtgagaactagaaaattggcgtgcccttggcgctcttactacttacaaccaaatggactactctagcatggaccatacggccgcggccgagctgattcgcgacaagcgcatagccgtggttggttctggcaaatcggccttcgacaccgttgcgcaatgtgccgatgtaaacggtgagattgctgcaacagaacatgttcaccttgatcacattttccaaattgaatttgaatttgttatgacaatttttaccgtatgatatataatctatctatctattatattattaaaacagccgtgaaagaaggcaccacattcgctgtgggggctagaaattcccacattaatcgaagaaaaagaaaaaaagaaaaagaagagtccaagtagaagtccaatttaaaaatagctgaaattcggaattaaaaataagcaatattgaaagaagtttccatataagaacccaatacgatattaaccaaaattcgaaataaaaaaaaataaaatccaaaattagaaaaggaaaggagaggggtg

SEQ ID NO: 38323 - DNA, 751 bp, Oryza sativa
  unsure (1)..(751): unsure at all n locations
cggccattgtttatagtantactggctgcgancnnnnnnnnnnnnnnnnnnnnnnnnnnnnnnttttaactacgatttatctaactttaaagacttttaatgtttatgcctgtaattttgtaaatgttatgaacggtaagtttattacatgtaattagttttttttgctacaataatttaatgctcaactttttttatctacaaaaactttgtttaaataagtaacaagccctttcccttgttaacatacctgcatagagtgatatttgagaaatagaacgaatgcttcgatctcacatccttcctgtggctgaactgtgttgatggcattaccatatagaccagattcttactgattctagctaaaaacaatatttttaacatcatccaagatccatgactcataatcaatatgttacatctcatcaaagatcattacatacaccatcataacaatctcaggaaaaactatataaacccaaaggaatggatcaccttgtcagctaagagtcagtaacatgctctcatttcactactcaatttactaagaactaaccaattatgcggataaagatcaataagaactcaaccatttccaggagcagattcaaaggagatcttcacctagaaaagactgcaatcaacttattaggatgagatgagaaggtggtaccaaggcgttcatggagactatggaggcaagccagcttggcagccatgactcacaacttcaggaactgcaaagcaaggt

SEQ ID NO: 38324 - DNA, 1141 bp, Oryza sativa
  unsure (1)..(1141): unsure at all n locations
gaaaattgaagtgtacggggtgaaaaatgtttcccggggggtgccattttgaatttcctttcatataatataaattcgggcactgcaaaccttataatatataaggaattataagataaacgttagttttgaaaccccgtgtcgaattttgaccatgccttatattatggaataaagggagtagaatagaactccaatctttactcaacgagctccaaccaattattacataaattcggtgcaaaaccagcgcacatcatcaagtttaaaaaaccacgcccaaataattgaagcaaacgcaagctaatattcgctcacacaaaatagagcccccttatttttgaaatgcagatgttatgccgccgcggaatgtggcgagatggcaaagggcgagggggggggtcggctttctaattacgccaggctgcgaaaaggggaatgtggtacacaggaagagattagttgaacaatnnanntnaaannannnnggncgncggggcgtaggtggcggcggaagagtgtacagtgtgtacttcacttggcgcgacgagccggaggacggagcgctcagggtagctgggtgggctcccttcttgtttttttttttttatcttttcatcgaaagaaaattaactcgcgatcattttcaacatgcacgactcgggctgtaatttcttttcttgcccgattgacggtggggattttattattactggcaaaaaaaaaaggaaacacttacatgggccaaaaccgaccggaattaagaaaaaaagaaaaatacttactggtcgaaatttcgatgaatttgatcggaattttaccaaaaccgaccggttttcgagaacttgtcggcaaattcagggaatttgtattcaaattttgatttattaaatttgttcagaatttaacagttttccaccggatttcgcgaaattccgaattccgccagcgcccgaaacggaagggcttgtcggaatcgtaaaccctgggcgaaatgtgtcactactagaaaaatcgtttttccagacgaccaaaaatagctttttcatgtgcagctcgatacgtgtacatgtacctgctcgtannnnnnnnnnnnnnnnnnnnnnnnnnnnnnnnnnnncagcaggcgttctagngacac

SEQ ID NO: 38325 - DNA, 670 bp, Oryza sativa
tgaatgaactgtagagactgtccgtgttgttcagcgggtgaacagttttgactttctcatggagaggcgacgcaagttcgaattttttttcatttttaatttttttttcttttaatatttacagaaataatccatcggcacaaaaaaaattacaaaaatagaccatgccgccctccactagggcggcaagctgacgtggcaaacgggggagggacggtcggtgacggcagacggtagagggagcacggaaaccctagggcggcaaggggcccccatgcaaaaaagccagcccgggcctagtacttttttgctggtacttttgctagtcgctcgacctcaactctgcgactgtattcccctcgtttaatgtttattgcaccattcaaagaccgcttcagctactgactttcataaaattcgtctttgcgcctcgcctgaactcttcaagctcctccatatcgcgtgttaacgtttcccttttgccgggtggccttcagatttgcaactctcttttgcgccagtctatcattcttaccatttgctctgggttctatagctcccgtcatttgcgactgtcccttcacctgccagtttagccctagacgattgcccgcaccccattagctctcctcccttgttacccctttttttaaacccggcttgatctttc

SEQ ID NO: 38326 - DNA, 672 bp, Oryza sativa
  unsure (1)..(672): unsure at all n locations
atccaagcaggaaattcagaacccagaacaacagattagcccattcgaatccaaccggccaatttccgatgtgcgaatcaacaaccatagcatttcacttaaatacatgatgagtcgcacaagctcaggctgctctttctctcacgcatttgcccccaaaatgtgcaacgcaaagcattcctgaccactcagctcacgaaaatggacccccgtgctccagaatccagcattcggaaatcctcgcatcgctcaaaatccccccattctctcaccccccccccccaccacaagaaatcccctcacccaagccgccttcagaatccagacaacaatcccctcgccgccgcccaccacggcgaaacctcccgcgcccgtcctggcatcgctcgagggtggcgtgaacccgaccacctcaccccgcgtcgcaaccaaccacgaacccccccaaccacagctcgtacgaggaaaccaaaacaacaggaagaactagggctcccggatctcaccgacgacaggtcaggcagggcgggggcacacgccgacacggcacggcacggcacgggaacgagcgggggggtcgccggggagcccgcnaggcggccgcggcggcggcggaggcaaacggattcgcgctggttgcccnagggcgtggggaaattggcgttcgattgt

SEQ ID NO: 38327 - DNA, 1814 bp, Oryza sativa
  unsure (1)..(1814): unsure at all n locations
tgatgagtcgcacaagctcaggctgctctttctctcacgcatttgcccccaaaatgtgcaacgcaaagcattcctgaccactcagctcacgaaaatggacccccgtgctccagaatccagcattcggaaatcctcgcatcgctcaaaatccccccattctctcaccccccccccccaccacaagaaatcccctcacccaagccgccttcagaatccagacaacaatcccctcgccgccgcccaccacggcgaaacctcccgcgcccgtcctggcatcgctcgagggtggcgtgaacccgaccacctcaccccgcgtcgcaaccaaccacgaacccccccaaccacagctcgtacgaggaaaccaaaacaacaggaagaactagggctcccggatctcaccgacgacaggtcaggcagggcgggggcacacgccgacacggcacggcacggcacgggaacgagcgggggggtcgccggggagcccgcgaggcggccgctgcggcggcggaggcgaacggatcggcgcgggtggcgcgaggcgttggggaaatgggcgttcgatttgtttggcgctctcgctttcgagttggtttttgaggaaggggaggcgaggagaagattggagagagagcgcgaaataagaaaaaaaaaatggagggaaatttttacggcggtgcgtcgatttgttctcttttcgcgcctttgttttgatggaaattcatgtttggtttgaactttcaaaggttcgatggatcaaaccatacccttttttaaaaaaaaaattaccatgggagtagtactattttgtttgccgtcaaacatttttggctttaccagcagtgatgttgacggtcacatgatattcgaatattcgaccggtgcaaattgtaaataatatattttgtaggtaatgaaaattcgaaatcttttcaaaaaccaaaaaaagggaaagggaaaaacacaaaaaagaagaattgattttttttttgcgtagcacgaactcctacttttgtgctttccttggtgtgccggtctctccacgtggcaagaaacgtgacacgtggggcactcacctgtacgttcgtggtcgtgcgacacccacgtcgcggcctcgcgggtgacctggtccagtcagtcagtcaccggcttgtatgcaaatgcaatgctttttctttatctcagaaaaaatgcaatgcaaatatgcgattaggtttcaattttcagaagtctcgggttccattttaaaatggcaacccatatattttgattggtataaaatactagtcattttattattaccgtgacaatttgtcatcttaaactattttgcacacccctagagcaaccacaatgtataaaaaatgtgaccttaagacgatgtttgcacttgtaaagtgggccatatacattgtggaaaatagcattagtttagggtgtacctcatgcttaagatctaccataagcaaaaagaaatatttttttctctctaattcactttatgaataagagatgaaacaattctttttccattgtatgtggacttatcttatggctaaattctaagagcaaccgcaatgtatactaccaaagtggataataacgtgggcccggggttcaggtggtaacagttattccaaagctcacaatgtgctatgcttattttgaaaattaagccccgggtccaccttaaaaataatcattgtaaaaccatctcctatagccatgctcgtgggaaaagattctcatatctacagaaaatattattctttattgtcttgtgngggtnccaagcgangtgtcattcaatgcacatg

SEQ ID NO: 38328 - DNA, 709 bp, Oryza sativa
  unsure (1)..(709): unsure at all n locations
aaataatgacatgaatatgaataccacctgcnnnnnnnnnnnnnnnnnnnnnnnnnnnnnnnnnnnnnnnntgtatatactttactgaagtcactccctaatatttttacaaagccaactgaaatggatgcacaaatttttttttttggccaaacttgtacttcagttctccatgatgttttgaaagccatctggctagttgcttcacatagtgggtagtaactggtatttaactgattaactactgtaaagccctggtttcaagagaatatgtatgatcttgtaaaaatcttataaatactaacaattgactccccagtgttgcttattagtagattagaaaaatggttcaacagcaataacaattcagtttcaaataagttttccttagctcacctgacgcagcaattttctgtggctaagaccatacatttcaggaggttccccataaccattttgatgattggatggaggatcagtttcacttgccatatcaaaagaatttaatgtatcttggtagccgtaatgtaggagatatgaacgaacaatcctgttacaagtgcacagtacatgtacataaggcggcaaagtataaaagatttaatgtcaatataggtacaattaaagattgagacaaggtaggaatgaaaggcggagtgaatatggtatcaaatgtaaattacgtaatatggtaaatttcacataaact

SEQ ID NO: 38329 - DNA, 785 bp, Oryza sativa
  unsure (1)..(785): unsure at all n locations
aaaatctgtcccaaatattgcatgtcctgggtgcccgattcaagtacctttcaaccaaaaaacaacaaaactggtatcagatatattctgtagattcatgataaaataaatgaccaaatgcagaaatagtgattgctgatcacatattggtaaaagccaaagaaaacttaacacctaagttttttttaaaaaaaaccaacaccttagtaaagactgacaagtaattttagttacaggtaatgatttggtcacaaggggcaatcttgttcagttcaaccatatgatttgtgacctttgttagaacttttgaagccctcaactgcacatgctatcgttttctacatatggtctaaatagttatgcaatattctgaagaaaatcgcaaccggattatgaactaattgtgattatttacccgtgttaatttcagcaacagcctgagcaagaggggatacataggaagctaccactacgagaaggatgccaagtacaggccattcagtgcactgctccctgagggtcaaaaccccaagatgctctatgtcaagctcgtcctcatcatcctcatgtgtgggcttccttcgtcagccttctcaactccgcatcntattcatcacaacgatgatcaccacaccagagtgagaaaaaaaacccttcaaattcatggttttattcgcagatttttttaaaaaagcaataaagttgtaacaaatattttctttttgaaagaataagggntacgatcatttaccacanagcttccacaatattgtacataaaatgtg

SEQ ID NO: 38330 - DNA, 3472 bp, Oryza sativa
tttttctttatctcagaaaaaatgcaatgcaaatatgcgattaggtttcaattttcagaagtctcgggttccattttaaaatggcaacccatatattttgattggtataaaatactagtcattttattattaccgtgacaatttgtcatcttaaactattttgcacacccctagagcaaccacaatgtataaaaaatgtgaccttaagacgatgtttgcacttgtaaagtgggccatatacattgtggaaaatagcattagtttagggtgtacctcatgcttaagatctaccataagcaaaaagaaatatttttttctctctaattcactttatgaataagagatgaaacaattctttttccattgtatgtggacttatcttatggctaaattctaagagcaaccgcaatgtatactaccaaagtggataataacgtgggcccggggttcaggtggtaacagttattacaaagctcacaatgtgctatgcctattctgcaaattaaggtggggtccaccttaaaaataatcattgtaaaaccatctcctatagccatgctcgtacgaaaagattctcatatctacagaaaatattattctttattgtcttgttaccggcagtagcacaatggcccggtagtagttattgtctctatccacaatgcttcttacctggctataagcttatattaattgcttgttactccctccattccaagttgatctacatatagttttttttaggttattactaaatgatctacatatttgtattcatttattagttctatttgttatttgtgcattggagtaaatggacattgatgcatgcatccatgcacacaagtatttataacccacatacaatatcttgatttgctattggctaggaaacagtggggatgatgcatgcatcgagtttgttgctagagtaaatatagcatgagagagttattagcttttcttggtcttggtgtacctatgaaatatgtagatcaatttggaatggagggagtacctgcttttgttcaacattgtggttgccctaaccataacattgtgggcatggctttaacaatggtccactattcatagggcccaccttaagattacactgcaccataaacattgaggatgcccatagtcacgtgaaatgactattttagttttgctcatggatctctatacactccctcggttcgttgctcgtcggctctagaaggggtttctgtagctgcaacatcaccgcccttcttcgggtctatttgggaagtttctgtagctgcaacttctcatataatcaaaaatcttaagctcccaaaacaaaacttccgcagcactgtaaccagaatatttatataactactttttcacgaagaacgacagtgatggctgaacatttgtcattgtgcgccatagacaaagccggagggcaccatgttaaagctagcacttcttgtagcaacacttatcaacatccagaaaggcatgcatcatccaaaggtgtcggttattgaagacggtgtgcatacggaaggatatattgggggcagttggcagtgtgtgacgtagcaattaccgtcgtagcttctccttctactttttttttatgtagatgccctaaagaggtagagctggggatggagggaacaaagagagggtaagccctgcacacgatgttagcccactgttttttcctcggcgaatgacaaaataggtggctaatcagtgtaaagcagttaaaatgaaaaaaaagcatcaatgtgcgcgacaaaataggtagtattatatctataacaagatacagagtgacatttatggatgcatatccttcgcattagcgtctgcgattacataggaacaacgctgtgcattacgctaatctgagttgtttatctgaaaggaatggatgtgatttcttattcctcatcatcttgctgctcctcatgtttatgggcatcatcttgaaatgctcttcgaccggtagctgaatggatgacactcatctgtctcgctccatgtttgattggtgtctctctaccctcgatgccccgccgctggcagggccatccattcagcgcttcgactttggtgttgtcgcatgccttacctcgacgaatgctggctagatctcgtgacgccgtcactacactcttaacaacccgactttggcttccctgtggcactgcctcggcgtcgttgtctcgactatcaaatatgactagagcatgacgaccgtgccgagagagcaagaagagatgaaaagtttcttttttgttttttattggaaaaaatctcaaagtaatcatgagcgcttgtttttcaatggatgtctcggatacatcataatccccaaaagttgcccctctgcggtcataacactaacactaatgcagaggatccgtgttcgacattcatcataaactaacgactcaagtggcaagcgacatgcagaggatctgtgtttagcttggcggcgacatcctgcgtttgggctctgccgtagttgttagttgtgtagcggtggttttcagccgtttttcctgtaataaaccgtgcaatggtatggtttttgggcccggttttccttataaactaggtcaattctcttcttctaaatataaaagtggaacaaacttccgccttaggtttaaaaaaaagactcaagtggcaagccatcaattttatcttctaactgtggattagatatgtttctcaccctatatggttagctcacattttgtcgtatttgtaacgtgtaaaaaatggtatataaacatcaatgttaaaaactttaatattattattcagttctgttacaaatcacaaatatttatatagggactagggaggtagtatattcatgtcagtgtaaggataaagcatacctcctctatatatgtgggttcacggtatatgaaaataacatacctaatagtatacacggataaaaaaggaaattatcttctcggaatataaggtgttagagtcctaatcgggaaagataaagttttcttagttcgtatcttgttatatttctccgagttctactgggagaggaagataatcttcactataaatacaagacctcctaaaaaaaagaggggacacgccaacagaggcaaatacctatctagacaaacccaatgtagcagccacatagctagacatgagggatctataactaccttcaatctcaccgagttcatgttcgaggaataagagtacactagctgtcgactaggtgtgagacctctatgacgccaagtcaacaaagtccagattaggtcatttcaaacatctactcgtgtgataccgatatataaaagacaccgattttggccaaaatgagtagggttattacctgtcagttaaggaaaccaaacttatataaaaatctatgtctcccatctcggttacctctgcttataccctggtttcaaccattcttatactatacaaataccgtctg

SEQ ID NO: 38331 - DNA, 659 bp, Oryza sativa
  unsure (1)..(659): unsure at all n locations
ccaaaaatcctactacaaacctaagacacagtcctgtctgaataagggttgttcagttgtttccatttgtcttcctttggtcgcatgcgtgttttcatttcatctcactcactctcttaacattccttttgcttcaggtgtgaccttacttatgttatatgcaaagacagagttggtgtgcaactctgacagagatgtacacaactgaagaacaagcagaactgtactacatactacttctactcaatcattctggatgataattcagtaatgtatgatcaacaagggacattttcttggtacaggtgaatggaagagtagacatgaacagaaaagaaaactaaaagaaacagaggttcttttcctgtacttccaatgtagattggctaccatatacacaagcaggagaagctctgacgttcaccaaaccccaactgatcaactgggaagaatttgggtggacctgaagcaaaaaaaatgtgcagtgcctttgcacccaagggatgactgaatctgaaatttgtttaggtaaactggtaaaatgagcttaccaaaaagggttctacataagccaggtagtgaatgtggtggaaaggcngacaccacacaagtcagcccaccaaaaccctggcctgaaaaaggaaaggaaaggaaagggg

SEQ ID NO: 38332 - DNA, 672 bp, Oryza sativa
atagcttggggtggatggaatttttcctgtggttttcatgtgaaatcagcatggaaggaaactttcccttgattttttcctacaaccaatttcttccatccgaaaggcgtgttaaggaaaactcccactgataagtatccctccaaaagccccatggaaatcgacttatagggtctctttaatatgtttgaaatatataggaaattcgaaggattatcctataggaaaaatatgatgaaaccccacgcgatgctgcgagagtttagtatcatagcaataagtataaataatgtgtaaaataactagacgacataagcttacataaattaatatggtttatgataatttaaatagtatatagaatgataataaggtgatatggctttcaggctttatgagagaagaaaaggagagatgtaatttgggctatagattaatcatctgaaggtttaaaaaaaagagatgacatggcttaatgagagaaaaaaaaattaggaagataatttagaccatagataatcatctaaaggctagaaacaattgatgtgctacggtttaattagaaaagagagaaatacctttaccaagtgaggatatataggatattataaaaatgattgagagatatagtttaatatatgaactatgtgagatgataatttacatatttga

SEQ ID NO: 38333 - DNA, 524 bp, Oryza sativa
ttgcaactatttaagagatccctgaatctttccagattatgtgcttctgaacagttggggatcatgcatcaccataatttgtctgggtgtgcattgtagattctactgcagcactggtgatcaggccattagctcaaaatcgttctttttctgtccatgaacagtagattctttcttggtttttgatatagattttatcgaattgtgtggtgtttatgtaattgtttggtttgggagttgtcaaaagaaagaaagcaagaacaagtgtaactggaagtccatttctctctgattttaaaatcacatgtaaaactctgacatgaaaaatcaacttttgatcctatcgtctgcctactgtcaccatcctctgctctaaagatcttctatctcatattgacatccctgattgctgacctgccagatgaatgctgtcaaactccaaaaagagtgatctactgaaatttctttgagcttctgctagaaagatgctgtacaaaagatgaacagatagctcaaaaagctca

SEQ ID NO: 38334 - DNA, 727 bp, Oryza sativa
  unsure (1)..(727): unsure at all n locations
ccgcgcccngtggagtactcgnnnnnnnnnnnnnnnnnnnnnnnnnnnnnnnnnnnnnnnnnnnnnnnnnnnnnnnnnnnnnnnnnactattcacgatatcggctacgtgacaatggaattaggggagattggcccattagccccaactccatcacgtttttcgtgaaaaatctccattagccctaactgcacgtgggacctacctgtcacttccatctatacctccctcccttctcttctctttcccctctcctctctctccaccaccgtcgcaaccgccgtcatcgaccacctccgtggtgggaggcctcgggagccgccgccgccaccatcctcgacccatccgacgtgggagggctcgggagacaacaccgtcctgaacgctattcacgacaggaggttcgggagccgccatcctcaacgccatctgcaagagagggctcgggagccaccgctatcgctgtcctcgaccccatccgtgacgggagggctctggagccgccgccgccactgtcgtcgctgtcctcgacgccatttgcgacgggagggctcgggggacgccgccagcatcgccaccttcgtcctcgacgccatccgcgagagagggctcgggaaccgncgncgccttccttgacaccatncgcgcgggagggttcgggagccaccgccggcgagccatccgacgcgggagggctcgggagccaacaccgtacctgacgctattcc

SEQ ID NO: 38335 - DNA, 731 bp, Oryza sativa
  unsure (1)..(731): unsure at all n locations
ccgtgcagtgattcctgatagcactncacnnnnnnnnnnngnnnnnnnnnnnnggggggggggnngggaangggggcccccgaagtttccatataagaacccaatacgatattaaccaaaattcgaaatagggaaaaataaaatccaaaattagaaaaggaaaggagagtccaagtagaagtccaatttaaaaatagctaaaattcggaattaaaaataaggaatatcaaaagaagagtccatataagaacccaatacgagattaattaaaatttaaaataaaaataaaaataaatccgaaattataaaaggatatatgtatggcacatgaatggacaagtgtgtacacatgttttgaaatgtacgtagatcaactagcacaataacacaaacagttcaatttttaatacatcctgtggatcttgtgagggaaactaaacttgtgcaaacagttgccaaaaaaaaggtgcaagcactaccacatttatgtgtgctaagcatatgaataggcagaattgtaacaacaggacaagactggagatatatatcgaggtcctacctcaaaagatcatcatagaaatctgggttgtccttcaagttgatggttggaacagaagcatacttaggtcccagcttctcagaaatagtattcggctgcagatctatcaagaaaaatgcatggtgcaccgttaaaaagaaatgatggaacatcagagaaacattnttttgta

SEQ ID NO: 38336 - DNA, 702 bp, Oryza sativa
  unsure (1)..(702): unsure at all n locations
cggcgcagtgagaactcctnnnnnnnnnnnnnnnnnnnnnnnnnnnnnnnnnnnnnnnnnnnnnnnnnnnnnnnnnnnnnnnnnntttcttcttacaagatggattaactgtggttgagtgctaccagtggtgtcagcattgtggcgagaagactcaggaggagtctattgatagatttgattgatttttagtaaatagaagtttacgggggtaatttacaaaactacaatgagagcagatggtggtgtcagccagacaaccaccaccgctacttcttttaaagtacttccttcatttcatattacaagtcgtttgacttttttcttagtcaagcttatttaggtttgactaactttatagaaaaatataggaacatttttaatacaaaacaaatatattatcaaaatatattcaatggtaactccccgtcaagatggcgacaatgacgtcgagcgcggcagcaacggcggagggacgatgagccatcttctggagacccgattagagcaccggccgccgccaccgtcggcggcaccaccaccgatttcccagtatggcatagtcacggtacagagtgcacaggatgttgacgcagccatacctttaacccttggtggtgagggtgttcggatttgggtgcccgtcgatatgcccagctttaaccctttgttgtgagggtgttcggattccggtgccgttca

SEQ ID NO: 38337 - DNA, 634 bp, Oryza sativa
  unsure (1)..(634): unsure at all n locations
aggggttgaacnntcgnttgnnanganncnncanantngaggaattcggaaccccccaggcgccatcgacggcggccaagatttgctacccctcgccgtcgcggttgtccacgtgctccgtccagctgctgcagcgacgacgttcttcctctccatgacgctcatctacacccatgtccgtgctgttggccgcggtgaagggggagccggtgccgccgccaccgccgccgggaacgtgccgatcgcgacgaccaccgtggagctcctcgccaagctggtcctcgccgctgcgcttgtcacggtcgttcttaccctcacttccaccgtccttgctgcctcctacgccgactgatcgacgagctgagtttcttcctactgctggtaagcgatttgagccatttttcttgagtcatctgtgctggttatgggatcgacaatgttcagacttgtccgagagttagtgttcatcctgtgctgtaacaagatcggattatatgtgctgcaagtgtgcttttctggtcattttgtatgtgaccagctgcaactcttcgatacttattaatggcttgtggatttgatggactcgtgttgtggtatagcgcacactatgttgcagtagcattatatcgtgtct

SEQ ID NO: 38338 - DNA, 720 bp, Oryza sativa
  unsure (1)..(720): unsure at all n locations
ggggctttgaatgatatgcgccttnnnnnnnnnnnnnnnnnnnnnnnnnnnnnnnnnnnnnnnnatactttctcatttgtttttagataggtggggatgccatccaaatagccccttgaatgtgccaaggaaaaataaatactgggagacatttaatttccttttattatgcacacattaagtacaataggtttcctaaataatgaagcaacaaagtacaccgaatacatatacttttgtgaactgtgatgaagcattacaatgctggacacacaattaatattggctgtgtttcctcaatgtattacatttatacattggaagtttatgtaaagtttatagattgaaaacctctggattgaactcgaacatccatctattccatgcataaataaataccaggaaaggtgtttaggtgcgtcaaaaagagaggacaaccaattggcactccgagcacatgtgactgaacgttcactcattagggtttttgatagctccaagcttccactaacaagcgaaataggttttttgccacttatttgcaaggcggaagtaaatggcttcgctctataattaagtggggtattatccttatatatttttggattttttaaacggggggctatttatataaaaaagatgaaaaggattactacaatagaagacaaaaaaatactttagtagtaaacattctagaactaaatacataggaaaaaatgg

SEQ ID NO: 38339 - DNA, 541 bp, Oryza sativa
  unsure (1)..(541): unsure at all n locations
agagattgaanattgaatntttgatagaacnnnnnnnnnnnnnnnnnnnnnnnnnnnnnnnnnnnnnnnnnnnnnnnnnnnnnnnnnnnnnnnttgcgtgcatcttagttatgtagaggttgagaaacgctcaggggtcttccggctagctccacaaggtggtgggctagccggcctaggttcgaagccttacccccttctatttatttgatactagatccttccctaatacctgtgttttcttttttagttatgtagaggttaagagtgttcttagtacggttgtatcaccttgatgtaaattggctaagttcaataaagcttccttatcttaaaaaacaataaattaatgtgatctgttccaaaaactagtgacaaggaccaggtctccaacagttcctgcaggaacttgtcaaacaaggggttgttcttctggtcacagctctcctgccaaatctataagttgctctctctctttgcctaggtttggagctctcatcatcttttgctgtcaagccatgcattccattgcctcctgaga

SEQ ID NO: 38340 - DNA, 715 bp, Oryza sativa
  unsure (1)..(715): unsure at all n locations
cggatgggtttgaaaaccnnttttgtgatcctcatggtnnnnnnnnnnnnnnnnnnnnnnnnnnnnnnnnnnnnnnnnnnnnnnnnnnnnnnaaccattccaaaatatagtatcccatcaaaaaatactcaatgtgtacagttggaatactatattgcgactaattaaacactctatgcgattcaaaataaatttatttttggctcttacggcctggcctcaaataactttatttttagtagttattatctccgagtttgggaaatagcaaatgttgcactgggaggatgtcacgttgcaataactatagttagcatctgataaaagtgcggataatatagtgttgttattgtgtatagacatgtgtgggttggatgcaaaatgatctcctttttggatatagagagagagcgacatgctgtcatattttggccttggatagttgggaaaatgttataaatttgggcgtgacactggatatacggcattacatttgagatattaaaacgtgcctaataacaaaacagagtacacgattcaccagaaaactgtgagacaacatttattaagcctaataattcatcgttagcaaaatgcttacttgctcacacatatagtcaaagcatggggtaattagacttaaaagattcgactcataatttacacgtacnatgcgtaattattttatttacatttaagactctatacatatgtg

SEQ ID NO: 38341 - DNA, 718 bp, Oryza sativa
  unsure (1)..(718): unsure at all n locations
cttgaattgcaaaacctatnnnnnnnnnnnnnnnnnnnnnnnnnnnnnnnnnnnnnnnnnnnnnnnnnnnnnnnnnctaatgtgcattgccctcaagcacattatgaagcacattatgaagggctgtaacagcgcctactaatgtgcttgagggcaatgcatcaactacctgagtgggtaaagcctatttattgcgacaatcattgctcattcacctaccgttgctactaaataccacttttaacgctgtacattaaagaatcttgcgctagatcaagatccatgaatactggcaaacacttgcactgatgggcaatactatctgctgctgatatggtgtattaccggctccatcaagaaccatgcagactgctaggagcctatctgcacctcatataatgaggcaccttacaactcaatggtcgaggatcatgcaacgtctgactcaaaaaaccctatagtgacccaacttacaattcactgagcacatttttacatcgtcaggactggtaataccctagaggtacgcaactatatcgctttgcaacagatgcgcattttgactggtgaatggacacccaataggaccgcacatatcgcgcttcccaacaggtgcgcacgctcaatggggactgtacactcgctagagcggtacattacgctcctttggcgttgttgcctcncttaatcggcacgttacacttgtttacccgctaag

SEQ ID NO: 38342 - DNA, 1189 bp, Oryza sativa
ctgacaccaaaaatatttcatcgtctattagataaaaggtagattaagtgcaaacatacatcatctgagtcatgctccaaacatttgtggatggatgtgttcacttataccagcatgctgtctaattggtactcatgtttactttcttagtaactgtacacatgacatgcaagatacctacgatgttaaatttgtgcaaagtaagaaatatcggtgttattttgcgattacttataatagcgtcaatctatctattatattattaaaacagctttgaaaggagacatcacgttagctagaaattcccatattaatcggagaaaaagaaaaaaaatccaaaagtagaaatacaatctaaaaatagctgaaattcgaaattaaaaatatacaatattgaaagaggagtccatataagaacccaatacgagattaatcaaaattcagaataaaaataaaataaaatccaaaattagaaaataaaaggagagtccaagtaggaacataatttaaaaataactgaaactcagaattcaaaataaggaatattaagagaagagtccatataagaacctaatacgagattagttaatattcgaaataataataataataatatctgaaattagcaaaaagaaaaaaaaaagttcaagtaggaatacaatttaaaattaactaaaatttggaattaaaaataatcaatattgaaagaaaaatatataaaagaacccgtacaagattaattaaaattcagaataaaaaacaaaataatatccataattagaaaaattaaaagagagttaagtaggaataattttgaaaaaactgaaattggaaaataaaaaaaaatattaaaagaacactatacggtattaattaaaatttgaaaaaaaaataaattctgaaactaataaaaggaaaaaaaatatttcagttaggaatacaatttataaataactaaaattggtgataaaaaataaagactgttgaaagaaaaagaccatctaaaaagacataatgagataaattaagtaacatgcctataaaggagtagagtagttgcggttgatacgacatataaaaactgttaataaaacaccaaatagaatcctaatgacgattaaaaggaggacgacaggcatgccgtgaagcaaacgggcaaggcagttgccgggacttttagaaagtaaaa

SEQ ID NO: 38343 - DNA, 653 bp, Oryza sativa
tcataattatagcctaactctagaagataactaaggtagcgaaataagactagaaaaggcttatacggaataatctttttgtacgcataaaggcaatagagaagcttacatttacataggatcattcacgaatgggcctaaagagtgtctaataagaatataacgcacaggacgcttgcaaaaaaaaggaggaacaaacatctatctatagatgggcttgtgctgacatcatctatacgtgctttgctccagtgcaagtcctaaaatatcaggtttgtacgtgtcagtcagtttgatactataactgacaagatagataaattgatgataaaagaaccgatcagccaataagccgatttgatatggtcttgaacaattggctatatgtccgaggtaaattctaacgctcagataaataatgatataaagacaatagaagaacttgaacaatcaatccaatcgaccgatgataatataatagagtagatatccaatgatatgtgccgaagttgtatttatcgagagatattaatacatgggtagatactagtctgtttgaaattcctggctcttgaggcgccgaagtgacctcttccaccgcgccgccgcctccggtaacgacgatggccgagacggtggacttcgcgagcggc

SEQ ID NO: 38344 - DNA, 687 bp, Oryza sativa
taaatacatcggagtttgaaaaagtgaagaacattttagccttttgactttatattaatatgcgtgagataggaaaaataaaatattttagacagagatagtgttataagtatgaagaatatatttatttgttttttttaaacaaataaacttctgtctactaccttcttcaataaaaatcatttttatatttttcccgttccaaaatataagcatttatagctatgaatctgaacatctgcccgtctagattcatatataaaagttgttatattttcatatagaggtagtacatgaatatggataggtactcttgtatgaatctagataaatggttgtccagattcatttataaatgttaacattttgctaacatagttgaaaatatttgcatgaaacacaacatttaacagcttgagaaacatgctcatgaaaaattaaaaaagaagcataagttgataaaatgatgacataaaaatagagcctctttggatggagggagtaaaagtgtaagacaattaacatgacgattttggtgggattatatgtttctggcacacgagtaagagtatcgtttaacagtttgagaaacatgctcatgaaaacaaataaaaaaaagtagagtaagctgataagaacgatgactagaaataaagtctttttagatgaatagagtaagacaattga

SEQ ID NO: 38345 - DNA, 704 bp, Oryza sativa
attcctgcagccccagaagtagtgaaaacttcttctcctgagctcaattcctaccagagaaacaaaaaatatgaaataagtgtcaatcaagcaccgcatgtgttcatcttcagacttcagctaacagtccaaatgttcaacaatctataattttgatatggaatttgcagtttactcggtgttattctagcaatgcggacgttacatgcttgcattttgcaaatataaaagcataacgttcaagtactaatcagcttatcagtatattaccctattgttgcagctgctgtctggaataaaaaggcaagcagctgaaaatttggcatacgatttttgtaatgcatactctgtaaatttatgagcctggcatccttgagcctattggacgttatgatttagagaagcatcagcaaacaagaaaaaggtgttatctttctgcactagttcttgaacagtactataacaaaaaatatgtggtggtatgttctatttcaatttcaaatgtcagctaagatcaattcttctaaaatgactccacacaaccagctaccttttgaagtccctttcagtttatctgcattaaatcaaccacatatttgaagtgtatcaactagaaatctccacacaagggaatacaccgtatttttttcccctttgtctgaactcaagtgatagtcaccgcaaaacaatcctaaagcattaac

SEQ ID NO: 38346 - DNA, 827 bp, Oryza sativa
cccaacaacatggcagggaccttcctcttcgtgagaggaagtccttgctagtgaacagtagaggggaggagagcatgagggtgaggatgacagtccatggatggaatggatggggatgaggacaatatctgatgattttttatgatacttggccttaccttgatcttttaggggactttccatttcttcacatgcctttgtttatgagttgaaattgcttacgtaattctagatgactaggtttaatttccttatgattatgagtattggtaaatccaaagcggaacgattgtttctactgtattgattaatcattttcttggtgaatggctcagagtggaagaaaaagattggggagctgacttacgcaagttgtctgctggggctgctcttgttgctctaacattgtggcttgatcagatgcaagtaggtcttaaaaataatattaatttttatatggtgttgcattagttgattgaaagagaccaaatcaatgattaaaaacttgttttgagtggagaaatagtaaagtttgttcactagctttacttatagtgtattgtttttttgccattgtcatgactatggacagtacagcacacacttttgagtcaaatgaactataaattaagaagaatgaagtgactacagacaagtaaaatgtgtggaatgtaggctatttatctcagttgtagtgtctaatgcatttctacctttgtttgacattgtatgcaattttcacgtagagaatcgtgataggttttgtgacagtaacatgatgaagcattgtcctccttttttgctagtctatcggcttgaagcacaaa

SEQ ID NO: 38347 - DNA, 724 bp, Oryza sativa
attcctgcagcccattgatcttgcgtgtcacattgaatatacgaacacatgtttaaaatattaaacgtagtctaataacaaaataaattacatattccgtctgtaaactgtgagacgaatttatcaagtctaattaatctattagcaaatgtttactgtagcactgtattgttaaatcgtggcgtaattaggcttaaaagatttgtcttgtaatttacacaaaatctatgtaattgctttttttctatatttaatattacatatttaatatttaatatgatagcgtgaaaagtttttacgtgggaactgtcttattttcgcgttttcggcgttgcgctggcgggggaggtttgaaatggtttcgaattctcgtggggtttcgcttctactgcagacatggcagatggggcccccgttgttggtggtgaccatccaggcgtagagggtgtgtggcaccgcggggaggtgcatcgtgcacctggttggttcaggagacgtgtgtttctacttgggaaatccgatagatcgttttgatagtgagatgggctcgaggcctacgcgcgctacaccctcagcacgggttttcgaggacggcaatcctcctagaggatacggcgtcgtgtctagaagcatctagtcggacccaaaccattactataccaactgtatcggtcgaaaaaaaaattacgtcatcgttcttatcaggttacgctactttttttta

SEQ ID NO: 38348 - DNA, 594 bp, Oryza sativa
tactcctcctctctcaatcccctcggtcgcatgcaatacggagcagatgggggttaaaaaacgccattggcccaagtggtttcgctgcaacggttttgacttttatatgacagcggcggcgaaaacacgcgatggatggatgcgaccgagcccaaatgtgggagtggtagtcgtgaactacaagtggtgggcactagcttttattgacgagcaataatactttccataggttacaacaactgggagaaattcagtgtcgggggaaaactgaaaattcccagtgaaaaatacgggatcgatccgatgccggctgatggaatggatcgatatgtgatcatccgagaccatcgggcatgcacgcctcgatccgaggaaaaaaaaatggcgccaaaagattacaagaaacgaaaggaatctgctactgctgctactagtatagtgtactgtgacgtagtaatgtactagtatgtgctactactggtaatagtaatggacatggtgtggttttgttcttggcgattatctctcggccttccggtcggcgatggacggggtgaggcggagcgcccacttgatggcgagcgggcagctgac

SEQ ID NO: 38349 - DNA, 1494 bp, Oryza sativa
tttaggagaaaatttgtcgacaaatgtataggtggtccctaaaattaatcatctgtcttattttaaaaattatatttttttaaaaaaatgacacacataaaacactatttatattttattatctaataataataataatactaataaaaaagataagatgtacttacggtcaaatgttgggtaaggtaaaaaagggagcgagggagtatacaagtactcgatcgtacgatcgtagttatgcatcgacacttcttttgcaggacaaaaggttgcatgaacgtgtatcggtgtattttaatttcattcgtcacaagaaaaatgaggtgtatgctgctctgagtcccgtcggtgtatttttgatttacaaagttaactataagtcaagctatatacaaaacggaaatataaaattgtaataaatggattcatacatcaattaacatgctttcctgccaagttctttaattagtatgcacaatattattctcgagctatattacaaaaatcttttttttttaaaaaggagaatgctaaggggacgggacgatcttgtcccctgtccgcacggtatctcctccaattcttgtccgctgtttgccgttgcccataggccggccccatccgcccaccacatgtgtgccctccaacgtgtgcgacgccgctaggaacctcacatctccctcggttcgacaactaacttttagagcaagtttaatagtataggttgtgtctagatctaaagtttgaatccaaactttagttcttttccatcacatcaacctgtcatgcacaaaacttttcagtcacatcatctccaatttcaaccaaaatctaaactttgcgctgaactaaacacagtcatagtctactactagctccaaatcatctatagttaatgtaatagtcaattcatacaatagttgcttactatactattaatacatagtcccacctgtcatatacacattacgttggtcccacctgtcatacacacattacgtcttggagtccatgctacagctggctacagatttgtagcccgctgttcttctctctcttcctttatctctttaaaatatgtttatagctggcttatagcctgctattgtactactacacagatcattttcccgtgcggtcgaatcagattttcacgtgcggaggttcggcccgtctggggcaattcgtttgggaaaatcgctatttttgtgtgcgggtggcggaaccgcacgcgaaaatcggattttcgcgtgcgggtgcttatgttgcccgcacgcaaaaataaaaaatcgaaaaaaaacaaaattgaaaaaacgaaaccctaaccttagctgtcgccaccgtcgccgtggccggatccgctgcccgctgccgtcgctatcgccggattcatgcggcggagggccgtcgccgccgccagatccgcacagggaacggccgccgccgcagtcacgccgtcggatccgcgcggggcggggggggggggggggaggg

SEQ ID NO: 38350 - DNA, 564 bp, Oryza sativa
agtaaagtatatacactgaggtgagtttactctagtatgtcataaatattgtttgggtgttgtacttactgtggagttctttacataggctggtacaaagagaatgttaatgtaaacattagtgagcacactagcaaagttagcatgcatgcaaccttaatgtaggattcaaagggttgttagcttttgaagtgtcatgagtatcccaattggggagttaggtatgtatcctcttagaagaagtaaatgatgttagtagtatagacgatgtgcttattggcattcggctttctagcatcattagaagcacttaggaggtaaatttgtatctgctattagatggaaacaaccaggggtaatccatcaggctgtgtcagctatttcattaaactcaatttgggtttgcaggttcaataatttggaagaaaaagtgagcaaggcaatactttcaagtttggcatggactttatttattaccatgttcactgccttgcattagtagttcaaaattccctttgatggtaaggatgtcaaattgtgtttgctgggcttacagactttaaa

SEQ ID NO: 38351 - DNA, 609 bp, Oryza sativa
cgtgacaatggaattagggagattggcccattagccccaactccatcacgtttttcgtgaaaaatctccattagccctaactgcacgtgggacctacctgtcacttccatctatacctccctcccttctcttctctttcccctctcctctctctccaccaccgtcgcaaccgccgtcatcgaccacctccgtggtgggaggcctcgggagccgccgccgccaccatcctcgacccatccgacgtgggagggctcgggagacaacaccgtcctgaacgctattcacgacaggaggttcgggagccgccatcctcaacgccatctgcaagagagggctcgggagccaccgctatcgctgtcctcgaccccatccgtgacgggagggctctggagccgccgccgccactgtcgtcgctgtcctcgacgccatttgcgacgggagggctcgggggacgccgccagcatcgccaccttcgtcctcgacgccatccgcgagagagggctcgggaaccgccgccgcctccctcgacaccatccgcgcgggagggttcgggagccaccgccgccgaaccatccgacgcgggagggctcgggagcaacaccgtcctga

SEQ ID NO: 38352 - DNA, 665 bp, Oryza sativa
atttattgggatcaattgtttccagagtgtgcaaggggtatgtatggtgcttcagggtgctggtatattgcacaccccatgataatttgcctatacttccatgaacatcggaagtgtgtcatgttggtgatagtttgagggtgctatatgcttttcttttcttttctttttctttttttagaaatcatttgagaactgcttttaccacaatatatatgatgtactttcattaacaatgtaaagatattattcatcaaatataaagatattgatgtggtcctactcaatgaatttctgatgtttctctaactctttttttgtatggaaataataatgatgcttggtttcttctccgttgcaatgatttatttcttgccaacatagattctatgtgcattattgaaactggtgcttatttttcattttcaacatcaatgaaaatttacatgaagtttgatttctctctaaaatagaaatggactgtcatgtgtgcatatcgagtccgcactgtagaatgttagacttaatcaaggttttgtacctctatctgtgagattggccttatgctctggagataatttgtttcctgtgtttcaacagtaattcactaggtttatcccttgatgaacacaagttctatgtattatgaatatcaggaggggaaa

SEQ ID NO: 38353 - DNA, 1132 bp, Oryza sativa
caccaatgtaagtatactatagcagattgactctttgagatgacacctagactcatattgctagccagttgcctgtctggccatctgtgggccaaacatgttataagctaactacttgttttatagctcttgaatgtccagattaaaaaaataaaaataaaacatcaatgtatcttatggctggattttctggctcacttattttgcaattaatgttgttcacgaagtcactgtaatttatcagcttcttcgtgtgcacaggtgtgcatgtgaaccaaaagtggaactctgctagtgggtacctataatggtcaagtaaactggaaatgctgcatctggcatgctgaatctgaaaatagagcatagcctcaaatgaaaatcttcggagttagagattgttgcaaataccgaaagatattatgatggtatatgcttctttttacagccaattggaaaatccatgaagcggttgctcgacgttcaaatgcccataacaggtcttccagtgcatttacaaagttcaatgaagcagaatcttctagtgtcccaagtttttctagaaagctgtcaacctcagtaaacagagacgaagtcctctcagtaaggagcctgcagaaggtgtaagatttaatcactgatgaagaaaaaaaatacggaacattatgaacataatcaagtacaatatcaacctaatgggaaggtcaaatccacaatcctgcaaagactttagaagaagaatggcatcatcagtctgctcgcacaaactagcagccctgatgaaacttgtccagacttgatgatctggttctacaccatctcttttcatttctaaaagctttgtgattccaagactgtagtcacgatttctcaagtaagcatcgagaacagtactgtatggtaaagtgctaatttccaaattagaagatttcaagctgttcaggactttctcagcttcgtctgggtgcccagaagtcccataagaagtcatgaggatatgcatagtagcgatggttggttcaatcccatcctctttcattgctgatagtaagtgctcggctttggaatgcatgcgggcattcctatatattttcatcatcatgtggtagatagatctatttaaccgatatccctt

SEQ ID NO: 38354 - DNA, 729 bp, Oryza sativa
  unsure (1)..(729): unsure at all n locations
gcagagtttgatgacttgncgatcgcatgcatncaacgcgaggggaggtgatctcatccgagcctatctatttcatatccaacccttgtgggatgtatgatttgatcatcccaactctctagccttgtagcctcgaggtgatgtttgtgacttcaaaaacccaacccaacctcgttctgctgattagtttcgcagatgtgaacatgatgacgatgatctattgatctagtgtgtgttaaagtaacatttggttggtgttttgcaggacgcagtagttcttctgtctgaatgagcaagattgcactgcactgttcattggtcaatatcagatttgcaattaccatcagattgatcaagtgggagtaaaaaggtggctggcacaccttggatgcttactgctggtggtgaagaatgagaaagagaagggcatacgaggccacattctgccaatggcacctgagctatgcaaaatatgccgctcgtgggcaatgttaggcacacattttgcatcccgcattcctgcctcatcgaatagggcggaacggaagggatagaaatggttggatggatggataataccttgtggcagtcagtgttgatgctgcagcagcagcagccttcctccacttccgccaccggcgccacaagaaaaaaagacgacgacagacgccgacgccgacgcgtgcggcaccagccgacgatcgacgaggtgataccgagccttgtgcg

SEQ ID NO: 38355 - DNA, 831 bp, Oryza sativa
  unsure (1)..(831): unsure at all n locations
cagcgtggattgagatcttaggacgcnccaagngnnnnnnnnnnnnnnnnnnnnnnnnnnnnnnnnnnnnnnagctctctgttagtgtaaggaagggagagataggagagaccatgggaggaagaagaatcaaatcaagaaaaagggacggcaaaaggaagggagatatggatgaatggatggatggatggaggggggagagggcaaatgggcctattatgggagagatgacagggaaagagggactcacactgcctctccacatatgcccccactttggatgataccccgataccttccctttcctcttcccctcctacgtcgaggattatatagtcccgcgcggaccggggaaggccaggatagcgctcgccgtggcgactgtgtgtgtgtgagggggggggggggagacctaccctgtgtctggactgcactgcaatgaaaatgctgcatatgtttgactgcgcaccgcaaggtgccactatttcatttgtgtggtgtacggtgcaaagtcctactaagtcagcggagggtgccgctctaactggccccccttatggggaggtgtgtggctttgaaaacagaatgttggatcccgagaggcccaacatggtggagatatagattctgcattcaaaaaactcgcagaatggcatgcacaggtgataaaggtacactccttcagctgaaaattgattattcatttactcattgcacattatacaaaccttgaaacgttaattgataagccccggacgtcaatatgagccgtccacctgcaatttacattgtaatacaagactacgaggtgggcaccacttaaatccgtgg

SEQ ID NO: 38356 - DNA, 726 bp, Oryza sativa
  unsure (1)..(726): unsure at all n locations
cttgatttgcattgcnnnnnnnnnnnnnnnnnnnnnnnnnnnnnnnnnnnnnnnnnnnnnnnnnnnnnnnnnnnnnnnnnnnntcagtgttgccactggctgtcgaaaactttgtcatgtgatgcaagcatgagtgttgtaaagacctctcccctgtgtgcagtgccggacattttatgcacaaaggaccatgcgacggttgcccaaattttctctacctggaggggaaatacacaacgccgtcacttgaagaacaacgacccgacttgtagaactcctgcggtatacaaacttagtgtgccaagggtacactaatcatttcaacagatgcatgaataaacaagaggaaattcttaattgccctggcaaacacaagcgctatcaggatagggacaggtcacctgatagagagtaactttaaaaacggccagtgtggggaaggactgcatgccgtcaagttgaattgatatcaacctataagagtataatatcgctttcttccctttctatctttctaggttgaaaggctaacaatcgtcaagatgatcaacttgtgagatagattcatgagatgaaactgnnnnnnnnnnnnnnnnnnnnnnnnnnnnnnnnnnnnnnnnnnnnnnnnnnnnnnnnatggacctcaacgtgatagaggtgtctagacctttaagagctgtatccagcttctttatagtgcactcatgaaacgaacttggacgactc

SEQ ID NO: 38357 - DNA, 725 bp, Oryza sativa
agctgaaagaaacatggccctaatctcttgactataaaaataatttactataaagtgggtctaacctcctctctccttcctaccttttctctctcccctcctatcctgtgcgcaggctagcacggtttcaccaatcacgaagagctgagcatggaatgaggctcaccaggtgtggaggaatgtgttgtagttggcgcttattttgtggcctgcattccttctctctcttctctctttgaaagcaccaaacaatctaacatggtatttttgcatctaataaaacaattctattgtacctgctcctagagtaatcgggaaggtccaccgccgatgcaagaagaacaacgagtaatcgggaatgtatgggctcccaatctattgctaattatactagccgacaacccatgcgttgcacgggctattgctattaattttataagcattatgtttttctttgtattctgattttaattcacgctaaagccttactgttgttttttttggagtttttttattaatttagtttagaaattatgaattactaagtatcaagagagagtcttaattatatttttttcaccatttaataatttttaattcgacaacaaatcaatagcgagaatagtgagttgtgtttgatattggcatggagtcacaatccaataaaaaattcgacgataaaaatttcttattgatggctttgggcacatatttgcacgtgttat

SEQ ID NO: 38358 - DNA, 836 bp, Oryza sativa
  unsure (1)..(836): unsure at all n locations
gacgaggacgaggaataattcgaaggtgtgttgtggaanttcgagaattaaagaaagagaanagtgaacaatctaanagggnctcnanatatactaattaccatncnggnnccctnntnnnnnacaacccccccccagcggcggaannggggagcgactcngtaggnaancnaccanannnnnnnnnnnnnnnnnaaaananannnanannanaaannaaaaaaaanaaaaaannnnnnnaaataagaaagantaaaataattaannatttttatttttataaatanaaacacatcatataacaaaacgggggggggggggggaagaaaggagggggggggaggcacaaangcacggggggggaaaggggaaagagaagggggggaggagagggtgaagggggcggagtgatgggagaggggggggagggaaggagagggcaggggggagggggatgacgaagtagggggggggggggatggagggacaagggggggggggggggacggggaaaggcggacgggggaagaggagagaggggggagggtggcagggagcgacaagagagaaggagggggaagaggagagggggggagggggaggaggggggggaggggggggggggggggggggggggggaggggggggggggggggagaggggggggggggaggggagggggggggggggggaagagggggggggggaggggggggggggaggggggggggggagagggggggggggagggagggggggggggaaggaggggggggggggggggggggggggggggggggggggggggggggggagggggggggggggggggggga

SEQ ID NO: 38359 - DNA, 1813 bp, Oryza sativa
tccctccacctctccggcaccaggctactcccccctccgccgccggcctccgcggccggcttccgcctggggcgcgaggtggtcgatggcgccggagaggggaggtcgacatcgggctcctcgaaggcgtcgtcctcgaacacgacgcagtcgccgatggcgaaatcctcgtcgaattcatcgacggcggcgacggcgaaggaggagggagaggtaacgagcgggcggcgcctggggaggagagatttgctatgtgggtggaggcgaggagaggcggagagcgggtttagggtttggacatgggaagggaaggggaagaggaggaggtggtggtggagggagagggaaggaggcatcgcgtcgtcctcgtcccgccgtgccggaagacgagaggattagccggcgtttaaccggctcgtcagagtgggcctcgccgaaagggctacgtgtagtaacttatttgggccggaaggagcccagtttctctatggatgtgcaagaagcttctaaggcctttccaatccttctcaaattgaagcccataaatgaatgtcgggatacaacgagagaaggctgagacttgagagtactttgtgtgccatcgtgttgctccatatattcattctcaaatagatggcattttaggatgcattcatgcatgcattcgaaataaataatcactaaaatatgataagtatttgatatttcctagtcatattagtaggtttgttattcttaaaacttaatattttatgtggttatatttctaacatttttcataaattaatgcaaggtaaaaaaaataatgatcaaatatgtgtattggtattacctagaaaaaattaagtatatatataacttgttttaatagggtgagtctatccagcgaacgttcactagcacattagccgagcgagcaccttatctctttagatattctccaccagatctgttcgttccctaaagcttccccaaagtaacgtgaagaaagaggcggggaaagatgcaatgtgggagctcattggttcttcgccccttccctctaccccctttgttttctctcctcggcgtgccacacatctcaccagggtaaggtcctctttcacagcacttgttgggggtgtatccttcttcctcctcaccaaccagcaacgcaaaaaagaggttttaattcctttccggcaaggctgacatccccttcctcctcctcgccaaccaagcctatgcctcatcctacacaacatcgacaagatcctttatggatatacctcaccttttttccctcatatctaatttcttgtaagaccagtttcttgcattttttagctaagagttattgatttttggtagaaatatttacatatttaattgatagttggtgattttgagttttggagtttatgtttgaatttgtttgaaatttcatatgcagaatgtttctctgtataaagattatatgtacagagtttgtatgtgtaaagcttgtatacacagaagtttctatgtgcaaagtttcaacatgcgaagtttatatctgtaaagtttattcatgcaaagtttttacgtgcatttttttttagaaaaaaaggacactgaaaggtaggaaacccttcgtgttcatgcatgcttattaaaaatgcaagcttcacatgtcggacagattcaagcatactaccaacaaagggaaacatccacgcttccaccagattcacatgcacaaggggtggatgcaagtcgagccgttaatcacgcgcataagcgctagacagtgctaaatgacagtgcgaattgtggttcgaagtagggctgtcaa

SEQ ID NO: 38360 - DNA, 686 bp, Oryza sativa
agtagttcatcacaaagtggattgatccgaagcgcccaaaaccaggagagagacacacgaggaatttttatgggacattaggaggcaactcctgatacaaaagaagattaggtcttagtgcagagatcaacaagaacaagttggcagtttacagcagcaaacaggtagccaggtacggtgtccaggctccaacccacctcctcgtgacgctccatggtggggttgaggaggagacggccgcggagacctgagagggaggccaatattggaacgagaccgcgagagggaggcagcgcggggaggaggcggcggcggcggcggcccagctgtactgtggaggaggtcggcgaggagatcgaggcggcattggctttggggacgaggagcggaggaggggcacacgccggagaaggaggcggcgaggcgaggagacctccggcgagcggcgcgggctctcgcccaccgttgatgctacatccaatggtagaagtcgctcccggtccgacgaactgatggtagcaaattttgcagaacagcccttgatagaatgatagcggtaaaaacttttgcaagattgggatttggtttggtttgggccggctccaagcgcaggagtccaggagagtggaatttccggcccgtttcgtcatgtgagccgatgggccatatgtgcgatacagagctag

SEQ ID NO: 38361 - DNA, 580 bp, Oryza sativa
tgcaacagacagttctactacagcgactagatcacacccaagtgttagtagcataatttggcttttggttaggtcattttagacaggccaaattatatagaatagttggtgtaattgttttagtggtttgcttaagaattggttagcttgactagggcaggaatttgtgatgcaccgggaggtgtacgagttgctggggagctgcagaaactagagaagaaggttgggacttgggaggctgcaattctcagattttgtcagttcaagcagcttagcatgcagcgatggagcttttgccgattcaatggatgtgaggcttcactggttgattttatgtggctggggttggatgcatggctatgtttgatgatatgcctgttgaagtctagccacacaggatcacattgttgccagagcaaggggagacaaattctgaaagttgggctggagcagcgttgcaggatggaggcgactttcggctgaggcttgtatacgtctacatggaagctgtcgttaaaaaaggacggttttcattacatagaattaatcacggatttacctagagtttctatatatgcag

SEQ ID NO: 38362 - DNA, 923 bp, Oryza sativa
tattcacataattaaggctactatttaatacttcgtctattaatttttattgtcatatttgctttaaccagcaataccaagaagagtgccaaactttattagggcagtctcaacccatagtgtccataagtagtgcctatgatgccatatcaataagacatcacaatagaaaccacactccacaactcatagtttcttaaagtgagccattaataaatatatcatctctcttctctaccaatcacatttattcttcatttattatgaagacccaattatctcccaatgcaaaacttgatagtgtctggtgcataggttttcgtgttgaaggtatgtcttgcatgagacccagtttcatcctctcttcactctctctctcttaattaatatagtgccacataagctaaaagtcctacatggcaatgtagttaatgccatagacaccatcctaggtggagggttaggactgcccttaaggctgtgttcgaatggtgatattggaaactaatctttagcgcatgcaaaactaagcaacccattagcatatgattaattaaatattagctactccctctattttaaaatataagtatttttagaatagtgccaagtcaaccatttttagctttgactattaatagcaaaaaaaaaaaccaatcatgtaaagttgatgttattagatttatcattaaataaattatcataatatgcaactctttttatttaaaacatcttatttttatagatattgttggtaaagtataatctcgaagactgtgttaaagtccaaaaatgtttatattttgggatggagggagcatttttttagaaaaatggattatatgattttttttaaagcaacttccgctagaactttttttcccaaaaaatgcactgtttatcaaattgaaaaacgttagggg

SEQ ID NO: 38363 - DNA, 523 bp, Oryza sativa
acatggcggttttacagatggctcgtgagaagaggtcgtgtccgagagcttcagagacgcagcagaacaattcagaaaagaagggaaaggtggatggtgagagtgcagctcgagacaagagggctatcactgtcactgtagatcctgaggttctggaatgtgatgtctgtttcggccctctcactcccccactttatcaggtaaataagcatatattgatccttcttcttgctgatcatgattccatttacaagtttgtttattagtatttactttgctcttcgtgttataagtttttcagtgtttcagaaaagaaactttaatcatgttcaggtcatatctgcattatctgcaaatgtctcaattcttaactctttgtagtagaacgtccagtgattactcattcagtttcaagtttcaacaaactgacacgaatatgtgctgaataatcatcgaactttgatcatactacaatattatttcagatttataggactgtctgaacattctgaaccagcattcc

SEQ ID NO: 38364 - DNA, 569 bp, Oryza sativa
ggcctgatgcacatcgcgcagcagtctggcgccattagtggtgccagtcggctattgttcgaagaaacgaccagttccgccgcgaggggctcgataagccgccgatccacatctacaacgactttgatactgaagagcagcgcggggacattgtaggggcgtatgtaacggtaaaaactgacgatggtgattaccttacccatacgatgcgcatcgatgccatctactccatccgtgaccggtctgaagcatggaagaagtacaaatctgacaacagcaagaagtgtccatgggtcaccgatgaagagcagatgatcctaaagacggtcgtgaagcaggcagcaaaatactggcctcgacgtgagcgcctggatgccgccatcgaccatgttaataccgagggtgaggaaggtatcaacttctcagcagaacgccagccagaacgcgatgtaaccccagcaggagacgaaattatcaaggagattaacgacgtccttatcgcaatggataagacatgggaagaaaacctgctcccagtctgttcgcaaattttccgtcgtgatattcgc

SEQ ID NO: 38365 - DNA, 845 bp, Oryza sativa
  unsure (1)..(845): unsure at all n locations
agctcctacctgaattngactggtagaaacngcccanccnngntatgaacgcgctgatcctgatgcaacaacctgcagctatgcatactgatcgatcagaggattgcccggggaactgggttgtttggctctgtggtcaactggaagagcgagcttattaaaactgagaagcatgtgcattagatcgttccaaacatatgatgagaaacaactcatctacgcccagacatccacatgatttctagccggggggacggctgtgtccttcagcggcaagagaggtcaagaagaacatttaacattttgaaagacccagctttgccggcaagaagaacaaactcgtccaaagagctgttgcatcatcaaaatgcaagaggcgtaagtcttctactctaaaaactttacctactaccagcagcaagctactaagcacgcccactttcatctagttgttgagaacgtgtttagtcatgcatgcttagccatgagatgtgtcatgtgtgcaaatgtgaaatattggtgtcatgcatttcccctttttccacctcgcaaaagaaatacatttcctctgcgtttcactgaatttatcagatattcacaactgttgcatgtgtctttttttcccttggtgcgatattccaattcagacatcaattgagttgccgaagcaaggtcgtgagggagcaaaaagaggttgtgagtcccattgtgacactggaaaaatgaaacagaacctttttcagagaaggtaaggatcctttgacagaacgatacaaatacttattggttccaccttttctgcattataaaatttctttaccaagaaaaaccgcctttgtaaaacg

SEQ ID NO: 38366 - DNA, 894 bp, Oryza sativa
  unsure (1)..(894): unsure at all n locations
gtgtgnannaatcgagtgatcagatcgcactgtagacncatcaattacagggcggagttcaattattagaacgtacgctttanaatcactttatacatggntgtgtccccgtattatttctngatgtgcactacaatcannagaacttagacagcactctcgtgactctagatcacannngccgatatatcgatgagtgccaacaacatgtaagatattatagtactatatgattgactgaatggacatgccttggagataaagggatagtggacgctctgtttatcgtcgtgtttcacaaagctatagtgaaaactttaggcatctagctttttatttttctgaaataatttatgtgtcacaatacatcacgccatgtacattcactagatctatagaggggtggcaagtacatctgatatgagcttttgtacaaattacatcagatacaaaagtgaatgatagtcactataatccatcctgaaataaaatatcgcatgtttcttttttttggcaaaaggttaagttgttgtgccgattgattaaaaatgttactgaaacaatgaattgtacttattccaatataataattcagggcctatgtggcataaaagaacaattnctgcgttcatatagatttggaaaactaccttaaatctacttccccatagggaatgcatacaattacaatggttgtcttggttaaaaaaaaagcagaaacgatgctatgaaattcaatcattttttaattcccctacaaattgcaaaatacctacataacacacataaaatctattttttggctaacaaaacaaccctggtaattggtgtttaaaaacttaaaaaaagggattcggggcccaaagtcgatcccaacagggtaaccgattacat

SEQ ID NO: 38367 - DNA, 583 bp, Oryza sativa
aaacataagtcacgagtaaagtattattcatatttcatcatctcgtaacaacaaaaatctaagtattaaaaatttttaaataagacggacgatcaagttagacatagaaacttatggctgtactattttgggacggaggtagtacagtagtaatactgcaacaaaattttactgcacaccagcgttggctattgaagcctgtacacgatatttctactaggatgcaacttgaagcctgtagtacgtacatttctgccacgcttgaagcctctatacgactatacgcctcttttgcagatatcgacttgaaagttgaagcaagctttggactggtagtccccccttcccaaaataagtttatctgattttaaaataaataaacctttttataaaaaacatatttagatattagaaaactatccaaatttctagcactagccaacctaatatcgaggatatgagacattatatatatatatccagattagtaggaggttggttattttttggcaaattttgccataggacatcgtgactttgcgattttaactgtaggacaccgcgcgaagtgatttttagggaa

SEQ ID NO: 38368 - DNA, 741 bp, Oryza sativa
tgatctatcccttccccaccttctcactctcttgtagcgcccattcattcagttgtttgtaacaagccacacaataaaataaaacagaatgccgaaaccaactttgtctaatcttaatggtataaaagtgaggacttaaaaattaagatcttggtatacagatagtggttattcagatgtaagatgatcgcatgaatgctgtgcaatttccataacataaaacaattccccaactttctatcagtaatttggtcctggtttatcaatatgccaggttgtaatgagttgtgtcagaaaaaacaatcaagacaaaaatgagcggtcatatgagtatcacaaacaatcacagatagagtcgcatagctcaagactgacagtaatggccatggttcatgtgtcatgattgagttgaggaacttcactatgaaaagagaaaataataagtcattgagtggttgagttagatgacacctagaaactgaaaacatgccaattgagtattgtggtattagatttccacctaggacagcttttggtacaagtgtccaaaagaagtactccaaacaaagaggttcttccaaattgtccaaacctagcagcaccaccaagctgcttcctagtgcattggtcctttcaaggtatattattatgcatataagtgtacaatgtgacgagaaacattaactaccacttaagccaagttcacctcatatattgtgtaaaggaaaacaattatttttt

SEQ ID NO: 38369 - DNA, 692 bp, Oryza sativa
ttaaagaagacacatagatatacatctcacatatttaagatatataataaaaagtttgagaaacatatgcctgcttatgtggacgggcttttcttctcttcctagtttatcaaactagggcgatgtcaaatattattcagatgcctggcttctttacacagctgttggatatagatatatagataagtaattttacagtctttataaaaatatcacgaggtatcattttttctattataattttgttataattttggtagatagacagctcgcactgggccacttatcttatggcttcgttcggtggacggagcgagctatttatttgctcctggttcatcgcctcatcggagcctggactgcgggcgcactacgcgacggaggcggtactgcagccacctgcggccggccgtcccaacctgcatatgccaatcgccaaagaaaacgccgttagatcttggggtttgcatcgccttggcagtgtcgtctaaagcggcacatgcatatatagcagggagtatactactcccttttaaatatttgacaccgttaactttttagtatgtgtttgatcatttagcttattcaaaaaatttaagtaattatttattcttttcatatcatttgattcattgttaaatatactttcatgtacacatatagttttacatatttcacaaacttttttaaat

SEQ ID NO: 38370 - DNA, 2914 bp, Oryza sativa
ggtcataatgcagttatgctaggctgcttcttgcttatgctagtactccctccgtctctaaatgtttgacgccattgacttttttaaacatgtttgatcgttcgtcttatttaaaaaatttaagtaattattaattcttttcctatcatttgatttattgttgaatatacttttatgtatacatatagttttacatatttcgcaaaagtttttgaataagacgaatgatcaaatatatttaaaaaagtcaatagtgtcaaacatttaagtacggagggagtataatctataatttgtgcatatatgctggaagaaaagtagtgcaagcaaagcgaagatagctagctgcatgctgcagggagcagaagaccagggagttaaggaaacgcgtttcgtgtggagccaatcgccggccgcttgcttaattacaacttgacccactattgatgaacagcactggctaggatattcacacaatgatgcatgataggatcagtacaagcaagcaacagcatgatatggtacagcaatttccaacgaatttcgatccactcgatctctcaacgcgtatatatatcggccgaccggcgtcacatcgatctatcgtccaaatccaaccgtgtcgcacttaatttcctatatccgcctacgttaatccgcaatataaaataatgattaaacatgttttaggctcatttggaagaaaagaactgtttagtttttcctgaagcatttgaatcctggaaataaaattcatatgaagttatctggaataaagagcatgtccttaaaagttttctatgaacatcctaaggaataaagcattccattacaattttagactaaaacaaacatgagaaagtccaactcatggttttctcttcctgtacatgtctacaatttctttttttttttgcgtgtgtaatccaaacgactgttttgaaatactcttgtgcagttgtgcttctaatttatgtaggaatttataaggcatgtgacccgtgttctttatatttttgtgctttcaaattcgtgtgtttcaaaggactcttagtctcttgggtgcgtttgagacgaggggaaatgaattgtttacagcaacttttttagagattatttttaccaaaagcgtacttcctccgggttgataatacttgtcgtttcgataagggcacggtttccaaaaaaaactactttaaccattattttttattataatatgtacaaaagtgttaataaatatatgattttattaaagtaccttttaagactaatctatacatatagtaaccatattgaaagacaaatattttaaaaataatttataatcaaatattctaaagtttgacttcactcttatctaaaacgataagtattatcagcccagagggaatatcatttaacagcttgaaacgaacatagccacgtcgacgtgtttcaaattcctatgcttgaaagcactttcctgtaaaaccttttttttaataaaaaatacgttgtttagaaatttgaaaagcgtacgcgcgaaaaataagaggtacaagttataaaaagggataaaagaacacacatttaggctctgttcgtaattcccaactccttccgcctcgtttttcatgcgcacgcttcccaaactgctgaacagtgtgttttcttaaaaacaattatatatggaagttgcttaaaaaatcatattgatctatttttaaaaaaaaatagctaatacctaattagttatgtgctaatggaccactccatttttcgtatgcaggagatttaagttttaattagtgttcccaacccattccagctaacacagcctaatgtctctaagagtccatgtcgacattctaaatgttgaataggccgaaagaaaggggtcgagggaggaaacaattaagaacagaagaattataataatttttaggacatgatatgatggagcttgtagttaaatttaactcatttctagaacagctctcctttctgttaagacaactaatgttatcttgaccaaaactatcctggatgccacaatgtctgaacttttgcagaaaaaaaatgataggtaatcacacggaatcagccattggaacgttcttgccacgcgtttttttattttttttaaattttttttgccaacaacgacgcactatatatataaacccaagcaaccagcccaagctccaaatcaatcaaatcgcattccaccaattctccactctccatcctcctctaaaatccatttcaaattcgcgaatctgattctcttcttaatcgaatcgcgaatttcgttagctgaatcaaatcacagcattcgctagctgcacaattcttcttatcggaatccaaaaatgcaaccggcgatctcccaattccccgccgccgccgttcgcctggctggaccggcgctcccataccggcgaccaccacagaagacgacgacgtcagtgacattgaggaagccggcggcggtgaggtcgcggcggcgcgacgacgcggatcagttcttctcgggcggcggcggcggcggggtggtggacgaggggatgatcgagctgcggcggaggatccacgagatgagggcggcggagagcgggtgggagccgccggcggagtgggcggcgtgggagaaggagtggtacgggagctacgacgccgacgtgtgcgcgctggtgggcgccgtgcaggccttcctcatgagctcccgccccggcgtcggcgtcgggatcgtggcagcggtggcggtgagcgttccgaccaccgccttcgtcctcgtctccggcctcctccatgcctcccagtctctcctctccaacctccaacactagaagcttagcttccaagctaaccatggatgatcacacttgtgttctttctagtttatactaatttaattttatctaaaaaaact

SEQ ID NO: 38371 - DNA, 752 bp, Oryza sativa
cggttagtaaaaaattaaaatgctactagctgcacagaaaactccaaactgtttgctacagcgaggttaaaaacgactctcaagtgagaatcagccaggttgtgccacctgacatccaactcaggagcttcagagatgctgctgatttcagatacacatctgctgaaaatgagagtgacccgtgactagtgcctaaactcaaagtgctactgtagtacagacagctcacggctgttagcaatcttcccatttttggatcgtccgagttattagcagaattgattgcaattcttataacgtgatttaaggagaggaccgacgagatttctgacattttggctttcagacagtggaagcttaattgcagttcgtcctggtcttcttggctggagtaactactatacttcagcttggtagtggtaagctagcttcagtaacaatttgtttgggtgatcaaatttgtttactccaagttggttaattagggaccagggagggtgaccaccatggagatcaaattgagatactacaagtaaacaatacccatcgagaccatgatagataggctttccaaacttcctagccagccaagcataatctgaactttttagtatctgtggaggcagagccaatctgtgggtgccacgtcacttttcacacagaggcagtacaaagtactacaaagcagagctggtagattgtagtacgtggtagatacttacttactcctaagtcacgaaatagtttaactt

SEQ ID NO: 38372 - DNA, 629 bp, Oryza sativa
gatcaaatgagatgagatccgccattgccggcagcatgggactctgcgcttcactttacttcctactgtgcacagcccttctatatctgagctgtgccacgtactaataagttgtgtgccgatttatggaggagaaaaacatgcaaaactttgggccatgcccggttaaatctaggctgcttatatactcccttcggttttattttaattgacgctttgaacaatgacacgctctacgagatatatctttgaccttatttttctattataatatatacaacaaataaatgcatgtttacttttattataatgttttgaaagacaaatctatatatgtttttctagtttctttaaactaaatatttttaatattattgatggtcaaagttataaaagtttaacctcaaacttatccaaaacgttaattaatttagaaccagagggagtactcccccgtttataaatatttgataccgttgactttttaagcacatgtttgaccgtttatcttattcaaaaacttttgtgaaatatgtaaaactatatgtatacatataagtatatttaacaatgaatcaaatgataggaaaagaattaataattcctcatttttttaatatttaaaaaag

SEQ ID NO: 38373 - DNA, 518 bp, Oryza sativa
ttctatctcattcgatttctatgtttttactatggtccaattaaacggccattcctattttttttctatgttttataattacctgttttacatttgcatatctatcagaatcccgtgttttttctatttcttcgttttttttcatttctgcgattcaaaaggacctatattttatattattatatcttattaattttttataactatttaaatgacatataagaaacaacctatatcctcatgagatgaactcatgaaaacacttccctactgccgcctctaacaagtacctctacttgggggcgcaatgttgttctagccttgcatattggctttggtggcgacagccgaatcgattgttgtgttgtgctccgacgaagtttgttgtgttgtgccgtttgaagatgcagtggccctgtagttatgctgcatgtgacaggtacaaacaaactggccgacacaaatatgtcaaacagattgcccgccgttggttcacgggcttatggagatgggattgg

SEQ ID NO: 38374 - DNA, 665 bp, Oryza sativa
agatgagatatcaaatctttgacgggttgcaaatttaacacccctcacaggtgaggtcaaactagtaatgggctggagagcaaccccgtcactacctcacctgcgacggcttaaaattctggcccatcacatgtaaggtgatacatgtgacgggccacggccggatgcctcaccgatgacggcaaacctaacgacccgtcaaagatgacggtcatctgtgaccaatccttaggcccgtcattggtgtgccgtcacagatgtagggttctggcgtagtgacttaaatagctaggtagacctatattgtacccatcgaattgatagggattagctgcattgtaatctctactcgccgaaataatacaagaagcagcacctggacgtacgtaaactcgactacgaggttccgaaccagtataaactccgtgtcagctgtgattgctcttcgcaccaagcacggttcacaacgatccaaatattacgtgtctactgtgattactcttcgcaccaagcagagtgcacaacgattcaaatatctgccggtctaaaacagcgacagaaccatgtcaggtaggggatctaacagcgacagtaaaacagcgacagaagcgcgtcaggtggatccaggcgacgacgtcatcgtcacagtcggtggtgggacccaa

SEQ ID NO: 38375 - DNA, 544 bp, Oryza sativa
aaaagaatgaaaagatgacagagctagctaatgccaatattattattattattatatattgtgccagaagaaatatatctttcaaaatccttttatctccttgcaaaaagaaaattcctcttagctagaagaattttacaactttctttttttggaaaaagatcatttttacaacgattttcgatcaatcaatcacgaaatgatgagaagctttcgttttctttcgcttaatttgttttgtttcagacgagggattaagctgtcgtccaaccaattaattaatttgctgttcccccgtttccctgctacttacatgatacactacgactaagccagtactaacatttggtgagaaattaagtgcatacaagaattaattaattgacgaaatgcgcgttgcatacgcttttacgcgtcttgcacatgcgtgcgaacgacatttacgtacgtagtaaacgatcaccgtcgtttaattatgagcaagcaaaaattcttattatgaataggtaactcagctccgacgaacggcgacaccggctgatta

SEQ ID NO: 38376 - DNA, 662 bp, Oryza sativa
cctctcgcagccctcgtcgatggacagcaacaacgaggacgtcaacggcgacggcgacgacgacgacgactgcaaggaggaaggagaagaaacctgcagccgcaggcaatccatgctgtaactcttgtgcaagtaggacgccggcgagctggccgccgcagcatggagctgcaccccgaacagccgtagcccggcgccgccgccgccgccgccctcctcgccggctcgttggcctgcagtcgagtagtcaccagagcatcgcctcgccatgatggcgtgcatgcgtcaatgcgtttgtgtgtgtgttgtgtgtgtcgcggctgcagattagcaggctagttaagggagggagaatgacctgcgcatttgcattgcattgcacaatcgaatgggatacaaatatggtaatatatggagaaaagagtgatgctaatctcgctgctgctagtaccgattgatcgagagggacgtcgacttgctactagtgaggacacgacaattattgcacccgtcgtttttgtgtttagccctatatttgtaatcaatttgggttttaatttatcgttaaccgtactgtcataccataccactgttgatattatgggcatataatgatttaatttattccataaataaatcatgacattacagatgaaaactag

SEQ ID NO: 38377 - DNA, 677 bp, Oryza sativa
cctatctctgaagtcgatatccggcttcttgtcttggcgcatgttggcttgtatgtggatcttgtgtcttgatctattgtttcgtgtcccctctcctcctagggggccttgtatttatacccatatgtccccttgtccaagtaggactagggaaaccaatatggatacaatccgagtagtccttgtcgtttccatgtaaaactctattcatccttccttatgcagaactccttctatatctgaaagttgtttccgtataggacatggtatgtggtgggtcctgccgagatttagtcaactattattaggtatgtggtatccataaccttgacagaaaccaataattatcaagttgtaactgaaacaaactcttctttttaaactaatatgctaaaattaacaaacaaatttagaaataaaatgtagatggactcacaatttagctattttaaatataattataaaattcaaagttaacaattagccagttgtaactgacacggtttcttttaatttaatatgctataattctaaaaacattcaacaacaattttagtgtatgatcaaaatttaaaatatatataaaaaatagcaatagccaatgtaacacatgggtgtgacatcccgacctaggggttaataggattaatagaatactcatatcaacaggttacact

SEQ ID NO: 38378 - DNA, 1041 bp, Oryza sativa
caccccctttctccacaaactacagcatggacgaacaatttgcctactgagggcccctttgatttggaaaaaaaaatatagcaattttagaggattttaatcctatagaaaaattttctatgaagtcctttgaaacaaatgattgaattctatccaatcctttgaaattcctatggaatggataatcctatagagattttagaggaaatttagcaagagttttaacctcttgctaactttcctttgagtctatctctctcatccaattcctgtgtttttcctgtggttcaatcaaacggtaattcctgtgtttgcaatcctctgttttatacttacattcctatcaaaatcatacgtttttcttattcctacgttttctcaatcctatgattaaaggggccctaagtgggtcaattaagaccaattgggctttacaattcggcaagagaacaagcctgagagttcgcctgcttgggcctttatttaggctgagtggtttacatggagttgggcctacttctagacccatggtaaactaatctacccctggaaagtagtactactactagtgaaaacctttccgtcttcctcccgttcgcctctcctttgcggtttggctctccactggggaaaccctcgaggccgcaagtccgacgccacgtcgcctcgtcggccgacgagatccgcggccggcggagtatattgttggagagcagagctgcggggctgcgcgtgccttcaggccaaaccctctctagtctttctccgtttcttccatctccgtcaacctaccggcgtattcggaaggtttcttttttctcctttttttttgttgaaaaaatccacggaacctatcgtcatggagagacactgccggctgccctctccccaccgtggtcaatcccgttgtgctgcactgctgcttgcccgcctctcgcggaggcttcaaagagacccagcgaggacgacgacctggtttgagaattcaacgctcgccgccttcatctgaccaaggaaaaccgcttgatttatgatttattg

SEQ ID NO: 38379 - DNA, 684 bp, Oryza sativa
atgacaccggcctgcaatcctgcgctcggcagagctgttgctacagctagctcagagtgattaggacagtaaacgcagctaacgctgcccatgcgaagattttctagccccatgctgctctgctccacacgtactcctacaatgcagacacgcagttgccaggccggcatcgtccaagcaccggtgatgcaactaccactattactactacggcagtttggatctaaactttagtcctttttcatcacatcaacctgtcatacacacataacttttcagtcacatcatctttaatttcaatcaaaatctaaactttgcacgaaactaaacacagcctacttctatctctcggttcaaggacatgcaagtcttgccttcatgagtacctggctgaacgttactcctgctcccttgtctcacatataaaagccaatcctaacattctaagataaaaatagtagaaaaaaaataaccaaaatacctctattattgagtaatggtgatagatagataaatagtattgaaggaataaaacttatcattttatgtgttgatagtagatacgatggtagagtgatcttttgtgggacaaaatcaaatttagaagtttgagtttttttagacggagggaataaaaacagtgagttagtcgccaaagcatctacgactacgtaaaactatccg

SEQ ID NO: 38380 - DNA, 764 bp, Oryza sativa
ttaagacaactcatctgccgccgcagtcgacttagagaccccaacaggcgcttcaattgcctacttaactataactgcgtcgatttaccaacactctttttgtctttttactcatatcatcacgagcgacgctggtattctcaagcatggcaccggattaatctactttgctttcagtttggtcacatttttcagcagttctgcatgcgagaaaactgtgagttagctcaatccatgtaatttgcttgctttggatggatctaccgagcacaacagttggccgcattctcctcctgcactaaagatggtagaccatacatctttggccactgccgtagaagtacttctgtgcagaaggtatctatctccacttcttttctggttggttaattcagttaatggaaattgtttacagactatattcaaggtgaaattgcactactgcaggttataaatctttccatttgcaacagcccatgttctatctcaatgatattcatacgttcctcttcaatgtcatgccctcatgcatgcaaaaacaaaaaagggtcttcgatctcagctttaaaagggtagcacaaaattttttattggaatattgaaagttcaggaatcaaagaatcatctccatgggcacaggtaactaaacaggtaaatattagctacatatatagaatatttgcttaatgtatatttttgtggaactctttattaaatatactattcccgacagctagctcattaaggattacaccttctttgaa

SEQ ID NO: 38381 - DNA, 950 bp, Oryza sativa
ccgcgcttgaattgcaactcggactccaacctatactagactcttgtatttatctagatttgtagcactaagaatacgtcatttggtcctaaattcttatattttgtgacaggggagaagcaaccagctacactagattgtacaccatctagcactatgaatgaagtaatgctaggttatctaatacttaatactttaatactaagttgttatatattaggacaaataaaatagcaattcagtcattttggttaaccaaggtatggccgaataagaccctgtttagatgggactaaaacttttaagtctttatcacatcgaatatttagacactaattattaatattaaacgtaaactattaataaaactcatctataattttggactaatttacgagacgaatctattgagcctaattaatccataattagcatatgcgatgctacaataaatattctctaattattgattaattaggcttaaaaaatttgtctcgcaaattagcttttatttatgtaattagttttgtaagtagtctatatttaatactctaaattaatgtctaaatacagagactaaagttaaatccctgatccaaacaccacctgaactcaggtagcacgaaaagcttgaccgaattagtttaaaaaatcggtctccatcacttatgtatcggtctggaaaaagcagtccggtttttcaatctcggtcatttttctcccaccggcacagtcaccagacagtggtacgatcgacaaggtcgcgtattgctgccaccaccacgtgctaaacctcaagatttgtgcagtcggcatgcaaaactcctctagtcaatggagcggctatgctagtactcctacattattccgtcgtcactcttatacaaacaaaaaaacggtgcggtgtacgcaccgtcgcggcgccgaccgaccgccagtcgtcgaagcat

SEQ ID NO: 38382 - DNA, 787 bp, Oryza sativa
ggggaattgtgacacctggtccattcatcatgttgatgcattgttagaaagaaaataatactacctccgtattttaatgtatgatgctattgactgtttttttccaaattttgaccattcgtcttattcaaaaaatttatataattattatttattttattgggacttgatttcctgtaatcaacaagaaatagagacaaagaattcgtggttaaatctataaatgatagccgatcggctaggtgctgatgacatatcatttatctttgagccgatgtcatatatgaatcaatcggcggttataaatagatagtaaggaactaaatctgttcgatcggctgtagatattaacgatatatagttcttatattaatatatacttaaatcaagtgattgggatagatcggtcaccatgccgagacagtataaatcacttagatcgaaatatatatatattaataacagggttatatatgtttatagcatagccgatcagatagatctagcatgtatcggctaatactccgatactactttatataaagatatcaaaacaaatataatataccaaacaaaagcttaatatacttaaatgtaataagatcctgacataaagggcggatttaacatgtcattgaagcatatagatcgaatatggttaaatcagataagatcggctgaaactccgatactaccctaatcggcaaccagaggataggctagagattgatattctaagcatgacttaatagatcaaactcaagtgatgcagcattaagtatgaaag

SEQ ID NO: 38383 - DNA, 560 bp, Oryza sativa
cgcgttttgaatcttgctatccccgatcagccgtgatgtggtggtagttgcagtactgtgtgcgtgtatggcagttgagcatcaagggggagcaatgctggcttatatatattgttcttttaacttgtgttacagatacagactagcttgattgcagtagcagtaacatgcagatgcaatgtgcaggcgcgctgcttccactacttgggaacatgcagagaacatgccacacatttccctgtaaattttagcttctgtggaatattttgttaagaagaaaggagtcatgcatcaagtgggtctggaacatgccaccctgagacctcacttttgttttgcagacctcaaatagtagtgctgtttctctttgactgaaaaaactccttttccttgagattctcagataatctagtccataaaagtgcttcacattaagcatatgatccataattctttctagggatatatgcgtgagtgccgaccatgtgaaagatgcttctatttgactaatagcatctcttgccgtcaggccggcagtatacgaacaactaaatacaaca

SEQ ID NO: 38384 - DNA, 620 bp, Oryza sativa
aagataaaagaaattccaagcttttccatctaacatctccttcattagaccagaaacatgcttgcttgcaagctacctgacaatgcaaccgtccacggactgattgcatatcgtacaaaaatttctgtaacacaaaacagcactagtcaaacctgaagctttcatggaaccaaaccatctctagaatgagcttgcactccaatttgttataatatccaataaagcacacactctctcctggtattactgtagtaatgatcaaatttcaatgttcagaagaaacaccattaaatcatgaattggatttaaaacatgtgtccttccatgtaacatagtcctacagagacagctgccaacagcagtcgatgcaaacttctggttttcatttggtataacttaaaaaggatgaaatgtgcaaagatattgcaaatagaaatggatgttgtagaatcaaatgcgaactgtttcagagctatccacaagaatagatataatatttctttatagtactaacagattattcccaagtaacaaaacagcatgcagatcacatgagagcaatgcaatgacgaaaaaatcattagtagagataatcctatggatatatatacaatagagca

SEQ ID NO: 38385 - DNA, 871 bp, Oryza sativa
agcagcagcaagagcagcagggggaggagctccatgcctcgcgcgttgtggcgccaaccaaacacacacttcgtcaacttcaaaggggaatagattttgccgatttggagggtataaactaaatttgttaatatatcaagggtgaaatggtaattatttcatctcatgacatatttcgaagagacccctgtaacaaccaaaattactggtcttggtggaatcgcagcggcctgcagatctcctcttctccgactcaatcattcgccctgcgctgcacaaggggaggggaaggaaaggaaaaccaattggatctctcaattaatcgggtcaggagcaagcggcctccacgcaacgcgggaggtaatcaggtagtgcgatgccactgcttacctgcttttctgttcttaatttcgccgatgttttcccctctactgaaatttctttaaactgtctcgaattgtcgatgcattcgcggggaagggaaattttctgttcttgttcgtagtttcttggctcaacctctccatcggctgcagtttgggatttcaatttgggcgccaattatgggtagctttcggtgacatctgactgttaggtttgtcagcactcaaccaaatggcctggccgcgagtttgtgcaaatttctttcgtccttttgttgaattgggcgtaaatttgatgtatgctcttgcctacattacttgtagttatgtggaacacgccgagcagaacaatttcatggtcttagtgtactctgatacaagtaatgttttcttgagtttggtgggagatgtcaaactttgtttgctagcactagagatggttggttggttttgtacttgtatttcatgttgacctagagcatgttttg

SEQ ID NO: 38386 - DNA, 695 bp, Oryza sativa
  unsure (1)..(695): unsure at all n locations
gcgctgancctattgaatccattcggacccccgcatccctacagaaggggttcacgtatgcaagctttgatgggacccaaccctctctaaatgtgctggtctccaattagtgtctgaacggccccagcctgtgtaatgcgtactgtgcgtatgagcaaaattccgggttcagcgccaacaccctttaatgctgaacagcttttgaaacaggcgatcttcgctgtcacatattccttcacagacagctgccaacaggggatgatgcacactgctagttattatttggactcacttgaaaaggcagacacgagcttagatatcgacaagtcaagtggatgtattcgaatcacatgtcggctgtttcagagctatccacaagaatagatataatatttctttatagtactaacagattattcccaagtaacaaaacagcatgcagatcacatgagagcaatgcaatgacgaaaaaatcattagtagagataatcctatggatatatatacaatagagcactactaattgcacgttccattttcaccactgcgcactacttgatttttttttctttcaggatcttttaatgttacaaaaaattattcccaggttaaaaagaaaatagcatgcagatcacatgatatcagtcgatgaccaaaaaaatcacaattagtngatagaatcatatgaacatgtg

SEQ ID NO: 38387 - DNA, 628 bp, Oryza sativa
attttttgttatgtggaaaaaatagaatttgtaatgcccgaaacatactccctccgttcatattcaaacccagaattgggtttttttgagacgaagggagtatgttcgtatcattatcaccctctttaaggtggccataattagtagtactacttaccaaagctgaagaaacaaactcattctagttaaatctattatattattaaaagaatagaaaaaggagcttccacgttcgttctcatggcctagaaattctcacattaatcgaagaaaaagaaaaggcagagtccatatagaaatacaatttaaaaatagctgaaattcggaattaaaaataaggaatattagaagtagagaatagagtccatatagaaatacaattaggaaataactgaaattccgaattaaaaataaggaatattagaagtagagtatagaatccatatggaaatacaattagggaataaacataataaaattaaaagtagagtttagagtccgtataaaaatacaatttacaaataactaaaattcgaaattaagaaaaacatgggaagaagagttaaagtcaatatagaaatacaatttagaagtaactgaaatttgaaattaaaaattaaagaatatt

SEQ ID NO: 38388 - DNA, 639 bp, Oryza sativa
cccattatattttccttcatttcactattaagtttgattgcaaatgtcttttatgcccttgaagatttaggtttgaatataagctttgttcgagtgcacaatatgtgcattttatgaaactaatgaaacaaaaataattagtgcaagaaattttgacataaaatttgaaaataaaacaaatttaataaattaaattttttatttgaaatttcaataggacaatggattttttttcatcgggagcattcataaaaatctatcgtgagaatttgtagtcctatctttatatggatgctcctatttttttatgactttttaaaaaataaaataaatacatattttttgtttcattatctaaaaataatttttgtcataaataatgtatcgcacaacaaactcataactataatagtctcatatgacaaacttttacattttcaataatgtaattcataaatttctatgttcatcaaaagggcaaaattgtcattttatagaaattatacggtcaaggatcgaaatcaaattttgggtgcatacaagaaagtaagcaaaaattcagaggcataaaaaggattagcttaaattgcaggggtatacaagggattttctatagagattattgtgagacctatacat

SEQ ID NO: 38389 - DNA, 624 bp, Oryza sativa
gctgcatccttggctcccttcccgctctgaaactgaaagggccaaaaatttcccatggaaagagagcacattaggattccagaccgtcaagaacttgaaagaaaatacagctcaagatgggtgttcggatctcacatgaatcaatcatctcgttttgtgatcgttattcatcctccctccgaatcatcagagtaagtgactgatcataactgataagcaaacaagcaattaggactggatctgatcagggaaaaccaaagcctggactgaggctccaactccattccaccagcaaaagtatttaacaccaagaatcacactgaaatgaaaaggaagattaaaacactaatctaaaatacgaagaagcaaactaaactgaatcatgtctgtccctcagaatgcctattctcaacagtgcacatggaattatcgatcgatcggttccttcaacctcacagcatattgcagtggagggagcaccaactgaactgaatcaagtgctcagattactaaactgctcatcactgggacagaacacatgaaaatcttcgctaatcaatcaatcagacatatacagagacagaaatacaggggcaaactaaaatacaggtaggtagcaatgga

SEQ ID NO: 38390 - DNA, 813 bp, Oryza sativa
aggcacaagacatgtaattaatatagagaatattttcccttctccctaggtagcactcgcagcacatgtggtatccccttagagtataaaaggaggaccatgcctagcgaggaagggggatcggactgaggatccctgagccaaagcttgtctaaccctagcttgcataccagggattcagggactttctaagcacagaagaatcatacacacaggagtagggtattacgcttcatagcggcccgaacctatataaacctcttttgtctcatcgtcttggaggggcctccgagatcaagatcacacacagtttcgctcaccaaatcctcgaatctcacccgctgcccctggccgaactctcaaaggagggcctcacagcctcccgctagagagggtcacccctcaacaaagacgagtggtcaaacaatgcaaacaaaaactcaaaatcccttatattataggatggagggagtacgacagaaaggagtgattttgtttagtgccgtagaacaaaaatatttgaaaaaaatacataatcacaaatatcttgaattgcaaaagggcgtagctagaaattgtgatatgaatgatactttttaaaagaacttttcacatttattttatgaaagtttggtttgcgaggatcttatctatttatagctatattaattgagcacttcgagtgagctcttacatgaacttaaaaatatataccatttgataagtgaatatgtaaattacacattcagatttcgtgttaaatgaaacatttcggctgggtgtgcgaagtgcattgcaattcaatgggcgcgt

SEQ ID NO: 38391 - DNA, 718 bp, Oryza sativa
  unsure (1)..(718): unsure at all n locations
ctgaatgcntccggcctgtacccnactaacgctctatttgttttcgcttaggattattataatctagattattagtaataataaaaaataaataggtaaattattatgatagattattgtaatctgtaagccagattagtataattggtaatctgttctaaacatatatttttcatattattgggtggctaaagagtcactgcctctattctactataatccattgaaacaaactcatagcttattataattcagtttataaatctggctaaataatctgtattataataatcttatacgatgagaaacaaacaggcccctaagccaaacccgaaaacgtcagatcgatccgcgcggtcagttaacagttaacccattcctttatcgggccacacggttttggccttctttttcattttaacaaaatttttttcatgggccagccccgggaggtacgaaggacatgatcacatgaggtccccgaaggggcatcagtgctactgctcggttagcctcgtcagttctggcagaatggtacgcgcgaattgaactggggctgaagctgggagcctgggacgacaggaattacgcgaatgaagagaaaaaaaaaacaggggaaacattcgggccgtgcttgcgctgattggataaactcggcctttccgntttnttcataaannnntgacctaagttggacctgacccangccctagtcaag

SEQ ID NO: 38392 - DNA, 736 bp, Oryza sativa
  unsure (1)..(736): unsure at all n locations
gcgccctttgaattgctattctagctcgtaccctgtcattctaggttgtttaggatagattaagatttaataaaaaactataataccccttattaaataatgtatggtggtaagtgaaatgattattgagggtaaaaagggaaaacttttgaatagaaagtgattgatgggacaacttagtactccatagtgaccagtattttgggacaaaatttaaatcctaaagagacaagtattctgggacggaggtagtattagccaaaaattgttgacgtgttttttttaacgatcgatttgtcagccatcagattcacgtcacgaatagcaaatgtgagttacatataaataactatattatagatacactacaattatactacaaccgcgtttgaaagtttagccctatatttgaaaggatattattctatcaacaatcgttgtagcagagtcttgcacttatgaaaatgaaaaacatcatattttccatcaacgtcttttttaaaaaaaattcatagtttttcatcaaattcatgaaattcagaaaaaaatatacgtattattaggtcatgaaggtatatacttatcatcgtgctaccgccgttttttaatagatgaccccggtgactttttctcacatgtttgaccattcggatgtttcnnnnantncnnnnttaaannncncttaaaatactannanngataaacatctcatgcactaaataattttattatgtaa

SEQ ID NO: 38393 - DNA, 744 bp, Oryza sativa
  unsure (1)..(744): unsure at all n locations
cgcggacttgaatgcagtgcgtaccaggaagatgtaaccatttaaggatgggcagagtaggttgatccatggtggccatcggtctctcgtggtccactcacatgttgcatcatggcactgctatgcaaagttcagttccatcttcccccgtgtacttggatggacaaatgctatttattcgccgaaagcttgcaagccatcaacagatcaactccctctagccccctggccggcaagaggcgtcttcgacgtctagctccgtacgtacgtctccgatctttcagccggtgagctactaaaatcatttatgatctgcgtggttggttggcagtattgttgagactgcaacatcgacagagcgatctatcataagctcagcttaggctgtgtnncttncnncccccttttttatcgtcaaaaccactttctccattggttcagtgtgtttccccctctaaaactcctaatatattggttcttttatcgctctttctcttttctccgttctttacttctctggtcttatttaattattacaattacacgccccccccgtagggtttattttttttaaattggcggccaaattttgtcttaaaatccggaataaggctggttaaacatttttattaaaagggccaaaatatttcataataccttaaaaagcccttatgttgggttataaattaagctcccccttactgccggtggtataaaaatatttttgtttcattaaaaggcgtg

SEQ ID NO: 38394 - DNA, 675 bp, Oryza sativa
acccaaggaattcagcattcaactatcaaccaatgaaatgaccattcaacaatatgtcaaccaactcagcattcatcaaaccataaattcagcatacaacaatagatttatccatacaaatgcaatttagcaaatggactacaacaagctgtccatacaaatgaaatacataaaaatgttcattgaatactaatgaaatatagtaaataaggtagaaatacaagtagcccagctacatattacattccatgatggctattacggtcagcccacatctgatcagctaagccgtgcctgaactgaaccatcaatgcatggtcattcgcttggtcggttgacgattcatcaatgtcctcacttgaccaatcaggcggagctataagctcatcaattccgtcatttacgacacaattatgaataatacaacaagctacaacaatatctacttgagttcgaaatgggaagaatagagtggcatcatcaagcactttgaacctcctctttagtgacccaaatgcacgttcaaccgtcacacggagggatgagtgtctaagttgaacaactccttctcattttgtactggattattcccccattcattcagatggtaccggacagcacgaaaaggaggcaagaatccttgtttggctccatatccagcatcaactagatagt

SEQ ID NO: 38395 - DNA, 892 bp, Oryza sativa
ccgcatgaattcacttcgacctgacctgattcaaatttgaatttgaattcaaatattagtttatagacccaaagtttataagtcaaaagtttacatacctgttttaaatttgaatttgaattcaaaatttttatatatagtatttctatacataatttttttaactttgtgttttttatttttttaaaatttatggtgtagtaggaaagagaaaggagaaggatgaaaggaaagagagaaagtgtattaggggaagataaggggggttcatacttctttggggcgggtatcctccccctcttgtgcgcgggcccctatattttaacgagatccttgtgtcgctaccggtccctctttaatttatatagtctgttcatcggtgggttgcttatatactggaaaggactggttgcccttattacctcgtgtccgtagtcctgcttatgggtgtattcgtgggacaccatacgtcaacaacggctttgtgggtatgggaatcggttcattccgtaaaatttacacgcgtttactatcctactatatatagcgggggcttttcaaagttacccctccctcgccgttctactacttgttggttttttcttagctgaactccttcaatagctcttgtcggaaatcactggtgcataagcttgtttactggggtgtagatttgttatttcgcttcaccatttcccacaaaatccattctctagctctggtatgcattaaaggggttaaagccctggtggtggcctaatgatgtggagcttaatctcaactccttatgttcgcttcttgtctgttccttactctctttatctatgctgtcaataatctttatcgtccgcatctctgcacttttacgactttggcgactctcgctctcctt

SEQ ID NO: 38396 - DNA, 757 bp, Oryza sativa
  unsure (1)..(757): unsure at all n locations
gaggtgataagaaattagtgggggagcgtcagaaaaagagtttgggggcggcggaatagaatagggaaggttgagtatagaataaggaaggaaacatcaaagagcaaaagcgacttagatgttaatgaggcgagagatctataacggtcgacatgcgcgtgaagggtaaaggtagaggtgcggaataagacttataaagcatggatagcaagggaggggcgtgcgtacaagagggagaatatgcaataaagaaataagatgatggaaaggaaagcgagtggtcgatggaatgcggccatcgtatcgatttaagatataaagtgggagatggccgtataggtattcggcccatcgaccccgggagaggcaaaatagacttttgcggaggaaaatgatttgaaaggatttggattcggaattgaactcgacgatagatcggggattgagatcttaagatggcacggacactagacgacaagcgaagaaacaaatttcgcaattagggtttttaagagataattttcccgctaggcgccacgacggaacgggcgctacatggagaaagtccatttttctccctcaactatagggcggttttgggtcgtgtccatcaatcgtacactccggtataaagacctcctcaacaaaagaaaaaagatcaatttaactccataagcgatgctaatggtgaggtttcctccgctgtagtgttgagattcnagtcttgtngngtgcaagcgaagtgcaaataaaccac

SEQ ID NO: 38397 - DNA, 547 bp, Oryza sativa
  unsure (1)..(547): unsure at all n locations
tgtgtgcnnattgatgatgactacccgngacgcctgcaggtcgactctagaggatcccctgattcatcttcatgttgcggtgttggaaatgccgctgagatgggtgtagcctttatagggacgggtgactttggtaagggcagagaaaatgaagctggggcttcttgaggctgttctgatgaggagcaaggtatggatggtgtggcataaactaacagtggatcagttgattgagtttccacatcatatcccaaaatagtaggaaactttggtgctaatgagcgcaatggctccaagtctaagggtagtttgtcactctctgcttcatcttccgagttctccatggtgaactcttggagaaattctggcagtagcaaaagcagaagtcattaaatagtctgaacataatacttgtatgatttcagcatgatgaatgatgtctcagaatttgatatgctaagaataagtgcgcaagatgaatataaaaaaaagcattgttcagtgcaatacaacgtagaccgaagaaatcgaataaaaagaaatagat

SEQ ID NO: 38398 - DNA, 568 bp, Oryza sativa
tttctagtaagattatatgaccctaatgcgagctattttgtgcatgatacatataaatagtatatttgatctactaatttataaaataagtaataaaaaatatatactattaggtttgataggagctcaccttaataaaaactcgcgagttttgatataggctcgagctaagttcgaattaagcctatgacgagttgagctcaagcagattgcaagtctcgagcttaattatttatatttttctttacagccctagacatcgtccaacacaaacatactcattccgttaaaaaaaacttaacttagaaaggtcgtaaaaaataaagaattatttagatttgttgtatttggagatatcatctcttattaggtttttttttgtccggagaaagtgcaacggtgaggtccgtgaggagattggccggttacacgtgctgggagtatgggcctactaggccgcatgttaggtgtgtggcatggtggtgggccccacgttcgattagagcaagtttaagagcaactataatagtgagctataagcttactataagcttatatggaggagaga

SEQ ID NO: 38399 - DNA, 521 bp, Oryza sativa
ataactagttagctagtagccagtctttagcatgcctgagaagttaaataatttagtgggctaattaattaagtaatcacgacgtacatgggaggctatgtagtagaaggcggacgcaacgtaaaggtcatcctgccctgctccgccaccaccgttccagacgccattgaagctgcagttcttggtttcgcagggcgcattcaccttcagtaacttcactacttcttctctgcacttggggtagtctgcaccttgtggtgcggccgctgcgtcctactgcttgccggtgtaggtgaaattaccttgtttttgccaaatcaacaaaacaaattaaatctcacttggttcattaaacactaaacgttaattgattatatgaatcttaaaggattaaaggggcgatgcgtatagtaaacagaacaaggaataaaccagtatctaagtaccactgaatccgcgcagaatgcaagtgctaaatgggccatcctttctctttaagatgtgcgccccagaagaaaaac

SEQ ID NO: 38400 - DNA, 539 bp, Oryza sativa
cagcaaatcatataaagaagtaaggcattgtatggagttgggagaggagtcaaggactaaaggccaaggtatctttggctagaaagcggttgtgtagagagtttgcccaagtgattctagtagcatgatgagcacacgggtaggaaacaaaagttggaggtgttggagcgaggtgagcccatgatggagcacgatgtattttagagagcatctcgagggcacggctttcttgtatccacgggttttggagggggggcttttaactatttgccactcttatgagtggtgcttaacgatttgccactaggttcacatgtcatagacacatgagggcccacatgttatagacatggtgtggcaaatcgttaattgccatgtcacaagagtgacaaatagttaaatttcccctttggacggaggtgaggtgttcaatgccttcaactccctccctcatattactacaaggagaaatgcacaatttaaccaggaaatggagatgtaccgtcatctcacgtgccactccacatactttcggtaga

SEQ ID NO: 38401 - DNA, 820 bp, Oryza sativa
atgacgctagctagctcgagccccataggtggaccatgacacaccatgaattggtaggggcagacaaatacacggactgctgcctccaatagggagacatggctaaacaagacgagagaatcaacttaagctcattagggcttatctagtgggaagatgtcatgctatttgcacgcttgatcaaccactccgttgtgcaacgtgctctgccgccgtctttccgttgtccttgaacgacataaccaatgctgttttgattgtttaattaggtcgctgatgacgcgtgttaattaagtaggcgccattgcgttttcggatataggtctagcaatctgaagcacagttcttcctcagtactgaattgtggacaagacgaccattaatttgtcattttggttggagtcgtagagattagttgatgaagcagctggtttgtcctgaagtatttgacaaattgagcaagaatttagtcagtattgttgtttgaaagtacaattgatcagcgtactatatgtacaagtggtgttatgcaagctactcctagctgcagggcactcgtttggcgccgatgatcagagccatctcaatctactcgaaaggaatcttgagcaggcaaaggtatattccgacctcaactgtaaagtttatctaatcctttcaaaatggataaggattgaaactttgaagatgcaaatgctagctagcccaccaactagtcctttgcatagtacaagaccaattatatatcagcacattcagacaagaacaaattgtttaatttgtaaggtccaatgaatcaacgacaaagtagcatgtttct

SEQ ID NO: 38402 - DNA, 631 bp, Oryza sativa
gtataatagccactcaagcctcaatgtgcccgatgatcacaattaaacaccattcaatataatctgcagagtgtcgaatattgaacaaaagagagactgctgggacttagcgtgccagtcaacttcagcatgagatatgtccgtcaaaccacacgaaggcggtgaccggatgtttacacatcccagaagacttgacaaattgctaagctctacagcatctcgtttgttcaacactcatactcatgtctagctagtcctcaacaaaagactaactaaacactttcattaaagcattggcatagagtaataaggcactcaaaagattaactttagattacaactaaaattggatatacgtaggccaaccggctaaataaatagtggtttgcacggaagcttatctacccaaaacccttaagcaatccgactaagggtagactcttattgaaccatcctgagaagaacaacggaactcgtggcacacaactaatcctgcaaaacaacacgcgaaacaagaaaaatcattagtacatgattaattaaggattaactagtataaaattgaaaaatagaattatttgattctttaaacaacttttacataaaaactttttaccaaaaatatatcatt

SEQ ID NO: 38403 - DNA, 643 bp, Oryza sativa
aaaaatgaaatgggttgaatcttaagcctcggggagtaaccggaaacataacaaaggcacagtgccatggtaacagggatatagattagctgtgaagaaatagataatcctcctataagtatgactgaaataggtaactacactaatttggcacactagtctaagatactaagggaacagctttaaggttcaaaccttgtggcttgaaaaatgaaagacacgcaaagataagtatacagtttaagctttgtgtacgtaccttcacaaggcttggtttcaactcccttgattgatacccccgatcgttggaaactttattacttgtatctacagagaaattcctggtagaatggtttctacaccagccggctatgaactaaaagcaggggcatgaatggaacggtgaatttgtaaaaggggtgtaaaatgttgtggtgaaggaaaggacaaaggagagtacctcaatatgtgaactctggatcctgcacaatgtagagaacagtaacataagtaacattagtcacttttgactagcaagaagcaacctcgttaaaaactactctcagtaacaagaacaacaacgctaaaagctcctgatttaagaatgcatgttggatcaataacaagttttgttatctatcat

SEQ ID NO: 38404 - DNA, 631 bp, Oryza sativa
ttttgcggggacttaccccacctttttataaacagatggaaacttgtatggatgccgtccgaatgacctcctgataggacggcccatacctaccttcacttccgccggaagcatacgccacgtgggccattgtgtctgcctcaaacctctaatcatagatactcctgatcccatgtcacccacaaaaacctatacaactcaaccatagagcactaactctccaaaataaaaacaaagcataaagggtgaccatgccccaaaattgtattgcatgtgtcactcttttttacatacggctcgattctattcataccccagaattacaaaatacctccataatacacacaactattatctctaacaaactctaatataccataaatctttacagcaaacttttgcccaaacatatctctaaaaaaattacatacaataccctaattaatagatacaattgccttcccaaaactctatccatgcatgacaattatcttgaaacacatcaacttgaaccctatgacttacacccagtcatattaataaaaattggctatattaaactaatcggctgtatcagctaaccccctccaactcaaactatatcaacctgaccttaacccatttggactgc

SEQ ID NO: 38405 - DNA, 642 bp, Oryza sativa
ttttaatcttttcatgcagcgtttaagttgatcaaaggcagcctccaaattgctgatttattttctgggattatttgtattttgctggcgagggaagggggtaaggggtgcacttttgttagtgaaaggttgagtatggcattgacacaatgggatcagtagtatgtcaaattctgattaataaaaatatacctcggtaaaattccttcccacaatcttcatttccaatagcaacatacttcagtgggaaccgttcgggatgccccattgcagatctaacagagccccatgttgattctgcgcttccccttgaaattcaagactatccaatacatcctataaatagaaaaaaaataattgaacttaaagaatgacaaatgcatagaaaacattttgttttgctacgatggcatctgcaataaggaaaagtcaaaccggaataatcctctacccagttctatttggatgactattcttacttttggcatttaacgtaccttaacaaaaaggttcaattatgatggtatcaacttcatcatggtggcttgatccctaaatttcaagggaaaattgtaagctggtaatgggcatgctaacaatgaaaaaaattttgttaaacaggaaaatttaaattattagaat

SEQ ID NO: 38406 - DNA, 549 bp, Oryza sativa
agtaataacagacatggcataagaaatagaatgatctaacatgtgattctgcagtgaaagatgaagtaatatgcataaaaaaataatccttacaagcaactgattgcgaagaagctctgactttgcttcctgttataaagaaagaaaaaacataaagctttatgactgtaatagtatgccgtcaaggtagaacatttggaagaaaatataaaaggtgctcaagacctgttcgccgagggcttttcttagtttattgattagggttattctagccatgttgacactttcaagttgctcaatgcactgcttaaggactgtttcctgcccttgaaggtcagaaatcaacgatgatccttgctgaatacctatgaaataaaaaaggagtaaggtgcgcatgttttgatcaagaatcgaagtgaaaggctgaaagcattatagtgtcaaagcatcatttcttcatatctggtctccaactttgtaaatacagaaagtcagggtacaggtttccgattagagtgaaatgcatggtcggtccttaaaattgagcag

SEQ ID NO: 38407 - DNA, 622 bp, Oryza sativa
tcgtttggcgccgatgatcagagccatctcaattttctcgaaaggaatcttgagcaggcaaaggtatattccgacctcaactgtgaagtttatctaatcctttcaaaatggataaggattgaaactttgaagatgcaaatgctagctagcccaccaactagtcctttgcatagtacaagaccaattatatatcagcacattcagacaagaacaaattgtttaatttgtaaggtccaatgaatcaacgacaaagtagcatgtttctttcgtgtgcttgataccagaataattaagaaacatgcataaagattatcatataaattggcttgagtactagcttgcacgatattaccatttataatttacattcttgtacatgaaaatgaaaacaaaaaaaaactcacaaattaatgccataggaagaaatctgaatctttccttgcatgggttacatcaagaattccgtctgtttgtctatctgtcatgcaactcctcaaaataaatccaaatggaacaatcagtatcttcctctctgaatctgtagtttcattcgttgaaattaattcacctctcttcagatcgatcggtaaacggatctagacgcctactagctactgcatct

SEQ ID NO: 38408 - DNA, 615 bp, Oryza sativa
gttaacgatttttagtgaactctgctgcttcacttagaaaaggttgcaatttggcatatcgagtattgacataacacataactcttcatgaggtgcatgcgatttactgctcttcttttcttgaacgaatagtgcatatgcagttcgttcctcatgaaacaggaggcttcatgatcggataattagtttcctttgtatctaaggccacacccttgactctagccctgtgtgccatagatgatagaatcttcttgggcattcccaggagtgatcctcgcgttgtctcatggggtccagatcaaccacattcctttgaaactgcatcctcaagaaacgcccaggggtcttccagctagctccacaaggtggtgggctagatgacctgggttcgaagcctcaccccttctaattatttgatattaggtccttccctaatattcgcgtctttttttttcgaaactgcatcctcatccatcattcagtacagacaatcaatatggaggttttaaatctagaacaaccatagattccatagttggaggatttcggagttctcaacttatactgatcaagcagttaccttgcacagatgcccattttctgctactacttcac

SEQ ID NO: 38409 - DNA, 1096 bp, Oryza sativa
ggtcatggcctgcaactctcagctgcaacctagaaagatactcctacttgatcgagttgcaaagttgcaatcaacgaactgttttagctttaatttcaaatggaactgaaggtttgtagcgagcacttgggagtaaagaaactccatcttgtgatgtgatgctgaaaagatcatgcatgcatgcatgcatgatatttagaataagaaaaaaatgatgcataatttatatgcatgcattgttctgtgttggatgcatggttcctgcaagtccaaaaactgcaatatggcaaaggagaaaccttgcttgcacccgattcttcggcaagaaagatgcccagatgcaggttgaaacgtatatctttaaatataatttgtatatagcttctaattttactttctttttgcaatattttgcagtgcatgcaagctggcattccaaatccatggctggcctgaaaacttattagttatcagttgctgctgctttattttggttacatctctcaactggcagatggtaactgcgtctcaatcttcaggtttatttattcatcgaggcattattactaagttatatatatacatgagttccataatgtaaacatattgtgcacaattttttcttactgaagagggaacaaaatgtcagagctgagtaagcagcgctagctgttttctaattcttcagagctgccattacagatccaagaattaaacataagtaacaataaactcagagcagatagatatatacaaattaaaatattaatgttgcgctatgctatacatgctggcatttgctactaacagctggtttgcatgtataattttttttcttagctaggtaacgtagatatatgctacgcgcatttttgtggttaatttcttttttttcttgaaactttttatttaatttgtggttaatttatccaacgccaactagcttattagtgtatatcacatgacaatatgacatccccccatggtttgcatgcgccggtccaactagcttggcatatataaaccggccgggctgcacgtgattatctgacagtgtcaacacaatttctgacagtagttagctagcttgcaacaa

SEQ ID NO: 38410 - DNA, 589 bp, Oryza sativa
caggattgcacctgtggttgctgcatgaaaccgtgggttggtaacttggtatgccggagggcagaatcgggaattaacaggacttaattaatcgatgattattaattaatagtgactctagtctagttgatcagatcaatgtatatatccatatacatgttgagaattaattagcaatagtaggtggagtaagaaggaagggtgagattcgatctggggttttgtgtacattgtactatgtggcaatgagggcaagaacgtgtactgtatatagctttgcagcctgtagttgtagactgtaaagacgcgaggtatacatacgcgtacgcggtacggcggcttatgttgcgaatgcggggcgtcgggagatgccacgtagagatgccaggtacccgttcctccagggcaccaccaggcaccagcaggctgcatcgtgattcgtgaagcacaggaggccacgcacggcggaggtaggcggccggagtagtagctggccagccgccgtcagatcagcttcgtcaacaaaatataatggatgcttgtccggcctgcaatcggccactgcatgcctgatgcatgcatcgtgcag

SEQ ID NO: 38411 - DNA, 768 bp, Oryza sativa
gccagtttctctctgttttttttttgtgaaatttgactgtttctcatatttgatagttcaatcaataaatttagtcacgatagataataaagcttagtgaatacaatcgacttacatggaagcgctttctaattaatacaaaaaatcatgtaaaactcacattgtgcaagggcttggtgaaataataggataaggggtatatatacaatagagtaaagtccatcaccggtccctaaacttgtactgctgtgtcatcctggtccctaaactcgtaaatcgaccgttcaggttctcaaacttgttcgactgtgtcatcccggttcctaaacttgcagatcactcgtttaggtcctccaacttgttcagttgtgtcaccccggtccctaaacttggatttgaatatcatctgggtcaaataggacagtctaaagactttatatttaaaaataattcataacttgttcatatgaactctaatgaagacaaactttatatcaaacttgtagccctcgacgcgatctacaactttgtagttgaattttttttattttaagtcatttttttgtcccaaaatataattttaaaattaaaatttaaaaatctataaacatgcaacaatattttgggaccctaaacagttttaattcaaaaacttttcaactacaaagttgtaggtcacatcgagggctccaattttgatataaagtttgtcttcattagagttcacatgaaaaagttatgaattattttttatataaagtttttaga

SEQ ID NO: 38412 - DNA, 590 bp, Oryza sativa
tacttttgacctatttatgtatatatatcagattgatgtttaaacaatctaattctctttcttttcttttgtgtgatcttaaaactatcttgtgcattatagtcttaatcactaaagcatacattgtatatatttttagttgtttaattacgttattaaataccaccatagcgttagaacgggcagattaatagtaatacaggaaattaaagatcgatagaagagtagtggaactgcaatgaacacttgtgcattatattctccaggacagatgtgacgattactgtcgcatatatatcttgcaagcaatgcaacttcttcttcttcaatatctcgagtgcaaacggacacgcaagagcgcatcagatatatatatatatatatcgagaaatcataaatgagctgctagtattattatatatgcaacattcaaactcaagctagatatatctgtcgatcgatccatggatgaatcaatatgtttgtgttgcagtgcacgcatgcgcatgcatttcagtgatttctctcgatcagaatcaggtcagatcagtggtaaatgagtcacatcgctatcgcgcttgtatgatcga

SEQ ID NO: 38413 - DNA, 939 bp, Oryza sativa
tgaaggaaaatataatgggaagggcatggaagaaatcaaattaaaatttcaggggtatagaagggatcagataaatttcaaggatgtgaaagggattgagtgagtttttaagggtatacagggaatttactctaatctctatggagtgcgacatgccatcttctttcgtcaagcaaccaatcgtcctaccgaattggctcgtcatctatcacgccttccattcctcgtcaaatcctattacattaatgcttagattttttttaagaaaatcctattaaatcatcaattaattaattaatcaatgtgccattaactaagaacgtttaattgttaatatgtctatcgggatgggagatgatctcactcgattttttacattttaactctttttaaaaacttattttataagtagacccttaaacaaaagacaacttcgacgttgggcaaccgcgggcgcaactatgacctccaaatttgtattagtccactctatactctgagtaggcccacattcacatagcactctatttataccttcattctcatttctaaaagcattaacctggaggtactatgtatgcttgaaatgaactcggtatataagttgacccaaatctatctagactctccatgtggagctcttcccaccaaacgaacacttgggtctaaaccggaacaagaagagtcgcgcaacgaaacagactaaatgggctggattttacactctcactccttcatgggttgatgccctagctgcctagcagctcaccgctactcaacagccaaatgcccagggtatcccctcggtgctacggcgttgtgcctgtgcgtcgtgtccccctccatgggccaacacgcacgcacacttgtgtaacacgggttgaagttctaatatcacatgtaacacccgagacacaaaatcaacaatagtccactcta

SEQ ID NO: 38414 - DNA, 1483 bp, Oryza sativa
tcgcttattctgtaggttattactattcgagactttgtggtgctagcctagcaccctatcatttatcattgcttgttcatcaatcaaccccgtaatatttcaatcatatttcacgatccattactagcctgattgggacactgattaaggtactttacgccggagggcttttcttcctttagctggtgatgttactgtcagggaaaccttattgctcaagtgatcacattactgagatagatagcgattgctatattaggacaaaacaaaaaaaaaaggactacacgactatgcactccctttctccctctggggtctttgtatatatcttggcttagcactgaagtatacctggaaatttatggcacctacataatttgcaggaaagtgatcacgaaattgcatggcgatgtcttcttcatgttatcctggccaccctagaaggaaaagagtgaatcgcaagataaatattatccctattgttttacttatacttatttgtatcacatagcaaataaaaaataatttaaggataaagcttttaatatgtgtgttctaactatgataaaaaatcacaaaaacaatttcaaaattaagttttaagattcaatttttcgcttataagtataagcataagtgaaacaattaataaggtctctgcttgcggaattgggagctatataaataggcggaaaattaacttctaaagctgttcctttttaaccaaatcatctataaaatcatgccaatcattgtcaaattaacaagtcagtaagattgcaatatgctacggatcgtacgataggcattacgtcaatagtggagtaccacatatggagcactgatgagaatgagatgaaggcatgcaatccaaaagcaattctcctttagtttgcgtgctctgatgaaactgtttcctgttccttttctcttgaccaacatcttcaacatatgctgccacttgttcagatttttttttttagaaaatgggtaaaaaaagctggcctcttattcaaccagatgtacacagccaaaccacttgttcagatacattgtcgaactacaaaattctagaaacactcttcagtttgttaaatatacacacggcaatgagatctccttgctactactgtccattacagtctattactactctttagctagctgaaaccgaccttttgctgaaagtaatttgttttggtcaagctagcaacgcttgagatttccaattgtcggcaacgacatcatgttggcccatagataggttgccacatatatgagtgcttgtttggctcttgggggtcatggcctgcaactctcagctgcaacctagaaagatactcctacttgatcgagttgcaaagttgcaatcaacgaactgttttagctttaatttcaaatggaactgaaggtttgtagcgagcacttgggagtaaagaaactccatcttgtaatgtgatgctgaaaagatcatgcatgcatg

SEQ ID NO: 38415 - DNA, 775 bp, Oryza sativa
agggcgaattcgagctcggtacccgtttcctgtattgtgtaaggagtattctgaaagatgttcctgagactatggtggctgtaaaatactgagagtgttccatcatactccctatataccaaaaagaatccaaccctagagataaatctggacatacactatatacagatttaacctcaggattaggttttttatgggacaaaggaagtaactttaagtagtgaaaaagtttggcaatcattcttggtttgataagaatcttaagcacatcagattttgcatttgggatgcaaaataatagatgaggacttactctagacattaatcattttcagggtcagggcatttgaattagcctgatgatcaacataagaaaatctgcatgagatgaacagaatgtactcgacaaagaactgggctcttcctgggaatacatctgttttgttattttgatattaacactagcctggagtttgtacttgtgaagagaagccagggagttgatatacgaacttatcatttaaagatgcactgttcatttggtccttgtttaccgaacattctgcagtaagcttcttttaccagggacttgattgatttgctcgagaaaatcaaccaagaattgctatgcttataagaccatgaatttgatcgttcgacaaactcaagtgttttacgagtgccaggcacatcttttggtcgaagaatacaactcggaaaattgatttgcagtcggcatatcgttcaattcaacatgcagtctcgcagttggcat

SEQ ID NO: 38416 - DNA, 602 bp, Oryza sativa
ttttatacttatattcaaaaagtttgccttttttactttttgggcctgttcagattatagctaaaataaatcttatcaagttttgttaatgctaaaattttagcaagatggtaatattatcaaaattttggcatgatttcttatgtattgactaaatttgacaacaaactaaacgtagatatttttttgataactttgtaaaaaaaagatatgattgaaaatgacatcaaagggaacaggctctttattgacatattttttgtaaaatgcaaaatggagattgcaaagtgccaacgttttttcagcgtgaagttatgagcaactgcacttatcgtgttcttaaaaaaaatgcactcatcgaatctttctttaaaacaagcattgaaaacggaattcacgttggatgagttcttaatataaactagatgaaaaccccgccgtgttgctgtggaaaatgaactaagttacataatatgcaaagatataatatgattattaaaataaaaataaattaatacttataaattttaagcctaaagataattgagattgcagagaagaaagaagagaaaatttaaaccatatctctcttctcttattaa

SEQ ID NO: 38417 - DNA, 576 bp, Oryza sativa
ggcgaattcgagctcggtacccatccaacggctgataccactccactgctcttctttataatttaatggtcaacttcagctcggaagccaaataaaataggagtagtataatgtggtgtacgtgtacctctgttactgacgagttcagcccaaaggccaccacttccagcgtggttaatctcctgcacaaataataataatacagatttcgataaggaaaaaagcaaagcatccgcaggagaataaatggaaaaagaagaaagaaatgaaaagaaacgagacgtagctagctagctagtcacctcgaagaacagaccgaacagagtgtccggcattcttcgagcgacagagtaatcgacatggagagacgccgtctccaacgtctcggcttcgcatctgctgccgccgccgacgaagaaaagaacgaggaagacgacgacgacgacaatggcttgccgggacagcatgctcctcgtcgccggcggccacactctcatcattctctctgcgaccacaatgatcaatggattgggtacgttgttacttgcgagagggaggcttgattattcgaggttg

SEQ ID NO: 38418 - DNA, 769 bp, Oryza sativa
atatgtattgaccaccagccaaaattagctttttttcatgctttccattcagatggaaggtatatgtggtaaccaccaacaaaaattctttgtacgtcgggcctcccggaactccacgaaggcaccaacaagggatactgtacgtactacaagcttattagcagggtaccattgttttgccacaacggccacgggtaggtcgcacggttaatcttcttatctacgcattaatatgacgaccccccgggcccgcgcggccgtccaagagaacggccagaaccgcgcgaccgcgtgccttccccagcgtgcagcgccgcccggccggcgcatggggtggctgggtgacggcagaaacacaataattgcggcgcgttttgccgttttgctcctgtcgcgcggatatatatcggatggcccggttaaagtggtctttcgcgtcgcgggcgttgctttcgtccgcccccgcgcgtcgtcccgatcgatcggccccgcactgtatcgcgcattatcacggccggggcgggctcgctcgctcgcgtacggtcggtgttgcacttcttgcaggtagtgcctcgcgagatcggagatggtgagtgctcgcgagcgatcgagctccatgtatctgcccgtgtcgcttcgtttcctcttcgttggtcgttgctttcgctttccctttttgtcccgtaggtgatcggagttcatagcgcgttcgggcaactaaagagtcgacgtgcgggcgttcacaatgagtttgtatatcaaagccgcg

SEQ ID NO: 38419 - DNA, 532 bp, Oryza sativa
tcggcacggccagcttcaacgacagcagcctctccacctcctccttccccagcctcctcaccaccttcttcctcttcttcccgtcctccttctcgcgcggccgatacgccagcaacacctcctcatgatcatcctctgtcgtcgtcgtcttcttcttcttcgccgccgacaccagctcgaaatggggccgccgcttctccccatcggcgcaccccctcatcatcgccatataaaatcaaaggtatttttgattattattctgtgatgaacaattagacattggagattattggttttgttatttggaatttattcacgaagtggttttggagatgattggattcacaggtaatcgcaggattttattatttcatgtgaccggtcagaccgggctgtgtatgccggtcagaccggcggtgatcgagcggtcggaccggccagcccacggtctgaccggccgacactgtgtcggtttcggtttcgggttgtttgtttggatatccgtgattatttcatgattatgacttctcga

SEQ ID NO: 38420 - DNA, 600 bp, Oryza sativa
ataatgttggttttggagtatttaagatgtgctgctgcaaatggtgaatggtgtgtattactaagggcacccacaatagttatctataggctctatacaagagattcatgtcagcatatttttctacttggaataaattaaatgaagagagagagagcaaagctatctactaacctggagatagtctatagagaaaaacgaggcaatggattagagagctatagatacccatgtagatatactattgagttggtttactattaatctagtttattgctgagatatacatattttatatggagagcaccttattttattattgcgagtgctctaatagcttgattagcttagcttaagtagacaagccactttagaggaacaatgaagatcagtgagacaacgaaggagaggggagtcaggggacacgagatttcgatttcattggagagaaagagacatacaacgtccaaagcaaagcaaaaaggagaaacaaacaaaagcaaaaaagaagaaactagagagagagagagagagagagagagagttgtggaatccaaccaaccaatatgcgccgctcctcttcactctccaagcagagca

SEQ ID NO: 38421 - DNA, 1047 bp, Oryza sativa
gaaagattaaagactaaaataacccaggagccaaactttaggaccatattagctattctccctttttttttcccaattttctcttctcttccagcttctgcttgttgatcgagtcatcaactgaacccaagacagagcagactgttgtaagcatggcattggcactggcacgagagagacgtgcactgcagtgcttgtgcaacactgggcattgcaggcagagagcacagcacagtagtaactccctactgtacactgcaattaccagggccaatttacaaaccaaaatgaatgcattcacccactcctctgagtcctgctcatcctctcctgaccgtattactaatgctaccaacaaacaaacaatcaatcagacgacatgaagaagaagaagaaagcccacacagttccattccacaatttttttcaccgtctgatattatgatatcatatgacagacacttcatcaaggcaatgcagtcctcccaacaccccaggtccacaatgtgataagccaggagcaacgtgttgtaggtatgtttgcttggctgtttgctctctttcccagtctcacacacatcacaaacagtgtgcaatttgatttggtttggtgctccatgattggggaatattcaggaccatggcactgcatgttcctttgccccactcatgcaatcaccatcccccatttaattcattcattctaagtaactctatcagcaactagtttcagaagaaatgctcaactaataatcactgtactctcttctggcaagagtccttgcaaattaccctttataactaaaagcatcagggagtagagggaagttaaccatcacatcaggtggtgaagaacaccaaacacaaagaaagagcccttctctttcctgcgatggattgaagatgttcaacaaccacttcctgactatcatcatcattccccaaactatagctagcaaaccccttttctgcaactccaaggctgcattgcactgcactgcacaagccaaagggggtagagaggtcagtgtctttccaagctgacct

SEQ ID NO: 38422 - DNA, 617 bp, Oryza sativa
ctttcccacttctgggatcacaaaagaccatgaagaagtttgataccacagaaccactagaaagttgcaccctttttaagcctaaaaagttggccataatgacatacttttaggccagtcacaatggctagtgtcattgcacggctacccaaaatattataccatcttctctcaaatgaaatcttttatgaaacaatccccacagtggaggggtttcactttgacgtttccaagactaagcaaagcatttaattgatacaagttgctgggatcatttgtacccaaaatccggcgcggcgcgggagaatgcggaggtcgcacggcggaggcggacgcaagagatccggtgaatgaaacgaatcggcctcaacgggggtttcactctgttaccgaggacttggaaacgacgctgacgagtttcaccaggatgaaactctttccttctctctcatccccatttcatgcaaataatcattttttattcagtcttacccctattaaatgtgcatgacacaccagtgaaacccccattgtgactggccttagggctccaaaacgcaaatctttttttactcctccttaatcatcctatggtgatctagggctagtactactaa

SEQ ID NO: 38423 - DNA, 553 bp, Oryza sativa
  unsure (1)..(553): unsure at all n locations
tgttcatgtcttgcacataatccatacctcacgtataagatgggagaaaaattgtgggttagtatgcttgcatatgtggatataccattccctgaatatatggttatgaacttatggttccttaatgttgaaaaaaatgtttctcaagcttgtgatgactttgttaattaaggtttaaagagttgagggatgaataatgtccagttttgaagtttagggacgaattttaggctttgatagagttcagggacttaaaataataaaatgtacttttctcttagttaaatgacaaacaacttcctgtttgttgcagctgcaattcaatgtctaaagaaaaagaagttgtatgaaacacagattgagcagctagcaaacttccaattacgggttcatgatcaggtgatgaaagatatgtgcgcatattaatcttgaattttgaannnnnnnnnnnnnnnnnnnngttgaaatgaattgacaggaagtagtctgttttggtatgctagataataatgcttgagagtgcaaaggcaaccacagatactgttgatgcttt

SEQ ID NO: 38424 - DNA, 1546 bp, Oryza sativa
ccgtggggctggaggacggcggcgggagcaaagcggaaagtgtggtaggagaaggtggccagtagtggcgccccgccgccggcgacggggaagacgacgaacagctcgccgccaccggcttgaggcaaagaagaggagagggagggggagggggccggccgggggggcctcgccggcgccgttgacacctttcggccagccggcgaggccgggcggcggcagcggtggcggaggctgggggaagcgctgaggagcggcggcgtaaggtatcgggagaggagagaggatttttagggtttggatgcctgcacgaatcttaaagtaatcgggtggtccaaaatttgcaggatttgtaagggggttttctgtcaaatgatctatagacagtacctttttttataatgaaaatcattctgacctttactttaaaaatataatcaattattacatagttcacgtggataaataaatgtgaattactacaaaattatactctacctccatcctaaaatgttgtaatttagaataggatgcaacgaatctggacatacctaaaatattttagcatggaggttgtaacaaattaggtacgcatatggatatagctagctaggcttatggacgtggcaaaattctttccgatggccatctacacttgtacagtgacgtgcatgcatgtgcctagcttcttgctgtcatcgatcagttatcgactagtacgtacgtgcatactgtagactggccgtcgtgcaatgaccaatgcataagtatgcatccaatcgatcaaccggccggtcatcagtacgtacgtgtgcccaagtccatccagagcaagagcaagagcatcagagcgtggcagtcgcgcgacactgctacgtactgtgaaagctgtgacacacgcatactccctcccagggccggtcctgagtttttgtggcccgggacaaaattaaaaacaggggcccctgatataaacatttaaataataatcaataaatgtaccaaatatataaatacttcattccaaaatcaatatccatattgaaaacttcatatatatcagcttaaaatttgtttgaacatttctaaatgcatagttactaaagatggtatgaatgtcaatcacatctaaatcatttactcaatgtataaaatgggcaaaccatttaaactttctagaaggtgtgataaaagaacaaactgatgattgagaaaattaatatactaatggctaaactcatataaattacaaagctagaaaagcaacatattaattgaaacaaatctagatcttactaattagtggccagtgctaacatcaatgtacatttgccataggagacagacaggagtagtgcagtacacatgagcagagcacccgagcagcggcggatggcggtatcaggcaatcaactgaatgtggccctagaggaatcaaatagacagaaacggggagagttcctgcgtgagagtattatggcataatacccccacaatcctaaagatgagatagtattgcattcgtatcatgaattcatggtatgct

SEQ ID NO: 38425 - DNA, 975 bp, Oryza sativa
caactagttgtactactgctccctccgttctagcagaaatcctgaaaagtgaaagtgagaggtgcacaacaagaaaatatttgtgcacctctcaccagaactactccctccgttcgaacggttttcattctagtcacatccggtggtcacgtgcatgtagcatgtgcaagtgcaacaagtccaagtgtacaggacagaatggcatatatgcaggcacgagagtatgcgaaattgtgatatcacagcaggcgatgcagatggctagagatatactgcatgcagcagtgcatgtgtgtaggcttatgcatatctggatggatcagcaaccagcgaaaaatacttacttgtccttgagcagttcacgtgacttgttgctgtgctcgatcgctgtatatatgggtcggagtaacagtgctgctgtaatgctgtactagtactataaagctagctagtgtagaaagaagggaacaatagtccatataaatggcagtggtccgccggcctctccttcgttatcctagttatatcttatccatatctaagttagtcttttcgaatgtagagagtatttggtctcggccattaattcacttgcttgctgcgtagtaatataattcattttcagataatcaatggaataattaagcattccaaacgttgtagtattggcatatatataaatatatgccgtttcgtattactacaaaatttccacatatcattcattctcgatcgatatctatctagctatctactgcttaggacaatggctaattaattgatcgattgatgatgcaaatatgtgtactgctacatactatactggattgaatatgtatatgatcgacagtgaaatttaattatagctgaatcgataagaggccgtggatcaacggacgttactggctagctctagctaggtcgtgagaaaatgacatgaatataggccgagtttagttacaaactttcaacttt

SEQ ID NO: 38426 - DNA, 954 bp, Oryza sativa
aatatatgccgtttcgtattactacaaaatttccacatatcattcattctcgatcgatatctatctagctatctactgcttaggacaatggctaattaattgatcgattgatgatgcaaatatgtgtactgctacatactatactggattgaatatgtatatgatcgacagtgaaatttaattatagctgaatcgataagaggccgtggatcaacggacgttactggctagctctagctaggtcgtgagaaaatgacatgaatataggccgagtttagttacaaactttcaacttttccatcacatcaaaacttttctacacacacaaacttctaacttttccgtcatatcgtttcaatttcaatcaaacttctaattttgacgtgaaataaacacacccataatgtcgatctgaatatgggcgcgcaggttgtcgacagaatgccgattatttcgggcgacaagcagtaaaagttcaaactatatatatgtatactacaacttaattatcacatgcgtgtagctatcatttcgatggatggatcgatcaaatgaaggaaattaacattatatcgggagtgcagagtgctgttgctatagtgtaacatctggcgtttcatgcatgtcccgtgatacaccagtaataccataacaacaccactctttggcacgaactgtaccttcacctagctagttttaattgctagcaattggcttgtgagtaatatattgaagctaattaacagctcagtcactctactgtgtagtgtatactgttccggcagacgtgcataaatcctgactgatcgaaactaatgcaggtactggtggataggcatgttggagttcatagtcataagcctttttttttacggatttgctaaagctccgtcgacagaaaatccaacctcaaatcttataaattttggatcactggatacatgtgcttcacga

SEQ ID NO: 38427 - DNA, 593 bp, Oryza sativa
cctccccctcgcgacaagctaatcccccgaagaaacttgtgcttcttgcccggccaagatcgaaccaatcctggcgcagaaaaaatcccccaaaaaaagcgagaaaatcaggaatttggaagtgagagattgaagcttccgaaggttttgggagggagagtggcgtgtaccccggtggcgagctcgtcagcttgaattcgccgccggtgagcgagggaaggggccgccaagcccggggcggccggggaaggacaagacgagagggtttggttttctttttttttcccctttccgtgctgcgtgtgttcgctgcaagcctcttgggttcaagagggcagagggtttttcacatcagaacatgagagggtgaaaaaagaaactgaggataatgttattggattataattttatcaaagatagctataaaaatgaattaaatagataatactattggttttattcttgtgagatttgaaaactcgtatacaaatatgctatacattttttctattaatatacatacgttaaagcgtgttatttgtttagcgtacaatgcgggctatattgaatatagccatagcatttatcacttg

SEQ ID NO: 38428 - DNA, 500 bp, Oryza sativa
ttgcagatgtaattggtgaaatactgatggttttctctgttttctgtttgttcaaatggagaatgaattaatcggatatttactcagtttcagatgtaactgatgaagttttggttacagataagtgtctgttattgtacaaaataagcgtaaatttgatcatatctttgatcttgctctaccaaaatggctcctcccctgcactaacattctaacaatgtactgtatagtaagtttcagttgctgttggtcggtgaccttgcctgtagttaatagtagtaagtcagtcaactcgtgtgcttgtgctgctagctttcgttttaacttttaactggtgtgctatcaactattcaacttgcctagtcgtccgtgtaccttcgctttcttcatttgtccattaattgacgctgtgcaatttgctgacgacaaaaacgaaatcgtccaacgaggttgctgagagttttctgcccccgtctcttttataatttattcaccaaacg

SEQ ID NO: 38429 - DNA, 671 bp, Oryza sativa
aattcctgcagcccatatatatatatatatatatatatatatatatagtaaatttgtttggtgctccatggtgcccgggcaccattgttgaaattgagtacatacccaattcaaatgagtatgaaactttttcaattcaaatgagtatatatatatatatatatatatatatatatatatatatatatatatatatatatatatatcgacatataaatacttctttttgacgaaaaaagataaagccagtctacgaaaaatacatggattgggtgggccaaaattttcaaaagccataaaagatatacaatgaaagagagaaaagtgagtgtgtgtatcttgtggatcatagttaaccttgaaaactctatggagcaatcaaataacatattggtaaagaatcattcgaagaacttacgaagcactctacaatatgcatcgacacaccgcgcagtatagctaaatccaatgtataaattgaactctaagaagctagcattcatagagaattatctgtaaggagtgtatacaaactatgatgatgttctctaaatccactgagatgagaaaccgaatgtatggacatgaatgaatgtgtgtcaagaaaaagagaagtccactatgctcaccagattcatcaatgcatacacaatcataattaggaaactatg

SEQ ID NO: 38430 - DNA, 551 bp, Oryza sativa
ctaaactcaaagttacaaatctgtattggaggctcagaccaagtaattgttacacttaaattccactatgaaggacagttagtagtaccagatggtaaagctataaactactagtgcaaatttgtcagtggaatagggaaaaaggacgttcatgtatgattaaagtgatcggtggggaacaaaaggttaaccaatcaccaggtagcatcaagtacagttggaaattttcaaacattgtagctggcatcagccaaaaaatagtagttactctaatcttgcgaacaacaaaaataatttggagctgaaagacctttgcaattttattacaaatgaaactaaacaacacagttcagaattcatgggtaaacttaagcttagacatagcagagctattcaattcatgcacagttcttctgggcttctggctacacggcactcgtacgaaaattaaaactgaagtaaaggcgcatgaattcaattcactatcgggacatgttttctagtaggttcgttggcaaatcattgctagtatatactcctgcgctaaccac

SEQ ID NO: 38431 - DNA, 564 bp, Oryza sativa
cgattcatcgcccttgaccatcccaatatagcaagctccatcgcaagggccttgtccaatgcgatcgtccagctacagagtatcccgttatctattatgagcaaaagggatcccatcttcaccagtgccttttaagaggatctcttccagttggtatatgtcatgctacacatgagctttgccttttatccccaatcccattggcagatgtacctttactgcgtcgctgatgatcggcccacagtgagttcactgaatgccctgtgctaagattcgttgcaactcatttctagacagctaagcattccactccatttcgggtcatctatggtaaggacctgctagtccttcatgtctatgaagctggttttgcttgggttgtggccatcttcaatagcatgataagtttctggtggagattgcagcagctgtggtaggctcaaaccaccatggtgtttcaacacgatggccagcactgcgatgtcgatttcattgtcgatgagtttgtttggttcaacacacaacactggccagcctgctcttggctaccaatacatgggtgca

SEQ ID NO: 38432 - DNA, 691 bp, Oryza sativa
gtattttataacactacctaagactatactactataaaccgataaaacttctaaaatttataactccctaatggaacaagataaaataaaaattctttcacctaaattcattttagaccagtacctaatcactgtgcataaatcatgcattttagagcattttagattttcagctctttcggtgtttaattgcataacgtgtcctttatctagataactagacgaaacccagcgtattgctgcggaaaactaaggataatccatagaaatagcaagcaaagatatatcccacaatcaatatagtattttgtcaattcatgcaaagaatgggccaatgtatgtacaatgaacaaatttgagcgggcactgactggatccatgggatagaggaatgagtggataaaatttcctccctaaaacaccatgggatcatccaagatttctaagggtgtatttgcactgacaataagtaaatgcatgtgcgtccggtttataaaagttaaagcctacgaaaaccttttaatatcttttttgatttatgacaggttctataacagaacttgggcaaaaagtatatcaaatagcaatcaaaagaatggaatgtatcaggacatatataatacccatattaacctgattataagcataagtgaaaatatatgcatgatgataacttttgtaacaacgtcgt

SEQ ID NO: 38433 - DNA, 867 bp, Oryza sativa
cccccccccccccccgaggccccaaccaccaacctcaaccacaacaagagtgaagagaggcttccgcttcctcttcctcttcttcttcctttgccggctccccgtcgaccctcgccgccctcgcgctcgtccgcacaagctgcaactgcaaccccagcatccaccctcatccggacctacccaatctcctagacgacatcaccgtttcagcttccccggcgagcatccaccattccaccacctgctgtactcctcagcttcgtccttgtgagaataagctgttcgataaaatgtctactaaggttcaccagcttgtcttgctgtgtttcactgcctgttaccattatgctgcgtgcaggataccacggattaaccttatataatcaattgtagcaaattgcgtacatgttctgatcaacttccttttcgcagtttctcgctacatttttacttcttttttttttacagctcggccttatactttactccacacttccacagtgagtggcatcgctacttttcaaaagctcttggaaggaaagaaaacaggctcctaggtctggttgcacacataatagtatgtatgattcacgcatgctgtttctgtagatagctgtcattggattaagtcaaactgttttgtgatccaacaatgagtctttcatgaattatgaaattggcaaagctcctgattttttttatcaaaataacctaacaatgagttcttttttttaatactattacaaataaaaatgcattgacttcctttccctttttttcgagaatacgcatcgtatctttgtattaaggagagggtaaggctacaacttgccaatttacaggaatgccagaacattaaaaaagcga

SEQ ID NO: 38434 - DNA, 1701 bp, Oryza sativa
gttaacagcacgtaccattttgctgctatcttgctttctgaggtggaagaggacggtaggtacaacagcattaaagagaaggccacatcatatggatctggaataaaaactttccggacaatttgtgcaagctttattgtatttttaccccccccctccgttttgtaaaaaataaatctattacacaacgtaatactcccttcgtttcatattataagtcgttttaattctttccctagtcaaacttctttacatttgaataagtttataaaaaaatatagtagcatttttaacacaaaacaaacatatattatcaaaatatattaaatgctagatttagtgaaactaatttgatttttaaaatattgctaattttgtttaaaatattgctaatgttcttattatattttccatatctatttcacctgactaacaaacacacattgcgggagaagtgctctttagtccctgtttgtaacctctttagtcccgggttgcaaatgggatgcccaatccaggactaaagattcctggcccctgacaagaatataaccgggatagttggtcaccaatcgggactaaaaattataaagtcccattgtgctaatgtgatttttgaatgacccgacaaagatcacttctacagtagtgaaaaggattttctagtggaatcttgtttgaataatttgttaacatcgtggaaatattgctttgccctctctctaaatggaagtattgctttccagcaacgtatcccgtttgcataaactatgcgtacaattttgaaggtacctttttcataccaaaggtttcatggagtccttttagacgaatccttcgtgcccctttttggtttttttttcttatatccaaatcaagaataatacttgaatgcatgggaaccctaaggttgcaaaccgcccaattcctttgtatggctgtaccttttttttatatataattaatggtgcgattgtaagagttttgacccaatttcccttgtactataggtcaaccctcccttttcacagtgaattgcaaaaactcactatctcaaagtagggatggatactgagttggtttggctcggtctagttcgttaggtaacgaggccgacggctcgagctagctcatttagcttgtaagccaatacacccatgactatctttccttaaaagattagcatcaaagatacagtagctgccaggaacatcctgtgcaattgaaaaaagaaatcaagcaactggcaaataacaaagtcttgacacgaaccttttgtacacatcaattcaaaatattgcatcatcaaaacaatcgaactctaattgaaaccaaccaaatgaaccatcaaacaaatcactaagccaaaactaacattccgatcaacttacagtatccaactgccgacgacgacgataacaagctctattaattatttgccactcttacggatggtgatagatgatttgtcactaaacccacatgtcatagatagtgagtgacaaaataattaattgtcacatcttaaaagtggcccaaagttaaatgtcccctaatatttgctccgtgatttggatcttggtggcgccggtgcggagttgcttgctcgtgctcgttccttctccatgatgatgatgcagaggcggagtggcacttgttgcggagtgagacggcaggatgacacaacgacgagagctcgtg

SEQ ID NO: 38435 - DNA, 690 bp, Oryza sativa
agaatctcagggcacaaatttgctgtttgagaaaaatgctcatttggtacttccactatcttttccaggactgcaatctttttttcttgccattcgaatttactgaacaaattaattaagcatgcttgcgcaagcaaacaccattctattttattctcatggatttccttgggaatattccattgaaaaaaaaactcttttccttggtccacaaaaaaaaacacacactgttttataggtttccttttcagacatgttcattgtgttcacagtttcacaccatttttttttgtgagacggtacaaaatgcaaattttcaggaagatgcctgcaggctggtcaggttacaatgtggcattgctgctttacggtcagcaggctagcatgtttcctgtattgtgtaaggagtattctgaaagatgttcctgagactatggtggctgtaaaatactgagagtgttccatcatactccctatataccaaaaagaatccaaccctagagataaatctggacatacactatatacagatttaacctcaggattaggttttttatgggacaaaggaagtaactttaagtagtgaaaaagtttggcaatcattcttggtttgataagaatcttaagcacatcagattttgcatttgggatgcaaaataatagatgaggacttactctagacattaatca

SEQ ID NO: 38436 - DNA, 543 bp, Oryza sativa
tctcccttatctttgaaaaccggtgcaaataaactccttcaatggttttgcaagcggttttatcctacgtggctcttatgggacccacatatcagtaagagcaaaatgaaaaaaaaaacatctcatcctttttttcctcacctctcccgttctctatttgccggcggagtagtggtcggcgagctcctttgtctacgcgcgccacggcaggcggctccttccctcacgcgcagccggttggtgttctcttctccgcacacgccgtagccgcccaggtcctctccacgtgcgtgatcggctgcagcgtgggcgcgataacgtcgtggaacaagtcggccctctcatgcttctacctcttcctcctccggttcttcttcttgaaatagactctatgcacaaatagactccaccctgtcgtccccacagcaccagcaacccatcacattggagctcctccccgcacggaatgacgccgtggagacgagccaaggagcaaagaaagacgttgcggtggctaacgcgtcctcccacccatcggtccct

SEQ ID NO: 38437 - DNA, 591 bp, Oryza sativa
atccacagcacggagtggcggtaaaattgcatttagctcctgcgagggaggagggatttggggattttggggggtttcggggtggtactgtggctgaaaggggctaactacaattttaccaccacgctgtcctgcaaaaggggggcggatgcaaaattgttgcctatgtggagcgccacgtcggcagtcagcccccagtcaaatgaggttcagacctactgtggttcgttatcatggacgtaaatgtgcaattttcaagtttacggacctaagtaataccaacgctctagtttaaagacccgccatgtattttactctttcagatcattagagctaggagcatttttaataggaaactttgcactacagtattttttactctgtaactcattaaaatatttagtcaaatttgaaggcagcaattgtcaataatcatggcctacaggcctagtgtgcactataaaggactcaaagaactaatccaatgtaaaaaaatttaaactcgctgatgtgctccacaaaataaggatatgtattcttaaccaccacctatgaaaaccaatgccacaaaaactgatttctttcctttat

SEQ ID NO: 38438 - DNA, 569 bp, Oryza sativa
tcgactctagaggatccccaccagcagaactttcatgcccaacgaatggtgctagcagatcaggtagaaataacaatcacagctaaaattaccaataaaaaaatgatcaaacagttgcattaacaacgcataagactaaacagtttgtctgcacaacattagagtactagagccatataaaccagttcatcagtcatcaatagaaagcccgaaatcaatcgatttataactaaaactgcaattgcgtagctaaagcagcgagttaggctatgccaataggaaattctccaattccacatttccatcgaacccgatacgataatgatgtcttcatgcgaaccattctaccaacccctagtttttgtagaggaaaaaactacctaccactaccactagtgaagcagtgacaagctatccaatttcgcaaaaaggaaaaaaaaacaaacacaagggaatctcctcttctcaccttcagttcttcttgggcttgcacccggagacgaggtaggccatgaggtccttcttggtgagcggctccgtcatctgcaccgctcctccgtcggggggct

SEQ ID NO: 38439 - DNA, 645 bp, Oryza sativa
cagagggtcttatattcaatacaaaaataatcaggaacaaaagagggtatggcacaaacagtggtttgctccatctctctgttgacgaaggaaatcggaagaagaaaaaggcaccaacaaacacagtacctacaaattgcttcgaacgtaaatgactgacgacgttaaaacaattgagtccatgaagatgcattgcttcaccaacaccattcgtccctcttcaagctgacaaaaaaacagacgcgggacattagatgtcaaggcatgcaatagaatggacatgacactaagctctgtacggggggagtacatctacagacagtccagtttcgatgtgtgaaacgtttctaactatacagataacacctgctggaagacaggatcgactctgtgtcgccactttgtctcgcacaaattgaacacactgtcacttggtgtcactcctagaacatagtaggctacagatataaagaatgaaaacacaggctaactgtctattaatatcacttagagaccatgagaaccatgaatatgtttatgtcatcatcaaagaaaagagatgctggaatgatgatatcataccgtgacgggtcactgcatcaacctctattaagaagaccaactccttgtaccctcttctttcta

SEQ ID NO: 38440 - DNA, 595 bp, Oryza sativa
ctgatatgttgcgtttatgaatatttgtgctataacataagtacattgtgttatgacatgttgcagttatgcatatgaatgtgtgctatgagccaaaaaaatatttttctaactaaaaaggatacctggtacaccctggtttcatctagctagtaccaggtaccagcaatatgctctgcctgataaaaaaaggcatgctggttcctggtacaaaatgggataccctggtaccagtatggtacctggtacctgataccaatatggtaccatgcaggtgcctggtgaaaaaaaggtaccaaggggataccctggtaccaggatggtacctggtacctgataccaaggtgataccctggtaccacgatgggacccggtacctggtactaagtagtatggtaccaggctgatacctagtacctggtacctgataccagggtacaccagtatggacctgataccaaggtggtacccctggaatagtatggtccctggtacctaatactagtatggcaccaggctgataccctggaccaggatggtagcatgctaaaagattagctaaaaaagaaaaccatgctgacaccaatgtgggaag

SEQ ID NO: 38441 - DNA, 570 bp, Oryza sativa
cggtgccggcgaggtatcgagggttcggggctctcgatacggggcggaggaagaagcactcctgctcggagtagttgtggcgtcgcggagcgtcgccggcaaggtatcgcgcgcagaggcgcgcgatactgagctgggttctggctggggccgctcagagtagttgcggcggccctctgcgccactggcgaggtatcgcgcgcagctgctttctggttggggttgctctgagtagttgcgtatcagccgggttctagatggggaatcgagcagagttgaccttggtcggaaaaacgacgaagtctggtattaaatctgtcggggtggttttgttaattatcccatgactactgcgttgcaacggaatcccgtacggtagctgccctcatccttcaaatgaagtacacgtatagtcatcttgctgccatgggacacttggcataccattgaaaaaataattaggtacgtagtacttcctccgttttatattataagactttctagcattgcccatattccaggggcgaagccaggataaatggtcaccggggtcagtattaaccagggttt

SEQ ID NO: 38442 - DNA, 652 bp, Oryza sativa
ttaaaaaactatactaatatctaatttaagcaattagttatattttgaccacataataaaaaagtgcatttactagactttaagcacggtatacattatttttttctgaagactacagtaattcacttggatatacagagccggtgaattaaaaaaaaggggaaaagaaaaggggaaaaaaaaaagagaaaacactaagcttcgtggtctcggtgagctcgcggcggtgcaaaaatagaaaagaaaatgaaaaaaaaacaaaaaagaaagcacgaagctttgtggtctgggcgagctcacggcggccgtgaactcgggaccgccggatctggctgtctggccgctggagggaaaaccgatggtgttggtgaggggatggatggcgatggccaggaggggattaagggcgacagtgcgacacaaaagaaaaaagggagcgcaatggcggcgacggtggcacgcttgtggccaccaaatcttgcaaaaaagaaaggaggaggaagacgattgccgcgcgcttgttgaccgccgaatctgactgtggagattatggataccccatacctacacggcatgtttaggccgactgggtatggagtggcatgtatagaaagaatttctttaagaagactcgggtaaattctaacctgtg

SEQ ID NO: 38443 - DNA, 553 bp, Oryza sativa
gcaactaagtgacttttaaatgctgtttactgcaaaacttaaccccgatattattatccccttgtaccccccttgcattaatcatgcatctgccggtgtggcttgctgagtactgtggttgtactcactcttgctcaatcttttccccccttcagtaagagaagctttggagaagaagtcttaggtggagtcctggcttataccccagttgagcgcctgtgaagatggagccgtaggcccgctagtccgctgctgtttatttttgattgtcaggccttaagtgcctttgtaataatgtaaatataatcgatataataaagatgtgccttttgtatcatgtttgtttggtgtaccccggcatttcctgggacggggattaatacactagcgttcgggaaaaggcaattttctcggtcgcgacacctcgttattatgccgaagaacatgggtgagctcaagtccgtcgaatttgtcttccaacttgcgtacctcctgccggtaagcggtcatattatcatcaaggcaggaccattctttcatgacttgattaaca

SEQ ID NO: 38444 - DNA, 3174 bp, Oryza sativa
ggtcagcctgggcatggcggcggtggtggggacggtggcgtgggcggcggacgcgccgtgcctgccgctgctggtggggctgttcgccacgatgggcgtgtccatgtgcagtgtcacgcgcttcttcttcctccgcgagtccgccgccgcgctccggggcggcaggccgaccttctcctcctccaacaccgtcccgctgctcagcctcaactggttcctcctcggcatcctcacctcccccatgcttcccggcgctgcccacgccattgtttccgccgctaatctcagctcccatcgccgccgccgcttcagttcccaccggccgccgagcggcggcggccggtcgaaggggagaaaaggggagagaaagagggtaggaaggaagatgggaggaagaagaaaaagagagagaggatgataggtgggcccacatgtcagtggggctcacatgtcagtgggccccacaactttttatgcgtgtgaatgataaataggttcacatatacgtttttaattcaattgctaactaaatgccatgtcaacccatagagtaggtcaaccctgccacgtcagcatcaccacgtcagcgaaatcgtcctccaaaaccaacaagttagtcaaatatattgtaccggtttcaatagttttacggtttaggatcatggaataaattcgggccacttttaagggagtcaaagtgaatttattcctacatcttccgaagtgggctgctagcccgttagtggcctgcaacagaaggcgtttcgtgcggactccagcacagcccatgctagaaaaattggagaaaaatatacagcatatcatattatttagggatttaggcgtgtattaagagtcattttcccgacatatacttatgcatacacaatatttacctgctcatctaatcattgatttttagctaataacactaattagttattttcattgtttatttcaattttaagggtgtattgatataatgatatgttataatcatttttcacacatctacttaagcatgcaaaatatttagctgcccatctacttattgatttttaaagctaaataaaattaatgaacaagtaaattgcatagtcagtacacctttacgaggtacgtacatttacctgtcagttgtttgttttggtgcataaacgtgtttgatttgtataaaccaaagcccatgtcataactaattgcactaagttgtgtataacttctatagaatatgaaactaaaatgaaatcaatatggagtaatggaaaaacaaaataaatgcaatgtgtatataaaaaggttaaagtaaacttcactttcgacaacattttattaccggtgtttagctttgaaccaccatttaaccaatgttttcactttggactgggttagtatacctttgtgacactttggatcatcctcaactctattatttgtgtacatccaatttgtcatatgttgaagaaacagtctacaacatagggagtttattgatgaataggagccagcgtacaggactgtcgttcatatgcttgagaagacagtcggggtggttcaaagtaccacaaaagtatatatcggatatcggtactcctacaacagggcagaaaggaccccccctcctccccccattggagatttagcaaggggccgaacagagttcgagtttgtttaccgcgaaaatgtaaaaatgaacacaagcgagtatatagcttcaggccgctcggaagcgtaacaccctactcccgtgtttgagactatgtggatgccaaagtgtacaatacaagcttgtgaagtgaactagggtttctgttctacctagggtttccttttttcccctgaaaatctctttttctagtggcatgacccctccttttataacccaagggatctacagcgtcgttatgtagagcacccaaaaaatatatagtctaatgtttaatgcgaccatcacattattttgggtgagtgggatccaaacatgcataatagtcactcaagcctcaatgtgccctatgatcacaattaaacaccattcaatataatctatgtagtgctaaatagtaagcaaaagagatatttctacttcctccgtcccaaaatatacctatttttaagattggcacgggtattaagaaagcatgtgagaatgattggaggaagtgtgtgattggttgaaaatagaaagtaggtgaagaagaatggttgtgattggttgagaggaggtaggtgaagaaatagtttcattttggaacaaggcactatgctagaaatagctacatttttgggacggaggtagtaaaacttagcgtgccggtcaacttcagtctgagacatgcccgttaaccattcgaaggtggcaaccagatgtgttacacatactaggagacttgacttaatttgctaagttctagaatatctatgttgttcaacaatccacactcatgtctagatattctataagcatagaacataccaaggcactttcatcaaaacaaatggcatccataaacaaggagttataaaaaattgataatttagagtctaagtttaagaaacatacggtcgaccggccttataattagtggttcacacggaagtttatctaccaaagacccataagcaagccaactaggggtagaccactaatgaaccgtcctgaagagatcaacggaacgcgctgcactcaactacctgcaacacaactaaaatataccacaaagaaacaagtgtcaatacattaacacgtttaatgtactggcaaggcaatacaatcctaaatacatacaagctctaaataccaaggaatggctatttatggtctcataattgcattaagctgaaataatttcacaaacattttgcaacagaattttaaataagcatttgcaagacttagtatagttatcatggtatagcatcatattagtgacatattaccatcatattcatcatcataatacaagtagcatgcttgctaccctcctcagcagcaagtcaatcatacacaagtatcatcatcaacatcattttaaatatcactttcaaaagcatttataaaacacaaaatctatgccaatgaccacactatgtcgcgcataaacatgagcacggctaatcgattagtttttgttgatgcgagaaacaaaaggcttgggagatttgtttaactcc

SEQ ID NO: 38445 - DNA, 1405 bp, Oryza sativa
tcgccaccgtgtgccgtcgacggcggcttcttgtcccacatgaacttgcccctttactcgttgagccgcatgttctccagcttgagaggcttcagctatggcgccgcaccacgcaacaagtagctcatcagttccccaccattgatgaacatctcaatgcttgacagttgacactactttacttacctgggtctcgaggagagtgatcctggcaaaggcgtcgtcgtgcttctcctccatctcgtcaagaatctcctccatggccttgctctccttgagcgccatgctcagtttctcctccagctccctattctcccacaccaacctctctatctacatctgcatctcccccaacagcccgtgcggtggcggctagccgaaggggagagaaagagagaagggaagaagaggggaggaagaagagagaggatgacaggtggggctcatatgttagtgggccccatattttttttttttgtgtgaatgacaaacgagtcccatcccacatatacgtttttaattcaaatgccaactaagcggcacgtcaactccacagtgtaggtcaatccgccacgtcagcgaaaccactctctaaaaccataaagggagtcaaattacacctgtttcaatagtttgggggtggagatatccggttttgcggtttaagatcatggattaggttcgggtcacatttaaggagtcaacgtggatttattccgaagatgtagcgcgtagcctcgataggccgaattcctgttccagcctaacaactatgggccccgcgcgggtcggccgcaatttcgtcctggcccatgtgaatttggccctgaaaatatctataatagaactgaggcccattgttgcgcgtgctgggctgaaaagaagaaatggagaaagttggaaaacatatcacgtatggaaaaagtccagtttgactcccttaattgtacaccgaatctaattcgtacccctcaaccagaaaaccggatagaacgactccccgaactattgaaaccggtacaatttgactccctcagcggtattggaggacggttttgctgacgtggcgctgacatgacggtgttgacccggttttcgtcccacgtggcgcttaagtggcattagaattaaaaaaaaattgtgggacccatctgtcattcatatcgtgggacccattgacatgtggggggcccacatgtcatcctttctctccaacccttcttcctcctccctctctctctaccttctctatcttttctctccttttttctcttccccatcggatggtagtgccggtgaaggacagggggcggcggtgccggcgtcggggacatggggacgcggtggggcgaggaggccgcggcggccaggaaggcacaagggaacgactggggggaggcggcag

SEQ ID NO: 38446 - DNA, 582 bp, Oryza sativa
cctcaatcccccacgccggcggtgctgcggcgccgctcccatcacatccttcctccgatcggaatcggctcctccactcggcgcactccactttggccgattcctccatcctccacgccggcagggctgcatcatcgttcggttcccttcgtttctttccgctggtacccatcgtgctctggctgatttctcccctctccccacgctgatggcgctgcatcggtggcgagatccttcacgcgcaatcccctctcgtgcagcagactcaaaactgcaggtatctgattcatcttaatttctaagtcccatttcctatgtcttctcgcaccccaactttgcaacttactgattcagctccctatctacatttgtgttctagggtttacaggtagtgaggctgaagcggatggggggagtcatgtttgatacctgagctgttaaaattaacaggttagttactcatctcatgaaacttttttgtttgtggttggaatctattttttgtgatgcgctagtacaatatggacacacatacattttgtttccagcaatttttattagaaggggttgatacctaagatg

SEQ ID NO: 38447 - DNA, 551 bp, Oryza sativa
  unsure (1)..(551): unsure at all n locations
cattgactttaaataaagtaatgagaccatgttacctggcctgacacagctcactatactagttttgtgggatcatagggagtagtatttaatagtagccatgcacttgtgattatctttttacaaattataattgatttgtgttgtttctttaatgaattgttaaattaattaacttggttatatggtcttccttgaaatcaacaattgggatatcccaaaaaagttctgaagtcaacatcaattgaaagcttgctttcttggtgtccttggctagccaaaccttcatgtagtgtacacctgtcatagtctacagccaaatgtcatcaaatctaattcccttcatcttcctgctctgacgatgctttgtgtgtccatcactacatatacttaatccagaactgcatatncatcatattctaggtgttccaatatgaacagatgttcaacacctatggtttaaagatatactgatatgcaactgtgcatcccgtcaacagtttttggtatgttcccttttccggggcttcttcatgttctaatctaatggg

SEQ ID NO: 38448 - DNA, 544 bp, Oryza sativa
ttaatctgatattttagagcaactttcatatagaaagttttcacacgaaacataccgtttagcagtttgaaaagcgtgccacgagtataaaaagtttatctccatgttgttggagaaacgaacaagaccatactaatcttttgtggtacatgcattgagattgtcaagtacttgtacagaggccgtgtttacccctaacttctaattttccatcacatcatatcatattcaaaaattttctacacacataaactttaaactttttttttccaaacttccaactttcctcgaacttccaacttttttcagaaactaaacacagtcacagtcagaaacaaaaagctcgtccagactcagagtttgctttgcgttgactgtaccatcgtactcacactacacagtgcatacatctattgtagcagctacctgctctctgcattaagttgtacctcttctgaaacggacacatatcttatccgcacaagtaatctcgtgtacacactatgtatatgaagcaacaaaaaaatctaaccgatttattata

SEQ ID NO: 38449 - DNA, 527 bp, Oryza sativa
tacctgattggtttcactgtatgaaacatggggacccatattctgtccatttgttggaacttggaagttggaagagaagagaagagatgcctatgtggagtacagtaaaatacagtgctggtacgtgcatggatgaggctgtccgtgcaatgtgttttggtcggccagattcgtttgtcgatcgatcatatgtgtccaatcaaacggccaatcaatcagtacaaaaaggagaatgcaaagtttgcaactgctgcctacctcctctcggaagcaagaactcatgcccaattagctattgtattagcttaatcagactcacagcctggtacagcaagaaagcagaagctaaaccaaaaacctgcggctaacactacactagctagaagctctgattatcagagagaaggcttctgggaagcgtaaagcagaacattcctatcctatggaaatgaaaatgaaaatgaaatgctgccatgttttgggatgggaccccttctttaccattgttcaaaagctaaagaagcttt

SEQ ID NO: 38450 - DNA, 746 bp, Oryza sativa
agtaaatagctggtttggagtatgtctgttgttcacagtaggctagccatgaattcagattagaccttactagtaaaattttggatttctagaagatcctgtgcaacttgctgtgtaccctattttcgtagtgcataatcattttttctgcgatggatacaatacggaaaatttagccttaaaggacctttaggactaaaagttctacctgaaagacctatacagattagacattatgtggtagaggcctttggtttatttccacccatcatattagacatggtaacaggcaatatgtgctaactggtaacatatgtaactgtaatcacaacatttgggacttgagagtgcttatgctttgttcaagttcaaagagaagccctttcaaacagggaaattacatgaactttttacaatagcttgttagtgacagttgtccttagtaatcaactttttctttgttccctttcttaccacataatggtctgattaccagtttgttcaccctgttaagcatataacatgtatgatcaacatatgaaccatttgttaacggtttggtcatttcagaactttcaaaatttggatcacatatgggtaatgacattggattggatggatacagtgaacctgatagctttatgggtcacaatctggtatgcaattacttgtaactttgcatacagtttgttctcatctttattagcgttttgattttttttatattgttaggggaaagcctgtag

SEQ ID NO: 38451 - DNA, 715 bp, Oryza sativa
atttttcagaccgcactttgtcgttcaactcaaaatcaaagtcagcctataaagtcagacaactttgtacaagtgtgaacttaaaacgagttcatgtccttggtcgtgccaaataaaaatggactgaaatagtccgtatttgtatgagggattgatgaattcaatataggctctagtactttcaggctcagccttgcaacaatgaaatggtcctgtggtttcagcccatggactggttactggttagagatttcgtaattgtcatgctgttctgtggaaatttccagaagcttctagaatcaccatatgcacaaacagatatggcatatatgtatgcatacaaaaacagtttttgttcatgggtgattaaaacatgggtacaagtgattcccgaattccaaatttattgtgattgatcttttcacaaatcacaatatgttcaggagattaccgaaatttggtatattctcatttgggttactctggatcccaaaaaactttacaaggaagtgggattttgctgtgtcatcagcatatgcttaagctttgcatactgcagagaagtggaatttttgcattggctaccaaaccaagtaaactgtgatcatatttagcaagtgatcttcaagtgggatattaaatttttacataatcctaaatacttattcaggttccaactaccatctccacttcaccaaatgttacacatttattt

SEQ ID NO: 38452 - DNA, 1223 bp, Oryza sativa
attctcaacatcgcccgattgatttatcatctatgttgatgtcgattctcctccactttatttttattctctgcaaaaggttagtgaacctaatactagtggaatattattattctaacatgtatatgcattgcaagcatcactagttctcctctattttggctatattgatggtcgaaacttatcgataacgaccgtcaacaggcttgaaagagaatacgtcccacatggtagagctggaagaacccttgtggctgcgattggaatggatatcccttgaagaatttatcacgataacactattccatatgattatgcgaaagtgcagttgcaagtggtgaacaaagggttagagtcatacgatctggacatccaaactcctgatggcatatccgtacttggggatgcggttgacattatagtattgtagcacataaagatatactctttgggactggcaacaatgctctgtcgaaaccactgagacctcctcaaaaacaactatcgaatgataaggtggaagaacatgagcaacctaagagcactgaagtggcatctacatcagcaatattgtcaattatgccagcaatagaaccgaaatcgaagtcgcaacaggtttggaatgggtcgaaatagaaccagatgtgtatgaggatccatctcctgcaaaagacaacgtggacgcaccctcggtcgatgactatgtcatcgacaagtccgaagtgcctaaactggtcaaaagccacaactccaagtccaaggataatcagaaggtgaagtggatggtaaccgccttctgaggtggtaaaaaacgtgccaaggaaagagatgttgatgagaagaagaccggtgaacttgccggcccaaaatactttggaacagatgattgtctggcagtgtttgaaaatggcaaagccttttggctggattatgcacttgaagaaggtccgtgggagatgagaagattacataaatggtacacggacgccaacaagaaaggcctaatgtcattagctgtttgaacatcacctgatgctttcatggccgaggaaggtttcttgtggctcaatttcgctgatcttcacgccgtctgtcggtgacatgggatcaggagtatcatgactagaggtttgaggcagacacaatcgcacacgtggcctggcacccccgagggacgtcgggcccgaaggtgatgtgttcgccctcctcttagtccccccgag

SEQ ID NO: 38453 - DNA, 648 bp, Oryza sativa
tgtgatgcttgtatgtaaggtatattggcttggcgtgtttgtacttgagggatttgaatatgtgggatttgcatttgtggtacgttggtttgggtttgggggatttggttttgaggaaaatgggtctggttgtaaaactgtggttgtatgagttgttgggtttgaatggaagataggttttgagtagtttgcaagggttgagtggattgtggaatttgggtggaaagtttgttttgaacagattgtgggatctgagtgggaagttgattttgaaccggattgtgggatctgagtaggaagttggttttgaccggattgtgggatctgagtgggaagttggttttgaacggattgtgggatctgagtgggaagttggttttgaacggattgtaagctttgagtgggaagttggttctgaggaacttcttgcgttggcttatcaaccggagcattccctacttggggattctctttttcctcatttccaacatttctttgggtctctttcccgacttgattcggttgacctttaccagtgtttagtgtctcttcctctctaccagatcctcctgctcccatggtttgatcatgcaaaacctttgcaattctctttgcagttcttcatattgttctttgttcaccataaca

SEQ ID NO: 38454 - DNA, 511 bp, Oryza sativa
tttcggcccattccttcctttccttcctctctcttccgccggcccaacctgagccggctcctctcctctcagctcagccggaaaagtctactttccctccctgcgctactgttcatcttccaactcaggcagagcccgagccagccgtgccgtgcacagtgccgccgcctcttccttccaaatctcgcctccccgttgctctttttctccaattttgctgaggggaaatattcctcttatcctcctctatctttacccccaaaaatcggagcaaatcgttgagtatcttatccgaatcaaactcgttttcgagtttatctccaaaaccgagtttttgatttcccggatcgatttcttgcgggaggagtccgatctcttcaatccaaggctattaataggaccccctagtcctcctctttcgtttgccccctcttccgtcctcttccgtgctccgtagcttcgtcgccaccgccggcaagcaaaccgccgccggccgccatttacggtgccg

SEQ ID NO: 38455 - DNA, 1123 bp, Oryza sativa
atgactctaaccctttgttcaccacttgcaactgcactttcgcataatcatatggaatagtgttatcgtgataaattcttcaagggatatccattccaatcgcagccacaagggttcttccagctctaccatgtgggacgtattctctttcaagcctgttgacggtcgttatcgataagtttcgaccatcaatatagccaaaatagaggagaactagtgatgcttgcaatgcatatacatgttagaataataatattccactagtattaggttcactaaccttttgcagagaataaaaataaagtggaggagaatcgacatcaacatagatgataaatcaatcgggcgatgttgagaatcagacttatgtatgaatgggccaagaacttagaattgacacgacaaactgggccaaaattcacaagtttgcatagaagaacaacggaggaggccgctagccgaaattgggctggattgggccggccctagatttggccgaaccagggggttaggccgaaccctcatcagcgccatctgatccagggcttcgcctggacggtgtggattatcccccaatgacggttggagggtatttctgaccattccaaccatcacaatcgtcattgggaggctataaaaggagttgctcttctcacttcactcacacacctcaagcaatagctctctcatattctctcaagtttagtttagtagtatctagctagtggaataagaatagagtagaaatcaggagtccggaagccttcggaagagttcgggtatgactctagtagctttcctttcctcttttgtaagctttgtacttttattagaatactcttctttatacatttatggtattgaaatactttccgagtatatgaatgcctactttatattatgttcatgttatactgaatatactgctgcttatctgggagatgctttggtgcaggtataatgtttgtgtatgcaattactctatgtcatgacgatgatattagagtagtatctggtagtttagacgtggtgtctagattacaggatatcattatttggggttatatgctgcggatgagaggtgggccgctgatggcaatagctcagtacgggtattcctccg

SEQ ID NO: 38456 - DNA, 588 bp, Oryza sativa
accaattccgtagtcaataattacataccaagtctaattacaaataaagtaatattatattaaaactcaaataatattacatgctaagactaaaatagtaatgtaatgctaaagtgtctcgtgcgtatatgctaagtctaattaagactacaatagtcaattcctaggagtcgcaccaattacgtagtcaataatgtcatactaagtctaatttgcaataaaataatcttatattaaaactcaaataatattagaacactacacaatcttatatgataagtctaattacaggtctaataatcttaattaattgcattacaaatataacaatcatttatattattacgtcacttgcctgctccaaatccttctagggctagctcttccactcaggcttgacggacgaatccgacaacacgtcttttctgcaagataaaaaaaatgtattaggataaatgcgaagtaacatatatatatatatatatatatatacatatatatacatgtatatacatatatatacatgtatatatatatatacatgtatatatatatatatatatatatatattgcatttcacgttaacg

SEQ ID NO: 38457 - DNA, 682 bp, Oryza sativa
tacagtacttcagttaattagtcgtatagctcgaaccacacaccttttctgacggtgacaaggtagggaagcaactggcatggctagctccatcatcgtgggatgcaccacacacgccggtcacactttccctagcggatccatccaaacgagaggcaacgcagccatgtcgggatgagaaaaaaataattccatgcgtgctgcaacaatccctctcactactacctttgttctaaaatattctaaaatataggtattttaatataaacataactattagaaatataggtcttaatggttagagtaagattgtgattgaatgattaagaaaagagagtgaatgaagaaatcaaatagaaaatgttatcattggtttagatgagagactgggctagaaaatttcttcttttttacttttttttttttttttaaccggacaaagtactatacttaaaaatagctttattttaaaacgaatctagtacgtaccatgctacgtgtggctaaaaaataagtctagtatggtgtaatcttttactattactgttaataatagtttacattgacggttattaagtaccgatttcaaccatcaatttcctcaaataataaaaggagaactaatatttcttacatgaatattagttgtaaataatgtagtttcacttgtctcggagaatta

SEQ ID NO: 38458 - DNA, 643 bp, Oryza sativa
cgccatccttcattaatcagcaatcaacgtattatccttctgagagtttgaattttagtgctgtggttggttaatctcctagattataacacccagatttcccaaaaagagattaaaagaaccagataataaacatggaacttataaaaacattgcaaccaactcttcaaaggcttgtttagattacacgtgatgatgtggttcttgcagtacccgcagcagaaattgatggtttcttccatctcatcagaagggaaaactgcagatatcttaatcacaggttcaaatctttcgacatatttcttcacagaagcttggggatcgcaggtggcaggcaatttggggatcccatgacctggttcaggataaacagaggtggtggttacaggatggcaacaaaataaaatatacaattgaaccagaaataatttataattgaatgggaactctggttagagctacatttccgtatgataaccaaacaattctaccatttccaatggagaaagccttgtgaagaaaatattaatatggctcctgtgtcaaccaaattcactcgtcttcacgaagacgtcaaaagttaaaacctcatctcactccttggtcggaaccatctctttttcaaaatatgatctttcatatt

SEQ ID NO: 38459 - DNA, 716 bp, Oryza sativa
tcaaacgattctgtcgataaaattttgtcacatctacctaacacaagatatataaaaaaaatcacatacaaaatggtttgcaatggagcaattaataatgattttgttgtaaatgtatatgttatcaacatgtatgttatatcgtttgttaattaacatgcggtacccttctactccctctgttccacagtgtaagttattttagcatttcccacatttattttgatgttaatgaatctaaatagatatatatgtctagattcattagcatcaatatgaatgtaggaaatgatagaatgacttacattatcaaacggaggaagtagctcttttatcttttgtttccccctccacattacaaatatcctacgtgttgatctcccagacgatgacatcgtatcattattcttggccctctgatgttattttcttattaacgatatccatggaacatatttttttccaactaacttaaaaatgttcatcattacgatagtccttaatttattcgaagataaacgtattagagtaaccggattacataatatgattatgaaccattgttccacaatccgtgcatagcattgtagtggctattatataaggcagtgtacatagcagaagatgtattcataacatatccctaattgttgtggccgtttattttgcctactaatagtcatacattacgacgagatcatgtgataccaacaata

SEQ ID NO: 38460 - DNA, 659 bp, Oryza sativa
atatgctcccagattgggcctcccaagtatgcaccctcacggatggactcccacacatcagataatgacatggtgatggactcccactgatcatcagataatgatgaggtcttagccttagaacagttcatgaaatgccataaagaaattgccatgtctttcggttgcctgcaattaataatataacaagaagaagaccataaccattaagactatgctttgggacgaaatggttggaaaccataaaaaaaatagtcccaatgattttaataaccatattttcttagaaaacaaagtaaaaaaaggcagaggcggatataaaaatggtattggaaatacggaaaattgaaaataaaaagatatggaaaaaaatgcatgtatcgatcggaaacatgactatgtaatatctgaaacaataatctgaaatcacatatttaacttgacatgattatataatatgaccacgtgaattcaaacttacactattctaaaaaaaagaaattcaaacttacactacgtaaatcacaaaccatctcttctttaggcatgtactcaaattaggaattgggttgaaaagttgatgggcctctagtaaaatagagacatggtatttagaaatatggtaattaattacagtattataaaaactataattttcg

SEQ ID NO: 38461 - DNA, 663 bp, Oryza sativa
caattgatccgccgttcccgtgtggccgcctccagatgtgccggttccatcgatagcatacacgtcgcgcggtgtacttgtcgatgatgaggcctggtctttgagcagatgtaggatagatggcttgtggggatcaatatcgattaccctaacgaatcaatctgatgtagtcgccgcaccttgttccttgtcagcatctcgagaagagatttgaaactgctggaccttatggggtgatatcttcatggcgttgagaaggaccttgcagcttgagaggtcgtgagtctttgcctggtggataggacaatagatgtcacgagttggggaagtacgctgaattccgcactcttcgcaggcacggatttcagctcgtacattgaggaaaacgaaacaagcttgcaaggtgtgcttgctagtcctatggacgggacaccaagctcttgtcgcccaggaagctgtcctcgtcagctcgcatttcttgtggggaggacaagatctggccgcattaggatccttctcaggctcgggtattgtcgatgttctgttctccgcttccgcgggaggatctttcgacatggggttgtcgaccggggtcgtaaccacaccgttctcgctcccgataattgctgaaccagtcgagatcggcattgtggtgtagaccgg

SEQ ID NO: 38462 - DNA, 511 bp, Oryza sativa
attcttcggtgtgaaaggaggaatgtttggagaccgtgattcacggcgcgtccgtcggagccggggacgacgagccggagatcgtggcgagagtcgtgatgcctcccgccgctgacgacgacatggccgccggagcaaacgccggcggtggcggcggcggcggcgaccgatcggagaagaaagagcgggaggaggaggaggatgaggaggtggagaggctgaaggagctctggctgtcgctcatggagcgggagcagcggctgcagctgggggaggcggagctcgacgagctccgggagcaggacgccacggggcgtgagctcgatcgccgcgccgccgtcgtaaacgtcgtggaagcgcggatgctggagctgaaggccgcctcgctgcgggaggagaaccgtcgcctggaggaggcgcgggcgtttgagctcgacgccgtccgcggcaagctggcgcgcgccatggagaagctggcagagctcagggcgcgcgtggagcgcgagcggga

SEQ ID NO: 38463 - DNA, 537 bp, Oryza sativa
tgcatgactgtgttttcttggacaaaacatatgtgcagattttgctggaagtgttgtaacaccatttttacatttttttataaaacggacgggttcaggggcacaatgtgatctccaattctccatatattcttttgaactaaatgccagcatgctgcaatggaattcaataacctacaccataatttgtaaacttgaacaaaatcttaaaactcgaatacatgatttgcatcagaccaaccagccacttgcatataaacatgtgtagtgtacaatcatctgcagaagatcatacgattaacgcgcctaataaatcttccaaacagaaagctagcgtgagcacatttcattgacagctaaaggcaatactagttttgccaaccacccaggtaacacaacagcagcagaaacgcattattgtgaagttacatttactgctaccacagatctttgggagaaaaaaaaaggcaacagttctttacacataatgtaaaattggtcacgacctattaatttggaaaagcagatgaagcacac

SEQ ID NO: 38464 - DNA, 1169 bp, Oryza sativa
ctggatttttcacattttggtccttttgaaaaacttatttcgcaagtagacccctagaaaaacttatcccaaaaatggttctttttggggcaccagagtggctggcgccgttgttcaacaggacggcgccagcctctttggcgccgtccccctgccgacgtggcggggcgatgctgaggtggctagggggaatgcgccagagtggctggcgccccccccccccccccgaaattttttatttttgttttatttgtttgatatttttttcacgcttagggacacacaagaaccaaccatagaaaaattgaactcaaatgaacgtaatatgtgacatgtagaatttttcctctcctctcctctctccggactagtgcagaggagagagatgtgcaacttttttatttttattttatttttttgatattttttttcacacttaggaactcacagaaaccaaccatgtaaaaaataaactcaaacggacgaaatatgtggcatatggaattttccaaagctccaccgaaaaacttctctcctcgaaaacacaattcttgcaagcggaatttggaggttttaatatcaccgaacccggcaaagcgggggagaatcggatgtaactttttctgtagatgtccgtgcatatattatttgcctgattccgagtccgtatgaaaaagttatacctattttaatagatgacatattttgtctatttcggtagagttttggaaaattctacatgtcacatattttgtccgtttgagtttattttttatacggttggttcctatgttctcctaagtgtgaaaaaaatatcaaaaaatgaaataaaaataaaaaaattacatctctatgtactgtttaacttatatgtcattttatgtggttatattttaaattagattaagtaatttcatatagtggtagagtgcattatgtttaacatgctgatcaaagggttttactaaaagagttatggtctaattttattgaaggtgcaaagtagactaagtggtatgctagatattttcagacttagctaagtggtagtttgagtttaaattttttttgtggttggttgtatcgtgatcctgagtgtgaaaaaacatccgaaaaaataaaataaaaatgacactgttgcaactctatatagggaaacaggaatggag

SEQ ID NO: 38465 - DNA, 631 bp, Oryza sativa
ccaatcaactgccagcgggtccgccagcttgagaaggattgatcagccgcgcgcgcgcgttgacgttgtgagttttaggcccataaggcccatgcataacctgcggtggcgcgtatacgtgaggcggacggcgcccacgtcctgtattttttttccggaaaagctaacatatgtgtttttttcgtttctttttgccatgtttttcgtgattttttttattttagaagttgaacctttcatgttgaaattttgaatttgagttgaaattttgaattttgagatgaaaattttcaaatttgagttaaatgttttgaatttttagatgaaagttttcaaatccaagttgaaagttttcaaatcttgacttgaaaattttcaaaactagatatggaagtttcaaaatgtaagttgatttttttaaaaaaataaattgaaagtattcacttgaaaattttcaaatctaagttaaaagttttttaaaaaatcttgacttgaaagttttcaagtctaagtcgatagtttttaaatctaagttgaaagttttcaaatttgagttgaaagtttttaaatctggattgaatgttttcaaagctgggttaaaagtttcaaatccaagttgaaagttttctaa

SEQ ID NO: 38466 - DNA, 1359 bp, Oryza sativa
aaaaagaaaggaaaggagaaatgtgggcccacactattttctctcacttacatgtgggccccacatatttatttaaatttttttgctgactaggatgcacgtcagcgaaacagggtggctatactgcctcgggaccttttttgacggttttacatagtttagggtacacatttctggttttgtgggtaagggacctgaaaaattctcggtgttaagtcgggggacctccagtgaacttattcttaagtttgaagaggtaattgggtctttttgtttaggttgagcacggagctctcgttccctcaacgtaaaaggaaaggttcgatttgagtccctcaattataggtcggatctaattcatatccctcaatgtaaagcataggtatgtcgtctctcccaaatttaaaacaggtgtaaaatgatttccttgaccattttgagagtggtttttgttaacatgcatccatgttacaaacacagtcataaaatatattaaaaaaaagtgggcttacatgttatcctctctctttcggtaccctttctctctccccccagtcttcttctcagctcgccgtcactaagccttgtacatctaagagggtcttaggtaaattggtaaaatttgctataggatatttaaagtttgtaatctttgctagtagacaccgcagaaacatggcatggtcaaggatactctaaagactttgtaattggctggaagacaccttaatgattattttattatttccaggctaaatggagagataaattatgttaaaaagacaaaaatgcccttaagtgctactagcatgtcaactggctctcccaatctttctcattgatcattgtaaaattttgcatggactttctttcctacgcggttggtggcggtgacactcgtcagaggtggagcagcgaatcgaaggatggagtcttcttcttgtgttggtgccgggtactttggtctgcgccaagcataggcggtggtggccagtggcgaacccagaacaaaaattaccgaaggtccaatacatactaattatctaattattgactaatatattaattaatatagtgtaatttagataggacaccgggtagtataacgtaggcacgcccctggtggtggccttgccgccttggagccctaggtggtgttccatgcagcgtcgtcggtggccttggttctccgggcgccgatgcgctttgcggtggcggctgttttggaattttgggcgatggccttggagctccgagcgctgctactccgtgtggtacccctgaagctccgagtgccggtgtttcgtgtgatggccttggagctctcggtgcacctgctctgtgcggcggcggtggccc

SEQ ID NO: 38467 - DNA, 613 bp, Oryza sativa
acacacttcatttctttcatatataaaaaaaatgtacaaaatatcgtcgaacacatatacccagaaaacgctcgacatgatgatgatgtattattgttgttgcctccgttgatgacgttctctgtttctgcgttgccaatgctgtctcctcctccactgcctgtgattgggttggacgatatgttgatgcataggaagaagaccgcggtgtagaggatgcagtgccgagaggagtcgcgcaaagaaccgctctccaaaatcttgatcgcctacttacccatgcagcttcttagatggatggaggaacaaaagggtgggatgtgtaccgtgagaggagaggaatacgagaaggacgaataaagaaaagagttcttatctctgtatatcccggtgatggaaggttaacagagagacgtttcggcagtaattgagacgcttaattgctccatacattagagccgtaatgactgtccatcagttatttttttaggagtacttgagacgcttaattgctccatatgttacagtcgtaatggctccccatcagttatatcatctttactcacaataatgcaatgctcggaaggggaggagagcaagcagccaacccccg

SEQ ID NO: 38468 - DNA, 516 bp, Oryza sativa
accccctctctaggtcaccacgtacggtgggttaggtgtcagcttacaggtgcccacctacccgcatttatggcgacccaagcggtcgcgccacgccgcatttaatgtggcgtgcagtgtactcaaccggtctgtgaccggtcgaatcaccgatgggactgggtagtgcgcctgtgcgtactgctcgtgtgtcaggcggcgtgcagcctaacatgtcccatcaaataatgatgcactggtggagaaaccatctttggtcggtcgcccgaaatccacaatagtctcggttccactaaaaaccgggactaaagatgatctttagtcccggttggtggctacagcgggcatatttgatctttagtctcggttggtgttaccaaccgggactaaaaatgatctttagtcccggttctaaatctgtcaagccttgtcaggccccccgatatctttagtcccggttggtaacaccaaccgggactaaagataggatctttagtcccgggtgataatatcaac

SEQ ID NO: 38469 - DNA, 629 bp, Oryza sativa
  unsure (1)..(629): unsure at all n locations
tctttcggggatcgctacgtatataaactctcacaactcatgtacactaatcacgacgcccaatgcgcagtatccttgaactcaggtatgtggacatgacgttccttcttcgtaaataaacaagaccattgtcctggcgaacggtgaccttaacaagtcattgacagctatcctcacagcttgatgacgggatcacgttgttatgcattacaccgactgtctcaaacagcatggagacagatttgactgttacaggactttactattggccagttgcgatagagtctgtaaagggaaattcgggtgtttcaaagcaacaggctgccagcaagcaaagccctccatcatgaaaaatggctctactcatagcagccttagctcgcgctattcggccaacaagagccataacatggctatatgttgcacttttggattgtattcagatgaaatcaaaatcccggtttatttttctcgaggtcgcttcgctcgggtatgaaactatgctaaaattcatgtcaaacttattctcacaaggtatatcgttctcgggtgtttgcactgcatatgtataaatagcatgaatntacgatgctgtctatggcaaaattttataatgccccttatctctg

SEQ ID NO: 38470 - DNA, 2115 bp, Oryza sativa
tgtagcatggtttactggcttatacgtgttactttgaaaaatgttactttttgccactctgtttttccagaaaaaatatactgttctctttttttgcaactgttaatacaagttagtacaaattaaattatatgttatatttgtaattttctaaatttttgtttatgtaagggtgtagcagcattttgagggaaaattaatgcttgactcactactacaaaatcagttttttttctggctaaaatcaactttggcaagcaggcggccagccgcctgcaacaaaaggctagagaaaattgtgattttggctggcgggcctcatccgcttgcgaaaataaaatttcgcaggtggcatcctagaaatccaccggaaaaatggatttccgctgatggcacatttaggtcaactgccagtgaagagattttccaaaaaaaaatccacatattccataggattttcaaaacaaatttacatcaatatattcatcaacagatcagcagattcacattaatagttctattacagtgaagcaaatcgattttcaaacatcaacatccaaacatcaacatgaaaacatcaatttctcacagtatccaaaagtccaaacatctacatcaacttctcacagcattttcaatatgcaaatatcaacacatacacatcggtcgccggcgaccttagaggttgctatcactgccaccgaagccacccccttggctactgctgccaccatctgggagcaggggcggatccaggattttcagtcaccggtgtcattaggtaaaacatattttattatagccttgcttgatatagttctagatccttaatccacgctggatttgaagtgtatatgttaaactataatggtttaaatttttatagtatttcataaaagattgggaacaaaataattcatcccaatattatcaacataattataaatctaaatcacatattcatgaagcttagttatctataatgtcctacacgtgttctaacattagtgaattactagtacaacatagaaatagatatcactgattgataacaattcgagcaacttaccatgtcttctaagtattaaaaaacatttttgcaaaatttaatgcatgcatgtaagcttttatctgttgcgcactatttctataccttattattctacattgttatctattaaacctaaaaagaagtaatgacacatttcaccgggttaaattattaattgtttaacaatcagaacaaagtaaagaaaccaagcaagttagttctaataatcacttagcaaaactatgagaagttgattaattaactaaaggaaaacagggtgtttgcacgtgtaatgctaacaatagcataactgttttgctttcataaaacaatgcatgtttttattacctgctaattgcatgagctgtagtgaattggtcaatctaccggtgtcagtgaactttcaccgatggtgtcattggttaaaaacaaatagtatcgtgtaagatttgcagaagggcgtcggtgttagctgacaccggtaggaacaccgtagatctgcccctgtcggggagagggaggagagggatgcgagggaatgcagggcgttgccgatctccaaccatcaccatcagtaccggatctacccctcatcgccatcgttatcgacacctcaaggctggaggcagctcgatccagagcttgcgcccctcccgtggccaaaaccgctgcccatggccctgtggcagtcgcatcgtcgtcgtagcggcctcccccgttgtcgtggcgatggatctggccacccctgtcatcacggtggcagacccggcctccctcatcatcacggcggcatatctggtcgcccccatcgtcgcggcaaaggatccggccccgagctcgtggcggccagcggccgagaagaggaggccacgccccgccgcggcggagaggtggtagaagcgatggcagctagcagcggtggtggcgacggaagccgacgacagtggtggcattggcagtgatcgcaacggtagctggtgacagtgaagaagggacgaagaagcagagaccgtgggagaagggagcgaggcggcggagagacggaggtagaagggagctgtggg

SEQ ID NO: 38471 - DNA, 1694 bp, Oryza sativa
  unsure (1)..(1694): unsure at all n locations
ttttcaccaagactggattagccaaccatccaggatgcatcacctctcttataacttttgctttgagcaacttctcgagctccacttttgctgcttgctgcctgtctgttgacattcttcttaacttttgcttttttggcttgtagccttgcttgattgccaagttatgttcgatcaggcttctatctacccccttccagttcttctggtgaccaagcaaagacatccatattgcttttcactactttcaagatttcctcctcaacatgcttttccagattctctcctagcaaaatgtattttctaggatcatcatcatctaactatactttcctagttttcccttcaggaactggttcctgcaacttagagtattctccatgtttttgatcaacggcatggactcctttgacatttggcgttccctgaagctcaaactttctcgccgccaactggccacctcggacagatatcactcctcgtggtccaggaagtttcatacatatataattgtgatgtattattgcctcgaagatattaattgctgatctccgagtattgcattatattgacacggggtacctaccacatcaaaccctattttctcttttcttgcattgtggcatattccaaaaaccacttgcaaaggtattttcccaattgcatgtacttgtgtccgcaaaaccttgtagaggcactcatgcatttgtcaatctgtcttcgggtatntgcatctttttgaaagcatcgtagaatagcacatccgntgagcttcntccatcaccnaagactctttgactttcgcattgtactatttccactgagatcaccaaagggtcctggtgggggaaaagtattccttccgcatcttcaggcccaaaggaaattactgtcttcgaatgaactggtggatttgactgatagcttgtccatacatgatttacttgtctcacatatgcttttctttgtctttttgactcaattcccaaagaagagcctcctgttatggcatttatcactctttttggagcttcttcaattgcttctattttcatgacttgtggtgcttctatggcatttttccctcgctgatctcaagccccctaatgcttgttctcatatcgaccgacatgcttttccactaagtaagccatgtgcttacattcttcagtggaatggcctcatagaccatggatttggcaaaacttgctatagcattcttccgtagaatgaccacctagaccatgtgcttgacaaaacttgctatgattaggctgatactcttttcctccgcttctatcattattcaaccatcatcctctacctctgccagaattccaccattgtcctcggcctcttccagattgcccccagttatttcttcctccacgagtgttttctcattgtcttttcccttttccttctccattatttgagccatctccaatgaagttcacttgttttttctgatcttacttataatcgaatttttccatggttttgcagtgttttctgctttttgttcttctcctaaagaaacttgcttgttcttcgtctgctactttcccaacaatgcagcttcttctgcttgcaccctcaactcatcttcttctcctcttacaaaactttcctattccttgcaggtccttcactgtctttggcctattccttgcaagatcgaaacagagagggcc

SEQ ID NO: 38472 - DNA, 581 bp, Oryza sativa
caatgaaatgtgctcacgctagctttctgtttgaaagatttattaggcgcgttaatcgtatgatcttctgcagatgattgtacactacacatgtttatatgcaagtggctggttggtctgatgcaaatcatgtattcgagttttaagattttgttcaagtttacaaattatggtgtaggttattgaattccattgcagcatgctggcatttagttcaaaagaatatatggagaattggagatcacattgtgcccctgaacccgtccgttttataaaaaaatgtaaaaatggtgttacaacacttccagcaaaatctgcacatatgttttgtccaagaaaacacagtcatgcatttatactgcaagcatgctatttacattattattgttcatgaaaccttacagatgtttctttctgagagtttacaaacgtagttctgacttgcaggtaaccgactcccttaaccactgaaaaccttcgaagggttattcgctcggagcagtcggagctatagatgcatgagggtttatcatgattatcatagtgaaatctatcaagtctaattttgagttctgatggtg

SEQ ID NO: 38473 - DNA, 509 bp, Oryza sativa
atataatgtatgcctcatctttatagaaacaacgtaaatatagttaaactaaaaaggcagtatcgaaaccggttttagctgctctaatattggaagtattgaaaccgtattgctacaggacacacttgcatgctaatattgaaagtcgatgcttacttgagggacgtaactacaaacacaacggtgtaatcggattataaattggatgagtaatttaagagaaaattttatttcaagcatagatgataggaatatttcccctacttgctcaatggattaatagcaactaaaacttctaaagtactagcacgtggatgtctctgatcaagactaattggagaggtaccgtttctgtttacctttccaccggcccacttaatattacaggctgtggaaacttaatgatgggccagttctggtgggcccgtggatttcaggcattcatccataccaaatttaccaatccaaacttgtccattgccctctccaatcctaaatccctacgattt

SEQ ID NO: 38474 - DNA, 628 bp, Oryza sativa
aattcgagctcggtacccttttagtttttaaatttttttatcatatgaaatagaaatttgaactgcattacttttactcaaagcaatttgcttacagtaattctgaaattctctaagaattatccagttgttgaacttcttacattgtctgtaggttttaaactaatttaacgtatccatttataagaaattctctctccattagaaaatgttaaatattgtcagttatttttttcttgactcttctctacagctggtaatttcctctgatcatagaccattacagatagagcttaaggactaattgagtataggcaactcaggtgatgcatcgttttttaatcaagagtaatgttacagttatattttgttttttctttgtatacttaaaaccatatctgttgttattctctaactcactagaaaacaaaacaaaattctacccttcaaacatatgcccttgtcccatcaaaatacatgaatgaagtgctcaagagaacacttaaccaaattacatatcattcatcaagcttagcccaatatattctatttttaatgtaacatattcctcacagtgtctttaataaaaaacaaatagtgggggatcctctagagtcgacctgcaggc

SEQ ID NO: 38475 - DNA, 788 bp, Oryza sativa
  unsure (1)..(788): unsure at all n locations
gtagtttagtactagtagtacatgtaattttctttatgtgtcttttcagatgtgaaaagataggagtaggattagaccctgtttagatgggattaaaacttttaagtccctatcacatcggatatttggacactaattataaatattaaacgtagactattaataaaacccatatataatcttggactaatttgtgagacgaatctattgagcctaattaatccatgattagactatgtgatgctacagtaaacattctctaattatggattaattaggcttaaaaaatttgtctcgcaaattagctttcatttatgtaattagttttataagtagcctatatttaatactctaaattaatgtttaaatacagagactaaagttaagtccctggatccaaacaccaccttactaatggctgttgtactcatcctcttgggagaagtgtcacaccctaaaaatcttaaatatataaattgttgtttaattggaatttttagaaattattttaaaagcctacaagctaaaccctaattttctaggaaaattttcaacataaaaatgagctagataaaattctattaaatactatgcttgctcctctattttctagatttttctgggaattatttgagcaagggaagtatttttaataattgaaacatcaattcacaaattgtttttgtttaaaaagttcaaaaatccccctcttaggccgttgggccgatttcggcccaactctttctttcctctctcttcccgcgcgcggnccatgccggnccaagccg

SEQ ID NO: 38476 - DNA, 511 bp, Oryza sativa
accaacatcatgcctgatggatcaaatactctaatccgataaaccagtgaatcaaattgatgtttatacttagccacagttctagtttgagttaaagcatctaatgcaaccattttctcatgctcaacaatcccctcaaattcagaagcaactgcatgaagaaattatttttttatttggaattatttagaattatttgtaacctttgtaaattctcccttttattatatatatatatatatatatatatattaatatatattacagtaggagcctctcctgctgtttcatgtcaaaaaactgcatgaagaaattggccccatgaactgaggtcagccactaacttgtaagagtgataccacttagcagcatttcttgacatatgtaacgcaaccacagatactttgaaatttggggtgatttggtacatatcaaaatacgtctcacacatattcaaccatatgcgcacatccgagccatcagtactccctctgtcgacaattatagggga

SEQ ID NO: 38477 - DNA, 621 bp, Oryza sativa
ccagcaaatactgcaaatagttagaacaacatattatatggagaaatgtttattttatgaaacatggaggaacaattaagagataaatgggcaattaccttttcctgcatctggcataatagcagaagcattatgtgagccagatatttgatggcactcattcttgtgctttgcacgccaatgcaattcctgaggaaggatattaccgagtgattaatccaaaacagtgatatctgaaaactctagcagcgcaaacaaactgattaaactgaaaatacaatataattgcctggttagttgatacctgatgcttctttgaacagtaactggatttcctacaacgactacaaactttttcccctttccatgtgccacaccaacaacaaaaccaagtttgggatcctaatagaaacatttgaagacaaaaagcataagtttgtgttcatgatttatacacagcatgcataatggattatttaagcaatatatcatatcaaagcaaagtgtttcctggacgtaaagctgtccataaaattatcaaaagcatagtgttttcaagaggaaatgtgagaataaaaagtgcattgtctacacaactttaaaagaatgttcaacaagctt

SEQ ID NO: 38478 - DNA, 785 bp, Oryza sativa
aaccattcataagtcaagagctatattttcaatcataaaaaaatatccagataactaaattattgcatttacttgttcttcaaataatatatcttttagttggtttattattattttcatcacttgtcaaaagctgtaaacactcatcatcattaacattccaagacataattctacacaagaaaaatatatcaatcctaaatgcaaaaaaaaaaaaattgagagagattgcatcagagtaaaaaaaaatgtaaaaataaaaacaagaggagttcagttacctcgataacgagattaaccgtggaggctgtctgctctgcctcctgcagcctcagcgcgagctccatgttctcctcctccagcccggcgttcgccgcccgcagcgccgccgcctccgccgccatcgccgcctccctctcctagacgttcttctccagctccgccatcctccgccgcgccgcctccgcctccgctgccagggcgccctccctctcggcgccgtccttctccatcccggccaccctgtcccggagcgccgcggcctccgccgccgcggcgacctccctctccgcgccgctcctctccagcgcgctcgccctggcacggagcgccgccgcctcgcgcgcggcctcctcccgctcgcgctccacgcgcgccctgagctctgccagcttctccctggcgcgcgccagcttgccgcggacggcgtcgagctcagacgcccgcgcctcctccaggcgacggttctcctcccgcagcgaggcggccttcagctccagcatccg

SEQ ID NO: 38479 - DNA, 565 bp, Oryza sativa
tggtcggcctcatttctgctcagcttaggtatcaattctgcaaggaaaactttcctgactcctgtctgggttatgtgcccattctatgtgattccacagcctctctcttatcccagtgcttttcccaacacccaggcattgattgtggctacagagccagcacctagctcataggaagtattcactaaaaatgcactggtatggatggatggcaccaaattctcacccccacgcaggaagctgtagagccctgcactttatatgtacaaccctcttagatcgtctaagaaggaatgttttttgaataaaattttctgatctttactaatgctcaaaaattaatgtataatcttaaatcaaaaagccaataaggctacagggctataatttttctgacacagaaaattttccatattcattaactcaacagccactgttaagtacttattatgttcagggctcagggtaacaggaactttgcagatacagttgtgaaactgcataccgtcctagctgacagtctaaggaaaagataagtcacatacacatataaccctaatcatgg

SEQ ID NO: 38480 - DNA, 592 bp, Oryza sativa
ggggcgtgcctacgttatactacccggtgtcctatctaaattacactatattaattaatatattagtcaataattagataattagtatgtattggaccttcggtaatttttgttctgggttcgccactggccaccaccgcctatgcttggcgcagaccaaagtacccggcaccaacacaagaagaagactccatccttcgattcgctgctccacctctgacgagtgtcaccgccaccaaccgcgtaggaaagaaagtccatgcaaaattttacaatgatcaatgagaaagattggaagagccagttgacatgctagtagcacttaagggcatttttgtctttttaacataatttatctctccatttagcctggaaataataaaataatcattaaggtgtcttccagccaattacaaagtctttagagtatccttgaccatgccatgtttctgcggtgtctactagcaaagattacaaactttaaatatcctatagcaaattttaccaatttacctaagaccctcttagatgtacaaggcttagtgacggcgagctgagaagaagactggggggagagagaaaggggtaccga

SEQ ID NO: 38481 - DNA, 559 bp, Oryza sativa
ccgtttgagtttattttttatacggttggttcctatgttctcctaagtgtgaaaaaaatatcaaaaaatgaaataaaaataaaaaaattacatctctatgtactgtttaacttatatgtcattttatgtggttatattttaaattagattaagtaatttcatatagtggtagagtgcattatgtttaacatgctgatcaaagggttttactaaaagagttatggtctaattttattgaaggtgcaaagtagactaagtggtatgctagatattttcagacttagctaagtggtagtttgagtttaaattttttttgtggttggttgtatcgtgatcctgagtgtgaaaaaacatccgaaaaaataaaataaaaatgacactgttgcaactctatatagggaaacaggaatggaggcggcggcaccagccatgctggcgccctcctcctgccacgtcggttcgcgtgtgccacggtggcaggaggacggcgccagagaggctggcgacgtcccattggatgacggcgccagccactctggcgccccaaaaaggaccattt

SEQ ID NO: 38482 - DNA, 522 bp, Oryza sativa
gtaggtagttcattttctctgtcataacagcgactggtagaaacagaaggtaactcattgatgaaattatcattcttcacatactgaagggagagcatctcttctaaggtgcatgtgctccttggcaattctacttgctcttgactgatctcatcacaagttacagttgcccatcgctctgaaagccgttgcttggcttccttagtaactgatgactcagcaaagtgggagatcttgctaaaagacgatcccagatagggatttccatgttttttggtataatgccatgttcgctttgacacaggactacatccccctgagtcactgaagctgtcaccttcatcttcaatatagtcaatatcagaatcactgttctgatcaatttctgaatcacctaatgaactttcatctcctccatatccatttgagtatgaggaagataaaaaagattcatctccttgatgacagccatcttgctggttatgaatgataccaggctctacttttgtagatcgtagggtt

SEQ ID NO: 38483 - DNA, 555 bp, Oryza sativa
caatcattgtagtaggacacaacatatctgtaggatcatcctttgagccattgcctcttagcaaaataccaggactgatcttatcacccatctccataatctgcttgccatccctttgaccagatttctgaccacttttcaggaaactttcagaccctacctgaacttcctcaaagatactctcattgaaccatccttgctcaacaacttcttccagctcaaagtgggcttgatacagcagacctttaggtgtagtaaggattaacttcaagggcagcgactcaagctccatcatcccaactttaaatcttatcacattgctagccctaaaggtggccatgtcaacttccataactgttcccaagttagatcccacttcatatagggcctggtaacctctcatagcatcaggaatgccagacaccttcacccaagcagtatgcatcttccccactgcatcagactcttgtgtccattctttcacattgacttgaacatcagtccccttaacattgaagtagtcaaagttggatagctcttcaaattttatcttgt

SEQ ID NO: 38484 - DNA, 504 bp, Oryza sativa
ggcgaattcgagctcggtaccccatatatcatatcatatcatatcatatcatatcatatcatatcatatatcatcatcctggctggcttgcctgtctctcccactggactgggaactccttgatgtctttgcagtgccctgaagaccttactctggagtcagaccaactggctaacatcctggctctcctactcttagctgtatacttaggcaactttcttttttttttaattttattttaagttctggggtacatgcgcaggatgtgcaggtttgttacataggtaaacatgtgctatggtggtttgctgcacctgtcaacccattacctaggcattaagtccagcgtgccttagctatttttcttgatgctctccctccccaacccccacagatcaccaggcaactcctccacaagccgtctaggaggcggcaacctccaagagtaacaagcaatgacccggcgtggagatgatcaatcaagtgccacactagctctacaaa

SEQ ID NO: 38485 - DNA, 655 bp, Oryza sativa
gagcacgtctttattttcttgagacacccatttatttattcgttccaatgcagagttcagaaataaactaaaaaaaatcctgattgggctgacaaaaatgtttcaaaagttcagtacaagttattcgcattcctagcagtctagaaactttgaacaatttccaggatgtccatgtgtcaagaataaatggcatgatttcggggaactgtgcttgtgtttagcctagcacttcacttgttgcttgaatcacatcaagtcaaaggtgtgatgttggactgcaaatgcgacgcacgtacacttcatcaaattcaacatctctgagaaatttgcaagcagacaataattaatgcaacagtacgttccaagttgcatccgaaggtgtaattagtcagcagttgagttgagaacagtatgagatactcttaacttatcccctaattaacaccttttgtacaggcgacgacgtgagctcccattacaggagacatggagaatagtccaagctccacagagatatggcaggcagcagcaagcatgggcaaccagaggctgctctttttttttttttggtcaagatatggagtgaattcgtgatagcatcacgtgaatcaacattccacacccgtcgtcgtagcacgcgcgtgatcagggcgat

SEQ ID NO: 38486 - DNA, 542 bp, Oryza sativa
gatttgtaaattttgttgtagattattttagatttggggataattttgtgaattacttgtggattgcggatgattttttggatgggcaattgtggatgatttgtggggatttgagggtgacgataatctttagtcccggattgggtgtcccggtttgcacccggggctaaaaggttgcaaatcgggagtaaaagagccattccacgtttgataagtactgctattccataggagagcaaagcgctgaagagttcaaccagttgaaaaatcctcgcacatcttgactcttcttgtctggcgttatttgacatcagtggcttcccggcacgcacggtaaaacagacaggttgtatcgtttgttcgtgagctcgatcacaaagcaggccagctgcctgctgaacaagcatgtcgcccactctgagcagcttccgtcttcttctgattcgacttgttttggtggctcttctgataggcagcggcctccccatgctctcggctcagcaaggcagcccaggagtccgtgagtatcatctttatatatt

SEQ ID NO: 38487 - DNA, 591 bp, Oryza sativa
taaaattagcttaaattcggaattagaaatagcaatattgaaagaagaatccatataagaatccaatacgagattaattaaaatttagaataaaaatataataatatccaaaattagaaaaactaaaacagagttcaagtaggaatacaattttgaaacaactgaaattcagaataaaaaataaaaacattaaaagaacacaatatggtattaactaatttttttagaaaaaaataaattctgaaattagaaaaaaggatttcaattaggaataaaatttataaataactaaaatttatgataaaaataaagactattgaaagaaaagaccatctaaaacacatgacgagataaattaagtaacatacctataaagtagtagagttggtggcagttaatacagcatataaaaattgttaataaaacaacaaatagaatcctaatgacgattaaaaggagggatatcaggcaggccgtaaagtaaacaagtaaagcggttgccgggacttctagaaagtataaagaaaaaaaaccacattgataatcattttcgatttttaaaatctcaatgacaataaaaaggagaagcag

SEQ ID NO: 38488 - DNA, 597 bp, Oryza sativa
ctataaaaggccccctagggccatgtaataagggatccaaaaaaaatttcactaagtaatacaattattctttatttctaaccttatttctaaccactgttgagagaaccaagactttcgatgtgacgcagttgtctattcgacaacataaggcgtaactgctttttcaccaaattccctaatacaaggcggcaacatctcggctaccgtttgtgcatgcaagcattgatgagtcatgtactggtgcatgcagaataaaccaactcttgatgatgtgcatgctggtcattcgcttggaaagggcaggtgtcgggtggatgctgcatggtggttattgctggcgaaactaccgaaacatcacacatgggaagaagagaaattatcggtgcaactgctgttaagggcacccacaatagttatctataggctctctacaagatatacatgtcagcatattttcctacttagaagatattaaataaagagatagagcaaagctatctactaacttagagatagtctatagagaaaaacaaggcaatgcatacgagagctatagatatccatgtagatatactattgacgtggtttactatt

SEQ ID NO: 38489 - DNA, 630 bp, Oryza sativa
agtccaaatggttgatattctgacgttttgaataaattgtaaataataatccacattttatttgcaaaaagatctggatcgatgtcatgatcatatacgtgtccatatgtttgccgttctttccactaaattaatttaattttgcaagtcaactctcgctccggtttttataaatacgtacaaacattttgtatttacgtactgtttcgtttatatcaatataaatagaatttgtatttttagtaaacaaatcgatcaacctagctatggtcattttagaccccacaccatgataaagatgcaaatatatattcttctacgtggcatttttcagtcctccatgtaaagatatatttatgacctctattagtaacacgatacaattaattagtgcagacttttgcactacgttccgatgactttgtatacgtgtgacgtgtagtctgcagaggacttccagatagctgggaaaattatactgtatatgcgtactgtactctgttagctgtcgctgtactctgatgtgttttataaaaagaaatacgttaattcatgttactccatccatttcgtattatatataaggtattttggtttttaatcaaatttgtttaaatttgatccagtttg

SEQ ID NO: 38490 - DNA, 572 bp, Oryza sativa
atggatggaaaacgtgatggcagtggcacggttttaattttggaaaatttcaatggcacgattaagaatagacgaattgtaatgacatttttcggaataggcaaatttgcaatggtatggatccaattaacccttgaaatattttggattttattgatcttaagttatcagtttaattctaaattaaattaccatttaactcgccatgcttagttaaatttctagctataaaatagggtgtagagagaaaaggaggacacatatatgggctgcacgtacatatataaccttctttgtacatggtacgtgactacgtacaaagggaagagatgttacgtgtgggaggagggaggtggaggtggaaagattttttagataaatctgttggcttgaaataatgggaccaactattttaatgaaaacggatggacagatgttttggtttttttttagaatttcttaggaatttttgttatttattagaatgcgatgtagcgagttaggaacgttggtaggatgccacctggcggtttgagaacgttcgtagaaagtttaattgacttttagtatat

SEQ ID NO: 38491 - DNA, 516 bp, Oryza sativa
gctaaagtcatcttacccaaactgatctaccttattttaaactgttagatctatatattaaaaaaacctactgatcgatcaggccatcagagtgcgtatgtacaacacatgtatccagttccctcctcacggatgaaacgaacccactggctctcgcctctttgttttccttaccacaattaagttaaccactgaataaaagaagatactaaaaattaccccgaaaaaatatctaccttattttttaataaaactggtagactaattacttcataccattagacatctaacgactttctaccaacttaattatatttctcaacttgtataccaggtctatttacctatacaaatatgtaaagctaaatccatctacaaaggtacgaaaaaatctgtctctgaatgaagctcttttttgttactatatatctccgtcttataatggatcctaaaattttatacccactccgtcccaaaatataacaacttttagcacttacgatttgtcccaaatat

SEQ ID NO: 38492 - DNA, 660 bp, Oryza sativa
tgcaagtagttcatcacttaagacgggatcagctagaactcgtatacaattaacctacgcagctgttgaactaggcgtgccaatgtgttgtacatacgtaagtacattacatacatattcgttttgtttctgactataaagtctgatgattcttattatagtcccatatatatattttttctcttctataaatatagtcgacgagatgcatgcgtccaggggtccagcagcatactctattttctctagttgacgtttagaactaaaaaaaaattaaaatccttcatgcatataaagcgatcatagcaggcaaaaaaatgaggagcagttgaagaagttggtgcaaaaaggtgtccaaatttctaccgccgtgtttcgcacaacgtttacaaacgctgcatatcaattttactgaagtatatatttgtcaaaagctgcatctgtatctgaatatatataagcacgcaggtctcgatcgatcgagtgagctcaacctgtccccaagtttaagccccccaaaaaattaaaatgcatgtcactagtcactactgatcactgatccatcctggaccatgcatctcgatcaggcatcatcatcatccacgacgtcagcgggctccctccatggaatcatatcaaaccaatcaacaataacagcgt

SEQ ID NO: 38493 - DNA, 701 bp, Oryza sativa
gctcatgaactcagattctcattctgtcatgcatctacatggagattgctgtactgatatttgtgagaagataggttgatcttgcatgcaaactgccaacacactgcaggtagggttaagttactgccagcttcagttgtgaaattataatatcatcacttcaaaagttcagagaaatggactgcaatttccctgatttttagcacatctgcgtggacattggagaccactgactgaatggattggtccagctgtcctatttttgcgctgtcctcatttggaggagaatctatcatgctgtttcatcggaactcatcgaataggaatggagttgaatatgttgtgcatgattcattgtcctgacacctaatagataaaaagtgctctctgtgttgaaattaattggatagatggatgatgaaggtagctagctagccacattgctgcagcataatatatatcgcagtccactttaggatgagcaactagctagctttcttctctgattgatgatggcgaggtgtcaccctcctaggctcctatccgaaactgcttgaaaccatcagtaactggtttgctctgaagaaaaagcgattaagaaatatcagggatacaaatatccaagcactagatgctaaggttggaattcatggatatttgtaggtttcacccttttcagaaaaagagctgatgaactactg

SEQ ID NO: 38494 - DNA, 3190 bp, Oryza sativa
ccgtgcggtccgcccgcccgcacgcacaaaatatcgattttcccaaacgaggagctgcacgcagcccgagcgaccgcatgggataatagatccaaccacccggaaaaatgagtattgtagtagtgagttttttcatactttctccgtttcacattatgaaatattttatattttaatagatttatacatagatccatatatgtatttcatatatgtggacatgccgaatttaaaccatccatgtgaccaccacgtgattttgaatagtgagatccatacacacaaaaatagccactcaaatctcaatgtgtccatgatcagaactttacaccatttaatacaaaatccgcaaatctcgaataatgagcaaacgaaatattgatgggactcagcgtgccagtcaacttcagcctgatacatgtgcccgtcaaaccacacgaaggcggcaaccaactgtgttatacatctcgggaaacttactcaaattgctaagctcaataacatctcaattgctcaaaatccatactcgtgttagactacttcccaggataaggactagtctcatgctgtcatcgaaagcaatgataaataggaaataagacatatacaagaactaaaattcaaattacatatactttagacatacataggccaaccgggttcgcggaagcttacatgcccaacccacgagtaagccaactaagggtaaacccctagggtgtgtttggataatgggaaatggagggtgggattgagattgggaaatgaatgaagggttaggattaaatggaagagagagaatgaatggttaggatttaaagatgccttttgatgtgtgggaaatgatttccccatcccattagccaaacgctgccctaatggaatcaaatacaaaacaacaacgattcccgaccactcaaaataaactaagtcacctgcaaaacaaatttaaatatacatggcaagagttcacaaacaagttaatatactggcaaggccacaattaaacctaaataaatacaagctctaagcaaagaatggttgtttgtggtctcatattttcagcataaaagcaagttttagttcacaaacagtttgcacggaggttttataaagcatttgaaggacatgtacataatgtaaaacattgtgatcaacttaaataattttgtcaacataattatcatctccatgcttgcaccatccttccatgatagcaagtcatcataatcaacatcatatttatcataagtcatggatcccaatcctatatccattttcaaacatatttgaaaacatagaactatacttatggcacacatactatgtcgctcataaccatgagcacaactaatcgattaattttagactctaaaaaatttgtacagcattaaccacatgatgtgaatcgctctaatttgtcttgtacccatcagtaccaccacactctatatgttcaatgtggtttagaggtcacaaagtagtctttacattacttaattcctagccttgcaccagcacagcaagtgtggatccaccctaggaatgacctagagtcgttaggtggcgtgcccacgccttaaacctaacatcgcggctacgaacacgtccgttcccccaggaggcactataccattgaattggacaaacttagatgcccaaactaccccaataaaatacaagtaaataggtagttcccgcttagactaattcattctttcctggcctaccaaaatacaaggccatcccataactagcaaacgtggatgcacattaaacaatagtttaatagtaggtgactattgacgaataatccgtgtttggccgatggtgccagatatgtgttagcgcgaactaagtcgatgaatacaatgacttgggagatcttcttagctccagtacaggtcctaaaatgagatgcgagagtgccagtcagtttgatccttcaactaaccagatgtatgaattgaagatcaaagagtcgatcgtcagatactagtccttattggacacaacttaaacttctttaaagataaaaggaaaaaacataagtcccgattgaacactaaacacactttcctaacaactgactcttattaacgttcgagagagatgaaggcaacgacgaggtcgagagatgcgagatataagggagggataacgaggcaagcgagacatgaacgggcgctcaggagttgattttttttactccgcgctgtttttttttttttttgcacgtggttgctccaaatttgtgtcaggtaaataaagaaaccaacatctgtagctttttttatttgtgtcagttttttaagaaaactggtgtttatttatactatattgtaaaaaaataaaaaattgaagatttttgtgctgaaattttggtgccggtgtttgagttggttataagttgcccgtatcttattcgatgtgagtttaaaataactattatacaccttctagtccaaacaaaccggcccataccatcccgccttctcatcccgcatgcctccactcagcgtcatttacccctctcccgattaatatcttttttttccttccctttttttttctttttctctatttctttaatccgggacatcctgatccttccaatctcctttttctccttttcctgcttttttctcttccaaatttctctcctcataaatattttttaaaaaattataattatttaaggtgtgtatgtggcaacattgttactttacaaatgcttcaattttcagtaattttttcactaattgtcgaaacatgaattcggcaataataaaacggggtagcgcacgagacctaaaagtggatggatgtggagacaaaggatttagacaggttcaggccctctcgatgagaggtaataccctactcctgtttggggatttgaatccgccgggtgtagtatagatctgacgatctagttgtctcatgcccctagagggagctccctgccctccttatataggttggggggcagggttataagatagaaaccttaaccaatacggtatcggtttcctaaatctactttacaatcttatcaaaccaggactttaggccgttccataatatacagggaaacgtaatacccaagtcatgatctgttacatattttatatatataagttatcccctataactagtcggataaccatgccgtgtgggtatggggtac

SEQ ID NO: 38495 - DNA, 1179 bp, Oryza sativa
gtgcttcaatcatcttcgccatgatctcccgagtactttttccaaatcagaagactgtggagggctgaaaaaataaagtcaggtgcatcgactagatgcaccgagtggtttcgataattgtagtcaaccaagcgacttaatattaatatgtagcatatgcggtgtgaatccctgaataatatgatccaagtgatataccgattgctttgtaaaatatgatgagtgtaacctaaagttggctacatcattgaaaattcacatagcaaaatagctataaagaagcttgtatgttgtgaataaagaaatttccaaagtattgggcatacgccatgcgcacactgctttaacagatgtgcttaagtccctagaagacacatggttccaccacacctggaaatatatggcatatgtggtataaaatccgagtaaataaactcataaaggatttaccaaccgcctgaaaaatgaccaagatatctaatcagcctaagtcataatattggtcaataaaaatgcacacttacgtggcaaaaagcaacgatattgtacccaatcaattgcttaaaaacccaaacaacaccttgacttatataaaaaagtcagcagggcagctatataaagctttattgtttgacaccttttaagatgcattgtaccaactcctaaaaagttgagtaactgtggtataaaaggattttaaggtattgggcacttgatcacgcgcactttggcctaagcaaaaagtgcctaagtccctaaaagaacgtgacaggccacacctgaaaatatgggctgcagacatattaggcctaggccaaaaaatatgccttcgacaccctttaaaggatgacgcatgtaacatgcttccgagtaataaatttggaacgggtgatatagaccaagtgtagctcatatcaatcgcttatgatctgagtgattatcccttataggatattccaaaataaatataataattaaatcccgactggcgcaagtattcggttgtaacccttatggggaataataaatagtccagtctttaaacatagaaaatagacccatgatcatgaatccatattgcatgtatccagagcaagtccaaattgaaggtatgatacttgtgtttgagctagtaagcccctgagcatatagcttgtccttctgtcgtagtcacaattg

SEQ ID NO: 38496 - DNA, 892 bp, Oryza sativa
atttttaaaagagaaaattatatatataccactaaaatttagtggtatcgattaacaccataaacaaattatgtatactctatataataaatcaactcaagacataaaaaaaactattttcatcacctccattttctctcactcataccctgaagggtgccaagcatggatctcaactggctacattatagtaactatggcaagagtatgcattattgagctaaagtcatcttacccaaactgatctaccttattttaaactgttagatctatatattaaaaaaacctactgatcgatcaggccatcagagtgcgtatgtacaacacatgtatccagttccctcctcacggatgaaacgaacccactggctctcgcctctttgttttccttaccacaattaagttaaccactgaataaaagaagatactaaaaattaccccgaaaaaatatctaccttattttttaataaaactggtagactaattacttcataccattagacatctaacgactttctaccaacttaattatatttctcaacttgtataccaggtctatttacctatacaaatatgtaaagctaaatccatctacaaaggtacgaaaaaatctgtctctgaatgaagctcttttttgttactatatatctccgtcttataatggatcctaaaattttatacccactccgtcccaaaatataacaacttttagcacttacgatttgtcccaaatataacaacattaccaccaacattcccttcccaactaatcacaatcctccacctttcacttttctcacctacctctacttctcaacccaacataacatctccctatttaattctacctactttcttaataactgtgtccaactctaaaacttcttatatt

SEQ ID NO: 38497 - DNA, 650 bp, Oryza sativa
tatatctcctatgaaatatgttttggcaacattgaatttattcgtaaataacagattttaaaaatggtagaacatattgcacttttgtacaatgcatgcaaacaattgactgctgccgctttcacttcacgctccagaaaataattccttctaatcatactgcttgtaaacacttccttcgtaacaaaataactagttggtgaagagggcgcaaagtacagcacagagataaatgaattaccgaaatcgcagtcacattgacataaaaatcaatcagtgttgccaccaaccacctacacagagaaaaattacaacttcaagttaaggcgcttttggacaatagttctgacctccctactctgatgcaacacatagttcattcgttaagaacatacaaactctctcaaagccttgggcacaaactacaaacctagaggtctagagcataattggtgcacttaattatccaaagttgcatccatcgagaactacctatacttcctgtctttctgcagcaccattgtgcaggtcacagacaataacattggaataatacttaaaatagtactagtgactcccaacatttgctaatcattacgcctaaatttaaacaaaaatccaaagccttgcatgcctgcaggtcgactcta

SEQ ID NO: 38498 - DNA, 557 bp, Oryza sativa
ctgttccagcacgaatcatagtgcaatccaacgaacagaaaaacgtcaaataccaaacaaaaaatcacccgacaaagatattacagaatcgttccggaacaattcatctatgtgtcggaccgttcggtggatggacccgagatcgctaattagcaatcaatcgagccagacgatagttcttttttcaccacttaccttttctttttggcaccatatagtttttctttttagttaagtttatatacctaaagttatacatctgaagtttatacacctaaaatttattggtcaaagtttatatacgcgactcaaattcgaatttgggttcaaatatttttatatagagtatttctatacataatttgtttacatacgaagtttactgtgtatatatttataagtataaagtcacatgaatatatttttaaggattctagatttttatattatattttattcttttctaacttgttcttttttaatggtttgaaattcatggtgcagtaggaagggagcaacggggaggcacgtgcgtgttaggggagggaggggggggg

SEQ ID NO: 38499 - DNA, 552 bp, Oryza sativa
tacttcaaatgtgtatccgtatacttcaaaaactttgcacccaaagaactaaacacacccttcgacaatttggtcactttcatccacacagtgtcctcgctctctcgaatactggtcaagtaccatgtattttctttccaagtgatatttgtatccgtttggtgtacgctagggtatggctgtaatgaaaagatgatacttttgtatgtttgcaacattattctgttccgacctcttgtttttgactcaatgacaaatcccacggatgttgtatgtgtgatgtgatattcttattcgtcaatatttgtatcagttgtttggaaacttggacgttctttggttgtagttctacacacgtgtttagattactatatacggtaagatatattaggacatggcgttggtgccttcgagcatcataatcgcagtagcaaagttttgcttccgttgagctgttaatttgtctgcattcgagataggtttggacctgtacgcttacaacggatgactgatcatataccctactgaagaagacttcttggctatatacac

SEQ ID NO: 38500 - DNA, 643 bp, Oryza sativa
  unsure (1)..(643): unsure at all n locations
tctagggttggtggccaccgccaccatcctcggcgccgcatttgccgtcgctgacgcacctccgactccaccaccacaagcgcacaccacgagtgcaccggcgccccgccgcgtccaggtccaggctccatggatggactgtggtggtgacgcccgccggcgagtagtgctccctcccaccggagatgcagtcgccgccggcaccgttccccgttcgccgctcggcctccccactactttccgcgccattcctcatggctccccgagctacacgcttccgaacggtgtgggggaggggggggacggcgtncgaacccgatcggcctcttactccgatgaggagagggagccgtcggcttagtctcgccggcggacgatggggacttcggctgctatggcggtggggacggcagaaatggaggcgctggcggtggtgtaatagggggagatggtggcggcgaaaatggaatccgcggtggatgagggaggcggcggccaaagtggtgaaagaagaggcgccgaaatggacggcggcggcagacgaggtgaaggaggcggcgccgtctcggcagcgtcatgtgcggcggcggcggctcaaaccgtggggcggttagggtggaccctaaccccccctcgcccccct

SEQ ID NO: 38501 - DNA, 547 bp, Oryza sativa
acggatagttaaagcgggacacggaaacccaaggtttatcttttttcaggacggagggagtatatacgtgcacgcgcatgctgacaatgtgcggattgcagcttttgcacgtggatgtctggatgaaatgagggggaagctgaacgaccggcaaacgctagagcgcggcagctgcgacggcgccatctatgattcgagggggacgacaagagcaatgtcatgatcgggataccatgcagtatagttttgataaaaggaatatcatatcgtctgctatgagatttttttttaaggttaattaatatttatattaattatatatagacattctatataaaaatatagtaatgatatatgtcatgcaaatagagacatttatcaagagaaaccacgttggttttgatatatttaactgtatttatataaatttgagtgtatttatttacattattttcaaaccatgatattttaaaataatattttatagtataatagggattgtagaatcgggataccatctaaaatttcgtaggatcgtgtagtaatg

SEQ ID NO: 38502 - DNA, 670 bp, Oryza sativa
  unsure (1)..(670): unsure at all n locations
aaacaaaatatgatctcatggtttaataatgctgatgcccacgcatggcgtgggccacccttctagggatcctaaaagtcaaataatttcctccggaggaagtactatgttactgtgccaaagtatatgcaactctttgtggtgaactaatgcacactaccaattggcatgctgggtctgaactccaaaactcttttatcccggcttctgcttctacactaatacattatcaaacttggacgacttttattttgttacatgaaggcatgcttttaattggcgaaggacccctcccactcccctgactgtttattgtcaaaagatcttaaaatcttaactcactaacatatgaaactattaattaatatcaacatgcaaaaattttaatatatagatatgagaatgactttntagcagatttgccactactttcgggcaaatttatatttgtaaaggttctcatggaaaaacaatgataaaatgtatgcgctggaaactatgtgaagtaatatcctacacacgtccaaaaataacgaatttaattgatctaacctggcctcaatatcagcattagatcccatatatatgtaacagggccaccttcgcatagcattctacttatactttcacattattctaacgtgggtcatttgatgcactgggattaggg

SEQ ID NO: 38503 - DNA, 687 bp, Oryza sativa
aattgcgtatgcagtgatctgcgtagcaatagtgcaactgtacaattggtgaaaatctccctaaaaaatggctaaatatatggcctcctattgtcccggagccaatgacagtgtggtcctttggctgcagccctggcagcagcattaacgtagtagtgagtgtccagtgcgcagtgatccaatcaaaattcgagacaagatcctccgggaagcatcaagcatcttcgcgtacgagtcgtgagacgatctgtccatgcctctgaagaaaaggaaaaccacggattgttcttcttcccctcgcgctgatacgagtgaaagtgcagccgaagcagctgtcgtagtggccgcgtgaaatgctgaagttgacgggtctgaatatgtgatcggtctggaggacgaatggacgatgggccgacatgggatggagttgggggttgggagaaagcgtggcgaaacgcgctgtgtttgctcgtcatcgatcgaccagaggaagggcagagactcacattaataaagcttagctgcaaccatacatccgccgcaggtgtgcaagggcaatcctgttcggttcacgtctctcttgcccttgtttcgcacgagcgaattccgtctcttcgttttggacctgtccctcatgtactacgacgaacggcacttaggggatcgacatcttcgtgggacaggatt

SEQ ID NO: 38504 - DNA, 694 bp, Oryza sativa
aaggtaagcttattttggatgaactggtagttgctgacatgaacagttgaacatttccgccgggcatgctttattgaattattgacggtcaaaatagctgttgctagtccgtttgtctttcccttggtcaaaatttgattgtccagatttgctgtattttttaaattgctggcaaagatgcttatattgataagtgtccatcttgtgggtggaattaaacatggtggtattacttagtataaacacgagttagcaaatactccctccatctcgatttgtatgatgccacaagccaatggagtgaacaatctaaaatgagtcaaaatgtatgatgccacatggagtgaacaatgttccaccatctttcccttctccttaaaccatggcctgatggcgtgatgcggagccgtttgcatttgcatgtcgctgccgtgattcctgaggccacctcgaaccgccttatgctcatggctcctcgccaccgtggtggcagtggttgacggcctcattggtatcatgtgatgtagccgccgtcctcgttgtacacgatagagttaagctggtgctatgtttgagagaggccatgctactgttgcacttgcatcgcttgtgccgccgtcgagaaaaaatcgtgcgcgttggcggcggctccccaatgttgtgttgggacttgggacagtgggcttttgaaggg

SEQ ID NO: 38505 - DNA, 1017 bp, Oryza sativa
gaattcgagctcggtacccttgcaggtctctacaccatccccattcaacaggacaatcacgaaactgaagatagcgggactacaagagataaaggtgtataaaacactaaaattgaaagcctcgtacaagtgagaaaataaaaatagcaaatgttgtctagatgtggataaatacctgctcgatgagagaaattaaacaggtcaagcagtatatagccttttcccccttctcatgcctaagtgcagatttcaacagggatgttctttgcggaaacaactgtgtattgaacaaataaaacatgtcagtaaactataacatacataaccaccccatgccatttgctcttcacaattagcccataatactaaagatgcagatgtagtccctcaaccttggggaaattaggccaataacctctaagtcatctgtatttacagacataacacaattcacactgaacttcctggtgacatgaccaacaaatgaaatcatgtaaaccaaatcatagctgctgtattgctgggggggagggtgattatatttttcagttgggaaggggaaggaaaacgcaaggtaactaacaaacatgcaaatgtttcctcttctgttgttgctgagtatggaaaattcaacattctaactactcggagagttaggaacagtaccaaggagaagcaagaacgagtccactaatacaacatggtcccagtggcagtggaatgcttctgaaaagatgatacattatccttttccttttcttcggcgttgcttgtcacatatgaagctggagcacttaaggtgtctttgtgaaagttttgcagtggtgttcgctacatcatgacaatggggaaccacccgtaggggtttactgcacaaggatcacaagggccctgcagaggaaaggcttgacccaggctagtagaataacctctacccgctaaaaatagcgggagtggtatgataccatccgaaaaaggtaagcaagtgaggcatatcagatgttatgcagattctca

SEQ ID NO: 38506 - DNA, 1531 bp, Oryza sativa
aattttggttttgatccctttcatacccataccgttagttgaatgtttaattctaatgaaaaggacctttttgcccttagacatgaaggaaatctaaaaattgtagactagctatattgttggaagtgtataattttgttatataagactatcatattcatgactttattgtacaaggtattattcatggcaaagtttatttttacctaatgacataaaaactaatatttatttacctactaaaagagtatatgtagcatttgtttatggtagttcaacatattttctcctgttgtatatattatataggaatgctttccaaaactatgtttatcatttaaaaaaatgctacatgtactttttaaatatatattaaattttttatgtacataaaacttatgaatatgataatcacacaacaaattttatacttccaacaatatagtttacaaatttctacatattcctcacatattgaagggtaaaactgacttttatatacctattaaacgggcaattaacggccagggtatggaagagatccaaatcaaaattcagaggtatacaagggagtgaaggaaattcatgggcatagaagggatcggctaaaatttcacgggtatggaaaggaattttctctcttttaaatgtgatgtatgtcaaatgtcagtatgcataccccccaacacacaccctcaccctcttgtgatcttgcacttatacttcaagttgcctatagtattgttgtccatgttgtgttatagtttggtgacagtctttctaaacaaaaacaatgatggttcatctatgagctaaactctgtttcgcttatttgatcctgcctttttcaaaagaaggtagttatcatttcagtgtcttaattgatgcccatatgtgataatgtgaacttgtgggcttcttaattgtccatgtatacatttcgtgatttcctgggaaagtggacagctggacacacatgggggcatgcacacttaattgctgcactgttcatctagtgacaagaatgggcaaatgttatatagggttgcaagtcattctatgtgtgcttaacaattgattttgaacacaaatttcaacagaactcatccatgaatattgcttgtttgaagaagttatataaggacactgctatatctactgtcacataaattacaagtagtttcttgtttgacttaatacaataaggacagcacatccctcctcaaaggctcaaactgactacagttatatcatcattttgaacttcatgttcatgttctctcattttttattcagggatttaaatcgccacttactgctgcttgtttctttaggagttagttcaaagggtgacataactcaccttttactgcagcttgaaattctttttcctctctctttgattcattcttgcaccctcttgctccctgtggacgttgatgcttcttttgtttgatttgcttcttgtttcaatcgtttacataatctcaattatacctcatacttgttattttcctgttgtttttcgaca

SEQ ID NO: 38507 - DNA, 703 bp, Oryza sativa
cccctagcactgctgatcgtatgatgcgacagcttgtgtagtttcctttaggaggatcaattttgcaacaagtgaatggcatttattctttcgccacgtatatgcgcatgacatgtggtccctggacctgattgtcatgtactcgggccgtggccacaaataagcaaatgcgactcaactatataaagggtacaagagcacatttccttttcgaaaatggcacgatacgtaatgtagaatgatttcctgaaaccaaaggaaggtatttgtgccaacactcaattgccctgagtatttagggcagtcctagtggtggtggagctagaaaatttttcatggttatttatgtagatttggatggatttatatgaaaatttaagagtctaaggatgaatgcgaaaaggctatggagtcagctcacacatggcagcgcccccaatacatatattactaatcaaatgtgctaatttaatatcacatctcttacatcatgttttcgatactccaggtctcatgccaaacataatttcatcatttttttctcatttagtatggagccttcgatgtgcatactccatgtagttgggttcccaaacggggaaaaattctccacgcgtgcatcacttctctttgccatggtgctcacttgtcatattgtgttttgtgacacgctgaggtgctgataaaccttcttttgtgacgc

SEQ ID NO: 38508 - DNA, 654 bp, Oryza sativa
agagaggacgagtgggcgactaaattgtcgctggctacacacacaacccaacgcaagtgcagcagcaccaggctagctttgattgggacaagcgattgtgggcccacgtgagctgactcgatgcaggatgaaacaacagcaacaagattaaaaaattggatggggaagctagctaaagagggctctttgtttaggctcaggcttattggtctagacttttaagtcagcttattggcttatatgatttataagccagtggatttaatgtcccaagtttagtggtggagtcatacatctatttcatataagccaaaaaaaacttctctaacctagcttttggcttaatagtgttagagtgacttatggcttcaaaaaagccaaatgaaaaagctgcttgtttgttttggcttggacttttcaacttataagttggcttataagcctaaacaaagagggcctaaacaaatagataatagtcgatgtgaacatgcttattgtatacattagctcttagcaatatctctaagaggctgatgtggtcatttttgcagcccttagcgggcggcactattgaccttgttctaatggttcaaaatcatccaatccaacacctagaggtgggcaaacgggcgggccgggccggcacggcacggg

SEQ ID NO: 38509 - DNA, 598 bp, Oryza sativa
aaagagttgagaagcgtgctgggcatgtgtcccgatcgagaggagatatagttgtacaggggctaatagcttacagtaggtaggtagattcgtgtacgtgtggtgcagctagctaggggaagttagatgacggcaatgcgtcgcagcctctcatatgatatcgatcagctggagagctggcctggtactcttgcgcagtagggaaaggaaacggacggagtagctcacgcaatcgctgaccgcatatatgcaccccgggtcactagctacctttacctttttcgatctcttctcttcatctgcagtgtaaagcttttttgactgcttttttttttgtgtgtggggggagtgcttgtaaacaagtccatcgatctcgttaataaaattcgtgaagaaatcaattaatttaattattgtcccacagggccgggctgcatgcacagcaaataaattaaattaagaaatggacaagagcatggtagccagacaaagacggacggacggacggactgaggacctttatttaagaaagaaaagggggcccctgctgacctggctcatgcatttgctagctagctcatcgtcgatccaatggcga

SEQ ID NO: 38510 - DNA, 543 bp, Oryza sativa
tcctttactattaagaaacataataaactaatggagtagattgttggagtgtagaaatttatttgatgaaactattatatttatgagtttgttatgcacaatattatttatgacaaatttacttttagatatcatataaaaaattaatactccctccgtttcacaatgtaagttttatgacttacattgtgaaacggagtagtacttatttattagttattaaaacttttttttatgtagcatatgtgttttgacagtaatacaacaaatttgtcgtataagaaaaatatactaatgtgctacatagaaaacttttaataactaataagtaagtactattttttatgttatatctaaaagtatatttatcgcaaataatatggtgcataactaactcataaatataatagtcccatctaacaaatttctactctattattttatatgttttttcatagcagagggtaaaatgggtttttttcattaaaaatttaacggttaactaatagtcaactagcggaaaaaggcatggaagagatccaa

SEQ ID NO: 38511 - DNA, 669 bp, Oryza sativa
tagcacattcaaataagaaatgttggacagtttcaggatgattacagttaaagtatttgggatcacccagccatttcttttcaatattttacctttgtttaacagcatacctttttgtaacaaccacaaaaatgtttgaactttgacaggtatttagctttccatacgtgtgtaaaagaactatcaccataatttctcatcatctatatgaatttcactaaaaaacctgccttcgttcccccaagatcctgtggtaacatgaggagcaacagacagactaacatgttgcgcttgtgacagtacatatctcatttatcttttgggaaacctgttaaccatctcctaaaactttgctgcccattggtatagcactgactcactaatttatccttgtcacagatatcataaatagcagatattattgagcaaggtttatcaccaatctatttagcctctcattatctgctattatcaccattacaatttacaaatgatgactttcctgcctttcaaatgaatgttttgatgaaccttaagtaggtcagcgcaacaagatgagtcatctaccttcctctttttctagtttccaccaacatttattaaggacacttacattcattgcctcagatttttaataccaagaccccctttctttttttgagtgacaaa

SEQ ID NO: 38512 - DNA, 551 bp, Oryza sativa
gccattatctgtattgccgtacttccgcagggaaagttaccctctcatctgatctaccattgcatacatctcaaaaggaagtgagtaaaaaagaaacaaggaccaatcttcagagataagtttttgaaacctatcttcagagataagttcactcggcgataggagaggacctgatttggactcaaatcaggtgttgacgaatagagtagcaagagttttttcgacgggtcaagacctcaagggtcttaacagttgaactaactcggttatgatttggacacttggtgattaactactgataatagtactacttattgttattggcttgttacatcattcggtgctcaaaaatcagatgcaaatttagatgggacagacagcagctactagcaacataagagaattatgttcagtgtatcatgcatgactaaactctgaacgtactcacctggatccagatgcgagcagtacagtacctgtgcacattgcttgtgtattactccacttaattacgaactctattattttcctccgataatgcccgcagaaca

SEQ ID NO: 38513 - DNA, 677 bp, Oryza sativa
gcacacgtgtagggtgcagatcgtgggtgcatatgaacccaggtgcagattatccaactcctataaataattactgcctcatgttataagttaaattttaactgcatgctatgtacctggtggggagcaaggtgagtgggttagaggctgtatcaggtgttatttaatacgtagcaccttataacttataagatgaggcagtaattattttactcagccttcactaggagtggtgtacaggcaaattagaggagagatgatccagtgatttttttacttgccgtacaatttttttactcattaagcgttcacatcaccagacgagtaactttttaactcgggacaaatgggatgggaaaagcctttgcaggcggtggtagtagtaaaagcggtccatgaggatgcggcacatgagaaaggcgagaaatccgaagttggacccagaaaaaactaaaagccaggaaggcgagcgctgagaggcgcgctacttccttcgtagcgccaccatgtgcgcgcgcatatatatatatatatatatatatatatatatataaaatatttacaaatagggagagaaatagaatttacaaagttattacatcaccgtgtatatccatgatttccaaataagtctttctactttcaaataggcccaaactatctcaatatttttcttc

SEQ ID NO: 38514 - DNA, 611 bp, Oryza sativa
aaattgggtgcggtgcggttcgggtcaagattcattcagaggggaagcagagcgacagcggcgcaggaggctgcccgacaccgggcgccgcgctgcgctttgcccgggtggtgctctgatgggtccggcctgccgtggctgctgccatgtccgccgccgtggccgtggccggctccggcatggccgctgccgtgaccaccacctcctccttccctaacggtgaccgaccacagagccacagctgctgcgtgcgtcgtcatctggccgacgagatcgacgcgacgatgaacacggaggatggcgccgggaaatgttatccactgacatgtgagcccagcttgtcaatcagttaaaattggtgataatactacctaggatctcggttgatccggttttgtaaattgaaagacctgctatacctgtcattttagtttagggatgaatttcagactgagagataaattgaggtacctaaagtgaacttgctcaatttcacgtcctcgtactcaatttcacatggtacgtactatgctaccacgttaccaggctaccagcacatgaagttgtgccctcaaatatgtacataaaagccgtgagtttattttagatgt

SEQ ID NO: 38515 - DNA, 592 bp, Oryza sativa
cgctccacgtacgttcatcccatcttcgatccgcgtgatgtgtatatgtgcatggcaagacaaaactccggccggcgaaggaactcggccatggagatcgaggaggaagacgtgcacaagttggaggatgcgtcgagagagagagaggagaaggaaagtgccttgcgtttggggaggaggaatcgaagatgtaatagccggccataaatatgatatatatggagccggcctcacaataaagaagatgagaagtgggccgatctggcggcgcggaagacgtcgtcacaaatctaccggctctacgcctctaccggcgacgtttccgcgcggtccttcaaccaaaaaaaccagatgcaacaggtccctcaactattaaaactgatgtagataagatctctcgacggtttagatggtggttttggctgacgtggcgcctacgtcgcaaattcgacttggtcttcatctgacgtggcgcttacgtggcaatttgatccgaaaaaataataaaccatgtgggacccacatgtctgtttcacatacaaaataataaaaatggtgggacccacgtgggccccacatgtcatcctcctaa

SEQ ID NO: 38516 - DNA, 677 bp, Oryza sativa
agtatttgtaattttgtaaaatttactcctttttctaggattttgcccctttgctttaaaataggaaaaccgggttttgacccgttgttcgccaaacaggttttacgtttgcgtagacgaagccgcagtaatcgacgaagagctgttcaaacttcaaagtctctacgctcccctcatttagcatgttgatcatatttttataaactagtatgttgacctgcgcagattgtgcagctaaaatcattatattttctctcatataataacatacatgttttctcaatgtattattcaaatatattaaaatgacaacataattttaaattttgtattaactttatgaaactactaatgtgtaatttttatattgtattttatatacgtgttagttattaattatttttaatattaaattttagttatttgtaaattatattcgactctagactcgtctttcaatatttcttttttgaattccaaattttcgttatttgtcaattgtatttctatatagactctaggctcttcttcctatattatttatttttaattctgaatttttattatttctaatcgtatttctatgtgaactctaaactcatctttcaatattctttaatttttaatttcgaatttcaagtatttctagtattgtattcctatattgactttagact

SEQ ID NO: 38517 - DNA, 631 bp, Oryza sativa
cgattccatataggaattaaagaccatatcctttctttttaaaacttgctaacgtacattgtaaattctttgatgtggaacaatctagaaatgtatatttgttataagacaatccagtttagtgataattagctaaaaacacaatgaccattacttcaatatttcatgagagaaaagttagaacgtattgcaaatatcaaagcatttatggatgatcatagaatagaaatcttcaaaaagaattaaaaaatggacttgaaataaattgaaaattgaacaaatgttgatgtatttaaaacccattcaaaatagaaaaaatcaaacaatttacaggacttttagaatgaatatatatatatatatatatatatatatatataaataatagaatagaataaaattttaatattattggatttgttttggggttgaaaatatcttatggggagtaaaatactctaaattttttcagaggaatttcatttcgatacaatattttggtttaagaattatatattgcaaaggtaattatcagaaaataactagctttcaaaggacacaaataagtttaattttaggttagaatattgtaaaaaatattttaatgaaaaatcacctgtgcataaatatt

SEQ ID NO: 38518 - DNA, 542 bp, Oryza sativa
aaagcatgcagatgcagttaatatattactatatcgctgtttacctgtattacaaatgtttagtagtactccagtaattatattccctccgtttcaaaatatttaacaccgttgactttttagtacgtgtttgaccattcgtcttattcaaaaaaaaattaaagtaattagttattcttttcgtatcatgtgattcattgctaaatatacttttatgtatacatatagttaaacatatattaaaaagtcaacggtgtcaaatatgttgaaacggagggagtatttgagaaagcgttaatattgattgtgattagccgccgtgggcaacaggaaaggcacatggattacgcgcgcgattgaagaagaaattccagtccacagtcaaggcaatgaatattcaatttacatgatgggcaaattggctacagtgttgttgactagactcgaggtgaggagagtcgtcggttcgatcccaaatccaaaagcaagaaatccaattcccttccccaatcagcaagcacaaccatggcgggcgctgtcct

SEQ ID NO: 38519 - DNA, 755 bp, Oryza sativa
aatttgaaaatatgattaagttatataattttcctgatattgaattatcattcccggcaaagttatttatagtttcatgttgttatttatacgtttatatttccttcgtcatttatgcccaactaagcttttaggggtaaataggggattttctcctaagcttgactggagccaccaccacaatgaatcttggagattgtggtagaggaggacactagcggacgcgaagatctcatagaggtggagatcttggtcgaggctgcagaggtatatatcccctaggaggttgagctcgcagtgacaacagagggtaagtaatgagagagagtagggcaagggagagcgggaggatgacgacatacagggccactattttattaatcttttcaccgactagattgtcatgtaggtgcacataagtgaaaactctcccagcttggatattagggaggataaagtggataattataatagttgaggagtgtttcctatcccgaatttatagttgaggggtaaattttagacaaacctgatagttgagaagtgaataattttaagtatatgtacttttctctttccaccaccaaagagattgaattgtcgccatcaaacattaattcgatcaagttctgtatgatcggtgatgagttgatgggtaacctctggatccggattccaattttacatgcttttcttaggaaggattctaatttggcatcttctctaaagagattattcctttgcactaaacttct

SEQ ID NO: 38520 - DNA, 502 bp, Oryza sativa
acatatatcattttctccaccttgacaccattgtatccaaatgcaagctattgtatttcaaatggcccaaaatacccattttacatctcttctctcccacctcactgacatttgggccccacacatcatcccctacctctttttttctctcgttacctctctcgtggtctctccttttccatatgcctgaggaaacatggcatcgtggaggactaggtggctagagggggaggggtctcaccgccttgaagataccaacattgggttgtgtgcatctgaacaggttgtcatggggaccttttctcgtcggaagtggaggacgggcttggagtgtgcaaagtggaactaggctggtggagggcagcgacagtgggtttaggttttaggttcagcgttggacaatgatgacgccatggaagcagaagagggtggaggagatgttgtccaagaacctggtggcggagctatgcctctccaggctctactccatcgtgccaaagat

SEQ ID NO: 38521 - DNA, 658 bp, Oryza sativa
gcaccgcgcagcggctggccgtttttcggttaatctatagtagctgagctgggtggtagtacaaaattatatattttttaatataattttacttaaaattaaaatttattaaatagttaccttgttgtcttaagattttgaaagaccaaacatatatattaaccatttcattattattcttacaattattattctgttttataatccgatcacactattgtattcgttataattaaatcttttcgacaagatgtcatatgactatattctacttaaagaaaaatatatctttcaacagttaaaatttaatgttgcatgcgtgataatgtggctactccctctctctcatattacatgcatgtagtaatttttaaaataaattttcttctaaactatttatccaatctacggtatgatcgcaccattatgtttgttgtaattaaatctttacaacaatatataacatgattatattttgatgaaagtaatacatatgttttaacatatgttttcatttcataaactttttaaataattcatttgctatttttttcagcatgtataacttaatgtttcacccatgatccattaaaaatttaatcaaccatttatttcaaggacaactgtgttattgcccctattttatgttgcaattatg

SEQ ID NO: 38522 - DNA, 658 bp, Oryza sativa
aatggagtatgaatagaacatgaaaaattctattttatatcaatgaaagaagcacccgttcagaattaatgaatcagattttcatacgtgggctaaaataagttttttttcaatttctaactaatttaagttgtttttttcatttatattattagatttagcactatttgatccactaaaaattattgtaacatatagttttctctatattaaattatttatagctaaatttgaaaatatgattaagttatataattttcctgatattgaattatcattcccggcaaagttatttatagtttcatgttgttatttatacgtttatatttccttcgtcatttatgcccaactaagcttttaggggtaaataggggattttctcctaagcttgactggagccaccaccacaatgaatcttggagattgtggtagaggaggacactagcggacgcgaagatctcatagaggtggagatcttggtcgaggctgcagaggtatatatcccctaggaggttgagctcgcagtgacaacagagggtaagtaatgagagagagtagggcaagggagagcgggaggatgacgacatacagggccactattttattaatcttttcaccgactagattgtcatgtaggtgcacataagtgaaaactctc

SEQ ID NO: 38523 - DNA, 958 bp, Oryza sativa
  unsure (1)..(958): unsure at all n locations
catgctccaaaagagcagggttttgggataaatgtttttatcacatggatctgtgatagatgtgttctaaaatatgggatttcgtgatatctactcttatttgtttggtatggttagatcagttagagcaaagtttaatacttactggctccaaatcattaatagtcaatctaataactcactcatacaataattacttataaacatacactacatcatnaacatatggtccacctcttatacacatataacattttggaattcgtattgcagctgaatataaattcatagcccgattttcttctctcttctctcctctctcttttacatgtgcttatagctgacttgtagcctgctattgtactcgctcttaggccctatttagttcccaaataaaaacttttcaccccgtcacatcgaacgtttggacatatgcatggaatattaataaaaaaaactaattaaacagattgcgtgcaaattgcgagacgaatcttttaagcctaattgcgccatgatttgacaatgtggtgctacagtaaatgtttgctaatgatgaattaattaggcttaatgaattcctctagtagtttacaaacggaatctgtaacttgttttattattagattacgtttaatacttcaaatgtatgtccgtatattcgatcgtgacatgcaaaaacttctaaacatggccttaggtcttgttcgtttctccaacaagtcggagatgaaattttggatactcgtggcacgcttttcaaactactaaatggtgtatttcgtgcgaaaactttatatatgaaagttgctctaaaatatcatattaaatccattttcaagtttaataataattaaaactcaattaatttttatattcatcttaatcttcaggagaatcaaacaccacctccgtgattcagtaaatcaaacgagtccgttgtgttggttaataaaaa

SEQ ID NO: 38524 - DNA, 682 bp, Oryza sativa
ccttcattttttttcttgctacctctctcatccacgtaagtttataattaatttatagctcactattatctatgctataaggcagagtgtgagcaagttgggttgcagtttcctagtaactgtaaggtaaaatttggaggcagctcatccaagactgatccatctattggtatactccctccgtactcgtaaaataagttgtttaggacaatgtttaagtcaaactttaggaatataaatcatgaataactctcaagttattgagtttgaaaatgtaaaaattatatgaatagatttgtcttgaaaaatactttcataaaagtgtacatatatcacttttcaataaatatttttatagaaataacaagtcaaagttgtgttttgaagaccgtatcattgttcaaaacgacttcctttacgagtacagagggagtattcttttgttttaatatcaataacatctcaaaagtattttctatattttgtcacttttcatgtacaaaacatgttgatattgtggttggttgtgggcatgttacattttcggatttgaggtagaaaatggatgatgccatggatgtaagaaaatgcgcagttgtaatttagtcttaattatatttgataatcaactttatccttggtttgtcttcatttaaacagtcttctcccccatgtccggcgg

SEQ ID NO: 38525 - DNA, 685 bp, Oryza sativa
agattggaccgttgaagctaatgtcctatgtgaacatatatctggtgctaaaattttctaaaacgagaaatatattcttcggaggtatattatgaacgatatcacaaacttagtttcatcagaaagaaatatagaaaaagagtcgagtgcatgaatgtatgaatgtatccagcttcaaaactagtaactgcgtattctgatagaggatcctagaaacaattgtcaactggaaaagaaactaagaaaggctataacacagtttattaatggttaatgggtagttgtgtacttgtgttcataagcaaggatagaagacattatgaaaagctatgctggtaacaggtaaactgaccagttactgtaatgtttcaagtctattccagtttaccttttaaaaaaaaaatcttacaatatatttttcctcaaatgtaaccttttacaatcaccagcttcaagattacatacaacacatcaaacttcgtataattttacccttgtactggctttatcatatctattggtcacagacgatataccagtaaccagcatcaatagagctgattttttttcctcctctgatcataagtcgataatagggccttttactttgaccacatttctacgtacgttgacagtcaaaaagtgcagcacaacactgggaaaatgcaggggaaaaaaataccaa

SEQ ID NO: 38526 - DNA, 640 bp, Oryza sativa
cgattaatatgagaatttctagatcgtgagagcgaacgtggaggctcctttttctattcctttaataagttaatagatgtattgattgcaaataaagttgcatgctacttcatctgtttcatattataagactttctaggatttcccacatcatatatatgctaatgaatctagacatatatgtgtgtctagattcattagcatatatatgaatataggcaatgctagaaagtcttataacatgcaacggagggagtagttataaagttcgtacctaaacttgattctgagccaccttaaaattattattcatattccttgctgtcttagtctatttattattacatggtcaattattaacataacttagtattgcttgtttagacaattttacactccatgtttggtatatggatgtgaatgtgttggtcagtcgatgtgagtgattgttgaaagacgggtggagacatgagcatcacccgcaacataagacttttgcaaataccaaaaacttaataaaacaaaataatttcgactgggacgacatggatacaatatgtgtggttctatgaaacaacaagccatcgattgctgtaagtaaaagacccagtcaagaagcttcgcacgaaacaatcagagt

SEQ ID NO: 38527 - DNA, 513 bp, Oryza sativa
atttatttgtattttagattaacacgcaaatcatcgccctcattcgggccctaggtccacgcagcatcgggagaatgactggcaaataagggtttgggtaaatttccagtggcatagaagaaaatttacccttcatttcagtgtgcagagcagatttgctatgaactgcgtaccaagatcttgactagttgtgcttgcattgcatgttcatatcagcaatttaatactacctccgttttataatatttcatattataagactttttagcattgtccatgttcatatggatgctaatgaatctagacaagccactagcctattattgcaatgtagttgtccttaactacgattgcaagcattagaaaacttatatttccttccaaattgatccaaggtactcttcgtttcaaaatatagcgaacttggactgaatgcgacacatcctagggcctgttcactttgatgcccaaaagttgccaaaattttggcatatatagttatcaaaatttggc

SEQ ID NO: 38528 - DNA, 710 bp, Oryza sativa
atccattagcgcgtgattaattaagtattagctaattttttttttcaaaaatgaaacaatatgattttttttaaacaactttcgtataaaaacttttttacaaaaaacacatcaaaatagtagtttgaaaaacgtgcgcgcggaaatcgagaatgagaggttgggaaccatcacaaacgaactgagccttagagtagcttatgactatagatatatatgacaagttcattttcaatgcagctgtttttttttaatttcggcttatgactgttgaaaaacacaaaaatagattgcattgttttgtagactgatacttaggctgcttcaacttctgataaaatattagactatatcaattactatgaaatttacactcactatattacagtttctagataatcagaatcaatcaattgataatactgccgggccaacgccaagcagttctatgattttctataatttatatagaaatatagagtgcaatacatttttttttacattcaaactttaattctactgtgcataaaattgaaacctatggtgctaaagttatgctttatcaatcagtactattttctatatatctttggtttctgacaacatatagcagctttggtgaggtcacaatctgattgctcttatacatgtttatgctttatacttctaagttgccaaatagtgaacaatttcagtttgtcaagtactat

SEQ ID NO: 38529 - DNA, 530 bp, Oryza sativa
taattggaaaattttaaaagtctctatcgaccatgaagaaaaataattggaagacaaaatgttgatatgctaaatgtgtggaataattagcagtacatcagacgagatgcatatgttgtactacgcttagaaaaaacagagtgggtagtaaatttgatttcaaatgattagttaacctcatcaatttctagttgtatctatttttttcttgtgttcacatatcattattttctttccatagcatcattcatcaacaagctgaacgaatagcgcacatatattgttagcctaggaagcacaaaaaatgaatgaacaaagtactagctccctaaaaggattgaagaataagaactaagaaatatagttacctgggagggagaagccaacaataaagctctaatcttcagaagaacaatatttgcatcctgaacaagctcttcaactttggaaatagcattttgaacagctaagagctgctccatcgtgttcattggaggtggagatgtcactttgacctccatcattggatt

SEQ ID NO: 38530 - DNA, 580 bp, Oryza sativa
attcaatgtaattatgtgccttgtttggccgatgggttggggtggatcaccaacgctcgtcttgtacagtagcagttagtatttttaataaaaatgcgagttctcacctagaaattaattgcttacctcgtattttgattatttcatatgtagtatcatcgggtgatcagggatgttttttttatcaaaacacagtgagggaggctcccacgatatatattaaagaataaaagagtatatacaatggcaagcaaaaacaaaaaaaaagaaatattacaattgatcaatccatgattgcactaaaggtttatgcacatccttgagtctagataaatgtagactcgatctgacttcaagtttttcttccaagaagaaactgaaagcagaatgccctgaaaaaatagaccattcctttcctttcaaatattctaggccacaagcagaaagagttccatgaaacaaggaaaaggaattgaagccttttgagtttgaataattttgatgaaagtccaaagagggcgaccaaatccagcccaaactacttcaacaggcaaaaactgaaactgctgaggaaaaaaaa

SEQ ID NO: 38531 - DNA, 610 bp, Oryza sativa
agacgaggacggggctgcagcggctcgcttgacgaacgcggacgacggacgagaacggctcgacggagggacgaacgccacgacgaccgggaacgacgagaggacgacgacgacgacgacgaccgggaccggcgagggggcgacgagggccagccagcagcagctgcacggggacgaggacgacgtggaacacgccgctacgatgacgatgacggaggcggcgccgcgagacgacgagccgggcaaccgatgggacgtcgatcggcgaggacgaacggagacgacgatgaaacgatgatggcaggcagcagcggctgagcggaggaggggacgcgtggaacacgccgctgcgatgttggtgaaggtggtggtgcagcggggcgacgagccgacgaggaggaaggagaggccggcgcggagacgacggcgttccggcgaaattcgggcgaggaggaggtgatgccggggaagaaggcgatgccgcggtgtcgaaggaggagatggcggcgtcgatcggcgcaccggcgatgaacagcagccggctggagggagtacagtggcaccaatgtcactggttgccggcgggggcaccgttccggcgagtttccgg

SEQ ID NO: 38532 - DNA, 2117 bp, Oryza sativa
ttgtttatccaaatcgaattcgaattcgagtttatctctccacctaaccctatagttttacggctttgattcctctcggtgtgggatcgatctcgagcttccgtgcctatgtaaatgatccccttgtcgtcctctaccattgccctgaagccacgtcctccgccgtggtccatagcacagccgccgcgtccgtcctagtggtcgccgcaagcctagccgccccacgccaccgttgtggtcgccgccgccgctcactattgtcgccatcgggttcgccgagtggagccgcaccccgtccgctcctccgttgccgtcgagacccgccggaatcccgccgtcgacgccgcccagagccgcgccgccgttggagctcaccgccggccgccgttcgtcgtcgtccgtcgttgttctgagcaccggtgagttcacctcgtcgtcctctccacgatggtgcccttggatagcccggccgagccctgtagcaccggtgatctcgtggtcccgtgcagtgccgacgatgacgtcatgctgacgtaagaaaagcccttttccttcttcaaaataaatctttattgcgtcgtaaatcataatagttttctgtattaggttaaaagcatattaatcttacaaaattcataactaaatcatcgtaacttggaatgttttcttttactgggaaaactaccagagcattgtctagtagtatattttcattacatagagcaaatatgtacaaaagttacagggaaacacaaaagattacaaagtttgtaaccagtcaaaaactaattgctttaaaggatccttcattctgcagatatactgaagaattttgttcttgaaatggtttctccatgattgaaaaggaggggaaatattctgaaaaataaacccatttctctgcttccagatgtgccaagaggcaataaagaaaatttccaagaaaccctttctggcaaaattcagccttactaagacattcatttgaaagaactcatgtgttgattccatgtgattcccagatgttaccaacatcttacactgaacgggcaggtgaagaagagatgtagcctggtttctctgtgtcccccacaaccaacgcaacataaatcttagagtacgttttaagtttcctactttcatcatcttttaatgttgtgaagttaaagtgatccagaggccatacgaattttatatgattgatctaagcaataaatccagggtttacgcacaacaattactaacctgtcccaaatctacccgttctataccatatcggtacaattttgaaatatcatgatagaggagttcaaaacgccaccaatattatttatggtacagaaatataatgatgaagtgttcaacctctcatatctatcaaattttaaattttatcaacccattttcaaaacatacatgttagcgggttctaacccggaatttcacaaattcgtactagtacgtaggaggagttcgcaaatggattttaaaacctttcgcaaatggattttaaaacctttcaaaacacgttagtactggtttgtaatgattaataaatgttttggtactagtttgtactacaacttttagaaattaaataaaaatctgaaaaaagtatgggagagacagctcttcatgaaattaacaatgggacagaattttacctctgcattgcactggccattacagattgagggttatctattaacatttattgagtattgaatacaccacggttattcaccatttacaaattattaggagcaaacttttattaccaggaccgagttaaggataagtaattccattatttgctgtaatttagtcaacacataattattttttagaaaaagacatacaatattgtcgcaaaccaatcttgatgacccatgcattttctactttaaattcacttaacctggagacaaacttctgcttagctgctagtggtgttgctgctgttcccaccacccctaagctgccactcagtgatgtagctcggcttggtgaccaccttagccacatcgacatctccagtcagcattgccacaaccttcgacattggcggtcgctggtgcggtgagccctgagtgggggatcctctagagtcgacctgc

SEQ ID NO: 38533 - DNA, 502 bp, Oryza sativa
tggtgggccccacccgtcagcaagggtggcggacgggcccgcccgtcagcggcgcgcgcgcgggtatagtccgagtggcccgcggggagaggagagagggggaggtagatgggccgaaccggcccaagagggggagggagggaaaggggacctttagggtttttttctttttataaaaccattttaactttgtttatttcttaataattattatttgtgctctgaaaattccactaaaatttatttacgcattttaggcttttaggaaatatacaaaattcctccaagccttatttgacttttaactttgcacattttaatttttggaggctttcacacagattttaattattctaggtataatttagaggatgcattttagagtcgttttgggacgtgacaatctgcacgttcacggctggttcacctcccgccctactcgatctcatcatgggcagatctgtggcaacagtttatcaccaacttccaaggtacatacaag

SEQ ID NO: 38534 - DNA, 623 bp, Oryza sativa
gtctagtcataaacaaaagtacacggattggagatggatgaagtcgggcgtcgatggacattctccagggcaaatgaagactacacgagctgcggcccggtagtcgagatgtcatacggcagagggttggtgccctgctgctaggggctcagttctgcctgcctgtcccgggtatcccggccgtaggtgggattgggtcggtactcttgtctaaggctaggatgggttggaaactatgtcacgtcttccgcccgtataccgtggtggtatgtggcacgtggtaacacgtgaggaagatgtgtcttgtgggtaaagatgtacacctctgatcagagtaaatctattcgaatagccgagccctcggatatgggcaagcctagcaatgtacccaagtcagtgttttaattcttaaaatttgctcaacaactaaaatatggaatggttggcctgggttggcttgggacgagctggaacccaggtcgggttgccagttcggtccgaatcatcgtaggccttgggttaaggcaggttcgtgagggttcacggccttgattaataatattgtgtagttctaagatcgtgtttacaaaatagccctgagcaactaaatgtctttaaatgct

SEQ ID NO: 38535 - DNA, 529 bp, Oryza sativa
tagaatcttttcttatatctgcaagccctacattggggtagagcccttccttgatctctaccgcttttactatgacttgcgtcggatggaacccaacagtgtatctggatgtgtcggattccgacttcgggattgcctgaagtcgcgttacatccccttccagtgcccctcttcttgcagcaaatggcgggcgagatggttctatcttcagatagaaaactcggatcccgtccttgttgtccctgaagaacaactagacaaaatcccagagtggactgccaaacccgccctgactccctctctccggtctttcatcgacatcatcgatgacctctgaacacaggggttgccagggtacgaagtcgttgccgactttgtaggtaggcggatccaaccgctccaggcctgcgcccatccagcctttgactactctgtgccagaggacgcgatccgagtttctcctcggggtattttttcttgtatttcgaattttactccgagtgcgtctgtttctcctgacttaccgagt

SEQ ID NO: 38536 - DNA, 552 bp, Oryza sativa
cagatttttttggaaccaagatgataaaagaatggtttaaaggatccaggtccagtgtaccatagtagaactcagctgcaagtctataataatcctgacaaatgattggccaacatttttaaacaaacatcccattaaacccatcaggcccaggggctctgtctataggcagattctgtataattttgtctaactcagaaataccaaagggttgatccaaagaagcaagagattgatttgcatggaaaagttcttgcagctgaaaaggcataaactcaaactgagaacaacccattgttgaagagaaagcactccacgctatgtgagccttttcctcatgtcttgtacaaactaaaccaaaagaatctactaaagagggtattgcatttcttctaaaagactcagtagccatagcatggaaaaattttgtattctcacccccaaacttggcccatatgatagtacacctcttttgccaataaatttgtttatacttcaggtatagtagtagcttgtttctgataagaattctaaagttccattcaagaacag

SEQ ID NO: 38537 - DNA, 667 bp, Oryza sativa
cgtatagtgtgcttcaggagtttttgcaagaacattacaatgaatcggatatgggttggttttcttgttttttatatctgcatcaatcccgaggcacatttgaaattatgatgttgcatgtatatatgtacatgtggaaaaaaacgaaatttgaaaaacataagttcttgacattgttctattttattgccaaaacattgtaagttttcaaagcaaagcaacaccaaataattaatcaggttgttgaatttagtgatttttattcattacctcttaccaagttgtaagactcagataccttttatacagttgaatattaaactcatatagatcatgcatatcataacttgcacgagtattttgtatgcttatcaacacgagcacacataaatatttactgatagatgctatattgctatctatgtgctgggcaagaaaatgcagaaattcatatttgttggtaaatatacaccctttttcctctagtaaatgcatagaatgcaccacatgcttaaatggagttaagaagaaacatgctggtcatatcaaacaaaatactgaccctttcaaagaattatatgctagatgccatcatagtttgatgcatgttactcatcctcaggtttctgaacaagggtgcaattgtaatgggtgatgatataaatgt

SEQ ID NO: 38538 - DNA, 779 bp, Oryza sativa
  unsure (1)..(779): unsure at all n locations
ccgcgtgaagcgtatccgtgcacgtgtagggctcaaagcgaaacccccaacccaaagtgcgggaggcccactggccgctgcactacggatggtgcgcacagcccacaggcccacaggaaagggagccacttcgcgctcacggttaggatccccgggatggggtcgctttccgcccccatatttttccgttcgtggcgtgcggcacgcgcacgacatcctttggttttcctttgctttgcttcacccgtatcgcatcgcgctcgcccactcgtgctctcgcttgccgaccattatataccgtgcgaaagcaagcaacaccatggagtgaaaaaataaaataaatgggagaagcgttgcgttgggtgtgctactttctcttggttttaaagctgattgattaattacgtgcacctctcgttgcgcgttttgcggtgtgcaagagccaagaggctctaaaaacctaataatataacataactaattttaaaggttactataaaaatcaaagtttgtatgtgatttctttatagaaattatagaaaagtaatcttaatgaaacataacctccctaaaaggaattggagaggacacaagcaatatagtttctacaatgtgcaagaaacaattcaacacctattttgattgccatgttgctcataaagcacgacaatgtgttcttctccttacaatatgcctcctcttgatgtgccaaaaaaatttagtnactcacctcggtttgntggntnttaaccaggggtcatcaatngtcatgggggcgg

SEQ ID NO: 38539 - DNA, 881 bp, Oryza sativa
cacattttgggatggactcttgtgcctcctcttcgctgacatcgatccatggctccatgccccggccgagctgcaaaccgtcagatctcacgccaggactaaccatcagatcatcgtatatacgaccccctccattattttcctgctgtgatgtcgtcacgtactgcggtttctcagtaattactctgtaactgatcacaatgaaatcttgggagtaaatggatggcgaccaacttcagcttgccgacaggctgcgtatgcgtacattaccgcaggcatgtttggaagattctgacaagtagctggttggaagccagcttctaagaatctggaaaagctgggtttcctagcttttgacttctaattctttttctaaattctacatctacagattctcagaatagactgtttggagaagcttctgattctggaagaagctgcagcagccagaagctctcccaaacagaccctacattacgtggcccttggtttatgaaacgatgtgcccccgaggatatgtcgcgtgagattgagttagctaggcctgtttgtttcaagattatcgtaatctaaattattaatgagattattataaagtgaattataatacgttaaactgaattataatacgtttaagtagaataagttgcaagatatgtgttattactggagacatatattaatgggtttaaatggctaaagtctgtaataccctcaactattggtatgggtggatggcaaaagtgagttaatttttttaagtcattaggggcaggtgtttatttagccacccaataataatgaaaaagccccgttgagggagataccagatcataccaatatgggttctattttataataattcttcacaataatctatt

SEQ ID NO: 38540 - DNA, 652 bp, Oryza sativa
aaataaaactatgaggtgggccccccaccaccaaaaaaaaaaaaaaaaaaaaaaaaactgaagaaagaagagaggagaggaaagagagggaaaaggaaagaagaagagaacctcgcggggtggcatcagcccacgcaggccctcagcattcagtgtcattgagcatgtaggctgtgcaccacctgtgctacccatgagacgatcccaggtgcctgtggaacgcagagcaagaacaccactccctccctctccacctgcatttccatcttgatcatatggaggagaaagtcttagtttaaagctagcctgtctttgacactttcctactccctgtcaatctccattttaaacaatgaaaggcccggtctcaggccataactttggcaggtaacagtgtaaggttagaatttaatgatgccatgtaagtttcatatatatgtatgtttagggttgccatctatgtaagacaactgaagattgttttttacttacactggtcataacaacttttaagaatccagttcaagtgagttgataaaaaggtcaagtccataatagtgcaggtggttctcagacaggaaggtggtgcacatatgaccaagtgaggtcactgtgatgttgttaagccttcccaacttttttttccaggacg

SEQ ID NO: 38541 - DNA, 649 bp, Oryza sativa
aatacacatcattatacatttgtccacacctacagaatgtataacaccaagagcagaccctaatgtataccatggatcctgggtgatagtgatgtgccaccgtaggttcatcaaaggtaaaaattataccactgtggtgggggaagtgctgcatgggtgggggcagcaagtgcatgggaaatctcctcttaattttgctgtgaacttttacatctgtttttcttttttttttttaaattataccttaagttctagggtacacgtgcacaacgtgcaagtttgttacataggtatacatgtgccatgttggtttgctgcactcattggctaatcatttacattaggtatttctcctaacgctattcctaccccagccccccaccccctgacaggccccagtgtgtgatgttccctgccctgtgttcatgttacaccagtttttcttaaagtcttcttagaaaaaaaaaaaaaagatggcagttatcatcctcatggagagacatctttcttctagttgtgtgtagggggagaaaggggcattgaaaataaacaagataattaaaatgtatattgtgttcccaggtgaaagtgttcccacacatgaagtgggttagggacagcccaggtagggagcagcttacaattttaa

SEQ ID NO: 38542 - DNA, 969 bp, Oryza sativa
  unsure (1)..(969): unsure at all n locations
tgtaatatatttaaataaatactttatcaaattttattnttttacaccactcacaatttatatatncctcatattttttcaataaaanccattttttaangttcaannttatctattttctaaaaaaaatcccattcttcatnatanatnnnnnntnagacataaaatctatacatatgtgnngcngatgncaccaacaataatttcatnttnnnntntctatnaatcactttttcaccttnatgatttttcannaaannacacttctttttcacatcaccncaannaccatncatcataaactnctaaccaattatatcttttaaaaaaaaancccccccccnntnttttccnnntntcaataatcanntatttcaacacanataaacccatctattataaaatctnanacatcnncantancancaacaaaccaaactaancaatntatatttnaannccacncttctanaattcaacactctacaacactttaatcattaacaacaaaagttgatcaatgccacaccaataaccttaatactctattaactaacaaaattgttaccataccttcaaaaactttaccaaaagttcttacttccctaatatcacctataaattcattaactttcattttaaacacacccacaataatatacaactctatcacataattgttatccaaactcaaaatcaatcccatcttcaatttctcgccattttgaaatacatgtgtatttgacaaaaaggttacgaagcccataaacactacatattttccattctcatttttataattcaatacccatatatctttttctccagtaaaactatcaaaaagtctgacaccctttgccaactgaatcttcaataattacaccctttttaattgcattaaccaattccatttacaaacattaaacccaactttttttgataaaccaataaatactataacctttttgt

SEQ ID NO: 38543 - DNA, 756 bp, Oryza sativa
cctgcagccccggtttagggtgtaattcatactcattcaatactccatgggggtaattcgtacttttttttcttttactgttaacttaattaactaattaaaagacatagtaatcctctctagccaatttattctagactgttgtccttggattgaatgctgattatagatcgttcctcgtgttcgataccctagaatactctaaggggaagtgctataacggtgtggttaagtacttatctgtgatcttaagactaccaacaatacctaccctcattaactaactatatttatttctcaggccaatccaagtatgtacggattcactatgtggtccaacaatgccagtccgaattatcatggccaaaaaataactaaggctaaaacacacaaatagagtacatgcgaatgaagcagcaggaaatttcaatacgcgctgaagaacatagaaggggctggtaggcaagatcaggctcgagttgtcgtcacagatatactcgtatcgttcatctatgagacattttagctctattatcatatccttctaatggtttctgctactgtatgggtcatgaatagaaaactaatgtatctatttcattttccctcaattacctaatataatgatgtgatgtggtgagaacgccgccagcctcagttgagaagagacgtggcgttgacatgttaggttgatttatcggtttattagtgccgataaaattagagaaaggaaaatctacctttttttctttccta

SEQ ID NO: 38544 - DNA, 908 bp, Oryza sativa
cgtgattgatatcagatgctcagtgacacattacgcaactcaagcgagcatgctcacttagtaggcaccctaggctgtacactttatgcctgcggcttggatgttgcgtggcatcgacagcggctaacattttgtcaccgggagcagatatcattaggattggcagatcgatcaaaaccatacaattatggcgaaataaatccatattaatttcatgaatcatcatcatcatccagggctctgctgcacaacatggaatggaagtgggttaaatgctcctgatgcctcacaaacctagctaacctatatgttttatacttctaattaacgtgaaaaaaatagaaaaaaaacaacaacccgtttaaatcaaatgctagatgtgcaattttttgcgagtgagggatgcgcgcgcgcgcgcacatatatatatatatatatatatatatatatatatatatatatatatatatatatatatatatatatatatatataatattgtattatacattctcttgttttatagatgaacccttttcaatgggaaattgtatctttttcactagaaccaaccaccaaagaagtacatttgtatggttaacaaacataactccggggccccacttacattacaatatatatttcttgcacgcatgatcgagcactatatatatatttatatataggagacacaaagggtcctacactataatgtgcactcaagcagatatcaatagtgcttcagaaagttctccatgcggcgaaattaagacatatacaacagtgtgtttgtctacattttactcgtgtcaaaacatggagatgttggtttgggaactatatgatggccccccatttaaggataaccccgatcaacatttagttctaatacaatatatatgtataag

SEQ ID NO: 38545 - DNA, 567 bp, Oryza sativa
aaaatcaggaaattgataactgggttatcagtagaaatggccatgttttagatattacagagctgcccgtcgaatcatttgttgagagataggcgggctttacaggtgatatagtcatgttactttctattcacctgatttgtcctaagttgcactgctgagggttggtttaagaagtaactaaagctatctcacctggcgctgtcagctctgattctactctaccagaatgaagagctaaatgacaaaatgatgtttccaaaatatctttttatttctacaactccaacatacacaggtgctcatctactttgccatgggaagatgcccaggcagcactagacagtgagacactgggcagtgtgagtagcacagctgtcctggcgaagacaccctagactatctgacaaccagccaactcccagataagtgagcgagcccagccacgctcagcagggctggcctgcaaggcagtgggggcctgaaagcttgccggagtggctgctaagtagtattaccgacaaggaggtggagagaacaagggagggatggagggagagaagaaaa

SEQ ID NO: 38546 - DNA, 635 bp, Oryza sativa
aaaatctcatcccactgaggaaggtggagggggtgggtgaaaagtgtccagacctgtgatgacatcagacagcctctgagctactgcagagaccccctatacctatggaccacttgatttggtgacattttcaaaatatatccaaaatctgactatttctcaccacccccagcactgccatgtgccccaggccaccaccttctttccccacagggctacccgctgctgctgtggcccctcccaggctattctccacatggtagccaaagtgaacttctatgaacttctacaaacagatcatgcaactcctcccccagaaacccccaagccttctcttcccactctgtgaaatggccaaagcctttaccacatggatgaagtcctctaagacctgggcctcgccgacttcactgacctcaccttgcaccactcccattgcctggaagcccctcaaagacacagagcacactcccttccgtgggatttgcacttgaagttccctctgactggaacttgcctgtcttcctcctttgcttccttcaggtctctgctcacatgtcatgctattatcaaggacgtccctgacaccctgtatgacagcactgtcctgcagaaccatctatgatatggaaatg

SEQ ID NO: 38547 - DNA, 602 bp, Oryza sativa
gaggaagggttcggagtagaggttgaggacgcaggtccggcgccacaggggacgccacctgcgtgagaggacggtggtggcggcggcgtccttggtgtgcagggaggagaggatgtgcaggagtaggtcgtcggagagttcagagatgcgatccacggcggccatggatgatgttctcggctgggcacagcgagaggctagatcgatccgttagggtttcttcgaggaaacgaggaggaatatcatatatatatatatatatatatatatatatatagccacacacactagcaaaagtgcccgtgcgttgcaccgggaagcgcacagatcaaaaaaatatgcaattaattaaaatacaaattcactgaaatatttggtatttttaaataggtatgtgtataattaaatatatttacaagtaaagcaagtgtgagaaataaaatgacattgttaaatttaattttattaaattctccatgattagttacgctctttggaattttattggaattttcagaacttaattgctaattttaataatacaaacatcatttaataattatttaattggaaaaagaaagaaaatccttccggttaggttt

SEQ ID NO: 38548 - DNA, 703 bp, Oryza sativa
tcaagcaacttatagcctacctcaaaagccatcaacctcaggtccctggcgaatcctaacaccttgatcaaatgtctcggtgaatggggcggcatctcaagaaacatagaggagaggaattaatgcatatttttttttaagttagctgcaccatttacacttaactgattcgaccaaagaggaagaaaaattgaagaaacgacacgtgctaagccattctataaatatatttttagcatttaactttttggacagagacaaataatattttttttgacaaatcactaaagtgaaactaaaatacttatgatctattattagctcggttcagtgttaccataaaaaggatgagtaggactagtgctactatgatcggatgaataccattatagatgtacagtgccgactaataaacgaaatttaatagagtgaatataagaaacattctgaaaagaacaactttttgcttttaaaagagcacaacatgaatcaaattaattttgcgcataagcatgcatgtgctgcccacttaatcaatgtatgggagaatcgaggagaaccgttgtctttttttcaaaatattttgaaggctacttaaaggttaccatctggcttatactaaaggcaaggtggctctgataccaacttgtcacgccaagaatttctatccacaaatgcaagcgcttacatgcgtggttaaccc

SEQ ID NO: 38549 - DNA, 6553 bp, Oryza sativa
gacactatagaatactcaagctttgacgatataggtatcacaaatgtctagcgtgatccatgccacttcatctaccatgagtgctgtcatgtgaaaggagatttcttcgacccagagggtgccctagcggcaagtgacgaattcaaggatcttcgggagtggaacactgctatgccataatgtaactacatggcgtatttgaagtgacaatgtaaaaaaatattttaatatatatatatatatatatatatatatatattggcaacacctttgagttatgcaatatatgtagatttctcagtaccaaatgcttgataatcttccactatatgtacataataatctacctgcaagaatttctattaaataatttaaaagtaatttacgggcaaattattattaaatttcaatattttctacctatcttcgcaggcggaagttttttttttttgctggcggtcgattcctattttcgaaggcggaccggagtagccaacgtccgcctgcgaaaactgcgaagatcggcgatcttcacagtcgttggcttacaatcggacggccgccccgcctgcgaagacccttttcggccgcttgcgataatgcttttcctagtagtgagtcggaaatgagcgaaatttcagtccgaaatttcccaccctggcagcgagttacaaacaagtggataactcacgtttgccttgtggaaacaacccaagaaataagaaaatatatatgtgtggcactttaggaggaaattgaggaagacaggaagtgcatcattaataaggccgcggacgggataacttggcattggacaccagacactgaatactcaaccacaaaagctagctgaccggatacagttcatcggataattatgctgtccgttttattatattggtaaagcaggacactgcatggacatgggaacatcaacacgaacacacgagcaccttaaaaaacatagagtagttgtttcgtgtataataataaacttgctaagctttcaaatcccgatgtgtagaaattaaatcgatcgaacgcgaattcttcccctatgcatcgtccatggatcgattagtgccctctaccaggtattggcgggcaggattgctggaaagccgctacaaatgacaaagaaggcatttaattagctagaaaagcgaaaggcgtaatttgcagtaaaaccaatcttgcgtccactggaaatagcaacaaagaaaaaaaaaagaaatatcagcagtgccagcttacggttgtttgcgcaggtgcttggtccacttcgtccgaggatgccgccgacagaaaccagtataacgaggaggacgacaagcagctgaacggaggtcgagtagttctttgccattgttactgacacgcagtatgtgctttctgtgtttggagaggcgatcgagttatgccgaagaattcgtgggtgctcgatgctccaaatgcaataccagttccagcacttataaaggcgtagccttagcctccatgcattcaaccagtaacggatccatctttaatttggctggaagttggttaggtggaaatgtgcaagaaggaacttgctggtcgactgaggtaattccttaattcacgttaattgccttctagagaaaatactggtttcaaaaagagtaaatgcacggaaggcacttaaatataccatttacgttccttaacactccaaggctgtattcgttggtgggtgttagggacccatctcacacgcacggaaaacagagcgattcattagcacgtgattaattaagtattagctgatttattttttaaaaatggatcaatatgattttttgaagcaactttcgtatataaactttttgaaaaaaaaatacaccgtttagcagtttgagaagcgtacacgtggaaaatgaggcgaaggagttggaaccacacagccaaaggctgtattcttccccctactttcctacttcctccgtcccttaggttgtattctttcccctactttctccatcccaaaatgttgctatctacccatcctaggataacaaatttggacataacatttatccagattcgctgtcttaggatgggtcaaatcccatcttagctagcaacattttgggagggaggaagtaactaacctccctctttttccgtacgcatgcttttcaaagtgttaaacggtacatttttttcaaaagttttctacaggaaagttgctttaaaaaaatcatattaatccatttttgtagtttttataggctaatacttaattaatcgcgtattaacgggcaacactatttttttgcagggaggtggagaactcagcccaaatgcgttttcagaattccgaacatgtcttgggtgtgatacaggtccaagcaggtgccagttcgctatatacacttgcgtggcatgctacagcggcgtctacgtgtcagtgacatagaatttttttaaaaacaataaatatttcttctctctaccttaattctttatatttatatatatatatatatatatatatatatatatatatatatatatatatagtctcctctacctaagaggaaaaatattttcaaaatttatcttttatataaaactgatatatgggtcccatcgaatatgtaggcaccacccaaacatgacacgttaacgtacggagcgggttggagcccgtttaaacatatatattcaagagcaccaaaatttaatttgagagtttatatatgtaactagatgacaaaaccgctcaagtttaataactacccaggtacttcactctttcgaaaaatacctcaacgacttaatttgtgaagcaaacgaccagtatccagtatctactacttgtcgataattattagtacttggtaacagagggatatttctctttaatcttccaaaccataggtggcatgtcaaatcaagcacagtcaacttacgtactcgatccggtcaccgtatcagtcagcttcaatacaagatccacaatactgaaatggaattttgggtggttttgcatggttggtgggtggcttcagctgtgccttcgtggaaaaaactgtatgtggccgacatgataaaattatcttacgtggaagtttggacacaaatcatccgattgagaacgcacgcgccttgccttgacttccacaaattaaggtttgttggcatatctgggcaaattcgagttgggtgcatacatgttattagctaactggctaaagtgtacttaccaaccataactggaaattgcccgtgcattacaacacaaatgtacaattttacaatgagtattaaaattaaaaataagaaaaaaaatgcaaatacaaaacgtggttacaacactatgtgcctattatattcatgcattccaataagttgccacaagtgcagatcgaccacagaatggcattgggagaggtaaatattagcgaagatcacccaagtcagtcatggcgaattcgtcatgaaggtgcgtcgataggccagagtagactagaggatgaggccatcaggataacatcacgccgcgacaccgccttgctctgagcatcggcaccaaagagcccgacggcctcctgcactcccacatcatccttcacattgtcgccgtcatttcacttcatcaactcactgctagatttcaacttcccctcttctccacaatctttagcgacacgagccgttggaccattgccaatgcccttgctggcacacgacatcctttgcatcggccgccaacccgatccaccaccctttctccatccccgcggctacgaaactgtcggtggcaccttgccgcccataggtaccctcctgccaccactggtcttcctcccactatgctagatctacccatctatgatagcctatctgtaacggactgaggtgccttgtcacagatgacatcatctataacgggttcaaccgaagcccgttcaagataaggctatgagacacggccagttataggtgtaagtaattgatctatatgtgcacttgatagacaataccactaatgggtacatatgtaggcccatcaaagattaaatgttatctctaacggatcttttttcaccagtcactaacagagactatcgacaataaaatcatttttaatatctctccaccctctctctctcagtctccccccctcccccttctctcgtactctcttcctctcagcacgtgaaactggtggatgacggcattggcataggcagcgggagatcggggacggagctagagtcgatgggtccgcggggtcgaaggccacgctggtgcctgcaggagcttggggttgtaggcagcactacttagaggcacagggcgagacggagagggcggcgaagggcaggaatggcacatctggccgactcatcatccctagaaagggaaatggggagggaggcgcacggggagacagatgcggctgggtggcgggacgagagctcgccatcctcatcttaactgcctccgccattgtctctatctccctagcagctgccaatctcggggtagcctccaacaaccctcaagcttagggtggcctgattaggtggctcccaagctcgtgatggtggtcggctgcttggatccgttgccccctagccagatccactccattgccccatccccctctatttctaatgaatgtgtagtgtgatgattgagatcacgacgtgttgtttctgatgaatgtgtattttggatgtttttgtgattgtgaattcgtgatgaagtttttgtgattgtgatgaatctggtgatgtttatgatctaaatattatcttcaaaatgtgattagtggggtggaacatatgcagggatgatgagcggtgaggaccgagcgcacagcgtgcaccatattttttgggttattcacacttgtgacgggtcacaaagatatttatttgattttttttttggtttatcacatcactagcaggctagaacttaggagtaatttgagagatagtttaccagtgacgggctagaacttagcgagaatgctcagtcttaggcgcccgatgtgagccaaaaatatcaggcgcccttccgcgtcgtcccattccgcgtgcgctgcatcttctcctctgtctccctcgctcgcgtcgcctcctcccccaagcttcctaccagcactgtctcctctccctcatgctctcttgcccacactaccctctcccccgttaacctcgcccacgccaccttctcttccccgggcgacctcgcacggctgctctcctgccccgtcgcgcggccctcctcttctggtccgccgtccgacggttcagggcggagtcgctgctgcttcctatcgagcgctgcagcggaggcgccggcaggacgcgagggggcggtggcagtcaccgccgtggcggtcaggggtctaggctgggccggtggatggtgcccccttccctcgtgtactccggcgtggtggctgacgcctagcgctcgacaggaaggccgtaccatataccatgtactatgtagatctaggttttcctcttgattttttatgtttcagtccatgtaccatgatgtttcatcagttagatttgaaacgttgcaatgttagttttcgattatgttccattctttttctggatgtaatatgtttcagtatattcggaaccgttgattcatacattgtagcaaaatatttcgttgtgtgatttgattgtgtttcaccactttcagcaccgaaacatttttaattcgatggtgtttcattctttttcttgatgtactcggatttgtttcatgtttcaatatattcgaaactgttatttcatatgttgtattaaaatatttcattgtatgatttgattgtgttttagctttttaaaagattaaaatattttcgatctacttggtgaaacagcgtccgatttttgacaaaaatatcaggcgtccgatttgtagacacctcgagaacttaggagccatatgagagatagataccagcgtcaatgaccagcgtagtgtccacttccaccattcctctaaagtcactctcaccacccttttatgcccttcatctgtctgttttctgccatagttcagacttcagacatacccagtcaacatggaagttattgccggcgttgctggtcagtcgtctcctgccatgtccctctgtctttctcatgcctctgcttggctggagctagaagacaacatgatggccctcagatcaattacaaattaggccgagtttagtcccaaactttttctttaaactttcaacttttctatcacatcaaaactttcctacacacacaaactttcaacttttccgtcacatcattccaatcttaaccaaacttccaattttagcgtgaactaaacacacccttaattactcgaaaagtctcagtcgactgcttattattagccaaggtgatgttagttaccttctagatcaaatacccgttccaaaaatacctcaacaacttgatctgtgcacttgtggacaatttctagtacttagaaacctactactacctttgttttaggttataagactttttagcattgcccacattca

SEQ ID NO: 38550 - DNA, 649 bp, Oryza sativa
ggcgaattcgagctcggtacccatctttagtcccagctaaggttaataaccgggactaatatttgaacatttgtacattttagtgcttacaaacttaaacgggccaaattaatttcattaaatatagatttaaaacaataataagtaatccattaaacatgtaataaaaccacaaattttatgagaaaacaatttaaatagtttaaaattcctaatacatttcaataatcacatataattaacatatgtcgtattttaaatagtttaaaattcctaatacatttcaataatcacatattaacatatgacctatttaaatagtttaaaattcctattacatttaataatcatatataattaacatatgacctaattaaatagtttaatcttccatgggtgaagttaatatgaaggtcttattatcagtcaaaaactcctcatcagatctttaataagggctctttttggtggagggatataattgctctctctgacttcttcagaggaattgctaaatgtgatctagtttctggaacatctgttctatattgggatgatctttggaatggccgagtgagaagtgtttcccatactcatatttgtgctcatgtttttgataggaatgaatcagttgcagttatctttgcca

SEQ ID NO: 38551 - DNA, 601 bp, Oryza sativa
agagtcattacacttgttagagggcaatgccagctgctggtattgacgtggcttaaaaagtcagcctcgatatatggtcgcatgatcacatgttagcaaagaaagtaatgctgcaaatatgagagacactcctcccccaatttttatatcgtgacgttcaccctcttgaacgaacagccagtcgttgtaagttgtaagtaccaagggcccttttgcctttgtagaatgcgtgctagaggcaccaaagccagtcagaaaaaggtctttgagtacgagctgcgcgcgatacctagaagattacacacgcaaatacgccttgccacatcggacgccatggcccttagatacagctacacgcgcatcaccatggtattattaacttaattgtaaagatgaattgaatattttgaaaataaaattagaatcaatggtctaaataatatacagtagaataaagttttttttaaaaaaaaaagaacataaagtgtgaagcttgtaagcagccaatttgtttcaattaaagctagtgaatttcgatgcctgcaatataggagtaaatggtgtgatcatctgtcacgctcgtacgaaagaaaggtgatga

SEQ ID NO: 38552 - DNA, 716 bp, Oryza sativa
agtctatagagatcaactggttggtcaattcatcatcaagaccagacataaacttctcctgcttctaggcatcggttcgcacgtcataaggggcgtagcgcgcgaggcggttaaactcatgcaaatactctataactgttttggttcacccgtgttattagtctgtagtttatcctctactctggaaatgaatcaataatataagattagccgatcgttctgcagtttttgtgtttgctgccaaaacaggtatcaactgatgaacaagaaaaacaatattatggttcaaatactcaaagttatactcacagttgtgatgtatggacgtcaacgttgtggaatatttttttcccacctatttgatactgactggttgtcaattgttactgcacgtcagtgttgaggaatttttattcctacctattttcttctatcgtgctagactttgatgaagtgttgttactggatgtcaattcttgacagccaaatgttatcataagtcctaactaatcttaactctcccaagtaaatacaagaaaacatcaagcacttacaaatttaagtacaagtaaatgcaagaaaacatcaagcacttacaaatttaagtacaatcttccagcctttgttgtgaattgtgatagattctcacaaaaataatttgaacagacgggatcttggaaaaacatatagctcacgacaggaataataacaatggt

SEQ ID NO: 38553 - DNA, 619 bp, Oryza sativa
gtgcagtagttcatcaatctgcataaagcaggcatctcttcggattacataatggaaggttcactccttgacctgtatgtgaaatgtggagatgttgaaactgcccttgagatcttcaattcgagtgattggactaacgtagcactttggaacctgatgcttgtggcatttgcgcacatcaacgatctaacacaggcttttgagctattctgtcaaatgccagctgcaagtatactccctaaccaatttacgtacccatgcattttaaggacttgcacttgcactagataaattgaccttggcgagcagatccattgattgagcgtcaacactggcttctagtacgctttgtctggtcgtgcaggaacggtgaatttctattgctaatatatggggctcgaaaaggcaagacatgttattgaaatgcttcaacataaagacgtggcttcatgacttccatgaatgctggatatgagcgacatgattgctctaacgaccctcttgcagcttttaaagagatgcagaaatgtcttatttgggcagattacatacgactagccagtgctataagtggctgagatggaatccatgctatgaagcaaggcttgcataatcatgc

SEQ ID NO: 38554 - DNA, 959 bp, Oryza sativa
cggcatattgtcctattttatggatcccaaatggcacacgatgaagcagaaacacaaatcttagtcaaatccaacagagattaatatccaacgacaaattcacggcctcctaccgcagcagcggccactgacgccgcgcgacagtcgccgctgccgtcgtgcaccggttctgccaccgctccctccgcagactgccgccaccgccacccctctctctgtgcaccagtgccgctgctgtgcccttcctccgctcgtcggcgccgtcgttcccttcctctgttggaattaatgaagggtccttagcccactcagattaattctttaaaaaatcacaaaagaccaccttatgggatggtatgcatggagagtttagtaccatcttacttattctagagaggggtacctccttaaaaggggatggcctcctagccactcgaagcatgtgtggtggagagaagagggggaacacacgcgctcgcctcgccttgcctagcaggacaagacaggtgccgcgcgtgcatgatgtacgcgtcgaatggtccgctaaaattagttcctcaccttcgcagatgcagcctcattttttagttttgttttgctgtgggaaattcggatttgttttgttttggaaatgttccaaaaatccggtgtgcacgatgtacgcgtcgaatggtccgctgaaattgattcctcaccttgcgcagatgcagcctccttttttagttttgttttgctgcgggaaattcggatttgttttgttttggaaatgttccgaaaaatccggtgcgtgaaaacgacatggagtccggataagttacacgcgacttatccacctaggttacgtggagtggagatcatgcgggcgccccgataaagaccacatcctctctataaaccgagccgccgtcttcacgcaacacacacgaaatcaatgggtaccgagctcgaattggcctata

SEQ ID NO: 38555 - DNA, 1052 bp, Oryza sativa
  unsure (1)..(1052): unsure at all n locations
ccggggtgttgcggcggctgccccctcccagcttggggttgggccgcccccaaacccacgtggctccccccgaggggggtcgagcccggggtggcgcggtggctgccccctccaagctagagggaggaggccaccctcgcttggggtcgagctgccccgaccccctccacatatcagcccacgtgtacagggttaggtgggcgcgcctaatgcccacctaactgcatttaaagcagtttatgcaaccgcgccaggccgcatttaatgcggcgtgctgcgcatctgaccggttgaatgaccgatgggatggcgactgtgtacccctgccctgtcagtgtgtcaggcggcgagcggcgtgctccatcccgtcccatcataatgatgaggggcttcacagcctcttaccccggtcagagctggtccaaccactctgaactgacccgggttcccgttttctggtgtgaacgagaacccgaaagtcctcatccattaaatggcgaatgacaagggcgctctgcattgatttgatgggccccgcgcagcaaccgcggatagcttctgggctaaggcacaagacatgtaattaatatagagaatattttcccttgtccntaggtagcactcgcagcacatgtggtatccccttagagtataaaaggaggaccatgcctagcgaggaagggggatcggactgaggatccctgagccaaagcttgtctaaccctagcttgcataccagggattcagggactttctaagcacagaagaatcatacacacaggagtagggtattacgcttcatagcggcccgaacctatataaacctcttttgtctcatcgtcttggaggggcctccgagatcaagatcacacacagtttcgctcaccaaatcctcgaatctcacccgctgcccctggccgaactctcaaaggagggccttcacagcctcccgctagagagggtcacccctcaacaaagacgagtggtcaaacaatgcaaacaaaaactcaaaatcccttatattataggatggagggagtacgacagaaagg

SEQ ID NO: 38556 - DNA, 531 bp, Oryza sativa
tgaggtggtagatttggcggagaagtggcggcatgccgcggcggaggaggaggagaaggaggccgcgcgccgcggcgatggatttggcggagaagtggcggcgcgccgcggtggaggagaaggaggcgtgcggtggaaagcgaagaagtggcggcgcgcggaggaaaggggacgaagtggaacagcgcctagggttttttttggcgtggattttcttttcagagtgattttttttggcggttctttttttatttttccgcccgagccggccgagcgatcacctcgctttatccgaaccgtgggatcaagatccgacggacgaaacattgctgacagatggattattgataagttttccccacatataattggtttctactcttaatattgctgacagttattttgacccaataaatatttggaattgctgacatataatatgtcttattatgtagtattgccgacatataatttgccaaaagcctttaccaacaaatagtctatcaattattgtttatctttaccgacaga

SEQ ID NO: 38557 - DNA, 738 bp, Oryza sativa
cttggatttcagtaaatcatgcccagatcgaaccacaatcagctaccagattatccagcgaagattctagccaaagggatatgtcttcaagtgttttcttgacagtgtcgaccaaaggggctagagccttgcttgtagtttcttcttctgtctcatcaaagtaatctttgatatcaaaagaaaacagatcggctaaggcaacaaaagagaaatttaaaggacaaagatgacaaacaaatatagccgatctaagacttggtgtttaaaagaaacttactgggatagcaggagtagctggttgtacttcttcttcaacatggtgactccctgcagctgatggagttttatcgcttgatgattgctggacaggagaaggaggaggaggctgaaaagagacaagtattagacaagatcggctgaggtcaactggtgaaagaattaagaacatcttactggtggagccggtttgagagttggtgctgccgatttcttcttcacaacaattctctttttctgcaaagacaaaattaatgagtgattggttgaggataaatagttattaaaggaaacagagagagatagttaccctggagaagtgagctggagcagagggagtcggaggagtttgtttgggtgaagccgatggagttctttcagtatcacatacttcatctacggcttgatcaacatcctctccgatctcttcttcatccaaagcttgttcgatggtgggtccag

SEQ ID NO: 38558 - DNA, 952 bp, Oryza sativa
acaaattacccccctcgacccaatccgcggtggttttagtccacgtgacgtacgcgtggcagcccagtcagtcctctatttataaaaaaaaaagagtaaattgcatcttagggctactatttcttacgtgtgttgtaacttggactagtgtaaaataaaacttttcactttggaacaagtatgtttacagaaggttttaatttggactatcttcttgttcctccagctccctttcttcctctcttttctctgtacagctcacggtctctttctcgatcaggcgtagtgcatgagaagtcaagaaggaaaacccttcacagggcagccacccaccgaaattgagctcgagctcaaatgtaggcggcactgggaaggcggagcttgagcactgcaaaacttgctgaagtgcgagcggcacatgtggaaatttagcgcaggcgcgcaacacgtatagcactagcggaggtcgagcatgagctttagcgtggctgtctgctactccctccgtttcataatataatactttctaccactgcccacattcatatggatgttaatgaatttagacacgcatatatatctagattcattaacatccatttgaatgtgcgtaatgctacgaagtcttatattatgaaatggaggaagtacttggcttagttcttatagtcagttcagaaagtagcagcaactgtatgtcattgccggccagcttcttcatatgctacttgctaccagtaggaatacttgttgtgcaccctctgctttccttgaaattaagcaacaagcactagctagttgatgattgaaaatgcaaactaccctttgaattctttggaagactttacagattgaaggagagagaggaggaagagagttggaggaggaagaagggagtccaaattgaaacatcatgtaaagatatctggcccaaagtaaaaagattggcttt

SEQ ID NO: 38559 - DNA, 1041 bp, Oryza sativa
tttttccatggattcttgattatggtgttccttccataagatatcagataagtctggcctttcgtctatttgttctcctccagttcctatacctgtctgaaccaccgattgtacccctctttcggtggttgttctcctttcttcgttagtgttcctatcatttcctatgttccaaatctgaccatacagctcatgttcgttggacaacttgctgattacggttgccatgttattcttgctcttgactcgcgttgtgttcagggatcatagcacgggtctcctggttggtattggccctcgcttccattattcacagcatctttgggagcttgactgactgttttctttccttgcttctgctatagcatccttcactcagtggcatcattgttggggccatctttgtggctctcgtctgtcacctttagtttgtcaaagtttattagggtctatgactggagatatatccttaaatcaatgtcatggttgtaaacttggtaaacagatacaacttccctatcatcctagtgagtttgtgtacaagcatccttttgttcttggttattctgatgtttggggccctgctccctttacttcaatacggggtcatcactactatatctgtcggagatatgggcctgggggtatgcaaagtgaggggatgttaccttcccatccagccacgtgactctatagcctggccctccccccgcgcctcgcgagtcgcagaagcagccggggggcctcggggtgccacgtcacgcccttcgggccctcgcgctgcctcgccccaaggccctcgcccaactgtcatgtggcggggggagcgtgcgggaaggagacctaggctgaaccgccatcaatgcgcgcggcgccccaactgtccctcaccgcgtttaatgctgtaagggcagacgtgtggtgccgtccgactaacccacgtcaatcgagtgtgaccagactgtgacaggcctgtcaccggtcacgtccgattggatgggtggtcgtgcccccacgttcgcctctgtcttcagcggagtg

SEQ ID NO: 38560 - DNA, 739 bp, Oryza sativa
atttcttccccccccccccccccgcgcgccgcctctctccggcgaacccctcaccggcggcggcggcggggcgagtgggacgccgcatggagcagtaggggacggagcggaggctgcgtgaggtgaagggcgggcgcggtggcgatggcgaactacctcgcgcagttccagaccatcaagtcctcctgcgaccgcatcgtcgtcgccggtacgggtctcctcctcctcctccctgaaccctagaaatggccccgggatctgatccgtcaagccgcgcggctggctcggcccgcgtgatctcggggccgcggcgattcgagctggaatagtgggtctagtttagttagattcgcagtgcaggtagtttgcatgtttgcgtttgtgtaaaatttcatagtgattgagctcacgagcagcaatggaagatgcggggggtttggtggttccatgatctgattctggaagcgtgatgcagtgcatcacatcggcatgaaacaacccgtgtaggattctcccaagtataactaccctcattcactcactgcagctcaacttgctagcacatttctagctatgttggaagattttccttttagggcgtacagtttggagaattacattgaaaatgggtttgaacattaattgttttacttctttgctgcacatgctggtggaaatgaatttcaagtttgtttatctgtgtggacttcttcttatacatggtaatttgcgttttgta

SEQ ID NO: 38561 - DNA, 953 bp, Oryza sativa
atgatgttaaattttgtcaaaaaattgttcagtttgttaaaatgctgctaaatttttgtagaaattccatcaaattcagaatatgtgccaattgttatgttagtcaatgtgggtcatttaaatgtccttttgccaagaatttaaattttcaaagcatgcataaaatgggggcaaaaccccaattaatgaatatagataggagagggtataaatgtccttttgctaaaaatttaacaccgttaacttttccatccaaaacaggggcaaaaacattgttcggttcaaaaaagtgagggcaaaaatgaaaaccccaatattggacactaaagtgggggcagaaacgaaattgccccttaaagatttgctacataaaaattcagaatcagcaccctttgttcatcctcgatcacaactcttaaggaaccttgttttcacacgcacgcttcccaactgctaaacagttttttttaacaaaagttataaaatcatattaatttattttttaggtttgaaataattaatagtcaactaaccatgcattaatgtctcacctcgttttgtatatcttttcaattttctttttccctcttctttcaaacacacccaaaaacttagctctcccaggttaccaatggcatgcagtgcattctgggtagcatagacgcctaatagctctagtagagatgtcatactccccagagccggactatctcgcagctttacttaatttgttagcaagtagctgaaccagctatcttttttctttaagataatggacaaaaattcggtctatatatccacatagatatgcacatgaaactcttgtataatgcattaaatatttttgaaaataaacttgacatatagcttaaaacaagtgatctaacaaatgcagtggagaatatatatttcaaaccgtggagtaaataaaccatttcaacaatcccatgaat

SEQ ID NO: 38562 - DNA, 504 bp, Oryza sativa
gattagcactcccaaaaataataccaccgctctaaaatatcgatatgctgaaatattattatttctcacaaaacaaaataatcgaacttaaatcttttatgaaaaacattttgatatcatcatacctttaatatttaagatccaatgtacttgactcatgcatggctaaatttttttcctctgcaagcaacatgatcttcagatgaacctacagtaagttcgcaaaacgcaacagagttcctctctgatcacttgaaattctgagctgtgtatggaaaatcgacagagttgaattgtacaagacgggaaaaaggcctactagtatgagttctactagttcatttcctagcctgaatgccaggtgtacgatgaaatagcaaggcctggtaccaagagacaaaagaagataggaggttcagattaagagtttttcttttaagtgggagactgctagtctttcttttctgtagggtatgccactacttcagtgctgaagaacatcac

SEQ ID NO: 38563 - DNA, 1293 bp, Oryza sativa
aacataagcataagcaaaaagatggggctgaaagctatctgcttctctaatttgagtactaattgcttctttaattttaattttgttttcgactaggttgaatgcgatggactagtttgatgtcatgacttgctatataaacctctcgttatttaatcacattaatacagtttctagggtacgctatttattcgtgaaaggtgtggagatagaattgtactacgataaatgacaagtctggtcatgtaatttttgagtgagtttagattagaatatgcttcatcacgctactctaaaattgcttcgtattaaaatggagagggagtcgttgacacaagagatcacattttaggtgttttcagtgataaaagcctccaatctcgcgctagacatgtgctagggtgcaccaatgtgagtatgtgtgagtatgagaatggtgtgtacttgtacatgtatgcacgtttataacttgtaattgaaaaggggaaaagagaaagtaaaagaaaaaccactctactgttatataaatcctactcatgttccatcaattttatttctgccaaaaaatgttgcaaaatccattgcgatttttgttttccccgatggtttcagctttgtttgatacatgttgtaacttctgtatatccggctgaacaaccttttctgtaatctgaatttctcatataccaaatataataacagtttttgttttgtttttttttcattcaaaccgctaaaaacatcaaaaatgatcacgtcctataatcatcgtgaggggatcaacaaaccgacggtcaaccatgtgcttcagagatcaaaacaaagtctaatcacgccgggcagaaaatcaaccgagagtgcaaagcagtggtcatcgtacctacattagacagcgacacactgacactaaacactacttaatactacagtaatactaattcgtttggctgaaatttggcacggctgctttgactcaattttttacatattagcacttttaacaacatattgtataaatagacccctaaaagtttagcgtatccacaatatacatataaagtagataatactactacgaagtaattaaggaataaaatactactactacgaagttatatatactgtgtaattaagttgtaagtaacaaatactaggaataaacaaatgatttctctcatccctctcttatgggtagtagttgtaggcctagcttactacccactttcattgatgcagagcctaatcttattcataacgtaggtagtaaatatttttaatacccttatagcatat

SEQ ID NO: 38564 - DNA, 1874 bp, Oryza sativa
atgatggggatacacggcaggataatggtgttctgattgattgtgaattcttagaggtagggatgcaagcggcccgatccatgaatctacttatatattaaataaagagtaatctgtgggtttttatgtcatggatcggcttgccatgtcgcaaatatgtaagtggatcaatctataaacctatttatagatcaaattaattagtaggtaatttacgagtcaatttacgggttcctcactaattttacctgtttaggttcgtgggttagaccgcttgcaactctacttcaaggcaagttcatgtatacgtcaaggcacacatatcacacctatctcttagaaaatcaattataaggatgaaatatagtgcatatctatatttatctttagaattaaacattttaggaagatttaccttgaatactttttttcaagaacacagagatggagtacgtccaaatacatcaaagtatcaaaccttaaccggatgagtaatgctcggtccgtgtgtacgttgttttaagataaaaccaatctacaaatttctctcttgaaacacaaaaaaatacaagattttgtcaaaattattttcatttctaaataatcctataaagttatcacgacgagagaagaaaacatcagcattgtttagattacttgttttaaattaagttttagtttataattgatattatttaattcatccctagaattatccataatctatccaatcatccataaagaaaaatccagtcaacaaaattcatccacaaagaacaaagctagcagatataagcccacacctaccatttgttctgatgcgcctgtgtatctcgggggctcctgccccgcgcgtgcacatggggggagattaacaagggggctgtttgattcccagccacactttgacattacttgccaataacaattgtcacactttgtctaaggtgaggtgattaaattgttaaacacaacttactaagcctaagggaatcttgccatacttttttgagccattgacacgtgggatccaatttgttgaaggggaatcttgccacaactgtggctacaaccaaacacctgtcaaatttgcctaaccttagacgtggcaaactgtggcaaagtgtggcttgcaaccaaacacacccttaaatcgcgcgcggggtatcggtagcatgggttcacttgtgcgtttctctttttgcgccacgataaaaaaaaattccttcccgcatgttttttttttcctttttctgttttcttttcgctttttctaggaaaaatagcctcccttttattcctttttatggacacgggaaattaggattggaatggagagttaattgcagcaaacttttaaatccaagatttaaaacttttaacttagatttgaaaacttttaaggcaagatttgaatctttcaattaagatttaaaaactttcgattcggatttgaaaacttccaattcagatttaaaaacttgcaattcagattttaaaactttcaagtaaagatttgaaacttttaactcatgtttgaaaactttcatcttaaaattaaaatcatgcagcttaaattataaaaacttccaaactttgaattaaaattcttaaaaaaattgactcaaaatttgcgttaaaacgtgggcatgtggtttaaaaaattcaaaaaaaaacatgtgaaaaaataaaaaaaaatcgtgcacatatgatttaaaatatcacgaaaaatattcacggtgattcgcctctccacaacgcagaaagaaaaaaaaggaaaaaggaattgatggatgggccatgtgcaaggcaggacagaaacgcgcacgacgcgtatgcactaattagcaagtgtatatgtgttggtcatgcat

SEQ ID NO: 38565 - DNA, 616 bp, Oryza sativa
gcagtagttcatcaatggtcgagtatgttcgctcgatcgatcgggatggctgctcgtttccttgttgctctgtaatggttcgaaactcatatatatataacacggaggagtatttcagaaaatttggtgttctctagatctctcgttcttgtattgaatgaggccttcttgcgactctgaacgtcgatctatatcccatatcctacgcctcatcttaactatgagtctagacacatattcttagttgtgaaagttatcttttttacagagagaggagtaatcgttgcgatcgatattgtcatactctgtgatgaagccaaccttactttttgtacattcggcgcttagaggaatattctttctatattttcctatgtgcgaccaatggcttttataatggttgaatgattaaacgtcgatataaaaaggccaacaatgaagcaatggaggcttttgttgaagattcacagagctgccattgtttcatcgagtactctaacacatcgaacaaaaaaaaagctgacgcggatgagatcacgcccacacagagttgccccatcaacgcaatcttgcgtgagagggtcttgattacctccgttaccaacccaattcatgt

SEQ ID NO: 38566 - DNA, 2222 bp, Oryza sativa
aaaataccattctcctgaaaaaaaaatccttctcccgagtaaaaaatatcattctcccgattggatgttgagcccggataaaaaatatccttctctaaaaaaacgatgttcaattatatccttctctagaaaaacctagtatggtaaatatccttctctaaaaaaaactttgagtgactagtatacttttgtggagcacatggtgctagtactagtatggcaaatatccttctctaaaaaaactttgagtgactagtatactttcgtgtagcacatggtgctggtgctagtatggcaaatatccttctctacaaattgagtgactagtatacttttgtggagcacatcatgctagtgctagtatggtaaatatccttctctagaaaaaaatgaattaaagtaaaggataaacaacgtaaaatctactaaaagtaccaaaaaaatggaatttcatcaacatctgaatttttgtatatatattatttattttattgttttgtatctagcaaaattgtagggtagaacgacataatagatcctggcttctccatttaattcggagaaaaggaggtatttttgttcatggaacattgatagagaaaaaagccgactatcggatttgaaccgatgaccctcgcattacaaatgcgatgctctaacctctgagctaagtgggcttacataacagaaatagtgtaacaaatagaaatatgtatagtataggaaatccgtaaatctaaaaaaaactttgagtgactagtacacttttgtggagcacatggtgctagtgctagtatggcaaatatccttctctaaaaaaaactttgagtgactaatatactttcgtggagcacatggtgctagtgctagtatggcaaatatccttctctaaaaatttagtgactagtatacttttgtggagcacatcatgctagtgctagtatggtgagtattcttctctagaaaaaaagatgttctcgattttgagtgactagtatacttttgtggagcacatggggctagtgctagtatggtagtactgtaaagacagcggtagttgttcaattaattgagtgactagtatacttttgtggagtacatggtgctcgtgccagtatggtagtattagagcaggtacaatagcaggctataagccagttgcaaatatattttaaggagttaaataaggagagagaagagcagcgggctacagaattgtagccacctgtagcacggactccaagacgcagtatgtgtatgacaggtgggaccagatattaatagtgtagtatgtaactattgtatgaataagctattagattggctatagatgaactggagctagctggtagctatactattgaacttgctcttataaagacaatggtagtcgttcagttattcaaagcgttgtcgtggtatcctcgctgaatatgactgttgtatggaccttgtcatgtaagccgcgagacttagcatgacttttgcacatatggctgttaggcgctcgtatggacctgcttgtgtacgactaagattcgatatctagtcatttggaactgcttctacatatgctacatgggttggtttgttctgactcactttgcaactttgctttggttgcccactggttatgaactcagggatttgattatttattgccgtgttcacttcaactccaaatgtgccagaaagacacaagttttatcatgttatgcatagctaagcgccaaatattatggcgtggaaactgcaacattcagcgccataacatttggcggggacatacagcactacaccaagccatacctacctggtcgactaagttaacccgttcagcgccaaataccttggagctgaccttagccacaacagagccgagtccgatggtgctgagctttgacacactggcaccatccacggtgtcacgacattcagcgccgttacatttggcgctgaacctccgggttatttttgaaataagttttgggcgcgattcatttacgaaataagtttttgcaaaggggtaaattgtcaaaaattttgcatggtgcagaggcctattcctcccgcgcgtaagaggctgttttacgtggatggatcatgcggtggttaaatcatgcgcgcggatggacggtaatgattggtccagatgatttggccggtaggattggagagggataactcctcttttttatattagtatagatatagatatagat

SEQ ID NO: 38567 - DNA, 2006 bp, Oryza sativa
ataggtgcttcgttttacgtgccggggaggacccctcctcccgaacacagcctaagtttaattgcttaaatctaatgtttctacttgttcctatttaatattgtaaattaagtacaaaaaaagtggaacagtagtgggaaatagtattatgcaagagttagtttgtaaaaaatctttaaaaaaagaacttaattttgtacttggtcaagaccagtttctgttgctatatttttaatcatttcacactagccgtgctttcatttttagttgtaaatcattttggaagttacctgtcttcacacaagtttctattgtttgatgatttatatacatttgtcataaaccatttatattttctgttaataagtaatgttgttgtttatttgtagtttcaaatcatttactagttacatccttatcttcacattagtttctattactgtattaagtaatttagtcctgatgaatcattttcggagttgcctaaccatgttgtcatgaattgatcccgtgtattcacggaatcaagttgaggggtgtatctccagggaatgacccacttgaaccacccaattatgtttagtgacctatagtgcaatttactcaatatttttaattcaaatggaaactgtgtctgttctttctcttctttcttttgtactcttaacaatatgtgttagtttttttattacaatgaatttcttgtgtgccatcaatcaagccctttttcgttgctttgtgaattacatttctctcagttttgtactgtacagaaaactgtttgtttatatgatactcttgatggatattgcagtttctgaggcttgcttatttgattggttatggagttgagatagaaaaaagtccagtcaacaggtactaatccagctcctctattagatatactaaattcaactttcctattggtcaattaccaattaataggttactttcctctctttttacatgtcactgaacagtgagacattgtatcttgattgtttcatgattcatcatcaatcttgcattcaaaatgatatgttttgttgtgtctgcagtgcatctttaagcatgctaccatggccaaagccagctacatggccttctattccaccggattcatcagcagaaacaatggcaaaggagaaggcaagcagttttcagcattactttttgacatttaatcttctagtgatgcttcatgtagactgctgttctcttgtattgagtcagtttgctcttgtcctgcttaattggcccataccacttcagcacttcctaagttataactctaatgaagccataacttataagaatgtgtatctttcgcacacattgaaaactttcacatgcattacaaatatgtaccagtcatttgttaatgtagaacaaatgaagaagaatgggaaaacaagttcccagattatatgacacagaacagtagtggcaatgatgattgaacagtgtaccataaagttgttgctgatattttcagtacttactgaaagatgcgatgggatggaatatgtaatttttagaaatgcttgtactgacctgtactttgctagtctttttgtttatcgtcacgcatgaacttatgtgtttattcatttcatatttgggaaactgtagcttaaagttatgaaatattttccttgtccagatgattctccaagcaaaatcaagagaaaagatcttcaatattcacaggaaaccactgccattagaaccttctttgcttcttcgtgaggttaataggcgtagggcttttctttctgttggaaatatatctgaatcatatgattcaggtgatgggtaaggactgtcgatttcctccattttcatgatgtaatctttcaagtgaaatttttcagcatatctgtgttaatgtattcttattaacacatatctatgttcttttttgtgtgggcaggtcaggactggatgcaaattcaaaaccttcgcccaacaaatatgcttcgaactacatggccaggccaatgtca

SEQ ID NO: 38568 - DNA, 741 bp, Oryza sativa
aggacgagctagcccgagcgacgggcggcttgaggcagagcttgcccagaaggccggtggttaagccggtggcggaccaggcagccggcgacggaggcgaaggccgaccaggtgctggcacggtcccattcgcgtggcagcctcatcacggacctcgcctattccccttcctccccacgcgcgaccgccgaagtggtggccccccgcccccatctcctcccatccttctcccttctttgtcgccacggcgaggacaatgctcgccgttgtggcactgacagccgccgcggtggtcgctgtcctggagtgcactgtcggcggtctccaccgagtgctagatacgggagcgcggtgggtggcagcactaaacgcgaagatgggagtggcaaactttgggagggcgtgtgctagagtggggggccccggagacgaagcataggccagacggcgtcgttgatggctcataggtgggagccggcccttccggccttctctgcctccgcctcactccaactctcgagatctagaggctgatgtgtgggtggtgcgacgaggacgatgaggaggaagaggaggaggagaggtggcgctccacctcccccgtggactgcaccggccgccccgctcttggttttttatgggatagaggaagtacttgttcgcagctcttttttaatcagaatttatcactccgttcgtagacctgtcgggttaacattgttcgcggctcttttttaattg

SEQ ID NO: 38569 - DNA, 1119 bp, Oryza sativa
ttgataggttgtttgcttcttcccgggctcaaaattgaaaacgaggaagttcacaaccaaaacgcttgtatcctgacacaggacgatgaatcgaactgaattcgagacgaacacaccaagaaggcgagacggcagcaggacaagcagcagagcaaagaaaccaggcgagaagggagacagatactgaccaagaaccggagctcgccgtcgccgtcgccatcgccggcgagcaggacgaccacgaagctcacctcacctttttatttttttttactaaatcaccgggggtagagaatccctacctgaatatattattgagccaaatgatcttacacggggcaggcttcacctacgcaagcgcagaagctctagattatatgagaatagagtacacgtggaatacaaaagaggagagaccaaataaagaaaaacctcccaggagataactattgatgaccaagaagctcacctcaccttgatcctcctgccaaaagcccaaaggtttcggtgtgactgtggtggttgtagtgcggtgaggacggtggtggtggtggtgagatggagagagagaaggtgacgtgacgtggggtgcacgtacggtaacggtacggcaatgccaaagcttggatcactccggaaaagggattaaccgaggtggtggtggtgatgtgtacgaggaggaagaaggaggaggcgtcgcgtagaatggaatcgatagcaaaaatggagatcgagtattatcagagtggttggtggttaggcatgcacgtcaggatttcaagatagcgtcagagagtatcatctgtcgaatcatcaggcattcaaccattttaggctttgccgttcaccgcaccttggctgtatatccccacggtctctctcaactatacactatacgaggccggcagccaccgatggtccatcaattcttcacacactttattttcggatcagagatattgaactaatcagactgtaataccaattatagagtcataaatagtcttttcttaaaaaaaactaaacaatgaggtgagggctctcccacttatatattaggtctcttgcctttctacaactcaatatgggactatttcaacaagaaatactctatacatg

SEQ ID NO: 38570 - DNA, 598 bp, Oryza sativa
ccctagggccttaatccgagctaatctaatcttgtttgggcctaacgacatcatcggatacgagtgtggcgacatcgctgtgtcggagctgatgcttgccgggccgctgctgcacgtgtgccggctgagccgcttagctgcagctggttgccgctttgccacagacaaagccgtgccgggtgggctattgctcatagacctgctgtatctagccgtgcatggatgctaccggctgtgccgacaccctaaccctagctttgtgtatgcgatgagctgccgcctagccaaaccaaggagccctaatgccgccgtgtggcaaatgagtgccgcttaaacctagccggtgcttttaatcgagttgtgcaggcgtgggggcaaccctaggatctaccggctatagtagtgaccggggtgtaccatgaaagattataggcaccggttagccggagccgttgcagagtcgatcgctcgttcgttagaatgaggtgttccccgtgcttcgctcgttcggccggggtgagtcggcccttagtttagagccggcggttccgttcgacggtatttggagatcatttaggtgatcccgcgccacatagaa

SEQ ID NO: 38571 - DNA, 563 bp, Oryza sativa
caaatttgtgcggattttgggctgaaataacgtgcaggttccggcattgcgggctggatttgtactcgtatttgggccaaatttaaagcctattttgggggcaaaatttactaaggcctaattacgggcaaatttgggccgaaactgcactcatgggcctaccttacacgcagtttttgccgaatttatttgcacttgagggccaaatttacccgtatttgtggaccgaatttacgagatgttatgatgcaaacttattacttgtagtcctatattcaatatgccaaaaattttgccccaacagacgaagttatattaacagctctgtgccatttaacactttattccccaaaagtggtcaaatcaataaccaaagatgtgtagtgcatttacgaataatcaaatgcagcgacatgaactaaatgtctcatggggcatcacaaagctcagatatgaaaagatcaagaagacagtctgaatgaccgaaactgtgtaactcgcatgacataagaaaggtatgatctaatgcagaattgcagatgacagtttaaaaagaagaagaa

SEQ ID NO: 38572 - DNA, 756 bp, Oryza sativa
tcacattagtgacttagcttctgtcaaggcacgaaagggatggcgccaatatatgttagaccacggcgccaatgatgctggggccgtgaaaaggaaaaaaattaccatcccaaagaacctattcatcctggatgaagccataaattaacacaatgcccgcataagatcaaacataggccgtgtttagttcgtgtactaaattttttttaaagtacacggacgtacatttgaagtattaaatatagactaataacacaatacattatagattccgcctgtaaattgtgacacaaatttattaaccctaattaatccgtcattagcaaacatttactgtagcatcacattatcgaatcatggcgtaattaggctcaaaagattcgtataacaatttacatgtaaactgtgcaattattttttttcacatttaatactttatacatgtatcaaatatttgatgcgatgaaatttttaaaagtttgaagggtactaaatactgccataactgtgtgaaacaaaagctgtcggacggtccagccccccagcattgtgctcagaaggcatcagccagttgaatagttgcctgtgtcactgaaacctgggcccacacccggttttcagtgggccccgtttggtcaacgcacgcaggcaaactatgacgtgcagtgcagtgcagcgcaacgcacactggtagtgattttgtacgggtagcagtagctagcaacagctaacggcatggatttttcacattttggg

SEQ ID NO: 38573 - DNA, 959 bp, Oryza sativa
catttataaaaaaaaatttgaccaaattacctcctcaatcgtccactgcggcacattggacgagctacgtgacacgctggccgtcatgcggcggaatctcaccacttgcgtcactggaggtcgagaggccagcgggcttgatagggattggaccggtggaagagatggcatattggagagagggagaaggaaaaaagggatgtgggaagcaggggtaatttgatctattttttttaaaaaaaatacattgaagaggtaagtagtgacatatctccaatttctatcaaattgtaatagcatgtctctaaatgcacaatttttttttcaaaagagatgacattgtaatggcattgatctaattaaaaaaaaagaatgtataactaggagtaagaagttgattgcatgctgatatgctaacgtttgtaaatatttttttttattgaagataatgaataacgcggcagctgcatcaaagacgcacaaagcccatcattcattactgtacaccaagccaagatagaaaacatacatatagtaactaaagttctgaacaaattaatgttcataaagatacatcatattaattaaaaacgttgagtgggaggcttggaggacctagcattacataacggctacatgaaagaaggtgttgattaggggaagaaataactaagtacctgagtgaagcttttagttcagtataattcgagagctgcttgattaggacagtccttaagtgcctctttaacaacagccttggtttcgtcattacaggaatgaatggttacatgacgaagggagtggaggttctccaaacctaaatcattcaagtcacccctcactataaaagtcataatcagaagacaaagcctttcaaggtgaggcatagctcctggttgaaacgatggcatcatgtagctataaaggtgaaaatattttaaactccggaatgcacatgc

SEQ ID NO: 38574 - DNA, 516 bp, Oryza sativa
cttgttttaagaacctatttagtaagatttgtaaattaccccttcaacttatcagtattaaaagtaatcaaatcgaaatgtatatagccacgtataaaatcaaactaagataaatattcttatagcaaactgatgggtattgtacattccgtagaaaatataattttaatttattttggataatattataatatattctctttcatctgtaaaaaagcacaaacttaactagtttaagaaaagtctgttttacctctaaaatcactgccttctctgattaccccattagataacgttggaccgttttcaacacttcatttaatttttcatattggacgaatactactctctatcgtttttacctgctgttgtccacgatttaaatcaaaatgcatgcacatgtttttctattatcttttctgcttagatgttagcaaaaaatacggtgataccaaggtaaactttatttagttcgacgactgctttgcttatataccatttgcattaatcactact

SEQ ID NO: 38575 - DNA, 1011 bp, Oryza sativa
acacatagtagtgttcagattcatagccaaaagttgttatattttgggacggagggagtagctttcagcaacagaggggaggcaaagggtcggagataagccacgccataggggacatcgatgacggcgcaaccataacgggaaagatatgacatgtgtctgaattagggttactagagtgtggtgtgggagagggaggagtttattgtggctgttgtttagaggttgtgtagtggtcgcgcaaactgaatgataggtatttttaattgatttagatatagaggatatatgcacatccatataagtacgtgtatggtcgatatctatgaactatattgctccctgattgtatagctagcgaggttacacagaaaattaaagaatgtaagcattatttcacattacggatacaaagtaatgaataaccaaaacaccccataattttgcaacgtgcatacatctagttgtgtggatagtgcgattacatatacagtacatccgattcacattctaccactttgtttcaggagttcgtgatcaattaattagatcctaggttggccaatatatttgtccatgtcttagcgaagaagggttgttctaacgaatattgtacgaccttcactagagtttttatgatgtcatataggtatttactaaaacaaaccattattgttgaataaaatgccaatagatagaaaaagaccgattcacctaactttatcgatcctcgacgcactggatagattccgattgtaacccactcataatccaaccaccataatttccccacatcacaccttttaccatttgtcattctatgaatatatataaaatccaaaaggacaaattcacacccatgcatcacaaaaccatgcctatactacatacctaactgaatgatgcccaacacaaatatggaccccctttgcaatgagaaaaaatcaagaagatgatagtaggggccaagggaggggggacatgatcacatgagatgagagggtgatctct

SEQ ID NO: 38576 - DNA, 2120 bp, Oryza sativa
tgtgtcatgtatgaatatgaccttttcgtgagctatcacgctacaacggtagaacatctaaattatgaagagctacctccattattgattttgaaaggactggacatatctagatttcaaaatgtctttaaatcattttctataaaacgttcagttaatagctacaaccaaaattgtctaaaaataccctaaaaatatgaaaatattggttatagtttttacacgccgaatatatttgtagtttggctaatgatcacacaaaatctccatttttttcttttaaatctttttcgcgaacgcgcaaaaggattgcatgtcaatatattagaagaaaagagttatagtcactcgacgcaatcagccagaccggcttatgcagagggaaggggaaaaaaagcaaaaaagaagctggagcttaaaaaactgcggcggctaaatacaaactccaagcagcgggaaggggccgagcctctttacactcccaacaagtccccaaaagtggcaacgccagctaaagaccacagatggctctctgagcatgtgtttggtttgggcacaaggtgggatgagttggatccatccctgttttttggaatggcatgatcccattttctgtttggttgaaaggatggaacgaatcctatttttttgtttggtttgaaggatatgatgggttggaatgatcctatgccttatttggatagagggatgaaggtgggatttctggagtgtacacattgtaaaataacatttagacatgaaaattacactatttgaaaattaaataccgttaatatcgctacatttttaatcagtatacatcaattcttgtatcaatccgttcatagaaaataacacatggccatcatctactgtcaagaaatttacctaaaaaaacaacacatttttgaactaattatactgctgttggttcaattgctactgactaattgacttcattcatacttactgataatactatgatagcgatcaagcgcttcggagatgagaattgacaaatatcagtctctctgatcaataccaattattggatagagaaatttacagaaggatagcagagtagcgaccggcaagagaagaggcatcattagctccctgctcgtgcgctcccaccgccgccttgcccctgcttgcgccgttggctcacccttgctcacgcgctcccgccaccgcttcatccctgctcgcgccgctggctcgcccctgctcccgtcgccgcctcgcacgctggccgccgattcgcccctgctcccgccgctaaccctagaacgcagtcgtgaggaggagctgaaaagagcgaagggaaaaaaaagggtgggccgtgagggttaccgcgcctcacacgcgtgcggaggtgggatgaatacgtccaccagtttttggcggatgagttggtcccgaatattgaaggaatattctcttttggaaccatcctatctcatctagtctctcaaccaaacacatgtaaaaatgggatgatcctatcccatcccgggatatcccttcaaccaaacacatgctgagtagatggactccaaaaccactaagatcgaagagagcgcagagtcgaaaaccctagagtttcgtttaaatcaaaatacgccctacataaaaactgaaaggtgagtgattataagttatttgatctgtcaagctacctctcgctaatcattttcagcgtgagaatggaattcgtcatgaagctcaaacccaaccatgcaagaatggaatatccaggcataagatcgcattgataccaaaagaataaacatgattccatcaggttattccttgagagttttagttcttggggccattaccctcacaaattaattcacagttcgatccaagccgatcgatttgctcccaaattttaaatggtttgtttaaatttgaagtcgtaacgtgtgacgtctctctcccaggatgtggggcccacctgtagggagagctttcatgcatatgctctgccatattctccctcgtcaagcagagattccagcttacaaagagcagagaagcagagatgtctcctcctatcatttggaatgaccataatgcccttacctgaaaacccaatattttttttaaagaacatc

SEQ ID NO: 38577 - DNA, 1474 bp, Oryza sativa
taataaagaatgataaaaagattgtgtaattaaaggttaagattgtttctctatacataaattattcaaaaatatctattatatctataaagtaatagaaaaaggagtctccacgttcactctcacggcctataaaatcccacgttaatcgaaagaaaaaaaatagaaggagaagtgctttgcaaaaaaaaacttagaaacggacaaaaaaaattctaatcggactaaaaaaacttggaaacggacaaaaaagaaaaacctaagagctgaaacggacaaaaaaaacttggaaacggacaaaaaaacaaagagtaaacggacaaaaaaaaacatggaaacggacaaaaaaaattccaatcggacaagaaagaaaaaattgaaaacggacaagaaaaattagaaattccaatgttaatcaagaaaaagagaaaaaaataaccattgggtcatagtagatccagattataacagtttagatttcatatagggtgtgtttagattccaaattttttttttccaaaaatgtcacatcaaatgtttggatatatgtatggagcattaaatgtggatgaaaaaaaccaattacacagtttgcatgtaaattgcgagacgaattttttgagcctaattacgccatgatttgagaatgtgatgctacagtaaacatttgctaatgacagattaattaggcttaatagatttgtctcgcaatttacaggcagaatatgtaatttgttttgttattagtctacatttaatacttcaaatgagtgtccgcatacttcaaaatttttacacctaaacaactaaacatggccataatagttatatagttatataaatttttttacgaaaggttaaagtaactataggaatcggagtaaaaaaagcttgggatggaaatgaccaaacaaaccacatatacaaagtttatttctaatttaaccaattggattaagaactaatgcattaacttatttaagtaataagggcatgtttagatccgctgacacgttttttcatcttgtcatatcgaacgttttaacatctgtatgaagtattaaatataggcgaaaaataactaattgcacagattgcgactaatttgtgagacgaatcttttaagcctaattgctacatgatttgataatgtagtgttagagtaaacatttgctaatgacggattatttaggcttaataaattcgtctcacattttacaggcggattctgtaatttgttttgttattagactacgtttaatacttcaaatgtgcgtcagtatatccgatgtgacaggccaaattttcacccctggatctaaacacatcctaagaaaattagactctgcgtttgctgtcatggcatagaaattctcatattaatcgaagtccatatagaaaaacaatttacatagataattaaaaaataatgaatattggaagagaaggctagagttcatactagtgtacaatt

SEQ ID NO: 38578 - DNA, 951 bp, Oryza sativa
gtcacacagctgcacttaatcgatcaggaatgtccaagcaccacaaaaacatgggagaaaacatctggataagagaaaaagaactccatccatatctagcatgtcaaatcgaaactagaatactagattgagcaggcaacaaagtaacaaccgagtggctatctcacctaatcggtcgaagcaagctttgctactaattgttatcaaggcccacgctatcaccaatttcaccatgagtagcgtaagcgctggctgcagcgacctctcaacgctgcagtcctactcacgaacacaacaggaacccaacaccgaagaagtgaagatggtggtcattcgcatattagtgtgagcacaagatagtagcattttgtcacaccgtccatttggaaactaattaactgtgcatatgctatgttatgaacccctgggttcatttcttaaatgccaatggattaaactagctagtctagagacctagagatctactcctatatggattgatttgagtttggaatctggaggagcgtcacatggtgccacatgcttgtttctcggatgaacaaaaagattcgctgtggctcgagcggaacgaggaggataaccacgggtttagtttgaaatataactactgtcaattaatgttagtattgtattatagcatattgtactgtaatatcaaataatatgaattagtatattgcgaatatgtttgcttgtagtttgttttatttgataaccatatatctttataaatatagctatatggcggtggttgttttaatcacaacacttagatatatacatgtatacttatacacaaaagaaatctataaatatagtgatagttggaaaatgttataaaaatatatatagaggagtgtgatatgaaaaacgtggtaaaggtctgatgactgatggagggggagaggccatccaaatggaatatagtgg

SEQ ID NO: 38579 - DNA, 1203 bp, Oryza sativa
gccctccccccccccccccccgaaccgccgccgccgccggaccttctcctcctcacccagccgagccgacctcgcgcgctggctctccttgcaggctccgaggagagggagggggagagagagagaggggaggggaggataaggtttgagtggtggcctggtggggggagtcggggagacgggatatgtggtgctcttatgaatgacatatttattgtagttgaacatgccctcagtgaccgtttgtcgtttggaagggaaagacgaagtgctaattgggaaaattataaaaaccatccattatatcacctcgagtttgggattacccctataaaatgcttttcacaaatatctccctcctaatttaccttggtttgatattctggaaatgaatcaataatctaagattagccgattattctacagtttctgtgtttgctgccaaaacagctaacaactgatgaacaagaaaagttattatggttcaaatactcaacagcacctgctgatcgtcaattaattgttactggactcatttttcccacctatttgatactgactggatgtcaattaattgttactggacgtcagtgttgtggaatctttattactagtattttcttccatcgtgctagactttgatgaagtgtttttactggatgtcaattcttgacagccaaatgttatcctaagtcccaactaatcttaactctcccaagtaaatgcaagaaaacatcaaagcacttacaaatttaactacaatcttccagcctttgttgtgaattgtgatagattctcacaaaaataatttgaacagacgggatcttatagaaaaacatatagctcacgacaggaataataacaatggtgtgaaatagacgacaaaagctttaaaacatagggaatgttgatctctttgtgggttgtgacttgataatttgcttttgcaaatctcttgccttttactggacgaaagcttgtgatcttttacaatgtcaaacccaatcaaaggtgtaaaataataagagccaacaaatgtaataattcttcatgttcccaatatagataggaaaaaaaaacatttataaccaagtcactggcatcataatatatatgcctttttttttgtgaaacaattcattgaggtacatacaccaaaacaataatgaatatgaaacactgctagagcattacagatgtgct

SEQ ID NO: 38580 - DNA, 966 bp, Oryza sativa
gtcttttggcatttcaactcctcgacttccacgatatgaccaagagtccaacatatcatttgctagcttgaagctataaagcataccatatggaatatcgcttggaatgcctaatttttatctcccttgttggggttaaaacaactagtaccaccagttttttaattatctaatttaacctaaccaccaaaaaaaatcagagggttaaaatagcaccatctaccattacatgttaccaattgaaaatcattcttgagctaagcgagatatcttgttcaacaatccaatatatccagagaaatcattcacttctatgtaaaaaaaaccgtactactattactgaatcttatttataagatcaagtgactattaagtctcgagtgcaattatcgtgaaaagcttacttttaagtaagtcttcaattctattccataaatcaaattaaacttacataaaatacatttatagtcaagatatcacatatagccaaaaaccttaaatatatattggtggccaagcgacaccacccattttagtgatatgtatcatgcgagtatgtgacagacctcttacgtaactattgtcatatgttttgattgcacgatgtcgtcttttggcatttcaactcctcgactttcgcgatatgaccaaaagttcaagatatcatttgctagcttgaagctatatagcataccatatagaatatcgctttgaatgcctatttgtagtatcattattggggttaaaacaactagtacgatcagtattttcgttatctaatttaatcaaaacaaaaaaaatatgtttgagaaggtcaaaatagcaacatctaaatgtattattattattattattattattattattattattattattattattattattgttgttgttgttgttgttgttgttgttgttattattattgttattgttattgttattgttattgttgttgttatt

SEQ ID NO: 38581 - DNA, 1291 bp, Oryza sativa
gtttcccccatccttctcttttcttcttttctcattctctgtccatcccccgcaagggtgcagcatcgctccgtatagcggacggtgggtggcctccccatggtggcacacagtggccagggaggcctcccctccaaggcaggtggtttcccttccacagtgggcggcttcccaatggcggggcatggcaggcgccctccatggcgacacagcagacggcttcctctcaagactacccagtcgcctaggtccgcgcatcagtcgtccccaccgattgaccagatccacacaccccccatcaaataaaatatttacaaattgttaacaaaatgtttacgagagaaatccaccatttgtaagacctgagctagatatcatcgaaatgtgacttacttctttcatttcacaatgtatgactttttagcattgtccacatacatatctaaacacacacacacacacacacacacacatatatatatatatatatatatatatatatatatatatatatatatatatatatatattcattaacatctaaatgaatgtgggtaatgtcagaaagttttacattgtgaaacggaggaagtatcaattaaagctcaaagcctatcttatatacctcggcgatgacatgaacacgacatgatcgattgcaggttaggtcacctctagctcatgttattgttgagctacagcatgagggtaacaatggccttttcttatatatatagctgcacttatatcgcataaattaagtacgatgtggatgaggtggggtacaagttcaacagttagagacaagatatacttttctaaacttaattactatcatcaaggcctgtgacactcaacttgtgtatatataggctatcggatgttgtgatattaatgtaaggatttgaatctcctagctagctaattcttaatttattgcctacaagaaaggcttttgaactaatttccaatgggattatgggacattttatatccattatctcatagaataaatagcagtactataaatttctagaaatggagatagacaaatgccccgaaggcatgaacaaaacaattagacaatcattgggtatagtttttagtttcttaaaggataagcacatgtatatgctccattaatgtttctcagaactagatcaatgaggatcctctatcataataccactatcattacagtcacaagtatatgggtcctatgcttctattgctacacacgtcaataaatgtctgtaatggtagtgacattatggtagaggatatgaacccc

SEQ ID NO: 38582 - DNA, 1790 bp, Oryza sativa
aatatatacaataaataaatgcatttttaatttattatagtgttttgaaagacaaatctatatatgtttttctagtttctttaaactaaatatttttaaagttattgatggtcaaatttataaaaatttaacctcaaccttgtctaaaacgtcaattaatatagaatcagaggtagtatcaaacattgtagtactacaccacttgatccaaatttggatgacacttgatccgaatttggatgattgtattggttctgatttagttcgattaaggtaaaagccgtgcgcgccgggtagaaggggaacatggctgcctttttgtgaccggtcaggggtaggtacacaaaaggacatatgccgtttggatcagaactgcagctagatcttgtccattgattggcgatgagggcaccacctagctagcatgtctgattggttcgagcctagctagggatcgacatgacgagctagctaatggaaagtactatacagaaattgagtactccctccgtcccaatactacaaatctggataggcacctatcactggataggatactaggaaatgttccatccggtcctaagttcttatatattgggacggaaggagtagttagcattgcctgcaatcctgcatgcagtatcaagtgttgttatttcatgcatgttaatgtaggagtaaattccatgagtactccctccctcccataataagtcacatcccgtactaggagtaatttttaatgtaagcgcctatctaaatccatggtactaggatatgtcacacatcacgtactatagactactacctccgtcccaaaatatagctatttctagcacagtactttgtcccaaaatgaagctatttttctacctaccttctcctctcaaccaatcacaaccattctttttcacctactttctcttttcaaccaatcacacacattcttcaatcattctcacatactttcttaatacccgtgccaacctcaaaaatgattacattttgggacggaggaagtaacttattctcgaacggatgtagtattatataggctacaactagatgaaaccggccctcgcgttgttgcgggagtttactatgataacagtagaaatagcgtgtaatatagctagacaacgtaagcttatagaatttgtatttttgattgatcattggaaaatgctataaaccacttaagttgatgtgatttatcataatttaaatagtatttagattgataatccaaaagtaaaagtaaggtgatgtggcttcatgagagaagaaaatgggggaaataatttggactgtaaattaatcatctaaagttagaaacaattaaagtgacgtggtttaatgagagagaagatagaaaacactaagtgggggcgaagtatataggatattgcagaaaatgatggagagatatatgttgaaatattatgtaaattgtgtggaatgatgatctaacatacttatattttatagctttaaaatataataaaatataaattatatagcacctttgcatgaggattaattaagttgtaataattgctaatggatgattatgtgacatctttacatgttaagctctaggatatagtgttgtaactttgtagggagtatagacacattcacatacatgaggaagagaatcaccacaaagagcaaagataactacatgaataattaattactccctatgtcccaaactataaatgcgtatatttttttacacgatctcgaacattatacattgaatactaatttctttgacaataatataa

SEQ ID NO: 38583 - DNA, 2323 bp, Oryza sativa
caggatcattttggttgtttcaagcaactgataaaattaatagaaataaaagatgtggagaggatcaccccggcgttgtatgtcatactcccaatcacaatctcgtgcttttgatgatcaatgaagatatgtattatagattgataggttcagatgaccaaaccttggttaattatgcactcacttctgaatcaggccacacagtggtatatttgccacccatctacatttctacatcagttttatcatattgtcaaaactggggttcatatgattttcggtatatgattctgcacccaacatttcataaatcaatcaagcatctgatccattgttaaatcctccttccaaagcataaacccatgattaactgtccaattaatattcttctctttctcaccaaccaatcagcttgtaccaaatcccagctgctagctgagccaccaattccagccacacaagaatcataccatcaaccaaaccaaaactctgctttggaataacatctctgaatttttttctgcacctgcagatatgtaacatcatctagatcaatctgcagttttctacttagatctgaacagctgcttattattattcccatatataatccatcacaattcacaggtgttcaactgagggaggctgataccctatgcaagtttgcatgtgtcacatatgctgatgttaacttgtctgatgtctcactcatcatcaccaccttatcaccataatattatgcattatatatgctacatgacctttcatagttcgaatggacagtagccagcatataataaatgagaaaaaaaagtgattatcttgcagggaattaattggttataaattataattaaatttcttgattggaatccagaaccatccaaaggaacttggtccatctgagaaagaaaaaagaaaaaggaatttggtttcctctgcctagtcggtgcttacgtggagattcctccatcttaactttggttagtacgatgatcagggggcacgaatagaaaaataaaacactggataaatattgatgtcatgaggttcttcaagaggcattagtactgatcccctggtttcaaatgaaatttgtccaaaataattgtcttaagattatgggaggtagtataacacagggtgcttgctcctttcgccacgataagtcatgatttttcagtcaacgcctacttgaacaatttccaagcctactctctcacgaagacaaaaaaaaacacctttttactgaataggacacaatttcaaggtagagttttctttatattaattcaaattaaagaaccaaatctactccaggttcactacttcgaaataaaaattttgttttcgagggatgagcgggctgaaattaactgccgcagttgtacacacaacctactggaaacaagtttcagccgaacaaggccattattcttcattagatattgtgattttttaacagatttacgctgaatctaaacaatttatatattgctaaattcaaacaaaataaatttcaggacaaaacaccctgaattttctgctctctccatttcatattataaatcgtttgacttttttttaaacttctttatatttgattaagtaacatttccaatacaaaacatattcaatgttaagttcaaatgaaactaatttggttgcttaattgtcgctaattttatctataaatttggttaaatctaaataactttgattaagaaaaaaaatcaaatgacttataatataaaatagagggagtacgtattttggaaggtgacaagcaacagaacagattgattggtccactctaaaaaaaaggaaaaaaaagattggtccaaaagtagaacaagagaataaccccagcatatactcactcctattaccaactatttccaccatatggagaagaagagaggaaattcaggtttcttccaagacaggcactgggggaggctaggattggtgcttggacgcctgcagcacacagatgccgccggctggctttctttcaccgatcagaatgcggccggcgccggcaaaactgaaggtgtacccaaaatgcccatctctctctgaatgctgtgcctgctaaaaggaatcaggtgaggtcaggattggatgggattttgttaggcttatcagcatcagctagtaggtagggtttggcattttcacatgaaaaagttcactactacctctcccaaatgcaacctatccggcaaagaaccttcctggaatggctccggaattcttggccgcattttctttggtctagaagtgggggtttgcttgatggcttaatgacatcttagatcat

SEQ ID NO: 38584 - DNA, 716 bp, Oryza sativa
cccaatatatacgtatcatcattattgttctaattatatttttataaagttattaagaatataactatataaaagtaaataaatctaataattttatctatatattggatttttaataactttctgaatctattaatgatttaagagctcaaggtttgactctgtgtagtatacaccattagagcttacttggaaacgaaggaattcgacattggtaaatactacagcattgattgattgtttgcacggtcccaaggtgattcctttggctaaaaaggtcttaaagataggaggtgcaccatgtaccaccagcactaacgaaacaaaagtatgagctcttgtactacgcatcacaagcaaagcaacagtgaaaggtcaccttgacttacaacagtgaacgacgaaatcgaaaaaggtaagaaaccaaagctgtggaaagcatgaaggtgaaatggaagtgtgacgcaagatgggattccctgattgatgtcatgtatgcttatgtcacgttaatataatgatttaatttattccataaataaatcatgacattacagatgaaaactagcatgaacgcatcattagatctacatatgtaaactattcagtgtaacataaacagatcaaatatgcgcaacatattgaacacgtaccgatgtgacagaaagaccggctgcttggtccaaacttttcgcaggtgtctacgaaggcacgaa

SEQ ID NO: 38585 - DNA, 656 bp, Oryza sativa
tcaattattattattattattattattattatgctaccaattaaaattattcttgagctaagtgctatatcttgttcaataatccaatttaaccggagaaatcatccgcttctatgcccaaaataatcatattattggatcttatttctaagatcaaattgatattattaagttccaattacaattattgtaatgagcttgcttttttaagcaagtctttaattatatcccataaaccaaaccgaacttacataaaactcatttgtagttaagatatcacatataggcaaacaccttaaatacacaacaactagtaaaatccaaacccacaagaagatcaagctaccatggtgcaataacaaccattaattaaactaaactaaactaaaatactttaattagtacatctagaaaagatagacagtgccattttggtcatcttcctccctccgctactctcaggtcagttgctaccttctcctctttccaaggtgcttataaagataatatatgtgtgttcgtttatagggtgagtttgtgaatgttacaagcggatatgtttatgctgttttcataagaaaaaaccataagagccttatcggttgcccatatatgtgttccatagtgacataaaagtaaatttgtaggtaaaactt

SEQ ID NO: 38586 - DNA, 812 bp, Oryza sativa
attcgcgcttggtttattactgctgtacccgatggcgcgggagctgacttgctctgcgtggtttggactttggacctctgccgtttcatttggtttcggggacacggtcaaatgacgttcagctcgttaggtatgtgagaaccatggtcaagatccacggccaaatacttgcgctgtgtggctgctaaactcgattgcttttctttgctgactagttctaactcagttttgctgttccctgtccattagtagtagtcgtgcacatctgtcgtctctcggcaacgcgagtatctgatgaggtgttttgaactgttggcgtgtagccacgcaaggaggcttgaaagttttccaggctatgctgatgaaactgaacacgtcagagcccgacaggaagaaatttgattgtgcttactcagtcctttttaggaagggctgccggaaaccgatttgattcaatcagtatgtacagttgcagcactgatcggtctggtattgcttaaatacacacatatatatttatttccccctagtaaattacatttagaggatatgaatctttgatgatgtaaaaaattaaaattgtatacaacatttttctatgtgaaaaaaattacagagcaaaatttgctgtgtatcctacaggagtacatcctttcctcccatctccagtgttaagggacggtacccttttctgcagccatctgcattcctgggccctccaaacaaataaccaaatgtatcaaagactacagtttatcctaggtacgtacaagtacaaaacccccctaaactacaatttccgtcgtgtcatg

SEQ ID NO: 38587 - DNA, 524 bp, Oryza sativa
ggcgaattcgagctcggtaccctacattcttccactagcatgaatcgtaaaccacataacatggcttaaggaatgctatggcttgctctgcagtcgttgtcattattcatccacgcattccgtggacacacactccccattccttcacttatgcaagtacttttgcacatgacaataaaaaaaactcatggtatagtatttttttttgcttgaatctatagaatctatctatctatctatacctatactaattgggcactctaaagaagctaccacgttaatcagaaagatccgactattgattaagtgtgtcatatcacaatcaccgtagattttcattattgagaacctgcgttaaaatagattgtgccgcttctcagcccaaccaatgaaccatacgagcccatccaatgtatacgtacatgtatcgatcttttctcaggttacaattaactctgttaatttcagcaatccaatagatgggcacgcaaacatgtttgaggtcttcgctcgagagagacaca

SEQ ID NO: 38588 - DNA, 518 bp, Oryza sativa
tgctacaggatataggaatttcatggttttagcggtaagacaccgcacggagtcacttttggggaaacacactctgaaaatatggttatttgctagaggacaccaaacccattaaattattgttttcgtgctgaccaggcgagaagtgtcccacttttttacatggcttgaccaaattgccccttttttctctttgtcttcctatcttatttccttatctcttcctctctctccctcatctctctcccttgacgcgctgaatgtggctcgggagcccagcgacgacgcggctcacggtggctgtgtggtgtgatgcgagcggccggcaacgcggtgcgcggcacggtggcacacacatgcaggagcggcggccgacgtgaagtcggagcagtggccacgtgaaaacagagtagaggccgtcgtggtggtggcgcagcacgcgacagcaacagaagacgatcgccgccgctgtagacgacaccaccataaacaaccgccgccgccgcctcctcgtggcg

SEQ ID NO: 38589 - DNA, 617 bp, Oryza sativa
aattaaacagcatggcgcttactaacccgcgtcaatgttacctgtctcctggcacattttgatttataaaatcgatttgaatttttggtcgattttgtggtactggggttgattttgtttgatgttcagtttctataatgaaaaacatctggacggacgcgtagtctaatgtgatggagaatattgcaagcccgaatcttaaatcgataatcccttatctaatgtaagggacgatctattgaaactgctaaggtactctatatatacttgaacatacgtgacaacaaacagtagtaattgtaattgacataccaacagaaataattcccagtgaaaaaaaaggttaacagaagaacggtaatctccatttgacctacatagtactccagctcgcaatgacagatctgcacgtacaggaatgaattatcgagaacgaagtaactcttgtgccggaattctggtagacttcaaaatccagtctatcacttgatttgatatacacggagaattatgttacttatcttatggtacatgaaacaatggaacacgttctgaatgttactgacgaaaaagaactcatctgcacaaaagaatgtctcggcaaaaacagcatacat

SEQ ID NO: 38590 - DNA, 719 bp, Oryza sativa
aaagatcttcaatattcacaggaaaccactgccattagaaccttctttgcttcttcgtgaggctaataggcgtagggcttttctttctgttggaaatatatctgaattatatgattcaggtgatgggtaaggactgtcgatttcctccattttcatgatgtaatctttcaagtgaaatttttcagcatatctgtgttaatgtattcttattaacacatatctatgttcttttttgtgtgggcagttcaggtctggatgcaaattcaaaaccttcgcccaacaaatctgcttcgaactacatggccaggacaatgtcagggccagcgacatctgagacgtctctgccagttgatcgccccatgaggttgtcagaaattcatgttgcagctgagcatgcactgaagcagacagtatctgaccctaattttatgacatcactttcatcactagaagaatttgaggtattgtaattattcaacatgctcatcatgatggattccttctaaagtaatatgctttttttaactaattactttagagacaatcgtgaacatacagaggtttgcacaagcaatagataattcattgcaacagttttttttttctgttaccagaaaagatatatggagcttactaaaggcgcagctgacaattatcatcactcttggtggaaaagacatggagttgtgctagatggagaaattgcagctctattcttt

SEQ ID NO: 38591 - DNA, 658 bp, Oryza sativa
tcaaggatactaggaaatgttccatccggtcctaagttcttatatatagggacggaaggagtagttagcattgcctgcaatcctgcatgcagtatcaagtgttgctatttcatgcatgttaatgtaggagtaaattccatgagtactccctccctcccataataaggcacatcccgtactaggagtaatttttaatgtaagcgcctatctaaatccatggtactaggatatgtcacacatcacgtactatagactactacctccgtcccaaaatatagctatttctagcacaggactttgtcccaaaaagaatctatttttctacctaccttctgctctcaaccaatcacaaccattctttttcacctactttctctttgtaaccaatcacacacattcttcaatcattctcacatactttcttaatacccgtgccaacctcaaaaatgattacatttcgggacggaggaagtaacttattctcgaacggatgtaggattatataggctacaactagatgaaaccggccctcgcgttgctgcgggagtttactatgataacagcagaaatagcgtgtaatatagctagacaacgtaagcttatagaatttgcatttttgattgatcattggaaaatgctatataccacttaagttgat

SEQ ID NO: 38592 - DNA, 638 bp, Oryza sativa
gactcgacgcgaccgcgactccggcgaactactactcctcctcctcctcctcgctcttcctcgcgaatgctggtcgcggcttgctgctactagcctctccaccacccagtttggtcgatgagagagaagggcccctgccgcggcggcaacatgggggagagggatttgggcgacatcgtgctctcctggtcgctcggtgaggtcatggacgacgacctctacagaggaaaggtgattgatcgatcctcatggctgctaatgattttgcgcgaggcagtgttgctgacctgagcaatttgtttcgttatttttttattaaaaaattcggggtgtgaactgcgagatggatgcatggggttttcggtgtacgatttttttttctaaaaaaacgcaaatattagggagtgacttaacatcaaataattaaataattaaaaggggtgaggcttcgaaatctaggtcgtttaggccaccgccttgtttagctaaccagaagacccctaagcgtttctcgtacaatttgttcttctatgtttacctgggagcaagctgttgtatattgtagatgttttgtgagtcgcttgtagtgtcctgttgcttaatgccttgttctgttatagaagctcactagtcagtag

SEQ ID NO: 38593 - DNA, 664 bp, Oryza sativa
tcattctttaggggacttccttttcttattgccacagagtagacgcatatgacctactaccattttcagcacattaggaaaaccgatgaccttcacattgttgattagtgaagaaacttaatgggtcgactattttgcgcgattgagatcgttaccgaagcacgaaacggttttttgtgtcactgcatgtgctctgctcacttcacctgtcttctagtacgtgtgaatttcgaaagcagatgtcacccgaagaagtttgagcttaacatccaactcgattccgttttgctacagtacaacttgcagcgatgcagtagctcttcattagatggatctttcagctttcaggctgcaacctgtttcatccttatgccctgtggatacgaagcaaaccccatgtatgatggagacgtgcattgaagtctcgattttactgcaggtctctgaggtgctataccgctgcgagtgataaattactattgccatgcgactctagcggtagtaccgtaactctagtaacattgtaccgtcgtcagaactcagaatctagtatctggcatcctagctacaactctcataatccaatacagatacagtactttctacaggggaaaaaaacaaaatatcgtatcttttccttaggggagacggaatcgaactctta

SEQ ID NO: 38594 - DNA, 593 bp, Oryza sativa
cgaacggagtgataaattctgattaaaaaagagctgcgaacaagtacttcctctatcccataaaaaaccaagagcggggcggccggtgcagtccacgggggaggtggagcgccacctctcctcctcctcttcctcctcatcgtcctcgtcgcaccacccacacatcagcctctagatctcgagagttggagtgaggcggaggcagagaaggccggaagggccggctcccacctatgagccatcaacgacgccgtctggcctatgcttcgtctccggggccccccactctagcacacgccctcccaaagtttgccactcccatcttcgcgtctagtgctgccacccaccgcgctcccgtatctagcactcggtggagaccgccgacagtgcactccaggacagcgaccaccgcggcggctgtcagtgccacaacggcgagcattgtcctcgccgtggcgacaaagaagggagaaggatgggaggagatgggggcggggggccaccacttcggcggtcgccgtggggaggaaggggaataggcgaggtccgtgatgaggctgccacgcgaatgggaccgtgccagcacctggtcg

SEQ ID NO: 38595 - DNA, 582 bp, Oryza sativa
ttttagagaaggatatttgccatactagcactagcaccatgtgctccacaaaagtatactagtcactcaaagttttttttagatttacggatttcctatactatacatatttctatttgttacactatttctgttatgtaagcccacttagctcagaggttagagcatcgcatttgtaatgcgagggtcatcggttcaaatccgatagtcggcttttttctctatcaatgttccatgaacaaaaatacctccttttctccgaattaaatggagaagccaggatctattatgtcgttctaccctacaattttgctagatacaaaacaataaaataaataatatatatacaaaaattcagatgttgatgaaattccatttttttggtacttttagtagattttacgttgtttatcctttactttaattcatttttttctagagaaggatatttaccatactagcactagcatgatgtgctccacaaaagtatactagtcactcaatttgtagagaaggatatttgccatactagcaccagcaccatgtgctccacgaaagtatactagtcactcaaagtttttt

SEQ ID NO: 38596 - DNA, 740 bp, Oryza sativa
ggccagagactgacttgtcaggactacaagactacaaagagatacccaaaagaggaaagcatggattgggttcaacaacaggatacaatgttaggcttgcatgagttttcccctcgggagtgctagaactcctatcactactagaaacttatgacgtctagagtgcatgaggactcaagttcatggagcgggtactgtcaatgtgaggttgttgaaaggctttgccgtggcaagtctcattcgttgggacgtaggctcatgtgttgggcaagtcgcggagtacgggtaaagtgtacatccactgcagtgtgagtaaaccaaatctattcgaatagccgtgctcgcggttattgagcactgggacatgtattacacttggctagagtctaaattcttaaattgattgggtgggatgatgcatgatgattttgtactggttgatcaacttctcgagaggcgggaagaggtagaccccagaaaaccatgacgaccaatggcgggaagctatccttgggaacacaatggatggtggacagaaccgtcgctgtttaatgaacaatggagttaaaacttgatcagtttatgctaggtcttaagtttatgaaatggtatttgaaaactcagctttacgcaaagtaagcatagccatgtcttgtattatcctgtacattattgcattttgtggggtggcttgttgagtacttttgtactcattggtgctctatatatatatatatctt

SEQ ID NO: 38597 - DNA, 742 bp, Oryza sativa
tacataaagatcatatcggctgaacctctagtgtatacttgtatgaacccctttgcctcacgatatcgattaagctcaaggctagaaatgtgccatcctctaatagctcaatcattcactcgaacctgttttgatagattatataacttgtgattgactcctcaatcacctttggcatagccatacactttcataatctacaacatcgagaggcccagagatatctctccataggaggggcaaatcccattttgattattcatatcccactacatgtttcatagcatacccgaaaactatttttataactacccaattacggagtagtgtttagcagtccctaagtaagctactacacatgttgggaaccatgataatctcaggtctaaggattcaacaccaacactaaatgagatcactgatgacacaacacatatgactcttgcaatggctcatgttgggtctatccaacaacatgttcactaacatgtgtctatattattaatttggtatctctataccatgatccatgagacatgatcattaattaatacatgtgctgatcatataatcatatttgttccacatatgatatttgatcagggatcctttagaaatagtaacacacaatataaagagtctcatgaaagaatcacatattcattaaccaataagttatcatttcaaggaacaacatcggataaatatgtaaacattgtatgtgatacaatcatctctataa

SEQ ID NO: 38598 - DNA, 521 bp, Oryza sativa
gattttgcttaatttcgtttacgagtgaatctagggtttcctttccgtttcggccgttatcgcgcctcttttaaatagtaaccactgctttgaaattttcacggcgtcacttccgttttcaccgccccaaccgaaactttccccaatcttctccggcgatttcctcgagttctccggcgacttcgcaggcgaacccccttgcggcgacaactccaccttcgacaatgtcgacctccgccgaaccctcgagtgcgccaatcatcgagtatgctaaggtaagtaccgtcggctaaatcgttctttttagcacgttttctctctcgtagttcaatcgtttcccctttttcctatagcatcttactcatcaagttgcaatccccaatttgcaacatccgaatcacttttttctgggaccaatcggcaattcagaccctaccgatttcattaatgctaagactaataggattcccttcagattataccctcctaactttagtcactagcataatatcttcaaatct

SEQ ID NO: 38599 - DNA, 617 bp, Oryza sativa
taccaggtacttatgtcgaacgaacgggtacgaccgcagcttctacaatggggacagacctactaattatgttaattaccaatatggcacctctgtacagtggttcttatttttaagtcctcgcgcaggaggcaactatagccgccaagggcaactttaaccattaccatgtacaatggtttgtgatactcgagtataaattatatggtatatttgtaaaccctgatcgagatgacgtggtgtcatacgattagttccccttaaatacctccggaacaccaaaactcctcttgctgctgttaacattacgttcagagcatatgaggatataagttcatggaacaggtgccacaattgttaataacttaatactgggccatgactaaagccgatgattatcagcaagtcgtggactgcgggtaaagcgtacatctgctgcagtagaatatctttgaaactattcgaatagccgtactcatggaattgagtaccgggactcatatggtaccctggttagaaatttaaagtctacatttttataaattcttgctataacacttccagattgtttattactgcttttatacctccctagtcagaatgtatagaaacttccg

SEQ ID NO: 38600 - DNA, 962 bp, Oryza sativa
cgggtggtcggatggataaggttgaagagctatctcgacaccacgggataccggagagtagattttctctagtaaattttggtgttaacaagagcacactaagtcaagcaaaacaccgggcaatgtactcttggtggcaatgtttcaagtaaacaccgagtaacaatataaattgactgagactattcttggtagctactccctccgtcccaaaaaagacaaaccctggttttcgtgtccaacgtttgaccgtccatcttatttgaaaaaaattaaaaagataagtcacgcataaagtattaatcatgttttatcatataacaacaatgaaaatactaattacaaaaaaaatttcatataagacagacagtcaaacattggcacgaaaacccagggtttgtctttttttgagacggagcgagtaacttctggcaagtatcacagccttttcggggttgcacatgcgagcctttacgactatccctacttctccatgggcaggaataactttagggcttattaggatcacggtactgcaaaaacgtaggagtagaaaaatcgtaagaatatgatagaaatatatgtgtaaaacagaggattgaaaaacacaaaaattctgtagataggattggtaaatatgtgttcggataggcagaggaaaaacataggaaatgggaaaaataagatacgagtggatggaaattttcctttgttttctattgattccacatgaaaggaatttttcctcttattttcctttgggttgattcctatggactgaatgtcaggaaaggaaatatttcctatatatagtattcccttgaaaatccttaaaaaatccttccatccgaagaggccctcaggaggttttggcgctggaccaactgacgtactagtactagtcacgtagtagttccccgcttcccactgagcaatcacaattcacacacgagtgaagtgaa

SEQ ID NO: 38601 - DNA, 859 bp, Oryza sativa
cgagatcggagatggtgagtgctcgcgagcgatcgaactccatgtatctgcccgggtcgcttcttttcctcttcgttggtcggtgctttcgctttccctttttgtcccgtaggggatcggagttcataccagctttccttggcatgtactcatgcacgtctctttcccctcttcacccgcacatgcggttagcgaaaggggcatagcatttccattgatgtatccagccactacgctatgtcttccgttgcatatgccgtttgagtactctcaagctctcctgatcgacttcttttcatataggattctttaccggccgttaaacataaagcgcgagcgcgcatgcaccgtcacagccaggccgttttcatccatacaatctcgcatgaaaagccagtcgtcgtcgatcacttcagaattcagattagtgaattattctacgtgcgtgctggataaagagagaaacgggagaagatcgatcaacgaccgatccacgatcacaattcgcaaaccttaggtacgtagctaggcggcctatcctacactgtaaatggttgaagcgttcactcaatcgctcatcatccgctaacacaaacaacattaactaactggctaaggctaataaagcgaagcgtgtgtggtcaggtactaacttaggcgccacccgtgccgtgccgtccctttccccctcgtaccaccgacggatgccaggctcccctcctcggcgtgccgtgcctttggcttttcttctctgatgtactttggatcgatcagggagagagccggtggaccacctcggccgacctctgtgatcgagccgttgtgagagaaaagattgaagggctatgccacacgacgg

SEQ ID NO: 38602 - DNA, 632 bp, Oryza sativa
taatttggaacttctaacctatagagcgagcatggtggctcttttttcgagctatcttaataatataataggtagatgattccagtgctgattaaatgcttggaaagggaatttaagcaattcaaaattttagaaattgataattgaagtgactaaaaataaatcttttgttctaaccttagtattttcaatataacctagaaattcttatgtttttaaaatgagggagtattttctatactaattcagttatattaattgttatccaatgcgtcataaagaggcttcacagatagataaagaactactaaaaagcaaatgttttgttgaacttagcttaaaatgaccgaacagttataatgaatttaaccttcggtccatttcaaataaataaataattcaaaaagttaatagtgattttgaaatgtgtacacactggccatcacatgacaatgggacatgtaaacggatttctgattcgtgacgaaatcatcttgtggtgaaattatttctctggacatgaaaaagacaattggcgatggatggactaatctgacctcagcattcccaaagctagccatgtactattactacattcaatatctcaagaatgaacaatgtatcacaacttt

SEQ ID NO: 38603 - DNA, 780 bp, Oryza sativa
ccatttcattttttttccgttttcttcttcttcctcccgtcttcttcccggtgtgccatctgtctcgtcatcgtcatggtcgacttgctcaccgaagaaggggcggcaatcctccacggcggcggcctgcaaggacacagccaccggctccagcggctcccgtgggggttccgcggcacttgacgtagaagagggccgggagccgaagtagatgagcgcgaggagatcctcgacggatgaatcagcgccagaggaggagggcacagcgacggatgggggaaggggcaacccaggaacccaggaggagtgctcctcggcaagggcgtcggcgagcggggcacgcatccgctccgcacgagcacgagcactacaagctgcaccgcatgacggtcgtctcgttcccccgctccaaaccctgccaccaccagctactcctccggccgtgcaagtcgacgtccttcttctcatttcacttctctcttctctcatactgtatgtttggatccaatcccctcagcccaccagatccttacgcattcatccatccatccctactttttttgcctgaaaagattggagaccatgttcttggattccaggatcgaatccgtggaagcaacaaataaaaatcacatatatatttttctttgcttggtcctgagttttgtttggttccttcctgcttggtttcttcctcaccgtcgttgacgcccaccacaaggagccgcctcaccttggtgagcgcggtggcggccatggtgacgatgaacagcacccggg

SEQ ID NO: 38604 - DNA, 681 bp, Oryza sativa
tcggcggcagggtggggcgcgttgtgtggcgaatggaaggtgtcggggttcccaactacgatgcgggcgtaggaaaggatgatgccctggaggtgcgcgatggaggcggcaaggtgcgcgcggaggcctgcttctcggatggtggagatcttgcaagccttgtcagctgcgtggcggacggaggaggcgaggtacgctaagggggaggggttgccggcgtgttggtccgagagggaaaggctgtcgatgaggaggatcttgcgcgtgatgatgtcctccacctcgtcgggcgtccgctgcggtcacactgccggggacggcgacgccatcgccggtgatgcagcgcgagggttgttgcttctacttcgtcttgtagttgggcggcagcgttgcaacgacgacgatgaccagcacgccatcagggctgaggcggaggttgtcagctgagggccactgttcttcctcgctgctcgtgttgtgtcagcagcggaggcagagccgccaccgcaacgtggacgggttcgcggatccgcggcatggcgaagctggaggagctgttcgctcggctcggcggagacggcggtgacgagggaaagggaggccggcgtggtggcgcgggcgtccaacggctcggccacactcggctgggtgtcggccggtgaaaaaaggggaatcgaggga

SEQ ID NO: 38605 - DNA, 656 bp, Oryza sativa
aatcctatggatttctttgataaaatgattactatcgggttattatcaattccaagcaggttgctggagcactgtttacacaaatttaacttcacttgtaaattaaagaacattaaatgggagccctattaataatttattaaataatttataaatcctgaaacgaaaatcaggatgtgacaggcataactgcacaacaccacgattttgctgtcgccgcctgacgcgcgcgacggcgccggcgacgtacgtactccactccgttagctattgctgctgctggatagacgactacacacctataggctatagctagctagtaagtactatgtagctacactagtacatagttatcctccacgtacgtacgggaaaaagctgctggttttgttgtagggtaagcagtgtggttgatcgtgttggaattaatgaatgggtcttagcccactcgaagattaattctttggaaaatcacaaaagcccacctcatgggatggcatgcatgtggagtttagtaccacttgcttattctaggagagggggacctccttaaaaggaggataccctccagtcacttgaagcatgtgtgggggagagaaaagggaaacacgcgcgcgctcgcttgcctcggctgggctggcctggcaggcaaggca

SEQ ID NO: 38606 - DNA, 845 bp, Oryza sativa
cttttgactgtgtagagatgcatcatgcacacatttttgttgattgtgatttgactgtgtaggatggccaaatgatggcacaaaagaggagcagggagtattcaccatgaatatgcataagggtcaagcaaaagtttcaagtgagggcatgttctcatcccacctaaaaattttacatcctataacatcgaatgtttgaacacctgcataaaatattaaatatgagctaaaaaaaataactaattacacagattgcgactaatttacgagacgaatcttttaaacctaattactccataatttgataatgtggtgctgcggtaaatatttgctaatgacagattaattaggcttaacaaattcgtctcgcggtttactgacggattctgtaaattagttttttattagtgcccaaacatactatacgacactttatataatatctgttcgcaacacatacatacattacacccatgagatatgaggagcatggagtattatggaatgattttaccattagactagacagccatttctttacctaggagtagttcccacaatgacaataatgatggcctcaatggcgccgtactgtggtttgctcaggctttccaaatacttaatgcgtttcttctgtctgatcactttcacctatccctcaaaaaggtcatgcatgcatcctgcctttttctcagtgtcagtttaaactttaaagatcatcactgacatatcctcagtactaccagccagccagccagccacaggttttttgatgaatcaatgacactccaccagtgcctattactggctcccaaatccatgtactccctccctctaaaaaaaat

SEQ ID NO: 38607 - DNA, 690 bp, Oryza sativa
aaagaaacttttctaaagataaaaggaaaacataatgtccttattggacactaaacatactttcctaaagattaaaggaaactaacaaatactggctaattaatagataaattgccatgccgcattcttcttgaactcggtcccttatggataagcttccttgaatagattaatttccttaaccggattctccaagaatccgactgctagcaacttgataattcccatcggtcgattccaagactctgaaaccgatactgactctaggccgatgatgacttcgggcttaccaaattttggtgttaacaatatccttatgtttctgaatctgaagaagatgatgtctccgaagtagcagcagcagccgaatgggcgagaaacaagaaggttttaacatgtagtcggtcaagaattcggggaaagatgagagatgattttgacatcaccaaggctgataaaatatttaatctactacttcggggaaagcagatccaacttcctactggccactcaatcccatcggttgatgaattagagaaaagaaaatattgtaattggcataacactgggtctcatactaccaatgactgcaagggtttcaggcagcagatccagtccgctattgaacaagggaagataaagtttgatgattcaaagaagccgatgaaggtgatgatcatccttttcctg

SEQ ID NO: 38608 - DNA, 763 bp, Oryza sativa
agaggccagtgaaaatcctggacaccatggagcgcaggaccaggaaccgggtaatccgtttttgcaaggttcagtggagcaaccacgccgaagaagaagctacctgggagcgtgaagacgagctgaaggcagcccatcccgatctcttcgccagttcttccgaatctcggggtcgagattccgtttaaggggggtaggtttgtcgcgtcccaaaacgactctaaaatacatcctcaaaattatgcctagaataattaaaatccatgtgaaagcctccaacaattaaaatgtgcaaagttaaaagtcaaataaggcttggaggatttttgtatatttcctaaaagcctaaaatgcgtaaataaattttagtggaattttcagagcacaaataataattattaagaaataaacaaagttaaaatggttttataaaaagaaaagctctaaaaagtcccttttccctccctccccctcttgggccggctcggcccatctctttccctctctctcctcttccccgcagcccattcggcctcctccccgcgcgcgcgccgctgacgggcgggcccgcccgccccctcgctgacgggtggggcccacccgtcatccccttcctcccgccgctcccgccaccccgccagcgccctagcgccgccgccgccgccgcgaatcccgccgcccccgtccgccccgcgtgcaatcaagaggggggaaatattccccgggatcccctcccgggtaccgagctcgaattcgcctatag

SEQ ID NO: 38609 - DNA, 765 bp, Oryza sativa
aaattttgaactttttaaaacttttgcatcatgctggatgttatggttgttattgcttgccaaactataaattgtcacaattgaaaatttagctaaagctgtacaactaagtaatacttataaaattaagatatttattattaaatatttacacacaacaaagcaatacaaagagaaggttaattactaatttaatttataggttaaatattaaatattggaaccatgtgacaagtgtcatgacatctaagtaaccatgaaatagtcgccactacaatgactctgtatatataggagtgttccactagaataattaaattaatatttataacattcatcgagtctctcatggaataaaattgactcgcataaaataattgatcatgtaaatgaattgagctttatatataaaatacatttatgtgagtgtttaactaaacatttagatcaatatggtaccaagtctcaatttacttttatggaataatagattaaacatgtccatgtaaaatacattgctatacaaataaattcaaccaatgtgcagtgattcctataaatatcaaagcatccatggtatataggataattttgggcgaagtaaattcagttggggtgtaacaaataatcaaataaatgaataaatatttaaatgaaatattcaaataaaaaatgtataatgttacatctcaattcaattccaatctcagccacttttgcatattagcccctccccctcctttttcctttttctctcatttctct

SEQ ID NO: 38610 - DNA, 2143 bp, Oryza sativa
  unsure (1)..(2143): unsure at all n locations
aaagaagaaaaaaatatgtgaataagcaatgaactagtacacgctagaagaggtgaagcgaggcgggcgggcaccagacgtgcactcagattagtagagaagaaccaatcagaccaccagtacacgctagaagaggcgggcggacacccaacttttttcaaacttcaaatttttctatcacatcaaaactttccaacacacataaacttcaaactttttcatcacatcgttctaatttcaaccacacttccaattttagcgtgaactaaacacagcattctccaataaactagtctgtgctatacttgcatgcgtacagtagtgtacagtcaaatttttatccacctaataggacgctctacgctgagcaatttcctggaccttctcgtgggcggcttgttcctcacgccgattgtgtccaaataataacgatggcagtgaattcccttttttttttacgggaaacaggaggagagcctctaatgcaatatattaaaatatataaataagggttacaaattgttacaaatatttacaaagtagaaattttttggatggcagtgagttcctgaccgaccgggattcgaaattttttgaggcaatttcgttcttacccctactttcatatttaatattgattttacccttgtattttagggtttttattttttcccctacttttttaaaacgaagctaaatattacaactactttggatggacaggctaaaggtgttaaacatttgacgaaaagacatttgtacccttagtgtgttgttaccgtcatcgcctcttggcccgctcgtcactgtcatctccaacccgtggcaagctacctccgacccatcctcgtgcggagccgctgccagccatcgcctcagcaccgagccaccgccgtcgccccaacgagtcaccgctgtcgcttcctcctcgcgtagagccgccgcgccgccgctccttcccctgaccgagccaccgccgccatcgcctcctcctcgcgccgagccgtcgccgccatcgcctccaccccgagccgctgctgtcgtttcctcgcgcggagctgctgtgctgccgccattgcctagctgggctgctgccatcgcttcttcccctcacagcctcctcgcgcagagccgtcaccaccatcgcctctaccccacactgagccgccgctgtagcttcctcctagtgcggtgccgccgccatcgcttgggcgggctgctgctgtcgcttctaaccctcacttctccgtcgtcgctcctctctgctactccctccgttctgaggttataagatgtnttggctttggtcaaaatcaaaccgcttcaagtttgacaagtttataaaaaatagtaatatcttcgaccaaagataaaattattataaaaaatatatctaattactaatttaataaaactaattgggtaataaaaatattattatattatctataaacttagtcaaacttgaagtagtagtttgactttgactaaaagttaaaatttgtataacttgaaacgaagggagtacctccctagccgttgagagaagatgacgatagggggaagccggaagggagaggataagggaaggaaaaaatccaaaggtattgtgaccgctagggggacaaaggtaaaacaatacattcaaaatcaattacttcttttatttttctacttctgcggctcaattactttggtttaaagaaattactttggttaattaggagaaaaccnaaattacnaatgcatttaatatagggaattgtcagggagaattttttttcaaattttctttgctctaaatcgctaancaggacttaaagcagaattttcagagcatcggagttaatgtttttaaattaatttgtcgagagttgaactaattaatttttttctcttacacctttgatcatgaatcgtgccccattcactcccctctctatccgcgggtttgttttgcatagcgagccgtgtccattttctttggcaagaccgtttccattcttttcctaaaacaacaccatattggtaatgcgaaaaacacacactggcctaggagatctgcttcactccagtgcaggtcctaaatcttgcttttgggttcaaaggcatgccagttgatttgatcctacaatcaacaaga

SEQ ID NO: 38611 - DNA, 2003 bp, Oryza sativa
  unsure (1)..(2003): unsure at all n locations
atcgcgcacaaggtgttcgactgacgggcgagggtggttgatggaatggattggtgaagcagagcttcggagttgcggggctatggttgttgatgatcgatgatgggcaaggaagggattggggtcctatttatagggccaaaagtaaaggatgagctcggacaccatcatcgccatggatgagctcaaggattggatatggcaaaggtggcagaggctgtgagggggcgggcaagatcaatttgagtggcgggaggccatgtttgaatacttacctgtgaaggattggcttgactgcgggtagaaatggctggcgacgtgttggcgccaatccgggcgtgacgcgtggcggcggcgagggttaaaacggccggctcgggtgtgattggtttgaattgtgagaggggaaaccaccttctatcttcaattcaaccttgcggcaagaattggcgcgattcatcccgggtagaatcaaaatcggactcggcggcagcgttggacgggagcgcacggcgtcgagctgtgatttcttgcggcagaggtcgtcctggctttgtcgtcgtcaagattggtgcggcggcggcggtctgagggcgtcggacggccgatggcgcgcgaaggcagtcgggcacgcacaagcgatctcgaggcctacgcgctgcggcgcagcgcgcggcaagataggacgctaggcagcgcgcgagaaggggaggagaaggccaactaaaccatggtttttgagtgggatgtggtccccaaggtccaaacctaaactttgtgcaaggttggatgggtgttgggctgttctagctgggctgggcatttcatcgagcaccttgagtgcaatgaacagtgttnttcaggacttttgaatattttatctagagagaattgaatttaaactatgaatttgaaaggttcactagggtttaaagtatataaattctcaacaatattaggataaactaggaaaataatctatagtttgaaatttgagagaatttgctcaatttcactaaggtttgaaaattagtagggttctaaagaagtaatacttgaaccatttaagaatcaaataaatttttagaacacactaaattaatgaaaagccagcatgatgcaatcaaattttagtttaaaatttgaggatgttacactatttttccagacgcctcttaagggacggcatgggaaaatatattttcgtaggaagcccccttaaaaattcccccagaagtctgagttaccgagttaccttctctttttccctcctagcactttaaaattttcaagtcattctaatcttctctcctctctctctctctntgaatctcacctcccctcctccacaaactcagtctgggcaaggaagcggcgcacggatgggcacgcgacggagttcggcagacagcgttcgtgcggcggcggagtgcaagtgacgggtgagtccctcctccgtgtgtggaaggcggtcggccgacgggcagcggacgggctcggcagagggtttttttcgtgatttttatttttgcgtgtagacaacataagcacccacacgtgaaagtagcgatttttgcgtgcgggtgacccccccccccggcgcacgcaacgatagcaattttcatagatcctctagtgcatgtgggttgttctaccgcacgcgaaaacctcttttggccatctgcaaaaatcaaaaatcacttttttgtactagtgacttttgttttggttccaattgttagataaattatattttacacaagtagatgccgatgtgggaatgatttgtagtccgcgtgtggaatcacttgaaagcttcctaatgtcaattttatgtgtatgggaatattttgatatcatttgttgtaatagttatattttacatgactaaccgtgcataagaaagcgcttaaaatggctcttgtgtcggttttgcacatgtgacaatgatttgtactacgtgtatcaaactgctcgaaaccccactagtgtatcctatctgt

SEQ ID NO: 38612 - DNA, 620 bp, Oryza sativa
ttaatctattcaaggaagcttatccataagggaccgagttcaaggaggatgccgcatggcaatttatctattaattaggcagtatttgttagtttccttttatctttaggaaagtatgtttagtgtccaataaggacattatgttttccttttatctttagaaaagtttctttcttgtccgacaaggactagtatttccccatgggtataaatatgtacacctggagtcattgtaaaatatatctctcgatcaatacaactactctcagagcatcgccaccctctttaccgaggtttttactaatcttctcatggaatttggcacctgacgcggggctgcatcggttcagtttgatctccggcgaaggggtaagtcctacgttccgctggccctggtgaatctaccggctacgttggtattgttctaggctgcaatgcttcgatctcttggatcgctctgttttggttgatatatttgcctatctgatatctcatttctatctctaattacactgtgtttagatacacatcggtttagttgggactgtctcagttaggtctgacctcctgtcttagccaatatatctcaacaatcacaatgctgatgtaaatagatttgt

SEQ ID NO: 38613 - DNA, 720 bp, Oryza sativa
ggtatcccttataatcggggtacctgccatctgagtagatcaagcagaataggtttccttatttcctatccctgccatttacattactaacccgtgggcccaggcccatgacctacccccgagttatgacccaaaggccttccatgtaccacctaggtacggtaatatccatagtacccccgagtactttgcttgatgaagaatatgaagcgagacttgtcaagtgacggagtcgaatctggccaagtactctttccaaagcatgcagatagaggcactcatccggacctgagtaaagttttccggtatccatcgtcttattggacagggatgaaaaccagactcgattttccaaattagggtaactccatgggccagcttgttaggaaaccaagagatataaatacccccggcgggagcgccgttgcccacttcccttgatatttggcacgccccttcgtcttcctcgctcatccccaactgctctttgcttccggcgatttagggttttgctctcagggtaaatccaacaaaatagccccttgattctccgctcctccaccattctccgtcttcctcctctgccatgtcccagtcaacagcggaattcgtgccaatcctcaaccaaactgttgcctgggctccgtttacagtaatggcggggaatcttgagaaggtggtggcggagggatacctcccctgcaagcgctcatcaactgg

SEQ ID NO: 38614 - DNA, 1065 bp, Oryza sativa
cattgcatgcacatcaatataacaatacacaagcaagttgtgaaaaagtcatgctttgataaacatacaagaataaaataatttatagcaaaacattaagcggagcacacctgaatctccctttcagtttctgtcatcacttcattcttttcatcagaaagcatagaattcttctggctttcctgaatccgtatcaattacaaaattatgaacggaagataaccaaatgatttatcagaatataatcagtagtgactgaccttaagatccttcttgtactgggatattaccgtcaatgattcttctctcagcttatggtagaaatcaatcaaaatcctatcacttgctgatttaattgaatggttttcatctgttccaaatgaagagttctgatcactgatcattagtctgtatcacatggggaaaaagggggtgaatgtggagccgaaataccatgaatactcaccatttcagtattagagaacatatcagaagagctttgcacactttctgaagaacattgcataatgtggacagcatcaatcggttcactttctttgtacaggtcgagtatggctgcattattgggtggaaaataactaaaggccttcacactttgtccagcggactcacgagttccaacatgatctgtagtttgaacattgttcaaattttcgctaacactagtaaataatgaccagccctcctggtcgctgctcattgactttggtacatcctgacaaaataaaaagattcagaccaatcagtggagaaggccatagacatatcaagacctaatacagaaaaaaaaactagaaagaggtcataacaggatttctaatgctagaatttcagaaatttttttttaatcaaaagatatataaggataaaattcatcctttgtttagcagggactagggaattcttataacaatgtctgtgtgctgttaaatttactactccgtaagtcagaattttatactatgtatacagattgtaataggcaataaaaatccttctaggcagcttgactgttcaacttgaagaatacaatcacatgattta

SEQ ID NO: 38615 - DNA, 1342 bp, Oryza sativa
attgaggagcgcgaggatgtaatcaagaatcctgtacaaatggttgtgtttagcaggaaatggtaacttcagtcttctggtgggtatgttcttgagatttttttttgagaaaatggatcaaaacccggcctctacacccaaaaggatgtacacggccagggtatgctcttgagataatttctgcctttctggctagtttcctgctgttaaaagtaaaaccaatcattatcatgataacatatccatagaagaaaaagctcacctagaacaaacaatttcacccagctctccttggagatctattgccacaacctgagatatctgtcctgttctccataaaatgttggccttaggggtctattttggactttcagttctccataaaattcaacattaaatttaccgtaagagagataatttgactagattgtttagttgtgttcttcctgtcatagtttcagcttataaaatcattttatcatttactaattcgtcatgtgtatccctaaaaggctggttagtaggaaagcacttaaatgagaaagtttcgtaagaaaatatgctgcataccgatgttcgtatgatattttattcgtaatatgaacaatcttcttgtacgttatacactgcattcatgtaaatgttaagtcagataattcttgtttcaccatttagtctcaatggtttcgtgtggaaatactaatggcgagtgagtttggggcatcagtgctagacatcttctttggatgctccttgggttcctgaccactccataagtgtcatattgtatccagcacccttaagagctttccccttttgttactttctgtcttcctctcgcagccaagtgagccagaatgcctcttccctatcacctgtcacagagctctcccagcagcatcagtagaacctgtggcctcatatcacataagcaccatggatgctgcatgcctaccagaagtctatgaaaaatacttattggtaatccatttgataataggaaagttcactgagaatccatagcaacaaatcaaatatctagctcatggagtttcagcatcccttaatttgcagattggatccaagttacttgaatttcagacacgctttcatcgcatttgtccaccttccatattccgtaaaaccacgtcattcttataatttggacttgttcgaaatctcccttttcctgtaagatttgaactatccatgtacttatgtaataacctccttaaattacctactcccattgatgcaggctgcttcgctggatgcacctgatgcggcatttgtgaattgtgatcagcgctgctgcacctgacgaataattttgttttcctgt

SEQ ID NO: 38616 - DNA, 856 bp, Oryza sativa
caagttttcctcctaccagaccgccaaagttcatgtaaagcactcagcctatagctaaatatttcagtggcaccaaatgcaaatacttcctactttcagactgacttcatgttaaaatattagtctacaagtaacataatgaggatgaggactgtgatgcagcttttattgatcagtaatgccactggcaaacaatttactagtaattaatgcaaaatggggtacgaaaattacctgtgatgttctcatccaagggacgtaccaaactgtcttcccatgaggctcagataatttttcctcagaatcctggttgttaattatttgtgtggttatttctatttatcactgtagaatccatgccatttaactttaagttttactacccaataagtataaaggtatggagttccgctatatgcgcaatactacattgttagatctgtgatcaaagaaggtctcatagtactgtaattttatttgtatatattattacaaagttataaacggtaacatcttgcgaaacctcttacagaaactaatattttggtaagggggggatacatactgaaaaccatactacattcttgtggtgtaggacaaattttacaacagctcttagaactagaaattagcaggctggacatcaaaagtcataaaacagctaaactgaaactaagcttcccttagatctgaagcaaaatcttgaaaactgatacatatagttcagatctggggttgggaatatgcagtagaaatgattctgctgaacaaagggaggtaataccgtaatacacaatgcaagcaacatgtgaggtaaaatataaacaaacggagctagtgagctatagtggtccaa

SEQ ID NO: 38617 - DNA, 1872 bp, Oryza sativa
ggaagaagaagagggggggtgagaatgacatatggggcctacgtgggtcccacctttttgaattaatttgtgtgaaagtgacgtgtgggtcccatggggtttattattatttttagatcgaattgccacgtaaccgccacgtcaatgacacgttagatgaagaccgagtcaatagccacgtaggcgccacgtcagccaaaaccaccgtccaaaccgttaagggacctaatgtgcactggttttgacatttgagggacgtgttgaatctggttttctagttggaggatgaaaatcggattcgttggcaagttaagggtcattaggtgaacttattcctacaaggattggaagcgtaccaaacccaaaggcctggaaattctgaagatctggattaggaagcctcgtagcgaagtggttccaccatccttttgcaggcctaatcgggcccaggcccacgtcaaccgcagcggcgatcactccaccccacatctcgccggcgagcacgggcggagccggcggcgagggaggcgacctcagttcctcgccgtctccgtcgacctttccccgcgccggtgaaccctcccggattcctcgcccttccccttccccttccctgtgagctagttccctcgccctcccccattaccgcctcggcttctatctgctctgcactaatcggtgagcccccttgatcgcttcccaggaactcctcttttcacatattcttcttccgagacaatatctcgtcgaatttttttccgccgacgagcgtcatgtcgaagttaatagtaggagaaatgatcttctgcaaacgtttgtttttgggaacctgatttattacaggagggttgcctgctcatggattaagctgttgcctgcatgtttaatgttaagtctctaaattttgcggtgataatgtattactccgtatagaataccctcatactgtatagatcatttgggcattttgtctaggagtatcatcttatctggaccgattggctacatgtaaacaatgcttattaaaagaaccataatattggaaattgaaagatcaatttgtaagtcacctcaattcatgatggcaacatgtgtttgccctttcttccaccaacctagtcatctagataagatataaactgttggttgagagaagcatgaatcttattgatggtagcatgtgtggagacagtaaagcatatatagagtaatggaacgatttcttctgtattggtgaaatctcggttctcaatacatgtgaattaaagttgttaatcttggaccactatagctcactagctccgtttgtttatattttacctcacatgttgcttgcattgtgtattacggtattacctccctttgttcagcagaatcatttctactgcatattcccaaccccagatctgaactatatgtatcagttttcaagattttgcttcagatctaagggaagcttagtttcagtttagctgttttatgacttttgatgtccagcctgctaatttctagttctaagagctgttgtaaaatttgtcctacaccacaagaatgtagtatggttttcagttgtatcccccccttaccaaaatattagtttctgtaaggtttccaagatgttaccgtttataactttgtaataatatatacaaataaaattacagtactatgagaccttctttgatcacagatctaacaatgtagtttgcgcatatagcggaactccatacctttatacttattgggtagtaaaacttaaagttaaatggcatggattctacagtgataaatagaaataaccacacaaataattaacaaccaggattctgaggaaaaattatctgagcctcatgggaagacagtttggtacgt

SEQ ID NO: 38618 - DNA, 839 bp, Oryza sativa
taagacgaatggtcaaacgttgattaaaaagtcaacggcgtcatacattaaaatacgaatacggagagagtattactgtaccaatttaagacatgttattatgtcaaaatattgaaaaaggttttgtcacccttgatatgtcgtacatcagcaaaaccaaaacaacccgttattctcttaggttatgttcgtttatagtagttgggaacttctctaacacggtaaacgaaccagtgaattaaagcatcattaattgacaccatagccgaaggcatggtatgttttaagaaatattataacaccatagtttaagaatgttaattcctttgtagtatttttatctatgtcttctatgcagttatagcatgctcaacatttaaacataccatattaccatccacttgtaattactattacaactttaaacacatataaaaatgccacataatctataatttactaaattttagagcttaacatgcaagcatattaaataatcactccacaccattttcataatatttcaatgtatattcatctatcatttatacaatatttaacatgtgttttctatacaagaatatttaacacgcattcatccactaatttcatggtaagtgcagggcatcatcatatccagtactcgcaataaaaaacccaatcggttttacttaaacgagaattaactgggattaccgttgatcaaatacttagacaagttcccccaaaaaaaaattgacatacctcatatgggctgaactcaaagtatttctaggtaggaatacgtctattttacctcttcaacttttaccttgatcgaattgcgttcctcaatcaca

SEQ ID NO: 38619 - DNA, 531 bp, Oryza sativa
aatcgtgtcattcatcatcacgtacagtatgcattaatcgtacgtatagtactagtacagtagcagttacgattgcttcatctgtaaacaaaggtgtgctaggtgcattatggctgaagaaacttgttacaactactaataacgaaatgacagcatggacatgctcaattagcaacctactacacgtacgttacacgacgtagcatcaagcaccactcatatatgtactaatacacccatgcgtgtcgtttcatcgtgacaccacactctctggcagtgtaaatccgcgagaagctcacaaaattctcacgcactgaatttaattaaatacataaacatcagcatggaaacgttctattttaaattggaatcgtatatacactcgtaaccacgtagaccatttaaagttgcttccccaagtctagacttactccctcataaaaactaacctatctttcaccatcttatttgtcctgaaaataatttgtatcttttaagtaatcattacattagagtttataaaagtgagaa

SEQ ID NO: 38620 - DNA, 662 bp, Oryza sativa
agtgggtgtggaacgacagctacccgctctaccactccacggactgccccttcctggacgtcgggttccggtgctccgagaacggccgccccgacgcgtcctactaaaacaaaaggtaagggtttgcaacaagaccgaagagataaatagaatgcaaaagaatgacttattttttcatattttacagatgaaccttatccgggaccatgataattaagccgttccattcaattcaaagatgaggttgaagttgcagccacccagcttgctactgcagaagctgactgcacaactaatgtgcatttacatagactaatactgactcactgagaccctgtttagatgggactaaaacttttaagtccttatcacatcggatatttgtcactaattataaatattaaacgtagactattaataaaacccataaataatcttggactaattcacgagacgaatctattgagcctaattaatccatgattagcctttataatgctacagtaaacattctctaattatatattaattaggcttaaaaaattttgtctcgcaaattagctttcatttatgtaattaggttttggaagtagtctatatttaatactctaaattagtgtctaaatacagagactaaagttgaattcctggatccaaacacc

SEQ ID NO: 38621 - DNA, 556 bp, Oryza sativa
ttgtacaacaggctggagaagctgcacatcttataaggatcactcatctggcccaagtccaacagccagctcctgcgataatgaaatctgagttacaaaccagatgtcccaacccactgacgtatcactacccttgagaggatgtcaactgcgactaatagactatcacattgtgtcagattctgctaaattgtccttagtcttgcctatgttctccccccaaaattaaaccgcagacctaatggattagaatagagcccatactttgtcatcgcacatggcaaagataaacagccatgccctacaaaatgtgtcatggatgggggtgacaaaagatgatagctcaatagctgatgctactcctgaggagttaagcagacattgatgtcaggtgaaggcctgtgccccatggactgtgagctgactggccacccaaccatggagaaacctgtggagcttgagctgttaaggctcatggcgccactggctgttgcactgtgctccattacaccggtgtgggcttgcggatgcatagatgagacctgcggcgcatggc

SEQ ID NO: 38622 - DNA, 946 bp, Oryza sativa
cataactgtcaccagagacgtgctctggtgagaaattgaggatgtcccactgggcccaaaagctccatttctgtatgcattatctacataggtcttagctaatggagtttgcctaaaagcttcattattgttagctgagcacaacgtaaattgattatccataacctgatgtgcatttgtctgggaaagcactgccatcttactgtcctgaccatctttcaaagttgcctgaacacttccattatttgctttcactggagtagcggtcgatagaatattggactgtgacataaggcttctaccaacctctttacttatttttgatctctcattctgaaatatatcaagtagatgactccagtactctgtcattctcctacatatatctgtatatgcatctgaagaggcaagtatttggacgactttgacaacatcacaatgattgtaatatcttgcacaaaactccacatctgaagatgttccaatcctgcattattttatttgatggaattaacatttagaaagcatagaacaaaggcaagtttgtcatggggtaacagtcggattactattaaacactcaaatgagtactactaaggttaccaagtcaaagtaatatgatttttcgcttgttaatttagtacattccaactttctggtgctaccatgtttaaccttattcagagatggaaaaaaaaaagcttatgttgcaaattaaatgttggctactctactctaatcaattgcagactggcagtgcagaacgaatgttcataaaccccaagtactgaaggatgaggatgaaagagcttacaccagcaaatagttgcagcatccgaggaagctcctgccacacatatcaatgcccaaataattgagctcctcttgcgccacgctctattcttgaagagggtggtccaagcttgttaaccacacattctggaca

SEQ ID NO: 38623 - DNA, 1092 bp, Oryza sativa
gagaaagttatgctgctagaattctaggcagaaatatcaggaacccatgcatgcaggtgcaggatgatgtcagtgtgagtgtgtctacctcaactatcctgcttgattgaacaattaaagtaggcataaaggtgaaactccacgtaccaggattgcagtagtaatcggctaatcgcgaggtaaagttgatagattctgaatctgatgaagggggatttcatcttcatggctggagtcaaatcaatgtttgatcaacgcgtagttacagggtgccctgatgatttgaattaatttttttaaaaaaaaacaataagaggaatgaagagagtttaacctgtgaatcgggaaagaaacagaagcatctcatcatcgagcctagccgttgggacttgcgttgcgtgtgatctacacctccaggcacgctgcatatctagggctaaaaaaaaaagttcatcatacaaggtctcatcaggatttcaggaccgtgtgagtgcggcagagctgtctccgcttgtggctgctagtgcgggctagggtcagcgggcgccgtgtacctgcggatcgtcatggtagaaggccggcggcgagcgggacgccggagcgcggcggacggcgtcgtcagtccgccgctgcggcgtggcggcgcggaaggcgatcgatgcggcgatggcccgatgcggccgatcttttctttgtggtggtttgtgggccatgggggcgtgggatgcgagttgtgcctttggcttgtaggcccaggcgtattatgttaggaaggcccatggatgggccgagcgggggttcggagttcaattctccgacctcccaggacgatctggactggaagctgttatgtgcagccacgtccgggcacagcacacgcacatcatggcagctggcagagtctctcgagtatgagtatacagtatactcctcgatggcagccagagatcgatggctgcatcgctggtgggtagatgttggttttggccattccattttttttttactagaatgcattggtaacataaaaaaaatcaacaacgtccgatcgtatccaacgtatttagaagttgattgggtaccgagctcgaa

SEQ ID NO: 38624 - DNA, 1663 bp, Oryza sativa
ttcaatgtatattcatctatcattatacaatatttaacatgtgttttctatacaagaatatttaacacgcattcatccactaatttcatggtaagtgcagggcatcatcatatccagtactcgcaataaaaaacccaatcggttttacttaaacgagaattaactgggattaccgttgatcaaatacttagacaagttcccccaaaaaaaaattgacatacctcatatgggctgaactcaaagtatttctaggtaggaatacgtctattttacctcttcaacttttaccttgatcgaattgcgttcctcaatcacaaaactaggtataaagccttccccatcttggaaaattgatgcaaatccactcttctgatggtttgggaagtggtttatgcatatgtggtaggttatctgcgatcaggttctctatctcgctgaggcagctcgtggccccccaaatgtcagtgaaatgtggcaaaacatatacggtagggtccatgtgtcaatgcattcctttactcctcccccacctttccctctctctcctcgcaagcacttgcgagggtgggacatgccagaggatgcgcccgccctctaagggatgaatcgacaatggcgaagcagcgcgcgaacaaagttcaagatggccacaatgggcaagccctgttcttcctccttcctcttccctgcacttatttgttcccttcaccatctccaaaaatcaatgccactcttcgtccttccggcttccagtgccatttggaatgggggtatcgaccgcttgccaatgatgagcaagagaagcgcattcttgcattactcatgctgatgtcaaggctacccggagactgcccatcttcatgcttgcttgtgtcaccaccactcatgatggagccactgttgggagtatcacgataaaggggacctggtgggcgatggtgggatgtagaagtcgacaatgatggggaaggagctagaggccggggggagatcgagagacagatcctgttggtcagctatacaaacctaggttgcggcggccttagatctataagaagagctgagacaaaagaggcagtaggtcggtgagtcaacgtcagggctcgaggaggccgaagaaggaggctagggagaccgcgaggtaatggagcagtgcagcatggtttgagctttttcccctattcctccccaagcgacgacaatgtcccaatctattgttcgtgttgctattaggcttgccgactgtcatcggagccgaaggtcgactccttggacgacaatggcagcccagtggtgaccatccccttcccgcgagcttgagccttcacaaatgccgccgcttggcttcctcgtgctaagtattttttcctttttttcgtcaacgcataaaaggattgcacgtcaatatattagaaggaaaagattttttgttattttttccttaatataatacaacttcaacttgtcacgtcaacaaaaatcactttacaaaacacccaagaagtcaatttatatcattaagttaggggaggtgttctaaccaattttacggatgagggatgcgatttgaccaacaacaggaggagggagtcacaatagacattccttttcggtgtacaaggatggaataagttcatctgaggtcccttaacttgtcaacgaa

SEQ ID NO: 38625 - DNA, 4306 bp, Oryza sativa
agaagaagagggagagaaaaaggaggaagatggtgtatcagatactgacgtgtggtcctagtaagtgtagatggagatgttgttaaagcgataaatgagtttggcttgataaattatttgaagagctggttaagtgtttgaagagtccgatttagaaatgttgttggagatgctattagttcttaaaaaaaaaactactgttgcaagaactgcagctagtaggcacatcatcgcacgatgcattgcaggcgacgtcatctgctgcactcgagtgaacccaagtcttatcgatcccccgtcccatctacgagatcatcatgcatctctctgccgcacacagcttaaattaatcactcttgtgacatgcatttactcgatcgtgctatttccaatttcccaagctctatccacctcaaccaacacaattgatattgagtgtgactgatagactgtttctcctctttaaaaccattgggggggttaatgcactgtcaaatgacaaataaatgcacattgtacgacgaatatataactatcatattggtattggtaggttgtgtctcttttgggctgaaatacaattataaaacaaagaactgtataacataaaaaataaccacaagaatggttgttttaatactttatccgtcctaatacaagtgcacatagtataggagtaaaaaacattgtaccaaaagtttgggtttagatttttctgaaagttcactctctctttttttccctgaaaatatggaagtaaatttgggaaattatgtgggtgtagggagaaacccagatgaagataatgaccacatatatatctagaagttttggtaattctaaaatttttcacactaaaagatcatatcagaatttggtaaggcttaaaatcaaatgtatccaacctactaaaatttaataacactaaaatgtattaaatcatgattatggttcaaaggtgaataagtccttataattataaaattataagggtgatcaacaaacatattgttggtcagaaaacagaaaaccacttgggccacacgtgcgggctgcactgaggaagtagtttcctctttttctcaatctcaggaccaagttgtagagaagatatagattaaaagttgcattaaaccaggatcacactaacaaactacgtcatgtactcctcatcaaacacgataagactcttcatcaaacacgataagactcttctaacataactactccctacgtcccattttaagtgcaacaataaatttccacgcttaacttttagtccgtattattttttataattagtatttttattattatgatatgataaatcatgaatagtactttatacgtgacttatgcttttaatatttttaaaaagtttttcaaataagatggacggataaagttgtgcatggaaaatcatggctgcacttaaaatgtgattgaggagtatatactttctccatctaaaaaacttaatctagatgaagatgtcaccctcatactataacaaatctggacaaccactatccaatttcattagaggtggtgtttgaatctcctgaagataaaaataaagataaagattaagtgtttaacgtaaaacgaggtcgtaataacgtgtgatttatttagttttaattattacaaacttgaaaaatagattagtctgatattttagagcaactttcatatagaaagttttcacacgaaacacaccgtttagtagtttaaaaagcatgtcacgaatatccaaaatttaatcctgtgcttacaatagaaacgaataagacctaaacatcatagattaagttttttttttaagtacggagggtctaagtcagatagacgtgtgtctctaaccccgcaggattcacctcagtttctcgccaaggcatgattatccagtcaaagtataatactcgtccctaatcgattttaaatcgaactactactactccgcaaaaacaaggctcaattagtagcaaaatgtttatcaggtaggcagcctactatgccacctaacctaccgtcgccacccttcctcttcttttttttttttgaacggtcacccttcctattctcaaccaacgtagaacaaacttaaaccaccttgatcgcattcgcattccatcgccatcgatcgatcgcctcctccgcacgcgcaacggcaagccggcgagctatatatactacatgccactactagcaccatgaaattggcaatggcaggaggcgacggagtgaagggcgccgccgccgtcgtcttcgttgacgacgacgacgacgagctgttcgacatcgacatcgccttgctcgaccgccactattaccaccaacgacgacgcgacgacgacgatgaagctgaagacaaagatggcggcggcggcgacgctcttcttgccaactgcctcctgccggtgagctcggtgagcaaggcggtgcccgtgacggcgacgacggcggcgagctcgtcgtcagcctctaccttccttccgcccgtccggtacggcggctccaggagtatgctcctcttcaacggccccggcggcggagggaggaggctagtgcggagaggcagcaactcgtcggcgaggttttggctcgccgcgagaggactcgacgccgccatgggaaactttcagaggtactagaggtcagctgaaacgaacagaatcgaacaagtcaacgagtcaacttgtggagcccagtggtatatggcccttgtgggcccaattaccgcaggcccataaaggttcggtttagtagcacaaaagggcctgtatttttatttgggaataagttcactttaggtccctctatttatcgctcagtctgattttcatccctaaaccgcaaaaccgggtacgactcatccccaacttacgaaaaccgggcaaacgaggtccctcggtggttttgatagtggttttggctgacgtggcgcatacgtggctaatttgactcggtcttcatctgacgtgacgcttacatggcaatttgatcttaaaaaaataataaaactagtgggacccacatgtcagtttcacacacaaatagaggaaaaaatggtgggacccacgtaggccccatatgtcatcctcactcctctctctatcctctctctcccctcttctctctatcccttctctctctccggccgatggagcagggcgggcgacgggcggggcgggacgtggccgacggcgggtcaggtcgcggcgcgccagccattctcccgcagcgcctccttcttcgcggggagggcggcgaatctcccccatcgtctttcggattgccggcggcggcggtagctagccccgcccccgtggtgaggtccgtcccgccggatagcttgcgctcggtgctccaggacttggtgtccgacgagtaggaccggcacgccgtgaagctacgacgcttgtagaggaccaataggcggaaggcggcgggacccggtgggagcggatcggcggagtcctggagatcgtcggcggtgagcagcgcgcacgcgtagagcccgggcctgtccttcccggagaggacggggaggaggatggccatttcaccggtcatggggttgcacacgacgagcttaatgttagttaaatcttgcatgcatgtagctactaagtgttagctatgggtttcaattctgttattgcattgtgcatgagcttccggtctatggatgccatgcatgtagtggtagtcgtgccgaccttggcgatcggaggcgtgagcacgttgttaggatcgtggggatggacatgattgtaccgcgacgtgggaacgcatccaatgcgctcacctgcataatgaaagggagagagaaaaccagaaaaggtgcagcttcatcgcaccacaaaactcagcgtgtttcctcgtggtcgcgtgtgtttccacagcttgttcgtcgatcacttagggaaacctgtcacttaagggcggcggagctcgacgacgaggcggcctttccgtgatgcgacgaggcgggagttcttgaagaggccggggttgtcaaacaccctgtcaagctcgccgccgccgaacctggaggaggccgagggcaacgggatgaaccgaggcagcgcgaccgaggaagacgagtcgtcctcgtgggtctggtggaagaagtcgacggcgaggtcccggatgaggtggctggaggccggcatggagcggcagatgtacaccgcgttgccggtgaggtggtgacaaggcggcgccaccgcctacaagtggcgcggtgcaccgcacgagatcgtgaagatccagcgagctaagccgaaacacgaggaggagg

SEQ ID NO: 38626 - DNA, 630 bp, Oryza sativa
atcccatttggtttctcacttccttttttttttgcttgattattagtacaatttcatttaggttgcaaattggaatgtgctaatccgaatgcttctttcttcatgttgatttctaacctcagaggttgaacctctcacattttttgcttgattattaggagcactctttcgtttataggttgccaattggaatgtgctaatctgaatgcttcttgattgattcttcgtgttgatttctaacctcaaactccgggtcaagctggccgcggacaagaaccgccttaccgccgccgacgccttgctcccccgccgatgccttgctcccctcgctggccgccacgtcgccggttggggaaggacttgatggcgacgtcacggccggtgaggaggtcgacgccggcctccccgccccccttgcttgcctacctcatccctcgatggcggtccgcctccgtgcctgtggcttctgcaatggcggacgagagcaatggccgcggcgcgtccccagtcgccagccgccgtcgtcgtggcgccccgtcgtcgggccgccgacgcccttgcccctttcctacctcgccccaccgaaagaagcaacccaaccgacgttcttcccagctgcctacccagaca

SEQ ID NO: 38627 - DNA, 509 bp, Oryza sativa
aggatccacaagaaatttggttgggccacaaatgctgccaagaatccacacaaatatggataaggaattcactagtggtttcagaacaagtccaaatatgatagtacttatttggtatctgttcctgataaaaagaactggatagttgctcatgcttctctctccttttgtgtccaatcacatactcacatgaagaaaaagatactactgaacagactgaacctgagcaagaaattgtttgtttcccctatagctgaacggcttatcagtgagaaaaaggttatggataaaagttttatatatcttaacggtttaaaaataaatgctaaaaaataaattacaatgaaaaaaactaactttaaaattaatttttaaaatttaaattttgccagcagcttatataagatgaaaagggctcctctgctagagatgactgaacagctcgttcacaattcctttcagacaaaggcagccgtggttttgaagggctcctcaagatttgttttgcg

SEQ ID NO: 38628 - DNA, 2012 bp, Oryza sativa
gctccgtcgctgctccgtccgtcgcccctcagcgccgccactcgccttctctccgtagtgtgggaggggagagagggggggatagagagaagagggaggctgatatgtgggaccacatgggcccaccttttttattatttttttgtagctaacatatgggtcccacaatttttattatttttccgggatgaaattgccacgtaagcaccacgtcattgccacatgggacgaagacctagtcaaaggagccatgtaggtgccacgtagatgccacatcggccaaaaccgccctctataccgccgagggagctcgtttgctcggtttcataagttgggggacgggtcgtacccggttttgcggttaaggaacgaaaatctcactgaccgacaaatagagggacctaaagtaaacttattccttttgcttcttgttatggcccttgataggctgaattccatgtataatagtacttgcgtttcatgttataaattgtttttactttttttctttgctatttttttaaaagctcaattaaatcgagtggacttaaactcaaacaagcctaatacaagtctatgggatgcacatgcacctaggttgcttgtcttatggcatgttactttgatgctattttcaaccaaaccattttttttaaaagttatcaaaaaaaagtctacgtttagtttgttgtcaaatatggtaaatacataagaaatcctgccaaaattttgacaatattatcatcttcctaaaattttggcattgccgaaatttaatatggtttattttggctacaatctaaacagacccctagatccacgaacatgggctacaattcttggtgggtcaaattcgcgcgatctagccatgctttctcgttgctttccactcgcgattctcgtgctcgcataggctcgatcacccatagccaggcgcagggcgttagctgcttattaggctcactcgtcaaagtggacttttccttccagacttgactatcctaactgtgttcttgaaaagggaaaacaatccttaactaaagcaacacatcagactctcgcatccctacttattcacatcactcacaagtcacaactaccccatacatgttgttgtgggtcatgcactactcccctctgcatgcactgtcgcaagctgctgcacatacacacctaggtgcatggtaaacatattctcactcttctctaaccaaccttttaatgaactttaaactatttttcttcataaattaattatcttttttgatatttgattgtacctctatatttgttacaattaaatctttaaaacaagatctcccatacttatatttctaataaaaatatataattatatttctaactagatattcttgtataatacatggcacatcaagttataactattgagacatcacgaaatatttactgaaacatccaaataacatcaagtgcaacatttgtgaatgaactggtgtaacatcacacaatacttattgaaacaatcaaataataccacgtgcaacatttacacatatactagtgaaacattaaaaaaaaacttattgagacatccaaacaacatcatttgcatttttttttaaaaaaaaacattgcaacataacaatataaaatatgcaacaatgtcgaatttctatggttgaaacatatatatatatatatatatatatatatatatatatagaaaataatcctaagtataataattctagattcattactactagtttatgtcatatcctattttaatttgatttattttaggacggataaagtaggggtgctcacgggataaatgaagattgatattcctaagcataaattattcaactgcacatgccaatacttgcattttgctgcataaaaatcatgtgcccataatttgacaagcatccataataagattcagataacttccttcggtcatcccgataaaaaaataaaataaaattaacaatcacaaccatagtgcttatcaaaacaaaaacaaa

SEQ ID NO: 38629 - DNA, 657 bp, Oryza sativa
acatcatcagtttcatcagacaaagtgattaaccggtgagatctcttgtttgtgcaggcgtttacttaggttagcttgcttgcagatgcatatcggtgtgccgagtatttgttaaatctgaatgtccagttgacctcgaacggcttgaaaagaactcaaataatgtaaaatatattcctcagattgtttattgagcaaatcagtcacctgtcatataagcatatgtaatattcaccgtatggcattcgcagatttcttttctctgttggaaatctcaaccaagacttgtatatgaatgaagattgaagagtcctgtgtgccatttcaattcttcggttttcgaataattatcgctattcagtattactctctctctctttgacgtaccgtagagaaattagggatatggtttttctacacctaggtgtacactaggttacaatgaacgtaaattttagtatgattgtattcataacgctgcacacttcaataatataacatttttataagtttttttttcccaagagaatatacagtcaaagtttgagattgaataataacattgagttactattcgagaacggaggtggtcataagtcaagccaaaattttctgcaaaaaaatgatcaaatgaagtactcaaagtacatggtttct

SEQ ID NO: 38630 - DNA, 744 bp, Oryza sativa
gcaagaggcatacctaaaggtactgccctacattatttcaatggcaatcgcctcgaaagcgattgcctggatcaggggaagcacaaagaattactactagaaaagcaagcaagcaagcaaagaatcttggctttgtaatttgccaacccacacggtgccaatgaatctagtacacttttcagcgtgtcaattcatcaaataatccaagttgcagtattgctttgggcatataattataccaattcatgttaatgtgaatctttggtttcgttcttaatacgaattggaagcatctcgaaggaacagttcaggaatggtttgtgcccacagtttcgaaaccaaagtctcccaaaccagacaaggtttcagctggttcatttcttcagagcatttctaattggataccaccataccaaaccagttgtttagattcgtttttgcttcgcagaaacgcacacacacatatggtgggacaagaccagcttcaactgggagtagagaaagttatgctgctagaattctaggcagaaatatcaggaacccatgcatgcaggtgcaggatgatgtcagtgtgagtgtgtctacctcaactatcctgcttgattgaccaattaaagtaggcataaaggtgaaactccacgtaccaggattgcagtagtaatcggctaatcgcgaggtaaagttgatagattctgaatctgatgaagggggatttcatcttcatggctggagtcaaatcaatgt

SEQ ID NO: 38631 - DNA, 649 bp, Oryza sativa
ccgtggatttattccaaatgggggtgcattctcatttctcaccggccggtgaccttcttcttgtgatgcttatatatgactatgtatgtagtgtgcgctactctgtccgaaatccgagtcgtttgaggtttcttttgtcgtgtcgatgaaatgaaggtagacaaaggtgatcctgcgatcgacggagtagtggcggcgctctgcgtggcgtcagctgtgatggttgccgtcgtcgacggcgccaaggaagatgggcgcgtcacgcagctgtcgaatggcttcacggcgaggcattcgccgaacgcgccggctccgttcgagccggtgctgtacgcggtcaacggcgccttcgccttcgggttcctccgcgtcggcgcggcgtcgctggacctcgacgtggtgcacctcgcctcgtcattcccggtctggcgcgccacgccggcgcgcgtcggggactggtcgcgcccggcgacgctcaccttcgacaccggcctcgtcctcgccggcgccgacgacgccgccggcgtgctgtggcagacgctgaacgccatcggcgacaccgtcgtgctgctcaactcgtccaacctcgtcgtccgccggttcgcggagacaaatacggcgtgccagagcttcgacaacccgtcggaca

SEQ ID NO: 38632 - DNA, 2687 bp, Oryza sativa
ctcggtaccccgtctacggccagctcaatccttactcgttaatatctcctttctctctgttgacgtcagaaaaatgctgcaaatcagcaccctgttggattagacgaacccttgtcgtaatgtaacagacatgcacatacctagttgtttcttttcattctttcctcctctcttcaaatattttttctcctaaattacttatccaatttacgaactgatcacactgttgtattcgttgcaattaaatctttacaacaagatatcacatgattatattatgtcaaaacaaaaacatacgtttcaaaccgttaaaacaaaatgtttcatacgtaatagtgatatgtttcaatatgtgtcttaagtgtgtttcacaaaattcctgaaactatctactactactctctctccacctcatgcatgcatacatgcatgtattttagcaagcttcaaaatgatttttctcttaaattacctattcaatctatgatccgatcacaccattgtattcgttgtaattaaatttttataataagatatcgcttgattatattttgataaaagaaaaacatgtgtttcaatccgttaatacttgttgtttcatgtgtgacagcgacatgtttcaacgtgcattttcatcatgtttcataaaatatttaaatgttccagttgctaatttttttttcaccatatatataatataatgtttcacttgttggtcaactgcaacatttgaccgtccgatttttttttaatttaaaaatgtttcacctaatgtactcatgatgtttcactacgtatagatcaaatgttgtagtgaattgaaacatcctttcgctattcgctgaaacattatttttatataaggtaaaacaacgttcgataaaacattttcgatctacttagtgaaacaattacaatatactcagcgcaacagcgtgcaacatttaaaaataattcaataataagctaattattttcatcggattatattcatgtgttgtcttgttttaaagatttaattgcaacggatttaatggtgcaattggattatgatttggataaatattttaagagaaaaaatagtataaaattcgtttgatacatgcatgatggatggcttgatacatgcatgatggatggctagcacacttgtgcatcgatcggacggtcgcgcgagacgtccgatttttcgtctcgcgccatacgtccgacacgtagcgctctccgaattaagccttagactagtaactagtaaggccggcccacgcgtatgcaggttgctccacgtaaagtaggcctgcccttatgtgggtcagatggagaggcggagtttaagggttggtttggtttgaggcctatattggccttaccaatatttggcaatttcaatattatttattgtctatttggtttggagccaaattttggcatgactaagaaaataggccatttcaacggttaatttagactattttggctttaatccaaacacaattttacctttgccaaaattagctatgccaaaagttatcaaaatttgacattgacaaaaattggtaagactaatttaggccacaaaccaaaccagcactaattctctccgaccccccgagacatcctgaatccgatcgttgttcgcccgttctcggccgggtcccgggcgtcgagtccgtcgagcgtatagaaacgaagggtgcatagctggtgcgagcggggttagattttggcttttggtccgttgcatcggtaacttcctcacctcgcgtcgatccttcgagtgtacctgtgctatactttttggtttttggcctgggcattggtagtttttcagtagccattgcagcagtggcgagtggcgactatggcatgagctagaggagatcaggagaggggaactgtaccgggaagtagcctgcgatggtcgatggatagatatggagaagagaagtgacgcgtgcaagagagcggagcgaatgcatatgcctctacgactctatcgctggaggtctccttcgggggttgcagggtcctcttctttgagttacttctctgccataatcccattttccttttaaaaatgaggtcctttttctttttctttatataaaacgtcgacggcaggctaaccgctcgagaaaaataaaacatggccacaggaaagagatccagtgatatcttgtgtacgctgcggcacatccgcacatgcagtgattcaaccaaaagaaccgagtagacagtgcatgcactgatgcacatcgccagcaagatctcccctctggcctgaactcatgaactcgtaaaatgaaggtacagaagaatccacaggaacatgccagaccagtacaagccaattcagtgtgaagggctgtatgcatcagctgccaagataagaagttgtattgcagcctggaggcatcttgcacctcgtgaaccatccccatcgaaatgaaccattgctctgcagcaactggaaaaattgcaaacacttatatatactgcaaacgactagctgctatttatgtataaaaatatgtatcatccagaagagctcgctatagctatactcactactgtaaacaagatgtaaagccccataaggcagtaaccccaaaacctgggaacccgaaacctagtccaggtgaccatcaacagggtgcccatcgggtaccgaaaaaaaatcgccctat

SEQ ID NO: 38633 - DNA, 1237 bp, Oryza sativa
actatagggcgaatttttttctcggtaccctcaagatcataaaagaaaaggaaatcgttatgagcattcactagttgtactaaaccatgtacctattggctgcagaaggcatataaagttgctctttggacattcatctaactcaagtcacgattgtattaaaaaatgataatagggtcattcctcagttcaagttgtattggaaaccttaatagtacaagtatgcccgcgaacatgaagcttactgaactcaaagtacaaaaatatggtgacaaccacagcaatggaaggagcatgaaaagagggatggaagtacatagacactatacacgaacacaacaacattgtgtacctatgtaatatccagttgggctgtcccacgttagtgtacccttcaccaaaatacagtttatactttggtttggctcactagttttggggctgtctaagtacatgaaccagtgccattaaaattaaaatgaaatcaaatgtgatcaagattgttttaaagaaaacatttgctatactcttgagatttcctattgtaatatcatactatagatcatattgtattttgctgttgactacagagagggaagtagaataatattggtgcctctagtaagttttgcttcttccataaacaagggcaaaatgactgcataaagcttgcacacataaagaaagggctagtatttatatgctcaaaagataagtgaattccattaaatcaaatatagcataggataatcaatcttaactctatagcattttctgttgctaacaccatattaagagatatagcataagaaatgtctttggtctcaaattttataatgaatttaaaaaagctaacggagcagcaaaaactcaataaacctcagagagctgtggtatttttgatagcgtcaagaattgttgtttccagtttatcctcagcaacccacatagagcttttcttgcgcaagagctccctgtgatccgccttcttctgtactttaagcttctccttctccctccagctctccagcttctcagctctttctttcatctgtacatgatctcatctcagttatacacatatatacttcgctgggtctttttattttacacaagataattgaaacaaattaaatttgcagaaaatttctaaaaacatgtagtatactacttaatcctctaataagagactcgttcagcaaactaggcaattcaacaaacaagtcgtgtgcaaggg

SEQ ID NO: 38634 - DNA, 596 bp, Oryza sativa
tggctggccaatacggattggcagattattgcagatcagagagatgggtgggtgtgtagacttggcggcttccttccttccatcaaacgtgctgctgctagcttgggcgtgggtcccacttcgccagctgttactgtgtgggccccgttcctgccctagctctgcaagctcaagctgccgagctggctgccacgtccactccacagatgcagatgcagcagctctgatgatctcatgaatctgctacctgctgctcatcatcagttctgtgcaactgtgttgaaaaacgaaacacaaacagtttttgggacaaggaaatgttggaagttgcgtcgggggagggtctgatgatcaattcaatctctcctccgccgaagaacaaaacaaacaaatccaatattagatgcaaggagaacgacctgcgagttcacttaaaggctaaatagatgataacccatgaattttcgcgtcgtggcctaacttatcagatctagatatacaaatgggtcaatttataaacttatttatagatcaaattaataggtaacctgccagtcaaaaccggtgattcgcggataagcccgctcgccccccta

SEQ ID NO: 38635 - DNA, 5735 bp, Oryza sativa
acatgcaaatatcgatgtgcaaaaggagtggttgggaaaatattgatccagaaggcccaaaatagtgcatgtctagttggttgagctattacaaataatttatttatagataaaattcttacatctttattacttcctccgtcctaaaatataaacacttttgatcttcgacacggtattcgagatactactttaaccaatgacatttataaaagtaagatgttttaaataaaaagagtcgcatattgtgatagtttgtttaatgataaatctagtaacatcaatttgatatgattgatttttttattcttttgcaattaatagttaaatatataaatatttgacttgacactatactaaaaattgtttatattttataacggatggtggagtattaacagtttagaagcaagatatatatatgagggtgtttgggagagaggggctcaaaaatataagtttctaagatagagacttatatttttgtgagagggactaaagtttagtccctaatttacaaacacacccatagactacgacaagaaaacctttctgattggggctgaatggcaacaaacacacgcggtgagattgtaaagttgcggtagaaacccgtttgttaccattcgagaggcggcggtggtgcaatggcttgcagtatgctcgtgggaaagcatggaatttttggctgctgaagtggctagtacgccatagcccatagagtagctaggagttttttttttttttttttttttttttttttttttttttgagagcgagtagctaggagtttgggcctgaaaagagtagagacaggggtcacatggcgtctgctgcctcgggtggcccccgcacatgccattttgctgctgccccatgctgggctctctctccttctctctcttcccccgtttacaagtcaaattttacggtgctgctactaggtaacccattttgacgagataaaagaggagagaggtgcagcgggcgctatagttttataatcagctatagcacggactctaaaatacaagaccagatattaattactccctccgttttaaaatgctggacaccgttgactttttagcatatgtttgaccgttcgttattaaaaaaattttgtgaaatatgtaaaactatatgtgtacatgaaagtatatttaataatgaatcaaatgatatgaaaagaataaataattacttaaattttttaaataagacgaatggtcaaatacgtacttaaaaagtcaacggtgtcaaatattttgagtactccctccgtttcgaaatgtttgtcgctgttaactttttatcacatgtttgaccgttcgtcttattcaaaaaatttaagtaattattaattcttttcctatcacttgattcattgttaaatatatttttatgtaggcatataattttacatatctcacaaaagtttttgaataagataaacggtcaaacatgtactaaaaagtcaatggtgtctaacatttcgaaacggagggagtatatgtttatagctaactatggtataaattagctattaaattgactatagatgatttagagccggcagttggctataccgttaaacttgctccaatgttgctgcaactcgtcaacacatgaaacaaaacaaaatccttctcgcagccggaacgaaagaaagtgtcgggattacgaggaaggcgatgctgaatgctcccatgtccgagtcccgaaacatattctttggttcggcaggcataggattaattaactgaaaagataattttctgatcaggatctttccaaataaaataaaaaacagaagaacattttatgacaatggtttagtataatagaggtcagaaagagctaaagctgatgaggtgatgtttcaaattcagatatcagaatgcaaaaagggggtgcagggtgcggatattttggatgccgtggagccggcagatttttccttttcctcttcactgtgtcagcagaaaatggaattggcagttggcacccccagtgcaagtgcatagaatggaggcgataaaaaacagactccctttcattcggcgaaagttttatcccagatttttccagtattttcagtaatcaattcgatcaatgttcgatgttttttgttcagttatcaagagaactagtacacgtctacagttccgggatgaaagagagatctcctgaacagcaaccggagtggaagcattttagcactgtcggagattctgtgcatgagcacgatggacagtaactaatttaaagcccaatcctatgttggcaatcttacggcccacataatggacagagaaagcatgggcctaggcctccccgtattcggcctgtccagaagcttataattttagaccgaagtttgggctcaattcttggctgggtccttgtagaaagatgaagttgtaaactggcctggaccataagggtcttcgatttctgcgaaaatatgtagggcaaaaaccacatatgtggtggaagtctgaaaactaaaacctaccaaaatttatatacctaccttttaatttacctaaagtcgtacgggactacactaaaattacttaaaacagaatttcacaaaccccataattcatcaaatgactaatacaatttattattttaagtattagacacacatcatgcaaatttagcttagcatattattagttttatctttcagctacggcacttttacatgggcagatgagagaggaccatggtataccgattagaacagaaaatcctatccctaactccctccggtcaccatttcattctgctggaggggtgtcatcccgcatgttaagtagattgataggctaactaggcctaaccctaaatttacatcattccgaaaaaaaaatattaacactaaattacaaaatggtacaacaaatattgtaacacggcacaaataccgcgtgtgaggtgtgtaagtatagtgtgcatgcgtaattatgtgtgagttcttaaaaaagtacaaatatctgactaatcgggaaaaagaaagatctatttgtattcgggaaaaaaatctatttgtattctcactagacttactatttcactttaccattgaccttttgactttcattaacagtaatttgccatttatattgttatcacaaatttcattaagtattatcaacaacaaagagaagagagaggttatagtcgcacaaatggcataaatttcattaagtattatcaaccacaaagagaagagataggttatagtcgcacgaatggtgatatagcatgggagcggttttatttttaactcatctagaccgcataggtatgatgcaacagctagcttcggaaagagctttgctcctacaccctggaaacgaccaccattttaacccacaaaacacctcgctacacaaaaacaacagcccaaaaaagaaagagctaaatggctgcgggaagaacagacggcttcacttgatacaatttgtccagaatggcttcatgccagccatccagcaccttttgctcttctccccttaggaacaccttccacttctgtgcaagcgagagtgacctgtaaataaccctgtaaaggagaagaaaccggaaagtccttaaaagcccaatcatttattagccacgaagcccagcatacactggccaataagaccatccaaaccatcttctcccccctatcccaaacaaacccagtgcaatcccagaatgaaatatgtctccttctcaaatgcaaggcctcttcaatcacacaccaagcaaacaaagctaaagggcagtgaaacagaatatggtcagaagtttcagttttcctagagtttacaaagctcattcccacccttccatttccttttaactaattgattagcacaaggaagttttcctctcccagataaatatagaaaatgcttgattttgagaggaattctactcttccaaacagcctacatgtctgaatccttaatcccccaaggttagcagattgtacattgacttggcagtaaaggacttatgtttagtgtaaggccagatcacttcatcgcatccaccatcaatctgaacagattggagcatcttttttttttctttttgagaacaaagcggacagagtcgagcactcgagcacagtatatcgtgcaagctgcggatgccagcgacaaatatgaaacagaaattttgatttcttgagtgtgatagttcggaagtgctgatatggtggggctaccccgttttctgttagcatgtttcttaaaatattaaacggcgcattccatgcaaatattttatatgtaaaaaattctttaaaaaaatcaaataactcgatttttatattggtaatagttagtaatatttaattactcatactggtttgtttcatttcacgagccataatcagctcagttctttcagctgattctaacggacccccaagtggcacgaattcagcaaacaccccaaaactggtatcaaccactatggctaatctcctagtacaatttttatctgaactatgaatgactcagtgttcgaacaaaggccaaatgtcgtctgtaacaaaagcaaggcttaaaaaaattgctgttcatggggttcggggaattattctcttgggctcacgggaaccaaaatcgctaatgagcgatcagccgccgccaccaccccccctcccccgcggcgaggcatgtggcgcgcgcgggcatgcgtaggggtggggcgcacggtttttcccgttgttttttttttctgtttttacttttttcttttcagttttttacggttttctttccagtttttttctttccgttttttttcttttcgattttttagcatttacgtatatctataaaaagtttgtatacgtgcatgcaaactttatagacgtgcatacaaaccttgtgtacgtgcatgcaaactttatatacgtcacatatacgaactttgtatacgtacgtatataaagtttgtatatgtgtatattttttatacatcaaaaatatattatagtagtaatattagtagtatcataaccataatgtagtagtagtattatagtagtagtattagtaataggagtgtagtagtagtactactagtaatagactagtacagtacatagtagcaggtagtcgcgtgtcgcgcattagccccccccccccggggcggatctaggaacaaaaaaattggggggactcaattacacagttttttcaacctccagtcatctagagacctttagtttattatttatgatgaaaaaattgaagggggtgctccggagggtatccatgggttttgtgggtgtaggggggactcgagtcccccttgcacttacgttggatccccccccccccaacacgggaaccgtccgatcgagaacgtgcggttgaacaatcaagcggacagaggcgagcacagtatatggtgcaagctgcggatgccagcgacgaatatatgaagcagaaattttgatttttgagaaagagcaggtggtctatcgatcgatcacatccaaggcaatttcttcatacggatatcatgtcccaagacgtgcatccagctccagcttgctagctcccgattccagtcatccagtgtctcaaactgaatcagaccttgtttaccgatttactgaaccaaatataagcagaaggaaagaacaggtggttcagattccacaatcagaataactctctctgaacattgcttgtttctgcacttttgttcttgct

SEQ ID NO: 38636 - DNA, 660 bp, Oryza sativa
ttttcccttggtctggcgaccaaaagtaataggtgtacttttgtggatggaaggagtataaaaaagaaaatattgaaaggtaggtttatagcctatttagacttaatagaaattaggaattaaaataatgaatattagaataagagtatatagtccatataggaatctagaattaattaaaattcaaaataaaagcaataaaattaaaagttgagtttagagtaaatatagaaatacaatttacaaataactaaaattagaaattatgaaaattattggaacaatagtctagagtccataaaaatacaatttagaagtaactgtaattcataaattaaaaataaataatatcgaatgatgagtttagagtgcatatagaaatacaattagaaataatgaaaattcacaaattaaaaaaaataagcaatattaaaagaagtgtctagagttcatataggagtataatttagaaataactgaagttttgaatttaaaataagaaatataggagtaaaacttataaataatgaaaattcataattaaaaaataaagaacattggaagtggagtatagagtttgtatagaaatataatttagaaataactaaaatttgatagccccctaaaccctatcctgaactttccataccggacaaatta

SEQ ID NO: 38637 - DNA, 1512 bp, Oryza sativa
aaagagcaactttgtaccctgccttctgcagccaataggtacatggtttagtacaactagtgaatgctcataacgatttccttttcttttatgatcttgactgcccatgatactttgcctgccatttctttgaactgaactatgacttaagttatttcagatacagatgggcatcattgttttccttggtgcaggatacaagatggtgtattctgaaagcatgacggaggatggactgaaggaagcttatttgtgattcccttctggaactaatcacaactgcctaagcaataacaaccatatttgaaaattctgctgcaacactgtatgttatattgttagacttgaacgccaagctgaaattgtattttggcattgccttttttctgagagagacctctctcctcaaatttctgttaaaaatttgttgcacgattaaaattatcatggccaaattttgattttcctgcatgatctagttgcaaactgtgttttacgtttgggtacatttgtctacattttttgaatggaatattggagttcatcgttgaatttgctactgtcataatatatcataatatagtgcatagttcttttcttctcatatacaagttggtttgtgtataatgcaagcatgtccaactgctcaagaagcaattgaggtttgcaagtatttgtggttgacgaatagcattttgcgttcctccgtgaattgttaactccagtctgagaggaaaccggagccttgcaaatgggtcatggagtattgacgatgggatcagaaagtgttaatcaaataccatcggcacttcttggcgtgccagacacatctgttctagaagcagaatcggaatccgttcattccggtcaaatagaaacagagcagtatcttggtgaaaactgctgcatcaatcgataatacaatgttctattttttctgtaactgtcataaacaatgttctggaagaaagcaaatgcgaagaaaaagggaacatgaaatcaaagtttggatttcttttaagctgaaaagaaattcaaagcgtggaaacgaatttgaccgcgtgacgcgtgggatgaagaggagaggagacaagggaaaaaagaaccttctggaggccggtttaggcacggcttttcttttttgtcttgcttcattctaaaataataacttcattttgtcttgtcttctgatttatctaattttaatatatttgtcccttggtttttataatctcgattagaattctcgttactataattgtcctataaatttagtgagatcaaagaatgtattgttgattttcgtcttttaagcatgaattagggggcttctttatagaatgtaagtatggtgttatccgggtagtgatgtgtgtgcgtatgcgtttccatgtaataaaaaatgtctataatattatgccctcgaatgtaataatgacttccaaatgactgagaaaaaaaaagtaattgttagaaaaacggtaattatagggagctttttattagtaccat

SEQ ID NO: 38638 - DNA, 717 bp, Oryza sativa
gcgaattcgagctcggtacccagctcgcgcttggtgacgacgtggcccttgttgatgccgacgaagagccccgacttgggctgcggcggcgccatggcggatctcctcctcgctcctcggacctgcggcgaaggcgacggaacaaaccaaaatcgatcaacaaacagagaatcgaagcggagaggggcgcgagagatctcgagtaaggaagcgctcgtgtgtgtgagagagaggcggcgctcggaggctgcgtaccttggatcggcgacagctacaaaaccctaagccgccggctgcgtccgaggagaaaccctaagcgatggagaggatgttgttatatacacgtcgggtactagggtcacagcccagatcgattcgtaggaggaattaatgggccggcctagtttgccttcctgggcaatgactatgggcttgcttcacttatccatttcgctttttagctcgcgtttcgttgttatctcgagaggctgtaagccttgaaatgtaaaattcttgtacatgaaatctttcgtctgctcgcttttcacttaatgccatcatgtagcagcaaagaagattagtactccccttgttttttgtcgaaatattctttttcctataaccttcaccaatcgctataggcttttgtaccaaattttgatagcgttggtttagtttgatgtttttccaaaatttagtagcatttttatgagggaa

SEQ ID NO: 38639 - DNA, 713 bp, Oryza sativa
tttatcatctacaaaagaaaatgtgcatgtgactactgaagactatccgccaaagaatttaagaaaacaagtgtactgatctaaagtaacttgatataaattacaagatttgacagtgtaataaaaaaaacattttttcttttttgtcaaaaagcaggatatataaatgcctaaagacaataaggtgtatagagtctatagacaatgagacaaaaattatatttcctagataaggatgcttaccattgctattatttctgttaaatggtattctttatcaaaatccttcaaatgatcctctttggcactgttaagcagctcagaaatgcaaacatcctttgaaggatgttcatctttgcaaaaacctttcgcaagtgaagaatcttgtaattccttgcaaatttcctggagattatggaaaatgattaaacaaaatattatgtttaattcatgttttgcactgaacaataatatcaagtacttgagttgatcctagaaacaaactcaatgtctcacaacattaaataaatttgtcgggatcaaaagtgcattgcatgcacatcaatataacaatacacaagcaagttgtgaaaaagtcatgctttgataaacatacaagaataaaataatttatagcaaaacattaagcggagcacacctgaatctccctttcagtttctgtcatcacttcattcttttcatcagaaagcata

SEQ ID NO: 38640 - DNA, 657 bp, Oryza sativa
catacatatatattgcgcagttaatattctaattagtcatttaaaattccttaaaatgctctcaagctgccacgttgtgctctaataaattagggcaaatattagaaattctaagaaaaaaataaagtatccgttacttgattttcacttaaatcggtaggtccaatattataaaccgttagattaaattgatcttagaacaaactaaatactacgaggtcccacctcagcataggtatgcacctacgtgcatgggtacgtacgcctcccctcccttttttatttttctctttcttctttttttcccatgcatatgcttccctccttttattaccatatcatgcgtctttatgagacgatttaatcaaaagaattttgagtatcatgcactcatatttttcatttgtggccatactacacgtatgtatatatagatggactgtatgataattaactagcaatatttttttatttactcgagaaaaaaaacatgattcaaaagttataagtacttaatccatctcctattcaaaagtttatgaatggttttctaaaataccttaagaaaaatagaacccttaatttattataaaataacatcatccaaactttagtttgccctaaatttatgaggcaaaatttctgaacaaacaataa

SEQ ID NO: 38641 - DNA, 563 bp, Oryza sativa
ggtacccaacaagaactcacacgattatattttgatgaaaaaaaatataaattacttttataatatatctaaattacttttagatttcactaagttacttcttagacatataaaagtaattcaataaagcctaaaagtaatttacatatactatagaagaacttataaaaaaagaaagtaacttctataatatatgttaattactttaaaactttattgaatttacttttatatatttaacttagtgaaatctaaaagtaatttagatatattataaaagtaatttatgattttttatcaaaatataatcatgtgagatcttgttgtaaagatttaattgttatgaacacaacagtgtaatcggatcgtagatcggatgaatagattaagagaaaattatatttgaagcataaatggtaggaatattttttctacttgcttgatcaattagtactatagtaaagtaagattcttcaagacacatatctggacaatggctaatcgtatctggacaatggctagcgtcgctcgttatgactaaatcaagagcgctctcgatttag

SEQ ID NO: 38642 - DNA, 631 bp, Oryza sativa
cgttcaggtgctgcaaaaagcggcgtaacgtccctgcttcttgtactggctacgctgcaataattctgtactataaccacttgtcttagatctgataagatcgcgaggcctttatcactttgatctctggtcgtcatctgtcagcgacttttttctctctctctctcttttcatcttcttttctctcggaaagaccaggcttgatcaattcatgtgcatgtcttctttgcaggatagcggtccaggacattctgatattttagtgaacagaagaaagggccagttgcaaattttcccacacttaatgtattttgattttgcggggaaaaggtattttaagaaggcttttcatcactagttcactacaggaaaccagcagaaacatatcagacagtgaacggcacgaactagtagtagactataatatcttgtgcataagctcggcacatgattagtctttattttagtaacatgattgaggagccctctagctgtctggcatgcaaaagaactccagaaatgatggagatctgaaggaatctttcgtgctgtttttaaaatccatcaacttctgtacaaagcagaaataataaacctttttttccccctcacactttctgattgtcgacaa

SEQ ID NO: 38643 - DNA, 591 bp, Oryza sativa
agtatttatatgctcaaaagataagtgaattccattaaatcaaatatagcataggataatcaatcttaactctatagcattttctgttgctaacaccatattaagagatatagcataagaaatgtctttggtctcaaattttataatgaatttaaaaaagctaacggagcagcaaaaactcaataaacctcagagagctgtggtatttttgatagcgtcaagaattgttgtttccagtttatcctcagcaacccacatagagcttttcttgcgcaagagctccctgtgatccgccttcttctgtactttaagcttctccttctccctccagctctccagcttctcagctctttctttcatctgtacatgatctcatctcagttatacacatatatacttcgctgggtctttttattttacacaagataattgaaacaaattaaatttgcagaaaatttctaaaaacatgtagtatactacttaatcctctaataagagactcgttcagcaaactaggcaattcaacaaacaagtcgtgtgcaagggtggagaatgcgaaataggggggaagagagggagaggggaggatac

SEQ ID NO: 38644 - DNA, 608 bp, Oryza sativa
agtatttcttccaaacattcagtacttgtcactaagttctggttctggataatctatcatgcacgtgcattctctattcgtacttgttgaattgttcgacctgtttgttgaattggctggcatctgttctgttacattacatctggggttgggaaaggcaagtatgccaccatggcaacttgatactgcattagcgccgtgtcgcatataggcaatgtgtttatccatagaaggatagtcggcaacgtgtgaactgttgcgtttgccatatcacacgaatgatctggcgcctactagctactgctggaatggaagaaatagcccgccacgcgcatcactctctcctgaaaatcacggcgcatcttctaaaatgccaaaattagagcagccatttttttgccgtatgcgtcgtgctgatctgtctcgtcacgaatagcaggaaaaataagatcagtccaactttgcaatgaatctagacgcgcctgcattgcaaggaagaactaccgctcaaaagtgcaacagcgatggatgctgcctgcagggagagtccagccgtggtagtaacacacacacacaaaaacctgtggctacagtaaacgcaacaaaga

SEQ ID NO: 38645 - DNA, 684 bp, Oryza sativa
ttctttttgtcggatgctgtacaggatgccggcaacaaagcccatggggatctactcaggtaagcctttcttactgttgatgatgctaaccttgtgactttaactacctttcagaaatttgatgggatgtatggccgaccaaccatgtagtgacaatcatgaatcatcacggtctgaaaataacatatcggttggtttattgtgatgttgcactcacaacaaacctgatgaatgcaactcgttttcagctcatggggatccatccaatggcaattgtcggtggaaggcaaaataggtggaaactgttaaaatgagacaattcatcaattgcaaataatcccacttcagaaaattttggagctaaccttcgatgaaattgtcgttacgacctgcctcacgaaattaaatcaataaatcatgtgattgtattcttcaagttgaacagtcaagctgcctagaaggatttttattgcctattacaatctgtatacatagtataaaattctgacttacggagtagtaaatttaacagcacacagacattgttataagaattccctagtccctgctaaacaaaggatgaattttatccttatatatcttttgattaaaaaaaaatttctgaaattctagcattagaaaacaatggtaatgccttctttctagtttttttttctgtattag

SEQ ID NO: 38646 - DNA, 730 bp, Oryza sativa
tataggccaattcgagctcggtacccataaaaaattttatgatatatatagacactaattaattttacttgcaaaacaaatacatccatatattaaatcttaacatgtctggtaattatcgaaaaataaagttgatcaaatttgtaccttggaactaatatcactaccttaatgaagaatagaatcgcatcatatccattatttctcatgaaaagatacttctcgagcatttcttgatgcaaaatcatcaagaacaagtcgacgatgttgtgcgcttgtgcggttgtgccctgtgcgatgcgatgtcgtctgccgagttgccgacgacgctacaactcctatcgtctctcggacgtttctgcttccagatagacaataggcaggtactagactactagtattaggtgttggcccctccaccatcataggcccccgaccatcatgggcccccggcggtcgcctcggctgcatagccctagggccggccctgatcgtagcaaggtacactcacgaacaacagtagaggagagcaaaaaggccacgcgttttttttaagaaaaatgatgacactgaaacgcacgtatgactcgctcaccgggcttggaaaatttggagtgagcacaacaggcgtggcggacctctcagtagacctctcgcgaatacttgctacagtaaagttttccacttccctactcctctctctttcctccggcctaaggtggcttctcgc

SEQ ID NO: 38647 - DNA, 668 bp, Oryza sativa
ctagaggcaccaatattattctacttccctctctgtagtcaacagcaaaatacaatatgatctatagtatgatattacaataggaaatctcaagagtatagcaaatgttttctttaaaacaatcttgatcacatttgatttcattttaattttaatggcactggttcatgtacttagacagccccaaaactagtgagccaaaccaaagtataaactgtattttggtgaagggtacactaacgtgggacagcccaactggatattacataggtacacaatgttgttgtgttcgtgtatagtgtctatgtacttccatccctcttttcatgctccttccattgctgtggttgtcaccatatttttgtactttgagttcagtaagcttcatgttcgcgggcatacttgtactattaaggtttccaatacaacttgaactgaggaatgaccctattatcattttttaatacaatcgtgacttgagttagatgaatgtccaaagagcaactttatatgccttctgcagccaataggtacatggtttagtacaactagtgaatgctcataacgatttccttttcttttatgatcttgactgcccatgatactttgcctgcatttctttgaactgaactatgacttaagttatttcagatacagatgggcatcat

SEQ ID NO: 38648 - DNA, 528 bp, Oryza sativa
cgacattgaatggagataaactttatataaaagttgtagatcttgatgagatctataactttgtagtttatcacttttccatttaaaatcatttggagtatcgaataagcattattagtttttaagcaattaaaaccggtggaaagggtttaaacacaaataaaaattttgcatttaggttttaaaaatcgccctcccaaagggcggtaggcgattagatttgttaattttcgaaagaaaaaatatatttttaaatattttaataaaaaaattccgtgtttttggacgtttatttagacttctctctttttgcggtatgggactatgggagagtagggctgttgcatttagaggatattcaaagttggaggggccaaattttaccaaatactccctccgtctcataaagaggcaactccgagtttctcaatgcaaaattaaataagagaataaaggaccaaaatattcattataaatagcaaattagtattggtgaatctgtaggtaaggggtattgaaggagtaaaa

SEQ ID NO: 38649 - DNA, 1091 bp, Oryza sativa
gttagtgaaatcgctctctaaacctgtcaaggaagttaggccttgggtgtcacatcgaacgtttaatcggatgttgaaaggggttttcaaacacgaatgaaaaaactaatttcatagctcacctggaaacagcgagacaaatttatttcgcctaattaatcgatcattagcacatatgggttactgtagcacttatgactaatcatagactaattaggctcaaaaattcgtctcgcgattttcgtgcgaactgtataatttgttttttcgtctatatgtagtgcactatttagatgtctaaatatttgatgtgatgtttttggaaaaaaaatttaaactaaatcagaggccttaaaataaaagagttaggatatccggtgttggttcattatagtctgcacttattgcgatacgaggggcgtcaaggacaagaagtagagaaaatctcgtatacgagagagacgtccccaccttgggccccagcacaacacaagtccggcgtcgtttcctcacgtcgctccaaaacgtgctgcacccatcagtcgcttccagcccgctaacgggcggagcgatgaacggacggctcacgctgctccctccgatccacgacgcgagccatgagtaccccgcacttttgccgcggggcccataagggccatcaaccgacggccctggtgccgcctcgccccacccgtcggccgtcgggacgggagacccctccctcccccgcgatcccgcctcggcatattcgccgtccttcgcctcgcggcgggcgcagtgagccgtggccgtggcaggcagccatcatgtgggctgtggcgcctgtgagccggccactacctgcgcgccacctgtcgggcgcccgattttttccctgctctttgatctcctcctcctctctctctcccccgtggtgtgcgcctctctattcttcgccgcctatttctactccagcattgctgctgcgcgactcgccgtcctccacttccgcagcgggtgggtagcttgccgcagaactcgttcggctttcgcatataccgccgccgccgcctacctagtacaaggtaaggcgactgccggggctgcaggaa

SEQ ID NO: 38650 - DNA, 721 bp, Oryza sativa
ggtaaaataaggtactctctataaaacatatacatctcagcaatagactcgattaatagtaaaccaccttaatagtatgtctacatttgtatctatagctctctcatgcattgcctcgtttttctctatagattatctctaagttagtagatagctttactctctctcttcatttaataccttctaagtaggaaaatatactgacataatcttttgtagagagcttataaataaccagtgataactttagaggagtaggtgaagcctgtccttaaactcaccttacaattaggagtagtaattgctatgtgtaggttgtcctgtggagtttgtggacgttggagcagatgatgttgcatttgctaaattggtaatggtgaatttattattgtcttggtgtgattaggtgaacacttttgtcctgtctagctagtatagtactccacaaaccaaccttgacgatttcaacagaaaataaaaaggctaatctaatctgttagctaagcttggctgggtttatctggactggatggatcatgggtgtgtgggtttagctcaggtaggcacacgttttgccaccctgctcgtatactccctccacccttaaaaaaaactcaacctactgatctcttctagttcagatttattgtcttaggatgtaacctcttctaggttaagttttttagacgagaaaagtattactctatgatatctccctcgt

SEQ ID NO: 38651 - DNA, 611 bp, Oryza sativa
aagatagccgagaataagaagaagaaaactttcatgggagataacaacgtgatgtttatcctctcctatatattgaccatatatattattttctctcattgaccagctaattattagcgtacgtatatatacggctctagatcgggcgccacgtacgtgttcggattaatctctagctggtaattgatttggtaataatagtgctgagatagatagatcagctggacaccagagtccgacgttccgttgaagcatcgctaatgtcgattagtacagttatggtcttccaaggtaaaaggacgtacggttagattaattgtgctcaatgatgaatacagccattcccttactgtttgctgcgtccagtttagattgtgacatgaagaattcaaggcctgcatatatatatgcgcataatatatataatgtcgtgtagaggaagcttcaatgtacctgtaaagatccttaaaccaacttgagccaactctcccatttactgttcttattttcaatcaagaaaaataccttcatataagggcaggtgttgtgtaatttagtttactagctagggcatgcttgaaagtcattcattttgcaagcttttcatatgg

SEQ ID NO: 38652 - DNA, 688 bp, Oryza sativa
cccacatccacaccacccaccctgccaccccggccttttggttgttgcgttcccgtcacccccttttttcttgccttcgcgtgttgaccaagcagcgcccccctccccctccgcccaacaagaatcgcctcagcaccatcgcgttgtgctcgcgcctcctcctcgcaccacaccgccattgtatagcctacctccgactcccctccagtcctctactcagacctcctttcttgctcatgctggcagtggcgcctcgactccaacgatggcgacatacagctggcctcccctcaacctctctgtccactcctgcacgtaccggcggctactcctcgactccaacaaagacgatacatcaagccgtcatccccttccctctagcagttttcttgatttgggcacaaggtggagatggcggcggagcaggagggcacatgcaatagtcggtggttggttgaggggctatcgacgaagattgcaacctggcctccccagcccccatccactctgatttttttattttggataattttcttgtgattttcttaatttatctcctgattattttaatcatgatcaagatcgagaccaaattgggtggtcttgataaatttctactactgcccagtctcttttcaataaccgaactaaccgaaaaaagacaggatatcaagatatcaagatcaaa

SEQ ID NO: 38653 - DNA, 735 bp, Oryza sativa
atgatgagaagtacctacgtacttcggccagtttgtcttgcattcgtggagcggatctatagtataaggaccgatgactctcaataaaatccagtggcggagccagaaattatataacactggtagagaaaggggctttactcccggttagaaacccccctatagtcccggttatacaaccgggagtacgaatccgggactaaagatacccatctttagtcccgggtgaaataaccgggactaaaaatccatctttattcccggttggtattaccacccgggactaaaaatggtggagcagtcccggtaaattcttttttttttttggttgttgtttcatggttcaatcgatttgctccctaaatatcccaaatcatccacaagcatcacagatttgggaagaaatacatcacatattgcaaagaaatgcatcacagatcacaaatgcatcacatcaccaaatctcaaacgaaaaatacatcacaaatcctaaaagaaatgcatcacaactcaaatacatcccagatcagatccaatatcacatacattacaaatcaaatccaatgaaacacaaaatcaaaaaaaaaaatcggcagcagatgggagggcgccgccggcctcccggtccccgtcctctcggcgtctgcgccagctcggccgccacgcccgcccgccgccgcggctcctgccgggcgccgctgctaccgcccggcttgccgccaggcccgcccgccc

SEQ ID NO: 38654 - DNA, 809 bp, Oryza sativa
actttattgagcttggttgaaattaagaagggttaatttgttaagttcgaataattatatatcaaattttgaagaaaacttgtacgaatttgaacctctctcatcgccatgacaccgagaaaataaatatgattttttttcttcgtctaaatgtaaactttcagatggaagtgtgtgaaataagtgtgcatgcactcatttcaaaacagctctggtttggaacggagtggtatatactccactaactgtttgaagttaggttgccatccattttattgagggaatattaattgtcatcaagcggtactacgtgtgaacttaatcggaacgtggtcgtggtctgaccaaaattagctgagatttaagtcaagcagacacgtgcactgcagtttgagatcagctgcgtcttcagaacaccaaacacgcgtacgtgacaattggcaaccctttcgttcatattcatcgatctttcaaagactcaaacgtaggattataagccaaccaattaacgatcaatatatggtactccctccgttctaaatatgctactttgaccaacagtattcaaaaaagatgttttaaataaaaagagttgaatattatgatagtttatttaataataaatctagtaaaaaatgttaaaaaaatgttagacttgtcactattctaaaaatacttatattgggacgaagggagtaagatctatttgattcagcacacgaacccccgaaatgcagcgatcaattaattagttgccaaaaaagataaagattaaaagaagatgaaccaagtcacggaggtgatttgaa

SEQ ID NO: 38655 - DNA, 1047 bp, Oryza sativa
gggaagggattagctgactggagtagctagtgaagtggggaggtggaggtcacgtacccttggttttggataacgagtcgtgtccccgtcgagctcgacgcgagggggggagatgagacgagatgggccggcggcccaagcgcgccaccgctcagcccaggaagaggaagcccattaacaagcccaatcatttatttattaaggttttattatatttttctcctttttttttgtcgacgacatggaatccgttaattaatcaacaaacaaacggattaaatgggctgtccatcttctcatattgaatagaaatgtcagttactagatcactgatcaatgcaaatatatattatatatacctcctccgctcaaaaataaaccaatcgagtttgtgtagtactattgatttattactccatattggtttatttttacaatggaatgactactctatatatactcctatagtcacaagtcagacatgaaggacaagaccaacttttggaattttgactgattttttattaaataagtttatagaatctaatactccctccgtttcacaatgtatatctatctagattcatgatatcaatatgaatgtgaaaaatgttagaatgacttacattgtgaaacggaggaaataatttataataatattttttaagataaatctacacgtgccatttactttctttttaaactaatcatttgataaactatcgacagtcacatctttaaaattttgaccagatctttgttaacaaacattaaatagcagttgctatatattaatattactttctctattttaaattataagtgttttggttaggttttgaataaatttatatatgggtctatttacaatataccacgtgtccaaattcatacggatgtaaatggatttttatattaagagatcaaaacgtggaacggagggaatatcatccagcatgaaatcgatgcattgatgacgtgcacgcgcatgtacgtatgcattatgcttatgcatgtgtacatgctaaactatatatagacgaacag

SEQ ID NO: 38656 - DNA, 525 bp, Oryza sativa
ataatacatggataaggataaggataatatatgttgcacaattttttttaaaagaaagactgagcataacgatttcttttatgcagtatgaatactagctatatgcacatgcttcttaaaatacaatttgttagtaacaggtcagggtttgtgtagcaaaaacagatcatcattctccctcaaagaaaacaccctccaaagaggaaaaacaaaaaaaaagaaatggagaggggccgtgggccatgtggagctcctccaataaaaccaaaagcactaaaaaaaaagccgaaagcgccttttgccgtcctccattacttttccccctcatcaaaaaaacccaagctacctcatcaccccaccatcaaaggcactgacatgtgggccatagtatgcaccctggcccacctgtcattgaccctcgttctccaagtggcacgagacggaataaactaaggcgggcgcgtgtatccggtacgggcacccgggtggttgtacacgaccgggtgatctggcggcggtgggccc

SEQ ID NO: 38657 - DNA, 629 bp, Oryza sativa
gtgaagcagactctgaattttaactaagttgctaaattcaatttgatctcaggctacaaatcgcaaaaactctcattgactttcagcattcaaatcataaaaactctaattgatttcagcaattcgagtttttaattgttcaatcaatctttggatcttgatggtgctgatcatggaggcacagctagcagaccatggttgtaactaacacatatgcttgactgtactgattaatcaatgagagttttttggttgaactaatgaaatttctactgtagtcgagagaaatgacagctaaaagaacaaagtgaaatgaagaacgggctgctgctcaccgagtcgaggaggatgttagatgccttgaagttgctagatgaccagcgggtgagtgtagtggaggaagtcaagccccttcgccgtgccgcgggcgggctgaatcatccttatccatggcatgggaccatcgagacctgcagaccattacagcgcagatcagcttccccaagtctttttagaattgacacagaggtggcggcaacgaactggtggctagggtgaagcaatcatcaatttctgttggtgaaccttactgtttgtgtagtgctttagctgaaaccatctgaaggtgg

SEQ ID NO: 38658 - DNA, 576 bp, Oryza sativa
attattttgtgtgtaatcgatatgtgggtcccacagtttttaaaattattttttatccgattgccacgtaagcgccacctgggaccagacctagtcataccaagcatgtaagcgccaggtcatctcaaaccgggcacaatactaccaacggacctcgtctgcacagttttggtaagttgggggatgcgatgtatctggttttgtagacggagagatgaaaatcagactgggcgacgaattaagagacctaaagtgaacttattcctctcatcctccatccccgctgcttccggcggctgccgccattccatctcccacttccccgtccattgccatcaatcctcacgccaagctagctatagctacgatggaacgcccttccactccggactccggttgggtcatcctcagcaccatcgcggtcgcggcccgccggcacagcaataatggtagcaccgccattaatggccacaccaggaacggaaacaccatccatcgagggtatgtatccctctagatctttcgcccacccaccaccaaatccctccatcgtcttcgtgcacagctcagacatga

SEQ ID NO: 38659 - DNA, 1014 bp, Oryza sativa
aagttacgtggcattgaggcattgacacgacatttctctcaaaccagtgcgtcattgtcgccacaatacgcatcgcgctatagtataattagtttagtcggaacatataaaaattgatcataatgtcgtcattttgttaatcaacttgcccatatattatttatgctccctaacaaaatttgtcaaatatatattgatatgacttgagtgaacctgaatgggccggcacatatatggcacaggtcaataaaaggaagttggccaccggtacgctcgtgtcatctttgataagattgttcggaattttatttcccttaattatatttgttagtactacacattttgtcctggggctggaattttctacctgatgactctagtactccacatctgagtgatgttattttatccgtggcacacactgatgcagttaataactaataaagtagtataggctaggattgatgttagttggtgaccggcctataaatgagtgtcgcgttttcaggcaggattattgtatagttgtggtttgcaattctgcgtgctacactgacagaaattagcagtagtaggagtagtatactagtatatattactattatatacttacatcagattgtataaagtgtatgaaactgtgacagtctgaaagagtagtaatctgccgggaatatgggtatcatgagattcccaaagtatgtagtcgtaaaagcagcaggtaggtacgtggattggagaatggtgcggtcgtgcgcgcgtcctggaaagcaatataatgcccgtaatatcgtggatttgtgcgtgcgtttgaccgtcacttgttcggtttggccggttggggttgggccgggggggtgtcccactggcaaccaaattgaaccccattgctagatttgtttcaatctttgacccatactcatactggagtatctactagtatctgtggatccgaaaagcaagacccatatggaagaatttttggtcagatcgctagctagcagctggaccttt

SEQ ID NO: 38660 - DNA, 711 bp, Oryza sativa
tgccgcatgtccttgtaccagtgctgcatgccatggtccggattagagagaagctagtaattaagagatgagcaccgagccacatagcatagcagaagaagaaaatattatggtggtggtgcctgcagtcgtcgcgggggttggttggcgcgaggacgacggcgtcgtggcggacggtaaggcagtacccctcgtcggcgcggcaaaagatcttgaacgtcggctcgtgctggggaccagtcgccggaggctggtattggccgtggccgtgcccatggtggctgaacatgctagctagcttccaagggccggcgtctggttgtctcgctggtattcgatcgttgcaaatggcacctcccgggttatatagaacaaattaagctggaggccggccggcgagacgttcgttcgttgagaccgaggccgcgtacgtggtgccgatcgatgagaccacacccaccgtgtcgtgtcatgtcatcttctggagtacatagggcctgtttagttcgcgaaaagaaattttttagtgttacatccgatgtttgaccgaataacggaagggttttttggatacgaatgaaaaaactaatttcataactcgcctggaaaccgcgagacgaatcttttgagcctaataacccgtcattaacttatgtgggttactgtagcacttatggctaatcatggactaattagacttaaaagatttgt

SEQ ID NO: 38661 - DNA, 520 bp, Oryza sativa
tgccaaaacctgacaccgatgtggatgacggcaattactaattgtgatcatcagcaaaagctagctaagctcaagtggatcaaagcagcaactgtggccttatctgatccattattgatatatatcaagcgctggagtatgtgagttgcatgccttttttttcctacccttttattcctttcaaacgtcatccatttatatatgtatttgtatacagagatgctgtgcatatatcgatccgaataataataagaagaagaggataacaaaaataactccactttttcagtcaattaggtagaagcccatgctgctgattgccgcgccatacatatatatatgatgggacgagagagctagctaggcaaaagaaaatggatacatagatacatatatatataatcgatgctagctgctactgctgagatggatgagaataaattaaaggggtcattcgatgtggatatatggcggcgcagatgtatatattactccgcatattacatgatctagaaaaccg

SEQ ID NO: 38662 - DNA, 710 bp, Oryza sativa
cctgctactattaagctttatgatgaggcatcgatcgatatatcaaggttaataaatccaaattctacatatcgttttctcaccaattaagcttcctagctagctctgtcctatcagctacaagtggtgctatacagaaagaaggcgactgaaacgttagctgcagagtcgacgacttaatttaattaatttctttgtttttatcataccaagttagctactagtactcctgtttccactagattaattacgaaaattaatggtggcaataaaatggaaatcagctcgcatttaaaacccgaaatattcaacagtggagaatacggccactgcattcgcgtcaagttgttgcctaatacttaatcatcaagtagcactaggtagatctccaaatgggaaaaggataaccgggtgaagtaaataattaatcaattgcaagctaatctaatcattgaggagattagtatatctgttgattacccgacgcgtccattttttagcacgcaaagaccaaatctagaggaaaatgtcatccacgaacgaaaacattcttatctgatttttttattttcagatcgatgcagtgagctctacggaaaattcagtcatcaattctgttatatgacgcaggaaaaaattcagtctttcgtcatgcatttggctaacgaattcctgccttgtcagctccagcagtcagaacttaatttgtt

SEQ ID NO: 38663 - DNA, 614 bp, Oryza sativa
acagctattgcttatattaccataaatgcaattgtattttgtatacaattatattgatcaatttccgttataatatggactcgtcgtgattactaacatagatatttctcttcccccccccctgaataatgtcgtaattttgaggcctcgaagcaaaaatgatggctacttttggccttctcttcagaatactataatagatgccttacttgcatatgggcaaaaattcttggcaactaagcatgcaatctctcgtggatcatcttatttggtaagagttggttagcataaggagcttgctatagttcaaatggcctaaaagaattgattaatttgtttcaaaggaaggcatggctggatttcagtggtggcataaattctccatgttgatctgggtgattgcaaggatgattaacggcatgactattgtttttgttgcaagcgacggatcctttttatagcacatcatttgcatacatcagtttcccatgactacagtacagcaacgaagtttggtaatcccaacagtgttacagcatatggttctcagacctagtagctgctttgtgggtgcaagtgtcagacttcatgtttgagatcagtccaagctgagt

SEQ ID NO: 38664 - DNA, 607 bp, Oryza sativa
tgtttgaatgttactcaaatggttataaaaaactcaaaaaaatttaagaaaatatattaacatgtgatatatccctctacaaacatgcaagttcaaatttaacttctacatctcgcatcgaaaaaaaattaactatagctaggtaacgtattctcatagtcaaaattgtttttttacgagatatagaagttaaatttgaacttgtatatttgtagagtaatatatcacatggtaatacttcttctcaaattttttcaattttttcatgaccatttaagtgacatgcaaacaacgagtggatatctcctcaagtgattaaaatagtttccctaataattagctagctatatacacagtgcacacgatcgagatagatcattgtttgatatacttgcaccggtcattttccaccgcaatatttaggattaggagtgtgtgcgtaactgtgtatatacacgatgtgacactgcatgtgtgcagttaagtttagtacgagacactcattaatccgctagccaccaaaatattatcctggattaaagttaagcatcatcatgcctcctaaagttcattaagaatgcaagtggcagcttaaaggatactccat

SEQ ID NO: 38665 - DNA, 549 bp, Oryza sativa
ttctctttatctcggagacattggatgtatgcatccatgacatgaatttgaggttagttcagttacattacaaatatagttataaaaggaaagtaggtttgttaaataggcgaacttacatcatcattcaagtattctggttcaattagtactttcattgatttccgattaaccttcacttcttcaatatgcaccatcactttgttatcctttgtcttattaatgtaggtaatgaaagggtcttcttttttagtcaactcttcaaatgtcgtacaaatttttaatatgtaaacatagaatctataatagatttatacaaaagtacaatgtttattacctttagaattttttatcggtgtctggcctattcgctttcttttcttttgaccacgtaaggcgttctttggtgggcttttgtgtattttttttagtaagatcatccttatcgatgtatactacaaaagggtaagtcaaatcagtaacacacaaacataaaatagaagtaataaaatttaggatgatgtagagagttcacacattcagatattt

SEQ ID NO: 38666 - DNA, 594 bp, Oryza sativa
ttcttttcttttgaccacgtaaggcgttctttggtgggcttttgtgtattttttttagtaagatcatccttatcgatgtatactacaaaagggtaagtcaaatcagtaacacacaaacataaaatagaagtaataaaatttaggatgatgtagagagttcacacattcagatattttctttggtgtttggttgttttgtttcctcttcttttcaccctgtaattagtctgtctggcatgatagcttctttttccattcgcgcttgaaaaggaggaaaattagtaccattcacatgagcatatgtaaggatgaaatagcatagtactgtgttatttttgttggtgtttgggttctgattttgtccttctttttaccccttgattcgtagatgaagttagtctgatttgttggtttgtatgttcttcatgtagaacctataagcctcttgttgctttgattgcactcgttactgtccttatgttaggtcatgttcacgttagtattatgataagttgtagtaacgttagcgagagaattttaattcactttacctccgtttcacaagtagtgtaaatgtttggatttatataggcc

SEQ ID NO: 38667 - DNA, 502 bp, Oryza sativa
aatggcacaatttcctgagtgccttgtagttgcagacagcagcagaatgtatagtaagcagaactaagtgttcactgttcagggcttcagacaggcgcttaggcagccatagtgtagtggtgcaagcgcgcgtttataagaaatgtgtgtatgcacgcgtatatgagtgcctacattatattatttaaataataataataaacgtctggaacagatatcgttcaccattatgttacatttagggggacatatatgtgaaaacaagctagggggacatatatgtggaaacgagttaagtgttggaaactcatgaaaatcatacctaaaagttttgtaaattcataaaaaaaactaggaataggtgtagatatgaaatacattctcattaaatctcaagtttaaactcaacttcagttaggagtaacaaaaaagacaaatttcaggtggatggtacaagactatattcatccgaaatttgtctttttttttctcttaagcgaag

SEQ ID NO: 38668 - DNA, 986 bp, Oryza sativa
cttttttttgacattttttcctcacgcgtttttttaaaccgtttttattttctcgtgcattttttcttttttaatatacggtagaaacttctcttttaaaatagttatattagattagattcgagataaagaagagatataaacggactactaaaatgacgaatagaaattagagtttttttctgccggcttttttctggcctttttattttttttttctcatgcatttttttacgaaaggtttttttcgccactctcttgtagtgtcggacctttctagatataataggattcgattttttttttactttagaatcggatattttttttattttttgcgccctttttttactgtgtcaacggagccggattcgtttcgattttttttctgtttttttgccccgctttttttttatcaggctgatttggtatttttcgcccgggttttttttcgccccatttattttatcggacttttttttcacccggtttttcgctcgttttttttcgcccggttgattttttttaccacatcacatataattcctttttacgtggaatcggacatttatttaaaaaaaattacccttttttttaccgcgtcgatggagtcggattcgttttgattttctttccttttttccccttttattggatcagacagatttgtttttttcgcccggttattttttcgctgatcggactttctttttccgcccggctttttctctcggttttttttgccggtttttttacggacgatggaagcacctcttattttttttaaagtataagtagagatagagattaacggatacaaatttacttatctagcctttcatctaatcttgaaagtgatacgtggcccacgtttttaggtacgttgtgttggaaaccgttagattacagccaatcaacggctatcagggtttccaatcccactaaaaaatctactggaccatagcttcatttttcttttcttccta

SEQ ID NO: 38669 - DNA, 601 bp, Oryza sativa
gcccctatctgccgcaaacctagggtggtacgcgaccaccgccgcatctactcctatcagccgcaagccgacaaggagcgatgcatttttctcttttttatgttaatttcagaaaaaaaaatccatatatggaatccgggaccgtccggaccgggtcgattttaaaaaaccatggtttttcggtcaatcgctcataaaatatagcggaacggtttattttagataaataaaaaaaagttgactattgtaggatgtggaacaagaacaaagtgatcccagagagcctgtatcaaatcatcacgaagaggcctatataaatccaaacattaacacgacttgtgaaacggaggtaaagtaattaaaattctctcgctaatgttactacaacttatcataatactaacgtgaacatgacctaacataaggacagtaacgagtgcaatcaaagcagcaagaggcttataggtcctacaggaagaatatacaaaccaacaaatcggactgacttcatctacgaatcaaggggtaaaaaggacataatcagaacccaaacaccaacaaaaataacaccaggtactatgctatttcatccttacatatg

SEQ ID NO: 38670 - DNA, 1382 bp, Oryza sativa
cttgagacagtagtcatacacatgcgcatttgttgtgcatggatggaaattttgtagtaggatttgtgcaaacttattccgaactgatcttgtgacgattttcaagctatgtttgatgtcgcattttcttcatttagcaatgttgtgttacagttacataataagtaatgtccaaatgcatatttaatgtagaagttgaaactatttccattattatgaaatgttctattccaccgttgctagaacgatgacaataggtgacatattatattccacttgttgaatctttatgtggttaaaaaatgattatagcattggatcagaagctggttggccagagatagcactcaacccaatagggtttaattctagactagcgctatagaaacacgtgtcattacttcgaggagcaaaacattttttttaaaaaaaaggagaaaaaccgtactcctaggggtggtatttattgatgatttgacattagtatccaccaattttaggactacgtgtgtactgcatgtgtttggtttgagaatgagctgagatgggttggacttatccctgtttttgagatgaaatggtcttatctattcgtttggcatatgggatagggtgatcgtactttttaagagatggcccgcatgtcagcaagagaaaaaaaaggtttggattggtttgccggttttgaggaacaagatgaactcagatcttagtggaatattcccttttagcaatcatcatgttccatctgtcctccaaccaaacacactgaaaaataggttcaacacaatccgatccatcccaacccttaaaccaaacacatgctaagagatggtcaacatgtcagcaagaaaaaataatgggttggattggttcaccagaggaatattccctatcagagaccatcccatcccacatgttctctagtcaaatatgctgaaacataagttcaacccaatccgatccatctcaacccttaaaccaaatacatgctaagtggatatgcatatgcctgagctctacaagattttgatgcctccgatgatacttcaagcttatgtaaagaacatgcatatgcttacgcagtgttgggtgtgcactaaattgtagtactctaaaaacggatggtttggtgatacataggatgtgatatgccaatatggcacacacttaaaaaagtttgtcttcttctctaaatatctttacatgctttggactatcgccatgaaatccattggtttacacctttttttttaggaaagaactgtaggggaagcccccacagttaaaggatattattaagatataaaaaatagtattacaattggtttaaccaggagattaaagttgatctctcatctaattttaagcaaaaaacaaga

SEQ ID NO: 38671 - DNA, 934 bp, Oryza sativa
ttccgacccctcggggagatagagggagggcgcgcctcatcacccttgggcccgacccccccgagggggtcaggccacgtgggtgaccgcggctgccccaaacctctagtcaagatatccccggtcccatgtcaccgacagacatggtatgtggtgggtcctaatgagatttagtcaactactattaggtatgtggtatctataactatgacaattatgctattttgtatgatagtacaaagatccatggatctcaatgtatttttttttcaaaagctaggggacccaaaccaactttggtctctatataaaaagctctgcagctagaagaaaccacctataataagattaataagattaatagttactatacatagtgtatatatatgtcatgataagtatgaaaattaataggagtagatggtttctgggatacgattacccttagttggtcaatagtaatcctgttatgttgttgattcttgcaatgcacgctccacggtacggccatgctgatctttctctctcgacctgccggaatttccacaacatgttgtccttccagagaactacaccgtactgtagaaagttgactataaatgtggatagaagtatcatggccgtgtatagatttattttttttctaaaaacgtcacatcgaatgtttggagacatgtacgaagtattaaatatggatgaaaaaaaaatcaattacacaatatgcatgtaaattgtgagacgaatcttttgagcctaattacgctatgatttgataatgtgatgctacattaaacatttgctaatgacggagtaattaggcttaataaattcgtcttgcagtttgtaggcggaatctataatttattttgttattagactatatttaatactttccgtgtacttaaaaagattttggccaaggaacttatcacag

SEQ ID NO: 38672 - DNA, 661 bp, Oryza sativa
gtacaaatcaccttagttacctcaggtacaatgctttgtcatacgtgcagaacgcaaatatacacacgtgagaagtctttagaagttttttctttttttacaaaagatagatatgacagtcttgttaataggtcctttaataggtctagttaataggtccatcagtttaagtgaaaaccgacatcaaaatattttttattaaaaataatataaaatagtgggttcattaattaatgtaaaaaattagttaatatagattataaattggtaatttactggtacataatataattgcgtaacatttatattaaacaatgtaattttaaaattttgatatagaataatggttcgatataataggtactcggtttaagtaaaaaaatattgtattgttaatataaagggtaaaataatatagtatatgatgatatatataatctatgtttataaagtgataatttcttaaaatttattatcactaataataattacgatttcgtctatatatggagaatagaaggaagaagaaggaagcaaaagtacgtctttactgatataagtaatttatatttttattttttttccaatttatctttttaaatgcacgttacaaatgtatatgtattttcggcttttttacaaatcgaacgtacgtacattt

SEQ ID NO: 38673 - DNA, 3044 bp, Oryza sativa
ttatgtttgtggcgtatgcttgatcgatttacatttgatgctttacaagtttggtgctattagccataacaccgtcctgcttttgtttatactctttttgttattcatgacgcgtgggcacagaccgaaagcaattgctggtaattaaatttgttttaaaccctttctatatgcgcatctttgggtattttttgtgcacattttgttaaggctactgaaaaggtgaatatttactgtctggaaatggaagggcgtttattacgtgaaatatattaggtaactgacccgcatcctaaagcgtgcaaatagtctcgtggttggtgaattactgagttggttaatggttaatgctgatcggtctcatatttgttctctctaaaaagccaagcgtactatgctaaatatttaggcaaattttgctgcagaatatcgtgacttctcgtggttttagctgtaggacactgcacgaaatcactaatgagaaaacgctacagaacatcgtgacttcatagttttagcggtaggacaccatatgaagtcacttataagggaacacactctgtaaatgtggttatttatccgaggacactccatccattaaattaatgttttcgtgctaactagacgagagggggcctacttttttacacaacttgaccaaattgcccctcctctctcattctcatcctccttccttatctcttcatctctctctcattctcttttacaaggcggcggaggcctgctcaacagcggcggcacgcgtgacctgctcggcggcggtggcggagcccggagcacgcgttgcccgcttcttccccgcctcctttctcgcgatgatggcgtctttcgtcgacttgacatcacaattgaacagcggttcttggccgcgcccagctcggcccgaagcagctcatgctcctcgccaagcggcatggaggaggggatagagggaagagagataggagagctaacatgtggcccaagggcatttttgatattttacgtgatttctctctcatcttcaaccgaaaattattattttaatgagtaagatgtccactagtaaatatctaacttttgagagtttcttcctcaaaagtcacttcgggcggtatcctacagctaaaaccggtcacttcgcgcggatactacagctaaaaccgcgaagtcatagtgtactgtagcaacatttcccaaatcttaaacacctaaatctttctttttctcacctttaactcctagactatgccccttgtaggagtagattttttgtttttatctaagagcatgttcaaagatagaatcggtatgatctgctatactatacaagattatttagaaactacatccatacaataattaagacaataaaactctaagcattaacccaatatatatgtttttattactgttctctcattttcatcatattcctatgtaactactatgtaattgagtgtagctgtaagttggatatgtaaaagcacgaatcttgatgcaagatcttacgaataaaaaagtgaaaaataggagcataaaaatctggtgcaagttaaatagcaaaatggttaaaaaaaaaactcctatgtacccattccataagaaatttagcataagctcacatctcatgttttatttttcttcgctacgtccaatacacgttctctctctacgatttccagcaaaattcttgtgttttaaacttttaattcatgtgaatcatccaacgacattatctttaacgttcttctagttatttttttcctatttctgtattttgaaaatccacattccaaatgatcacgctttctctaggatttttcctattcctacgtttgtttcccaaattactaaacggtgttttgcttacaaatatttctattagaaaattatttgaaaaaacatattaatccattttcaagtttaaaataattaatactcaattaatcatgtactaataacacacctcgttttaataacacgcctcgttttatgtgtattctcattttttttctttttcctctcaaacacttcataagaaccaatctttttctttcccctcctctcaaacattccaagaacagactcctctcaaacactccatgagcatccctcctttccccgccttgttccttactgtaagtttgtaacggtaatattaactcaactatgagaattgttagactttataattttattaggatataaaattattgattggagtttttgtgagttacttcctccgtccaaaaatcaaggcctattttcctttttttttttggttttttcaaaaacctaagagctatttgtagtctctatagagctacgtgctaaatttgttgggtgcaacctaagaatacatgggttttatcacatagtgaatgagttaattactcactgctctgaataacaaaataaatataggtcttatatttctggatggagtagatcgtatctttgacatcttggcccaattaggaattggcatgtgtggctcatgagagctgtgtgcgcatgtttagtaccaccttgcaagtttagcaaagttgaaatcaacttagaaggcctcttccctccaaccatgtcactctcaagttaatccttttatacgaaacgaggacgaaaatgtaagtggagtggtatgtgtaagtgggctcacccgtcagttgggttaggctacatgtttttggagggagggctgtgacaaatggtatcagagccgattctcgcagttgtacgtatgggtcggtgtgcgagcatatggctcatgtggcatctatgttgaggcacatggcatggcgtatggcgccggccctagacgactctcgggttaactttttacacgaggtgaggatgaaaaagtgtaagtgcagtgttatgtgtaagtggaccgcccgtcagttaggcttgtgacggtatctaaacctaataatggagtagtggtacttcattagccacagtccacggtgcgccagagctatcaaatgatataagcatttgatgattcatcagcaacgatccatcctatagacgatacgatt

SEQ ID NO: 38674 - DNA, 546 bp, Oryza sativa
gtcgaacccagtggcgcaaccagtggacatgtgagagcggccgcgctcagacagcaaacttccaactccaaccgccatccgaaacccaaccagatttcttcccaattaaatccccctccctcctctactcgatcgctctacacgaccgatcgatcgatcgatcgagagcctgacccacgcgtcgtaccggaccaggatgttggattccattaatgccagcagctatagcccaagtagcttagctagccatacaccgccgtcggccagcttggcgagaccgcgacgttcgcgcgccgcgcggcaccggccgggagggggggggggggggcgagcgcgacggggacccgcggccgcgcgcggcacggcgccttggtccacgtacgcctatctacctagctcgtgcagtgcggactacgcatgcagcgcccactaccaccttgccgcgcaacaccagcatttctttttcgcctcgtctcgtctcgtctcggctcggggtcggggtcggggtcggggtgtgcagtaaaaaacaaaactttgcaccattca

SEQ ID NO: 38675 - DNA, 691 bp, Oryza sativa
gagactatttgcacgctttaggatgcgggtcagttacctaatatatttcacgtaataaacgcccttccatttccagacagtaaatattcaccttttcagtagccttaacaaaatgtgcacaaaaaatacccaaagatgcgcatatagaaagggtttaaaacaaatttaattaccagcaattgctttcggtctgtgcccacgcgtcatgaataacaaaaagagtataaacaaaagcaggacggtgttatggctaatagcaccaaacttgtaaagcatcaaatgtaaatcgatcaagcatacgccacaaacataaatccaagattccaataggcaatacgtgcacgcgagctaataaataccaaaatcatagtagtctcgataatattagcatcaatgagcgaggaagagggtgagaggcaggtagtcaatatatgatgatgatatatacaaggaaacatacctagaggaactggcgtctttggctgactgctggggccagctgatgtcgatggtcaggacagagaagcacaactcaactggacaacagtcctaataattaataaataaacaaatgggtacatctaaaattttgaagaaaacaaacttggaccgcttctgtgcttttctgcttacccttcaaggcggctctcgaggtttggacggtttcaattccttgccttcttcaataagc

SEQ ID NO: 38676 - DNA, 1091 bp, Oryza sativa
gggtcccacgcggttgacgttgagggatttttcacatgaaagggattttttaatatatatatatatatatatatatatatatatatatatatatatatatatatatatatatatctgcggttggtaattggaattggaaactattctaaggtaattggtgatttttattcgttttagaaattagaagaagttcggatttgtcacagttgcctaaacttcatgaagcttttatttaggcaaatatatttccatcaatatcacttgttctcaatattgcctacccgaaatattcgatgccataaaataaaatactgtagtaataaactaataataatcattttagtagctcaagaccttttgcaaaatagcccaattaaatcagtttttttttttctgtcgacgtcactttttttctgtcaatggcgacgagggaagaaaaaaacagagaaatcaaacaaatgcagcagctgagacgaaccggcaaatacgtgccaaacaagcgacgcttttctccctttttcctcctcctgattcgcagcgtccgaagtaggcatggtttgcctcacctggctttcccccacgtacctttcccctgcgcacgcgacacgtcacgccacgccacggcgcgcgcgcgggcggcggcgtcggcgcgtcgcccacgtacacacacgcttgtcgcgccaccgccatcctcgcgcgccggcgccgacgcttcgcggcgccgcgggcggacgcgcggcgcgggcgatggcgacgcgccgatgtgatatgcggctggtcggcggacggcggggggtttggttcgccgaggcgacgccacgtcggcgccggagtatccctgaaggaaagcgcggccaccaaattccagacaaccgactcgccgactgcatctcgatcacaaaaacaaattaatcatgctgcatggtgacatggtgtgatctggactctaaatagcatcagatcaaagagaccaattggtggtaatcatcaagcatcagagctagatttttaatcaattaggcagcgggtgagttctgggacgaatccatcgatttccatcaacgggtaccgagctcgaattcgccctatag

SEQ ID NO: 38677 - DNA, 1150 bp, Oryza sativa
ccgctgtgggttctcccacaaagaagacccttttttactgcccatgggctgaaccccattctgagctacagtgtccaacccatcgtaaccctcattttatatggcccaacccaaccctgcccttattccttcctataacccatacaagacacaccattttcagcccattagtgtttcaacccgtacaacccatgggttggctaccccattaccaggcttatctgtagttccccataaatatcttgacgggatgtgtttgcttgttgcaatattactttggcctagttggacagaaagggaagaagtctgttcattctgctttggtatattaatataacggagttagttacgttttcaaggatggctttcaattaaaagctgggccactggcctcttttctaaagaaagctatgttttccaaaaaaaaaaaaatcaatactccatgaaggatgatttcatggcagataaaatgaagcatacatgaacaaccttcatcaggaaaaataaattattaggcacttacctgtgtttacccaaagagaaagtcacttttatattgaaaattagaggggccgagataaagtgctatgttatgtagcaactttactcaaatcctgtcttttataatatacattggtcggaatcttggccgacccggcgaaaaaaactttactcaaccagtctgctattacaaatcagattttaatagctgcgtgctattttcggagaaatctcttgtatttcatttccaagtttgaacaatacaagttcattatgattttatacgctacataaacaaagaaacatgcaattcattagtaccttagaagggtaggttgaatataatataatataataatctgaccgattttattaatagaagtgtttcagttatctggaaatttaactttggacagacttgaatcacaaaacaaggacttcaaaatgcatattgtaatatttctgcactagtcaaaacaattcaagatttccacatcaagactttacacctagtggattccaaaatgcagagaatgtataaaaagagccaagagaatttgaaagctatgctggtttcatattccaacatctgtattatatacacatatgcttcataggtttacacatgcaacgccaaggtttagtcaag

SEQ ID NO: 38678 - DNA, 544 bp, Oryza sativa
ttataaatgtctatatacacgctctagaacaattggattttatttagttgaattttgccaggtgacattcgtcttgtctctagtcctcacttgattagtcaacactatagactcaaagctccaaataattggtgtgttgatttgccgggtcgattggatctaccacttcaatcgcagctatttctttgtgcttaattacctattcgcaatatctaattgcatttatcatgttcttgcagtgttctctcctttgcattgcagggatcatcaactgcgtgtcacaattggtacgacatcgttttatggtgtagcgattgcatgacatcctgaacttgctctggttgatagctacgtcgcatttgattgaagtgagagttatcccctcaccagaagatcaggctatgagagagagcttcatcaaggagttactacatgtggtatgggaagtctgatgcaagtgcaatgtgtgagccttctgcaacgtggtagcatccctacctaccataatagcaaagatcaaagaaaaagagccagtgacttcgat

SEQ ID NO: 38679 - DNA, 712 bp, Oryza sativa
cgccggtgggtgccaagggggtctgcgcggtgtgcttccggccgacgacgttcaggtgcaagcagtgcaaggctgtcaagtactggtgagttgtctgaattctgaaaccctcttctgagtccccctttgcatttcgtgaaatttcaccgggtgaaaggggaatcggaaagagagttctgcgattggtagtgcggatttctgtatttcgtagtaatttcggtgttcaaccttgaggagggctagtggttccagaaagcctggaatttgcgtctagttttggtttgcgcataacatgaccatcttgaataactgattggcaagtgagtttggtatggataaccctctatttagtcttttctttgtgcccatttgttgcatttgaagaatctaatgtggacatatggcattgctaacagaaacacagttttgaaagacattagcctgtgaatcgctcatctgtcatattcccaactaggatcctaatggctcaattctttctattacttttgttgatgatgatcttcttggaaactttactttttttagcctgacttaaagttgtccgtccattggctcggggcacatatattattgtcttttatttatgaatgaacttaggcacatgaccgggtttaagatgttaggatctcaatgtctaaaatgttctctagatgagaaaagtatcattttcacaaagcaatattatttgttg

SEQ ID NO: 38680 - DNA, 530 bp, Oryza sativa
tatacgatgataaattaggtcagttgattcagcaagaagaacagcataaaatatcaagtgatgtccttcttaatagtagttacagttccaaatttctgcatcatgcatgcatgcatgtagtagtatgatacggccaggtctaccaacacctgataacgttagattcttcaagggacaaaagatgtcgaacttgacgaaaggatgattccacgatcagtgtaggcctaccatgcgtccatgcatggcatggcacagaaacaaaatgaactcttgtgtaatgcgaaaaacatgtcgccgctgttgcttgtcggtgagctagttgagctgatcgctctcgccttacatcttttcggctcccgggagctggttccttttggcgagagcatgattgctggaacggaggcacgatcgggagcaagcaacccggaaaagaaaagggaaaagggggacaagatgcatcaccaagcaagcaagttttccccctgtggacttaaaaactgcaaaatgaaatggggtgtgatgccaagtga

SEQ ID NO: 38681 - DNA, 598 bp, Oryza sativa
gaatgagttgtgatcgagcttgtgactatccttataaacctgacaataaaacattaaatgctaatgttcactataagctcgtggtttggtcacaacagaaaataaaataaaataatattgctgcccacaggagggagttagttcatcgatcccttgaataaaaaactcccaagaagcaatattttctaaactaagtgggacctaacaggacccaccttaatttctctcacaggttttaaccattattatggagtttgctatagctttttttttaataatggatttttcattattagataataagactctatatctataaaagatatacacgggcaaaacatatataggtaattagattccaaccctcactaggagaaatacacaggaacacacacacataaaagaaaaactagctgtaaccctcattgacgacttattatttctattgcaacatgagagggcggaagtggagaatcgaaacagtttgtgctacctgtcgccacaccatctctgcctcgaatcacaatgccatctgctactaactaatgtgtctactgtcctacgccatcatccaaatccccttacgccgccgcattaa

SEQ ID NO: 38682 - DNA, 535 bp, Oryza sativa
tgtctacagttgacctgtactaaaaatttaggctatatttcagtttcatggtagggaaatttgaacagattagggtcaagaggatatcggcggagcaggacatgcccagttggcattgttctgtcccattggattgttacgtgcacaggagttgattttaaactctcgaggggatgtcttttcgttgcttgcatgttacttaaattattatgaaaaattttgaaaaaattgagaaatatattaacatgtgatatatatatatatatatatatatatatatatatatatatatatatatatatatatatatatatatatatatatatatatatatgtatatatatatatatattttttttttttatatatcacaaaaaaaaaaacgtgtgtgtgtgtatatacacgctctctatctgtgtatatatgtgtctatctcgcgagaaatataaagtatatattttttttgtgtggagagggagagatctcacacacgcacatatatttttatttatatatatatctgtgggggggggcg

SEQ ID NO: 38683 - DNA, 602 bp, Oryza sativa
attcctgcagcccagtcacgttgaagggtaacatcagaggatcatcttccgtgtttgggattttggacacggttataaaatacttttagcgagttatacctaggtagtactacatgctaaatttagtcattttttatggtatttgtaacgttacatgaagcttcgtcgatatgtttatagggtgggcgtttaatccgaccgaaaaattcagtctcgatctgttatttagaaattttggtcatttaaaattaaagatcgatcggtcttggacaccaaaaaattccggctttgtctaaatcatgaacgaaattttaaaaggtccaaaataatcaagcgaagtcttaatttctagattaaaaaattttaaccccaaatagacttttgactattatggatcaaattaaagcatactggagggttaaattgggtcaaaattccggttaattgggttggtgatcgaatactaaccgaattgaccgaataaaaatcaatctttcaacacctgactggcctatagaatgaaattttccggtccggctttttttgtccccccctatatgtgtaacactttaaaaaaattaaaagtgaattggggaaaccct

SEQ ID NO: 38684 - DNA, 684 bp, Oryza sativa
tgccattgaacttttgtgctgtcttgtttgcttttccacccaaagatattcggaggggaatcgtggagaatcagaattatttccgttgggaaccaatcgtatcgtctataggatggatcgttgctgatgaatcatcaaatgcttatatcatttgatagctctggcgcaccgtggactgtggctaatgaagtaccactactccattattaggtttagataccgtcacaagcctaactgacgggcggtccacttacacataacactgcacttacactttttcatcctcacctcgtgtaaaaagttaacccgagagtcgtctagggccggcgccatacgccatgccatgtgcctcaacatagatgccacatgagccatatgctcgcacaccgacccatacgtacaactgcgagaatcggctctgataccatttgtcacagccctccctccaaaaacatgtagcctaacccaactgacgggtgagcccacttacacataccactccacttacattttcgtcctcgtttcgtataaaaggattaacttgagagtgacatggttggagggaagaggccttctaagttgatttcaactttgctaaacttgcaaggtgggactaaacatgcgcacacagctctcatgagccacacatgccaatttcctaattgggccaagatgtcaagatac

SEQ ID NO: 38685 - DNA, 578 bp, Oryza sativa
aactagcaaggccatgtgtgatcgatgagtcgtgaagctgtgggagagggaaaaaaaagggttatgtgtgattgtgcaaggccgcagtgggaaatgggaatcagtgcggtaaaagtcaggtctaagttagccgcttaatcggacgtttatttgtacgtcaatgccacgaaccaaagaatcgggacgtgttttttccacggttttaaatctccggctacagcggtttgagaagaattatagctatttgctctcacgtacagtttagtcgctatagctccatttagcccgctataactaccgctatagctatttaagaagctaaccgctaaacattttaacctgctatttaaaataatggatttctcaccgccaacgcctgattgggcgatcctgcttaatcagccgaaaagcagaggattactcaccacttgcttccttctcgcgagtccgcgccttcgttcgctcaacgttgacgcccgcaccctgcaccttgagcagaagcacgaattaattagcagaggaggtcgacgagacgttaacaggaagcgggggcagctaggacgtcaggaggtgaccgt

SEQ ID NO: 38686 - DNA, 731 bp, Oryza sativa
ggcatgctcttggacttccatgttaacataattcaatgttgccatgttggcataatttcaattaccacttttacctgaataatctcgtctgttactaggctagcagattcctgagcagagtattagctggtgtgttgttcgttaattgggtggtatgaaaatttttagttgtttcgacgtcgcatcatgctgatagacagttgttatacaaacagcgatactacggcttggttcagttcccaacttttttttcaaacttttaattttttcatcacataaaaacttttctacacacaaacttccaacttttttgttacattattttaattttagcgaacgaaacacaccctacagctcgtggaacagatcgtgtgatcgtgtcgcaaactaaactactggttagaagaagaaggccggtgtaagttgaaacttcagaccaatagcaatcagttgactgtaacaacacactgatatttcgagcgagcgagcgtgaggagaagtggtgaaattcgcctcttgttcccgtcgtccactcatctcgcgacgacatgctcgagtgcttctgttgatggaaatcgatggattcttcccagaactcacccgctgcctaattaattaaaaatctagctctgatgcttgatgattaccaccaattggtctctttgatctgatgctatttagagtccagatcacaccatgtcaccatgcagcatgattaatttgtttttgtg

SEQ ID NO: 38687 - DNA, 511 bp, Oryza sativa
aagaccaatcggtctccagttttagatgaccgaaatttctaaaagaacgaagattgagaccagatttttcgatctgaccgaacatccacccgcatctgtcaccggcagagaggactggcagtgtcggtggacatggtgggtagtggtattggtggctctcggtggcagtgtcctaggggcggtggcggctaggtgagcttcagcgcctagatctgaccacggccaggcgaggacggggggtcagtggttgtcaatgattgggctagctgatgatgcaattgtcgttggcttgcctgacgcatatgaggaccatgccagcagaggctctcggtggtggcgtcctaaaggcggcaactaccaagcaagtgtcgacgccaaggtctagctgcggattggtgtgaacgacagtagagtacctttggtgagctcatggcagtaaaaacaggtgcatgtcatgcttgacgcttcacgacactctaggagtgatggcgagttcgacagtctgtgaaag

SEQ ID NO: 38688 - DNA, 645 bp, Oryza sativa
ttcgagctcggttcccctgtataccttggtctcagttgagtatccaagatgatcaaccaccatggaaaacattgacctacttaacatatggaaatcggcatggcatcgacgatgctacatctctggcaccatcaatcatcaccattggcatacatggtgtagaggaagcactataaggagcaccacaacaaaaaatacttcgtagagacatttttctaacactagaggcagttttaaaatgcctctagaatcctgtagaggaattttgagaatatcttcaacacacttaccatctccacctcatatcatttaagaaataaatcaatttatcaaaataaagcattttaattcacatcatttaatttacattttaaaaactttcaaaccttaccaaaaaagggccacttatactggacattaacttcaaaaaatctcctttaacattacttcaacccaaactttaaccatatctcccaaacaatttcaatacatattatacaacaccattcttacattaaatcaaaattttaaaaaatacctctacagaagttaaaacaccataacaaaattcctttacatattaaacaaatattaaaattcacaaaacattcctctacaacattaatttaacaaaatatactaaaa

SEQ ID NO: 38689 - DNA, 586 bp, Oryza sativa
tctaagtgaaatgaagtgcaactctcatgcgttttctaaaaagataatacagttatagcttgatatttaaaattgtggatggttattttcaatcacatggggggacaagtgctaaaacggtgtcactagtatacggatcactgccctgagcgccgatggcaataaataaattgtagaagcaacaattaagtaagtatcaaatagttaactgcatatttttgggtggcaaataattaattttatagttaatccacgcagagatatggtccactcattattcacaacaattaattttgttactttctgtcatctttgtgatggatttagaactcatcatacatgcattactggtaatttggaaagatctatttgaaaattttgatggttcaaagaatatatgcataaacttagccttagccttgcagcggccggctccaactttacgtagatggtgctctcatatagctcaaaataaaattgggaatacagaaaggcatagtctagcttttgaactcacattttcctgcaccacgtatctttattctaggaaattaataaggccagaataacaaaaagctggacagtt

SEQ ID NO: 38690 - DNA, 544 bp, Oryza sativa
tcactaggccaactgttctagctttgctagcatcttattatctgcagttgctatcagccagttccccctcgtgtccatgaacaaagctcaatcttcagatccacaccttactggtcctgcaatttagtcaggtgggagggattcaagacacaagcctctcacggtgcgaagaaagtgaaaaatgcaatatagccggagcagattgcagttgcaacaaccttggaaaaatatggggagttgaggactaagggaaggttagtaagtcttctatttctaagaaagtcaagtgtttaggagtttgaggatcaggatgatcaagctggaccaagttctaggaatagcaatcataagaaactgaaagatagcaattcgtatggtcatattatggagattgataaaccagtccaacagagcatctatctattatctatctatctatctatcttctattatatactaaaagtccattaaacttcctaaaaacgctcttaagccgccacgtggcacacctacaaacgggtaccgagctcgaattcgccctata

SEQ ID NO: 38691 - DNA, 2587 bp, Oryza sativa
catgaataagaatcaacacaagtttgactgctcttttcgaaaagaaattaatcagatacgagaaaacgtacctgttaatgaacaatatatctttcaattaattttgttactctgtggctcacatgtagtcatgaaaagcaagatatatataatataatatgtacattatattcccgacgtcaataaagcaagagaatgtattgtacgacgaggatcttctgatggtcaaacatgccctgcatctgcaactcagattacattctgttagtacatctcagaagcatctctcctttgacaacttgcaataagcatgtccaggttcagtgtattatatagttactcagtacaattctacaacattcagctagaggttaacaaaatatctaataaagatatagagattaaaataatttctgcactaaacatggagctgaaaggtagatctagctagctagctagcaagcaagcttttttagtcggcattttcaggaatctttgcaagtcagttctattgtcatacagaatcaagaagatccaggtgagcgagacattcacggccgtgcgaatattccttctagatacaggttattagcaaccataagctaaaagaattaaagcaattaactggcgaataagagaggaaaaacgatgaaccttttctcctctctcacttgatcatctcgccgtcaccttttcccactgatggttaattaatttacttatgaaaagttgaaccctttttttcttctttggctttttagtaatctatttgaacaaacatatgcataggaatgtgctatatatatattaacttaatttgttttctttcatggatgttatataaagtgtttgggcaacaaaaaataagatcactgtgaaattttaagcgttggaaaacagcatccaattaatgtgatatttgggaaatttaagttggtaatgtaccattcatactacataaacgatttttctatacaagagcccctatagattgcagacagaccataaccaatggcgtctataaaaatcaagctccatttttgcatgcggctccttaagagatatgcgtgcgaaaaatatattttcgcaggcggatatgttaagggaacgcatgcaaaaagtgagcctatttttgcatgcggtcttcttaaaggaccacataccaaaatagattaccttcacagatgttttttctcctctcttttccctctcagacacatcaaaattttcacttctcccctcaatttattactttcacctctctctctcttcctctctctccctctcctctctctctcttcctctcctctcttcctccgatcggacggtaggcgggcggcggtggtggcggcggcggctccacctcctcccccgctgggcgactaaaccgccaagcaggcggaggcacgggctccaccccctccaccgcttagcgacctcggacggccccaacgctgacgaggaggcggccgagagcgggtgggcgggaggcgtggctatgggcgcgaggcatagcggctggcgcgtgccgtggcaggcgggctggaggcgcgacagctccacctcctcctccactgcccccttccgcgtggatctggccgccggtccaccccacgcgcacgaatttggcaacggcacgatggatctggcgcgggcgacagtgagagccgtggtggcggccggcggccatctcaacaccaccgccgacgaggaggtgcccaggagccagcggctccacatcctccatcgccaggcgactccaccgcctctctctcgcgtggatccaatggtggcatggcggatccagcaacggcgacgacgggaggcgcgacggcgggggccggcggggttagaggttgggttttttttggaaattttattttatttatcgcgatcttttatttttgcatacggtcgatataaccacccgtatgcgaaaataggacttccgcatgcgggtgcaccacctgcgcgcatggaaaaaacactatttttgctaaccttttggtgcaaacggctggcttaaccacatgaaaaaaaatatattttggccgcacggaaaaatggcttttgtagtagtgcatggccggaccagaaaggcatgtattgtttaccgacatttattatatgttgattcactagtgaataccggtgggtacactggaataccagagaactgatctttcgtcgaatggctcaaaacagaaatatctcggctcttataagaaccgatactaaagatgatttttactaccgggtaaatagttccgtcccgctgtagaatatttagtgctagttggtaacaccaatcagtactaaaattggtttttattactggttcactgttttcaaaccatgttaggtcccccggtcggcgcaagggatctttagtactggttggtgtcaccaattaatactaaagatctatactttattacaggttgtacttaaaaatgcccgtttttttgacaaattgacccttttcaaaaacttaattcgaaactaacccctgccaaaaacttcaaccaaaactaggccgtcggctcagcgccaagcgcattggcgctgaggttggccgtgtcagcgc

SEQ ID NO: 38692 - DNA, 762 bp, Oryza sativa
tttcagtatttttcatctccttgccccatagatttggaagttagcttttgatcaataataaactgagttttggaatatcacgttacagtagttgagaaaaaatacatataaaaccattcaactcatgcctctgcaacaggtaacaagcttgctctttgccattaaccttatcctattttgttcatcatgcataaatatgatcctgttttctatcaagcactatgatggtgttttatatgagatctcaaactctcaatgtactcaaagtaaagcattgctattattatattccttgcaaaaagttgctacagtatcatccagaattttagactgcagtctctgttgcctctgtttcccttcttttcttactatttttttaatcacataaagtgtacttgaatttttaaattttattttaatacaaatattccgcagcaacatgcgaggtatcctctagttgaatagacatgcactacctctattttataatttatattataagtcgttttgattttttttaaccaagttaataaaaaatatagcaatatattaaaaaaatatcaagttatgttccatgttaaatgtaatgaaactaattttgtattataagtgttgctatatttttctataaacttagttagttaaacttttaagaagtttgacttagagaaaaagaaaatcaaagcttgtaaaacagtcttaatcttaaactgagggggttattaagtatgtaaataggaaactccacgacaaataaataga

SEQ ID NO: 38693 - DNA, 585 bp, Oryza sativa
ctccctccttgccgccgactcattacctccgccgacggctccctcctctcccacgtgcgcgcgccgccggctatccctcctcgccgcttcacctcctcgccccctctgccgccggccacgacaggcgacgacgacggttcgcatccagccgccggctctcctcgttgacgcgacgatgacgccggcggcgccgacgacagtggacgaggggagccctagccggcggcggccgtggtgaggccggtggcggcgccccatgttttttttttatttttctgagatgattttcgcaggcgggccatgggtccgcctgcgaaaatagtctattttcacaggcgagatggtagcggcggtcctctcccccgcctacgaaaatggttttgggccacctgaaaaaatattatttctagtagtgaaaatccctaaacccttacccttgcacccttatacaacggtactgtagcccatgtgagaatgaccaacgacgccttagacctgtgctttggcatggaataggcgagagaatttttttaaccccagtctgaaattcgctccacggtagtcgaacccaggacccgaggagtg

SEQ ID NO: 38694 - DNA, 521 bp, Oryza sativa
ggatgatatgctaatggttctctttgttgtggagagagaagtctggggttggagtcccaataccacatacacatataatttgtattaaaaatcatggatttgtggctaatgatgtgtaaagttaaaataataatttttaggcctttttgtgcatttataattagaaaaatcatgacatgttatcgtagatggttcataactattactcggaagagacgactagtctgcgatgggtggtatgtaatgatccaccataactttaccacccacgacacagatgactcatctgtggtagttgttcacggatgaggtttaattcgtcgcagatgtgcgttattacaacccatcatagatcaagggttctgtcgtaggatgtgatttcaatagcaatgtaatgaaatcagagatttaccactgcttttgtctcttcgaatgtgtgaacgtgtattaggagagcacatgcgggtgtgtgattttggtacacatgcataatgatgtctgcatttcttctatgtaatagg

SEQ ID NO: 38695 - DNA, 636 bp, Oryza sativa
aaaaattaaaaaaaattaccataccatagacaagcaaaacatctctttactttaaaaatcatagaagttttcgctgaaccgatattatagcacaatgttcaaatgaagctataacttccaaaatatattggaaagggatattacttcttcccatcacatcttaatgtaaccttaaactattattatatattagaatcaaaagtgaagcttcactttagattttgtggatctattgccaagtaatatgcattcagactagagttttaaagtggtaacattaaatagcccagcatgatatttattgaacctactcattaagaatgctataaacagtgaatattgctagcaaaaaacatacccagtttggcggatcttttttagccacttccttatctcattttccagcaactcttcctcattcatatctagcatttcagtagtttcttcaataataccaaatggcttctcagcttgtataataaatttagctccttcaagtttttctgatacgttagaagcaacttcatccgtccaaagtgaatgcacatactgaagaagctgcaaaaaaaaaagaacagttgtaataaatatgaaattactacaaataactaaattcttccgggtatgctataatct

SEQ ID NO: 38696 - DNA, 990 bp, Oryza sativa
cggtaggcaatgatggagagatcgccttggataatggagtggaactcatggtgaaggaagattgcacgtggttccttgttcacttgaaagaggtcggcgatggcgagccagagggcacgagccgtctgatccagctccatggcgaggtcgagggtgtcgtcggcgaccgagccaaacagccagctgcggatgcagaaatcagcttgctcccatgaggtgtcaggatctgcaggaggtgcggagtcgaggtggtcgaggagaccgaacttgccacacatcgagcggaataaggtcttccacttgttgaagttggggttgcgaagctcaagggagatcgggacatgagtcttgacggagatggtcgtgtatgggttgatgaagatagtcgcgatggcgttggtggaggccggcgctatagaggtgccggtcgcggtggaggtggcagaggacgtcgacatggcgatgaggagggcggcgaccagcagacgacggcactggtgtagcacacaaaggaaagttcagagatgcggaaggaaggaggagaacttggaattgataccatgtagagagaataggagggaacaccacactccccaatgaggggggtgaccatatattatagagatatttaaccatttaccacatttagatgtggcaaataactttttgccactgaacccacatgtcatagacacatgtggacccacatgtcattgagataggggtggcaaatagttatttgccaaatctaaaagtggcaaatagttaaaagcccctatattatagcctttccaatatacaagatcctcaattagaggagtatacaatgaatctaaggatacaaaagaatcctatacatatatggccgttttattgacaaattgacccttttggaaaacttatttcgaaactaacccctgccaaaaacttcaaccaaaaataggccgtcgcctcagcgccaaacacattggcgctgacgttggccgtgtc

SEQ ID NO: 38697 - DNA, 1853 bp, Oryza sativa
cttttaagctagcctctatgcagctgaccatcactagtttaaaattatcatcatgtgatcgaatacctatatatgtattaaggctagttacaattaattattacgaacaagcatgcaataaacaactccctccatgacaaaccaaacactagagacaacacattgtattatggtaaatgctgaccttgattgtgctatttgcaactgagaaattgtagaagagaacagttatttttccgtgtcctttctgtgttgcatgccattggattcatatggagttcatgtcatcagaacaccctcgcactcacttgatcactgataaacctttagtctgaagattcccagacgatgaacagtgatctgacgaaactgaaaatctgaagaaagaacagagagcgagctagagcaagtttgttcgttccttaatgccttgcagtttttcaggtttacttctccttttcacctcccatccaggtgtttgacatatatagatcttgaatgaacggaacactggatcgagtgatcctgccatcccacaatatttcttccagcctggccactacttataactgagaaaaactgaaatactccctccgtttcaaaatatttgacaccgttgactttttagtatgtgtttgaccattcgtcttattcaaaaaatttaaataattatttattcttttcatatcatttgattcattgttaaatatactttcatgtatacatatagttttatatatttcataattttttttaataagacgaacggtcaaacatatgctaaaaagttaacggtgtcaaacattttgaaacggagggagtaatagctagtgaggctgaccgaatcctagactaactcagttagcctttttcgatcaccaacacctaatgggatgaacgaggccaaactcagctggaagcaacccaagccgagcagagcaagcattgtagagcgtattcacatcactaaatccataaaaaaaaacataaaatcacaatcactaagacatggtgaagagattcaccatccaacaatattcaggaatcaaaatcgaccaaaaaatttactaaatcacaatcactaaaaaaatcacggttcatgccatgttgtcctcttcgattccatccccaccggatcccgcacctgcacaaacaacaagaagagaagggtaagaagaaaggaaagtgaagaattgggcaaatccaaaatgcaagtgaagaatcccaagttagcaaatccaaatcaaaccgggcaatgccggcggtggaatgagcgcggaatgcgtccatctccacgtacagtagcaccaccctgacctcgatgcccccgccgtccctgtcaccataacggccgctctccgccagtgccagcgcgcccgtccactccacctacaccccatggagtgttgacatctgctctttgccagtgccgacttatttgcagcggctgatacacccacccccgtgctcacggcggcgtatgtggccacccccaggcgcgcagcagcaggtccacacgccccgatgctcgcggtggtggatccagacccgtggtcgtggcaatgttagtcggggcaacggaggaggaggagacggtgacaaggtggaggacgtggaggacgagaagaatgggaggaggaggaggaagaaggggctcagatggggctcgactaaataatgtcggctggctcggttggccgatttttattttttattttttaattataggtgtgagtttttttaagaaccagcacctataaaattagtataggtgtcggtttgtctggaaaaactgaataccggtttttacgtagaaccggtacctataggttgttacagatgccgattttttt

SEQ ID NO: 38698 - DNA, 508 bp, Oryza sativa
ttactttgcagctacaaatctctaaaacaccaaggccaccattcatcctaggtttaaatggagcctatgttgaagttatttcttaatttctttctttgcatcatcagaatttttaacatagaccttatttgcaaaataactagttatacacatgtatgatgagcctcaatttcgatgaaaacagcatgctagaacatactgaatttaattaagagaaatgagaatggcatggaaggtgatatctaaatctagatccagagataacaacctcgctccatacacattacatctttgaaggctttcaaacctgcattcagctatgctatctatcaagacatacgtacttgtaatatgaaaataaattcgatagaatctcagctatagtttgcacgtatatacctatatgtatgcatgtcacaataatattctttgtttccttcctattttttccattaaagacatcctaatagtgaatgcagacaagcagttccaaatagattagtggcta

SEQ ID NO: 38699 - DNA, 1074 bp, Oryza sativa
taatgcggggcaacaagtatcagtttcccaactcaaatacatgtgtaccaggtcaaaaaaaattacacatgtgccactgtgccaacattataaccacaactcacttatgcatttctttaattgaaagaacattttttacgtataaataattacctccattgtatcaccaatttcatccactttgtgcaacatatcaacataggtatgaagataagctataaattcttcttcaatctgattggagaatatatatatatatatatatatatattggtcaagtaaggaaaaaattcattcaaaatcatgagcatcaaggtagaaaaccaaaaatagaagaacaagaagaaatacctcccagatccacaccatgtcttgaagttcatcagaagatgtgtatttataacgagccactatcatttgctttgacagccaatcttcaaatatttctgcagtgtttccattgcgttcaccttcctgtgctgatccctaaaataaaaaaaaatgcttgagttgagtaaatgagttccttggcctaaaagaacaaatgtgccaatataagcactataaatattgcccaatactaataattatattaatatgacattgcttacaaaaggcatagaactcacatatatcaacccagataacaaataatggcagctgccaaaatggagggagtacaagaattgcatgctaatgaattacctggctctgcatacaatggtatgcatcttcacaaagaagataaagagcattgttatctgacttcggctcgagggttaagcattgtacaatctttggaagtatatcatcttgaacaaaatatagaagttcatcattgtgcgtagcaatagcaagttggatcaaactatgacaaaatggtgcagctataatccttgcttcaccatccttccaatagccaaagatataattgattaaccttagtattgaagatctaatgttatcatggcataaaagatacctacatgtgaaataattcaagtgttatttatattctaaaatacaataaaataactgcacaaaatctcaaaatatactattgtcgttgtaagc

SEQ ID NO: 38700 - DNA, 1637 bp, Oryza sativa
tgagccatctttcagaagagctcgggaaagaatcagtaaagtaagtaacactcccttacagaagtagtgtaagtattttttttagcactgtatccaagttgatatggaacaacggtacaggtatgaagatttggtgtgggaacctggattgtgggaatcaagcactaaagtgcaattggttagagatgtttattggtgctacaacaaaaacaagaacagaatatctacacttaagaacaaaacagcccttggactcaaaagctttattgacaagttggaggtgaacaagtctagagcaccagacaaacaaatcaatgacgacaacttgtatgagtctctgttttttcttagagtttacatggttgcccacaaagacgatactattaaaggttacagtggcacaatggtgagctagctgttgttgaaattttgttgattttgcaattaatttgaattagtatgaaattgtgcattaaaaggacttacaatatgttttatgtctgaactctaaagtacaaatacttatatcctgatgagctttatgttctactttcttttcttttttacaatttgccatacattgtgtcatacaggaaatgatgcatgacaagaaagccattgtaaggttgcttatgatagaacgccctgaatacatggtgacactcatttcagcaatacggaagttaggctggattaggcaatctccattttgcgcagtaagaaatctgaaaatattttttactgtgttacttgttcaacctagtacttattatattatattcatgcgtgcagtggataaccagtacatgatagagttttacaccccaaatcctgcaaagtgcttggtatgcatacaatttcttcttatactcttatcaagctgattctttagcttatgctcctaaaaaaatcattccctttctttactctcatctaattatctaacaaaatttgatctccattcttgcagctatctcttagaaggattgggatcccatgcagtttgaacagggactgcaagtttagcagtcttaggtattcactaccatcagatcaaaggtttcaatggcccggatttagtagcagtactgtttgttagcacttgctacagtatgtgctacaggattcatctgctacagtacctgatgaacagtatttttgtgtgatctgagtccttgttatttgatccaacaatgattgtatgacttgctgaggaaaaaaaattggtagatggcaaagtttcaacatgcatcttgcagtagctacatggaggttgtacttcttagttactccctccgtttcataatgtaatactgtccacattcatatagatgttaataaatataaacacatatatatctagattcaataatatgtatatgaactggacaatgctagaaagtcttacattatgaaacggaggaagtacatattttacaccaaaggaacacctgcggcagctgattgggtgttggtaccaggatatttggcgccgaggcgctgtgctccttctcaaacttgtagcgtgtgttccatctcattgaccattttaagaagctcttttgattagagactgttttcacatgtgcaacttgacgatggagtattggagtagcatgcttggctttaagggttgg

SEQ ID NO: 38701 - DNA, 529 bp, Oryza sativa
aattcgagctcggtaccctaacccaacacagtgtaattggttttcttttccatcaacaggttggttattaacgcgaggttagaatatagttcctctgacacgagaccctaggtctcctttgtcagtaaacaattatacacatgatcacatatccgcatcttccaaaagaatcctcttagaacttgtctgtattacacatttctcccttattatacgaatacaaggccctgcctaaacaaaaagggaaggtgcttaacatcggtacattgtaccctcaataggaatcatccataaacatagcaagctcactgtttatagacatcaatatgtttatttattatatgatcgctgcaaactttcgattacagtgataagtagcgaactgaaaaccacaagcgtagctgctcattttgtttctggagagatatagctggcattgttctagtgactgcatcatccttgattggttctgtgatgatgtgataggactgcatattgctatcattcataggagaagcttccttctgat

SEQ ID NO: 38702 - DNA, 1408 bp, Oryza sativa
cattaatctgccatttgcaatggcgatcgagacaagccacagtatactttactgacgcgttagattccttcacatggtacggccggtggacacggatagaataactctgtagccatattttcagatcatccatcgatcgaaactccaaccccttccttggttcatcacacattggttcgaaggcaccgtcatattgtggatccccatcagcaattgctagcccagatctggtaagatcctcgaattgtgttatttccgggtttctacccaccagtttcgcaaacacagtccttacgcactggacgatcatcatcggagtcggaagcggactcatccaattcatcctctgtatcatactccaaccagcctgggttcaatccactgcgtatcatagcctcctcacactcctctcgggtatagaatttcagcctagccaactcccttaggcccatacttacattcttagcattcgcttcttcctcaggcaactccacatcatctcctacctcccgaccatcctcaacatctccttcctctcttaccggcacattctcctccacattaacttcctcccttaacggcacattgtcctctgcacattctcctccacattaacttcctcccttaacggcacattgtcctctacatgtacttcttcccttaacggcacattctcctctgcatgtacttcctcccttaccgggtcattctcttccctgatgtcacgtcctgataaattcatcccgaattaaaaatcattcgctaaaaggaataatagaattaattaaaattcgaaaagaaattggcaaacattaaaatacgtgcaagaaaaattcaaatgtggcccggagaatttttgttaaattctccttggtcaaaaaggagccctcaaattttagtggaattttcagagcacaaataataattattaagaaataaacaaagttaaaatgagtttataaaaagaaaaaccctaaaaagtctttttcccccccttcccctcttgggccggctcggcccacctccctccctctctctcctctcccccgcggcccaatcggcctcctccccgcgcgcgtgccgctgacgggcgggcccgcccgccaccctcgctgacgggtggggcccacctgtcatccctgtcctcccgccgctcccgccgcctcgcccgtgccctagcgccgccgccgccgcggattccgccgcatcccgccgcccccgcgcgcaataaagagggggaaatcactccccgtgattccctcaatctttccccccccacttttccctctctctctctttttcggattcgtctggaaatcctcccgcaaactttcgccggcgtcattgatggagccgaaatagccgcgccgggttgcttcccctccggccggcctctgttaatcccaac

SEQ ID NO: 38703 - DNA, 601 bp, Oryza sativa
ccaaagatgatttgccaaaagaggggtaatgagaggtacttatggggggtcctaatagcgtttggaaggagattagaggtgtgtttttgtgttttgccagggctactttgggttgctccttgcatcatttggttatccttgcatgcaccttttgttgtgccaaattatttttcaatatctttggcacattctctgccttatcttgttagctagtgtctagtgatgcatgcctcctgcagttgtcagcagcttcagagtatgtgtgttatgtgtatgaaaccctaaaccctccaatcatgatccaggatagaaaaaaatcttaatttgctgatgtctagctctactgtgcatcaaattgacccagaaaatgttgtatgctaggactaataaatttccacttctttcaaaaggaggactgaattatgtgttaggactaaatttgtagaattgtgccaaccaataaagattgttgtctttcagcatatactataataagcaaattgtgttatttgtcaattcaaatggagatatcattttcattcagaaattttgcttatccgtagttttttagcatactataataagcataacaatattgcct

SEQ ID NO: 38704 - DNA, 650 bp, Oryza sativa
ggcggtgacgccggcgagagggaaaaaggaggaaaaagggggagagaaaggggggctcgcccctttcttctttgggaaaaggaggagggagcggaggcatcgcggcagagggaggagggaggctttgcctccgtcccttggaggctagcgcgggagtggcggggccgaggcgatgacgacggcgatgacggcgggcggtgtggagcggagcggcaacacgagcgacaggcgcggcaggcactgacgacggcggtgaccaggcggtcggccaccacggcacgcgcgcgcgggaagcaacgggcggcgcggcggtttgagcggcgcggctcgggcacgcgcgctggctaacggagccgggcgactgcgcggcagggcagcggggccaggcggcacagacagcgcaggcgcggcaagggcggcgaccgcgcgggcacgtgcacgcgaacacggcgcgcgggaagcggcagcgagggagcggagagggaggactcggctcggcgcgggcggctcacgcgcacgcgcgcgggcagagcggagggaggggcgctgggcgcggctcacgcgcacgcgcgcgcggcgcgcgggcggagcggaggggggagggggggagagagagagagagagaggacgccgggagggagggggagatg

SEQ ID NO: 38705 - DNA, 599 bp, Oryza sativa
ggtctgacaccgcctaccatattttggaaccggaattaaagatcaaaacgtacccctggccttttgaaccaggactaaagatattctttagtccttgttcctactcaaactgggattaatatagtttttggtcaactcagcaaagatggttttttcagtagtgtacctatagcctatctgcagtagtgaggtgttagctctgttataagacatgcaactgaagtgactcatgcattgatcatgaattacaatgagacacgatttatagcttgtatttaataaaactatataatttgtctgaagcgagtttagggaaaaaaaagtttactcccaacaaaattgatgccctgctttagttagctactagcgtatatacatacatggaaagtctatcagcccgttttaaatctttggaactttttacacacgatcaacaccatatatattcaacaactgcagaaaaggacacgactactgcagaaaaggacactacagcgagaatgctagctggatagtgctaaagagagacaccattctttccaaaaaaaaaaaactactagtacactcaatatctatgtatttttttccttcttagagaa

SEQ ID NO: 38706 - DNA, 540 bp, Oryza sativa
tcctttggatgttccagcacagcagccaagaaatcaagtacaagatgaagaacccgagcataagaaagttattgtcagttacaactgcagtacctgttaaagaagcggacatgccaatcgccaagtggtcactggagcaaatgcagtacctgttaagcctagcactagtcagaagcaaccataatactcttatatcagtgttcaaatacttttgttttatagttgttccccatcaatcatgtaataacagagaaacatgagataatgaatgagtttgataagtttattgagggatccatgttaagattgcaagtgctgggagttgtgtacattttgttgttgattagggagacctagggtctcatttctgtaaactcataatctattataaatcaaataacctagcgattgatggcgaagaaaatcaagtgatcaaccaaagagacatttgtttggactgagagtttcagatgtgtcttcttcggatcagaggcatgcacccgttgtggagaaactggacacgttgctggcatgtgtctc

SEQ ID NO: 38707 - DNA, 528 bp, Oryza sativa
ttttcttcagaaagaaaatgtgcaggtttggttttctataatttttctagagaggaaacgttcaggttttggatgtttttgcttggaataagtccactttgactatcttaaatatatctctaatctaattcatatcccgtaacaacaataccggatatcttgaccccctcaaatattacaactggtataatttaactccctcagcagttttggaggatgggtccgctgacatggcgctttgaccgggtctatctcgctgggtcatcctgtgggacccacatgtcattctcacactccttcccttttttcccatttctctctctccttcatcttccccattcgacttcaatacagtgggctgagggacgatgactccaccacccgtgccgtgaggggaggccgcagcctcgtcatcatcgtggttgctctccacatatctgaagctttcgagcctccattctcagcttcccagggcaagcctcatcgatctgtagcgttgtatcaagaagcagcgggtgacgttctatt

SEQ ID NO: 38708 - DNA, 549 bp, Oryza sativa
atgtggaggagaatgtgcagaggacaatgtgccgttaagggaggaagttaatgtggaggagaatgtgccggtaagagaggaaggagatgttgaggatggtcgggaggtaggagatgatgtggagttgcctgaggaagaagcgaatgctaagaatgtaagtatgggcctaagggagttggctaggctgaaattctatacccgagaggagtgtgaggaggctatgatacgcagtggattgaacccaggctggttggagtatgatacagaggatgaattggatgagtccgcttccgactccgatgatgatcgtccagtgcgtaaggactgtgtttgcgaaactggtgggtagaaacccggaaataacacaattcgaggatcttaccagatctgggctagcaattgctgatggggatccacaatatgacggtgccttcgaaccaatgtgtgatgaaccaaggaaggggttggagtttcgatcgatggatgatctgaaaatatggctacagagttattctatccgtgtccaccggccgtaccatgtgaaggaat

SEQ ID NO: 38709 - DNA, 1130 bp, Oryza sativa
ccctcacagactaacacatgtcttttctgcacactttgtcctcactcgtgtgcacccgggaagaattcccccaggccgggcccgcttacatctgatagctttcataggtcatagactgctctcacagactaacacatgtcttttctgcacactttgtcctcactcgtgtgcacccgggaaatgtcttttctgcacactttgtcctcactcgtgtgcacccgggaagaatttcccggtcggtcacccatcccaaattgctccaggccaagcacgcttaaccctggagttctttggagattggctgccggaaaagaagttgcaacttgttgatatgaatattctattaatcctattaagccctaggccggaatgttacaccctcacccccttaagagagatcgacgcccccgtcgatcaaccctaggccaggaacgtcctctcttggccacgtccatgtgtccagtgccagcgcatgtgccatgctgtgtaaccactcccggtctacactagccatgcgcaccatgcctgcgcaactgcgacacacgcgcccgtgaaaccgcgagagtcggctctgataccatctcttgtcacgccccgaactagtcccgactggaactagcccgtgacgctccaaattaacctgttaatcgataccagtcccaggaaatagtgctggtatcacaggaagacagaatatcacagcaacagaggtctctttattatagagtaggagtacagtcatgttgggctgtggacagatcccgagctcacaactgcattacaaaaggaaagcggaagccaggactagaccaaacaacacaggcgcgacttgggaactaggccgagaccctaaaactcatcgtagccggcttgctcctggaagaactcctcatcagcaggatccgcttcatcttcttcagcaactgggggggattatttatatagagcatgggtgagtacgggagtactcagcaagccatgggaaataagtgtttaatgcaggcttcaaggaaaggctgttgtttttgcaattgattttagttgaactcttttctaaaaacaactgagtgctcctcaaacgacacggatgagacagtgcgtctcgtccggtcggagtatgtgtatcagct

SEQ ID NO: 38710 - DNA, 675 bp, Oryza sativa
gatccccgtgagtgttttcgtaaaacgagtggtattaacgtatgattaattaagttttaattattacaaatttaataaatatatttatctgatattttagagtcacttttatatagaaagttttcgcacgggacacatcgtttagcaatttaaaagcgtgtcacaaatatccaaattttcatccaattttgttggagattgatggaggcattcactttattagcgatcaatatgcatatcttaaatttctgaaaattgacgataaatctgaaatttgagtacaaagtgagtgggttgcacaaggccagcatcgggaataaacggttcctactgtttgccacatgaataagaatcaacacaagtttgactgctcttttcgaaaagaaattaatcagatacgagaaaacgtacctgttaatgaacaatatatctttcaattaattttgttactctgtggctcacatgtagtcatgaaaagcaagatatatataatataatatgtacattatattcccgacgtcaataaagcaagagaatgtattgtacgacgaggatcttctgatggtcaaacatgccctgcatctgcaactcagattacattctgttagtacatctcagaagcatctctcctttgacaacttgcaataagcatgtccaggttcagtgtattatata

SEQ ID NO: 38711 - DNA, 569 bp, Oryza sativa
atcaaggttattacgcattccaaaagtaattaacttttcatcaactaattaataacacatactacaaattaattacattactaaactaactacattaattataattaactactatactactcctgacatagtctcttcgctagtagctcgcctcccgaaggcgcgctggccaccatgcgggctgccatgcctaccacatgctcctctatgtgcctcccgtcacatcctcctctgtgccagtcacatctcctgccacttttttccttgttgttgatgtcctcctcctcatcagagtacaatggcactattgacctatcatcgaaaaaacgctcatcattggtgtttcatagttcttcctcagtggaagcgctagcagggggaggaagtagtccgacaatagctcagggagctcctcttcctcatcagtggtgttgtaacaaagttggtgcggcaagtccatcatggtcgaaggcatgcgagaaagaagaagagaagagtgcgatgagaaaaacccacccatattgccctctatttactgaatatgaggagaggggaggtgaggaggtgga

SEQ ID NO: 38712 - DNA, 540 bp, Oryza sativa
caccatcgtgtgtatatattgaccaactgagcaatactagtagtcgccttattttgctgatgtgtcaatatatatgatgttggctgataatataagaaaaaataattcgtagtaaacataacggtacatatcgctatttgatgcttctttttggtgttcgatctacgagtaatccaatatttaacatacacacaaaaataacggggccacctgcaaatcgtgtgcctaattttttggcaaaaatcaggcgctattccaccaaatagatcagaaatgtttcactaagtagatcaaaaatgtttcaatcatttaaaaagctgaaacacaaccaaatcacctcatgaaatatttttctacaacgtatgaaacaacgtttccaaaaaatcgtacgctgtttcaccctatataaaaataatattttaacaatagcgaagaatgtttcaattcttaaaaaaagtggaacatggtcagatcgctagatgaacatttggttaaacgtatgcaacaaatgatttaaatccattgcaacacttaaatccc

SEQ ID NO: 38713 - DNA, 586 bp, Oryza sativa
catgcaacaacgaagaaactatattccaagcacaagttcgtccctacttgactcacattagtataacaacagtatccatacgcatagaaaccatctagaagccaaatccccaaaggaaacatgtaaatacaacaagacaacccgaaaccgaacacgataagaatcctgccggtcagaccatcaggtcggctggtctgaccgctgcaacacctgcagtctggccggcggcacccggctggtctgaccgccagggtcaaccaaaaaccttcacttcacaaaatcaaccgtctacaaaatctccaaaataacatcagcaaaccaccaaaattttcaccgcaaaatctaaatcaactcattggttttacatgttataaagatgtgcttagcctaacatcatcaccttaatataatgtgaaagagaagattaaactgactaacattgtttaaatctatggatgcgacctccttctccttctctgcttcttttggtgtcgatgtagatatatgagtcatgagtatgagatttcttgcttgatcccctaggcaatgctagcgatcgacaagtgggtgatggtttcactctgag

SEQ ID NO: 38714 - DNA, 936 bp, Oryza sativa
taatccaaaagaaaacatataagaaatctatttaaaaaaacaaactcgcatgctaacttgagacgatcggactcctaactgcaacttatgattttctaaaaatatatatatccaagcgaactcccgtaatgaattttatcttcactaaatcatataacaataatgggattaatatagacttcacccgttataacgcacgggcattttttctagttttatagtaggtaaagatttagactaaaagtgtcccagcgttgcaacacgaagaaaattgaggaaaagttaaaaaatatttatattatataattaatcaaaaatacaaattttactatcttctttatataaagaatatatatatatatatatatatatatatatgtgtgtgtgtgtagaactactatatggcgttacaggcgccacatattacatggcgcctaacacagccgcaccaccactctgtcccatcttcccccacccaccacatatttgagttaaaatttaactcacgacaccccacacctatgccctcccccacgcccataatccaagttaaattttaacttggtgttactcaacttttagtgtatatatataccagtgttgtacatccaccccgtaaccaatcacatatccagatcctattttttcgaagatgagagcggcgagcgggcgtggcggctggcggtgccggcattgggcggatccggcacggcacgactggcggcgcgacgtcgagcgccacctccactgccgagcggcggcgggcgcgacgtcggcggatccggtacggcacggctgcaggcgtggaggtgacggttgacggcgtgtaggaggcgacgaggcggcgcacccggccgccgatctgcgccccacgcgcgaggatccggccatggtagggcgtatctggcgcgatgacggatccggggataatcctgc

SEQ ID NO: 38715 - DNA, 1054 bp, Oryza sativa
ggaagaactggctggggcggcctcggccgggctctaagtagccaacgtcagcgccaacttacttggcgctgaggttgggcacatcagcgccgaagcggttggcgctgaggtagctgccacgtcagctaggggatcggcccggccgccacggtggcacaatgtcagcgccagtcccgttggcgctgacacagccaacctcagcgccaatgcgcttggcgctgagccgacggcctagttttggttgaagtttttggcaggggttagtttcgaaataagtttttgaaaagggttaatttgtcaaaaaaacggcatatatggctatacattcctaataaaatatagtagcttcagaagtaatagcagtacaactacacttgaagttattggttgtctacagatccagctaaaagataccaagtaactccagctaggggccattaatctaactcgtttcgtacccttggcaggaacacgaatggcgttctttcacccaaccacactagcatagttgtcaactagcagcataacatgctatgtatttgctctctgtgatgcttagtatgggatgagtgatacagaaattgagcaagagcaacagcaggcctccaatcaaaacccaagaaattaacaactgtatactgatacaacctccacctttacatggtaattgataaaactgatgcactgtatttattatccacaaagaaagattcatttgaagaacagaatctcatgctggtcttcagtccttctctcaaattcttttcaaaattatcataaagttcacgtaccaggtacagttgaacatatgtattgtagcttcagaagtactaacagtacagtacagtggacttgacattatcaacggtaatattgtgattgtctttaaacctaataagaacaccaatcaattctttggtttatcaaaaatgatggtgttgtagcatgggataaactccgtccccccatgctcgtccggaaacatatgctaagaaaaaaaatgagttcgagtcaaattatttgctcaaatgaagtttccatgcaaagtgatttt

SEQ ID NO: 38716 - DNA, 1606 bp, Oryza sativa
ccgctccacgccccacgcacacggcggcgacctccgcggcggcgagttcgaacaccgaaggacatggaggagcagcggcaaacacctccatggcgctccgccgttgatgtccggagcaagtgccgacaaaaatttaacttacgcttatagattgtgaggatgtatttgttgagttaaaatctcgttgtacacaagttaaaatttaactcatacaaactgaattaactctacaacgatgtcctgtagttttgtatcgcgagataatttttaactcagcagcgaccagacttaatcacatatcatctagaattgaacaacaacaagtaattttttaactccaaaaccatgtcatcgcatcccaccacccaattgtacgtaagttaaactttaactcatatcaattgaaaccatgtataatattaactcctcaacgacgtcatcgcacccaccacctaactgtatataagttaaaatttaacttcgctggttttaccccaccacccaactgtatctaagttaaattttaactccgcgggtgggttggatgccttgttggtgggattttgtcggtggtgggctgacctctcctcgtttgtgtctggcgccattttgtttcgtggcgcacaacgtctgtgggtggcgctgtgtagcgccaccgtgtatatatatatatatatatatatatagagagagagagagagagagaaactattctacacccgggttacccccctccttcccaagggttacacccacttccccctccttaccaaggcccaagaaccacctcccacctcggtcaaaggcccctcccaccggtcaaacccgcctaataactcccccaccacccacctcttctcagctctcgtcctaggacggtgcagtaacacgacgaccactgtgcagtaacgttgtgtcttacgtgcagtaacagtgttaaaatatagttgaaatatagttatgacggatctacttttgataagctctttttttctagcatcatggtgcaaacggttttaaaaaaacttacatcacttgggagatattgttatttaaagcttgacttttttgcaatttgtctctccacaagtagtaatactatactattatttgttactacttgtctgttgtacgttactataatcacatcacgatgttactacactgcattttactgtattttttgggtagtgttactgcataacacgtggtaacgtgtaccttccatgcagtaacacttttacttttgtgcagtaacagcatctgagacttttaacctataaatttttgtttcaattattgatttactgtaattcaccataatattattgtcacatcttacacatgcagtagcactatattggtgggaggagaccctttttcttgagaagagggaggaagaacggtttcttgaagagaggggtacgtagatgcattttgaagtttaaccctctacatgcagtaacactatagcatcatggtgggaacgattttaaaaaataacatttatcttgtgagatattgcttttcaaagattggaactttgaactttaaccctccacatgcagtaacagaatgtgtaacttgcagtaacaagggcatatac

SEQ ID NO: 38717 - DNA, 1715 bp, Oryza sativa
tatgtggaacaaattagaacacactaagtgtgggcaacacatagatataaatttgagacaaaaatggcatgttatcaagaggtagtgtttgattaactcgatgtgagaaatgctcagtgaaacataaagtgatataagctcaggtagctaagttggagtggttattccagcactatcagttccattaatcaaaagcattgagaaataaatacacaacaatagtgttaatgaattatgctaaattgaccaaaattagctatatgcaaaatagtgttaataaggagggtttattttgcttgtttctggtgtaaaatagttgatcttgtctccttcagacaaccgagaaacatttgaactaaagaaaaaaagaatgcacagacacacatcttactgctgataggattctaggaaagatgcaacttgacatttttcctaacaaggaacctagggtgaattatgtgaaatatgccgagtatcctgatcaatcgttgtttttataattcaaaattttaaagaaaagtttgattcagtatctcagttcataaatacattcttaaagtggtttctgcataaaaaaacatttgctgtgtaaaagaaaaaacttgagagactgatttactattctgctgtactgtacaataaaatagccttttaaagaacatagtattacttaatgggttaatttgatccatgccattgtaaaatatgtcgaattagataataccattactattcacgatatcggctgggtgctactagaattttgtaaaattataaccatgccatcgtcgtcacattttccttccatgttcttcattctctccatgaccaggtggtgttcgtcgactcttcttatctttggtcaacgcctcgccgccagacgggccctcaccctccatgcacctgtcatcgacggtgtcactgctcccgctgccgtagcaggaaatccagcgacggccagatgaggcgccacgattgacgctgctggtcggtcggctgtgtcacaacaagtgcagctagcgtccaacatacttgctacggaagacacacaagtatgttcgtggttgctctcatcatcaccgctggcaaacatacttgcgtctgaatacatgagaagctagcatacgcatgccatggcgagcccgtgtcagattgcattgagggagaagatgaagcctcggcagcccacactgcttcatcttctcacccgccactgcgccacccctccatgctgaccgccgccgcccctgccaccctaccggcgccagcgtgctcgtcgcaacggcggcaaggtttggagatggctatgagcttgtcgcagcgccatcgccattttttcttttttttttcctctctatattttttcaggagctaattggttccttgctgtagtttggggagaagatgacggaaagtgtgacagcgatggtatggttccaaatttacaaaattggagtggcacccaaccgatatcgtgaataataatgatatttttctaatttaacatatttgcaatggcatacatcacattaacccttacttagttgatcgtggccaaaatcaacagcccaagactaaagcatgcatacagcatactccctatgcagtgcagtctcagcctaaactgaacctattattggctagttaagcatagataggagacaagttgttcaacactagtagaaattaaaggctgttcatggaccatacatacg

SEQ ID NO: 38718 - DNA, 548 bp, Oryza sativa
ttgtagtgtgtccaactgtcatctcatcacctgtagtcctccatatctaattgcaaagaatgtgacgtgatgttaggatacacatgtatgtatttaagctagattaaaggtcaatgacatgtcaagcaggaaggatttgcacagcgaaggcacatttcaataccatatcacgctctgcctaacatctagcccaacaaaggtaggagtatgaaacactatgtatgactttactgcagagtaatattatagcatctatatgtgaatcaaaactagtagcatatattcattggcagcatttctgaacagtgaggagtccgtttccaaatataagcatttctagattgtttagcaggaataaaggtttgagaaatgcttatattgcatacaaaatatgaatcctagaatgcttatatttgggaatgtaacgattagctagtaggaatctaggcagggatcggaattttagatgaaaataaaatgagaactgagcaggaaactgtatatgccttgtttcctggtagaccatgctacatgatttcttagtttcg

SEQ ID NO: 38719 - DNA, 1411 bp, Oryza sativa
taggccaaggaactcattaactcaactcaagcatttttttttattttagggatcagcacagaaaggtgacgcaatggaaacactgcagaaatatttgaagattggctgtcaaagcaaatgatagtggctcgttataaatacacatcttctgatgaacttcaagacatggtgtggatctgggaggtatttcttcttgttcttctatttttggttttctaccttgatgctcatgattttgaatgaattttttccttacttgaccaatatatatatatatatatatatatattctccaatcagattgaagaagaatttatagcttatcttcatacctatgttgatatgttgcacaaagtggatgaaattggtgatacaatggaggtaattatttatacgtaaaaaatgttctttcaattaaagaaatgcataagtgagttgtggttataatgttggcacagtggcacatgtgtaattttttttgacctggtacacatgtatttgagttgggaaactgatacttgttgccccgcattactttaaatcttttgtaagagttaagagttgctaattccaaactttagcacacacataacctagatagatctgtacagctcccaatcctatatatgattcagaatttaatgtgttttatcattgttatatatgttttgtttgtttgtttagtcaggttatcatttgaactaatccatacatgcgtactgtcagggccgtccctagggttccgaggccccggtgcgaaatacaaattagagccttaaaatttaaaaaaggatatcttgcacgcttgctgcgagattttataactcttttattacgaaattgctactatatgaaattgctgattgattatagtgttgctgccatgttgcttctgcgaacaacggagagtggacgaacttcacactttagaaatcagtaattgttattaggaaaaaaagaggagttggcaaagttgtagctgataacaaaacaaagtatcaaatagtataagcattagggatgggattaggccttgtattcttttggggcttatttttttatctgtttccctgtaatttgttgctaattaggcatagataaataatactaattgtggatttgggggtcctattttttttggggggcctgaacatatgcacaggttgcacctgtcaatatacggcactgcgtactgtgataaaagatgctagcatcagaaaataagatactccaatggtttgaattattcattttcttaatgttcaaaccactgtgttgcacaaaagccactgcattgcactaattttgaaaataaactaatcatagttcacttgcgcattagaaatttaatttatgcacatgttttctctatgtctgaaaataaactaatcatagttcacttccgcattag

SEQ ID NO: 38720 - DNA, 1661 bp, Oryza sativa
tttataaaaacttacatcacttggaacatattgttattaaaagcttgacttttttgctatatgtctctccacaagtagtaatactatactattatttgttactactgtctgtttgtacgttactataatcacatcacgatgttactacactgcattttactgtattttttgggtagtgttactgcataacacgtggtaacgtgtaccttccatgcagtaacacttttacttttgtgcagtaacagcatctgagacttttaacctataaatttttgtttcaattattgatttactgtaattcaccataatattattgtcacatcttacacatgcagtagcactatattggtgggaggagaccctttttcttgagaagagggaggaagaacggtttcttgaagagaggggtacgtagatgcattttgaagtttaaccctctacatgcagtaacactatagcatcatggtgggaacgattttaaaaaataacatttatcttgtgagatattgcttttcaaagattggaactttgaactttaaccctccacatgcagtaacagaatgtgtaacttgcagtaacaagggcatatacatgtagtaacatggttttaccaaatgtataaaattattcaaaacactcctatatcaatcagacctcgctcaaagtgacctacagacattacctatagcccacctatttaatcttcatctcgtaaaaatgacagtaaaactacaattatcgtgcagtaacatagctactttaaagtggtaacatgcacctaccatgtagtaacacttctacttttgtgcagtaacaagtatatggttagcatgtgaggctttaactcagtaatactagtcacttgaatgtaataacaacctatatatttttgtagtaaccggacgtgctactatatttcgtgatggcgttactatgaaaagggtgggggtacatagatggaggaaggagaccgattttcttgaaaagagagaggaaggccaagtttttgggtagagagagataaggagaggagaaagtggagggatcatgagagggagagagagaccaggattatatctattttgttactacacactagttacattattactatatttatttcacaatgttactacggggttgcagtaacatatagtacaaagcagtaacgagcgggagtaaatactaaagtttagaaattgttagttctacaaacaataatcaatagcgtggtggtgaccactgctcatgaaaattaaatgatggcatatcatgttacaataggaatctataattctgatggtaatattactatatctgtgtaataaaagatttgggatagtgcagtaagatggtttgaagtgtatgctaacaaccatcctaggaccattactacatgttttgtgccaaatattacaggatttagcacgtatgagaagataaaattttactaagaaaactctatcacaactgagaaatagcctattggttagtgccatatggtaatttgagttgaaggtcttgagttctattctcattgaatgcaaaatttcctttatttttttctctctcaaaaaaagagagaggtggagggggatggggagaaaaaaaaggaaagggggagtgaccgggagaaggtggggtgggggaatcgggaggaa

SEQ ID NO: 38721 - DNA, 537 bp, Oryza sativa
catgcgtgtggaacacaacatcgatcttaaatctacttatctccttccttggtagctatttacatacttatccaacaaactaaccacctactcatttcagattcctttcaggacattaatttgtaccaattgtaaatgtgggcaagctgttagatttgcctcatgtttcaagtgttttgattcagacgaattgttagatgttgggtctcattggctctattagttaattgcactataatgcatactccatcatttacaaccagtatgcatctcgctaacttttggtcactaacaccataacaattcactaattgtgcactatttttgtgtgttagtttctcattgcttttgattaatggggtgggcattgctgaaatacccactcccaacttagctacctaagcttatatgactttatgtttcaataagcctttttatgctataaacctattaataataatattgttgtgctataaaacctgataagcttgtggtataataataatggtgtgataaaacatttttatgctctctttg

SEQ ID NO: 38722 - DNA, 581 bp, Oryza sativa
aaatcacaacttaggtgaatgtctcttcatccataacctcatccatcaagtcgccacatgaaaggttaagcaaagaactatcctcccgatcctcctcatgaactaagtctgagttactacaagaccccaccatgattttctaccaaaagagaagccaaagcacctaagttttcaaatttgagacaaccaccctcccttaagagcaaaaccaaatcagaaactaagttactagagtcacctaggttcaaacctatatcatttaaatttctaacaacatgaggatgcgagaaagaatgacatgaattcttaaattcattacctgagagagggtcgagattcatccatgcctttttggacttagccttttcaagtgaatgtctcccgctgctgcccatcaacctctcgctagccctttttggtgtcaccaccacctccccaacattagccagctgaacaatcttttcctgctgcacccccgcctcattttcctccatttcctccctctctaccctctcatacacctcctccaacacatcttagacagccacatccaagatattttcagccattatagaaaaatc

SEQ ID NO: 38723 - DNA, 577 bp, Oryza sativa
ctgacactatccagctagaagaagcacgtgtgttaaggctttccttagccaaacggtgtgccactttatttgccgatctcctcgttcatatgagcttgaaatcctggaatgactggattcccctcttcagctcctggattacaggcccaatttcaaaccgatcaaaacttttattcatgaccaaactcacaacttcaactgagtccgtttcgaagactactctggttgctgcaagtcttgcacccacccgcgtcgcttcgaggcaagccaacgcttcagcatgagttgcacttaacacttccccgaagaaaatcctgttcgcacccataaactcaccccgatcatttctcactatcactcccccacttcccatctgttcatctgcagcaaatcccccatccgatttcagcttaatccatcctgattccggcaacctccagtgcattgtcggactaggacagtatgatcagatttttcaaatagactagcccactcttccagaggaacaaaattctctccaccgtcctgtctgggttatctgggatctgttgatccgtgcatcattccgtgctgacca

SEQ ID NO: 38724 - DNA, 583 bp, Oryza sativa
tctaacattcaatggattatccgtaaagttgtgtcaggatcctgatacatgggtgtctgataatccctccattgtgctccagcagatgccatgctcatatggtaagtcttaattttctagtttaagtacctaaccattaatttccatattctaaatgttcatatagttgtgtcaaattactaacatttgtaatgatggcctaacttaatctgtcatatttttagtggatttccaaaggtgttctaggaagtcgtgtcaaattactgacattgcaacaatgatggatcaacttaattagattatattatatttttttatggattctaaaaggtgttctctagcaagtatagccacatgccatatttaaaaataaaatactactttcgtttatatttttaaaacttaattatctgtcttatttaaagtttatttccccagattatttaatctgcagtgcttttctcatacagtttgaaattaattaaagtacttatggctaaaatccgaaactttgcgcacaatcacatcatgtgataattccttgtttgttaagcttgtgcatatagatgcatgttgtgtccat

SEQ ID NO: 38725 - DNA, 552 bp, Oryza sativa
atctccttcacggttttcatagcggcccatacagatgcaattatctagtgagttggcgacaccccctctatagcttggttttataaatgcagctcctctcatcctccatctccatcaccacagggcttccgctcactagagtgagcgagcgagtgaaatctgtttgtagcttgcgagctaggacaatggccggtcctcaggtatgcatcaactaagtgagcagtacgagtattcaccatcccactaggtgtgtgttccaacccactacggtgagcttgtcatcaactacctttaccaatgcgccattcagatgtctctgccctatgacttcatcactgacatcgacatccttcaccataatcccttggacattgtcccaagtgaatatattttgacttgtgttgcctttgttgtcccattgaaattattaagccaaatctttgcaatctttggtttaatttcatcaatctatagcctcacctatgatatattaggtgttttgacggttaatttcttgtctaattctgtgtgtgtcatattttccttatgttg

SEQ ID NO: 38726 - DNA, 561 bp, Oryza sativa
aggtcaccgcccactactatggcccacagattatgcaacagagatgaagtatctggatttttgtgctggaatcattttttgagggacaaagtctccgctccaggaatcacttctttttgggacggaaggagtatgtatctaacacaagtactcactaaaagattacaaatgggacacccaaaatcaatttttaatgtagaaaactgacagaaaaacaaacactaatatgggaaaaaaagactaacttgtgcagaatagtgggatggcttacaaaactatgaaaatacaaagccaaagaattgaagacaaaatataaagctaataaaacttgcagtaccatgattagtagacagaactttatttaaatttaatttgaattggcaaacgaaactaacaaaattgacaaaatttcagaaatcgtcaaccattgctaatcttgttcaactttatctcaaaactgaaaactgtcaaaactaagtattgttcactcaaaattttgtgatgaggcattctaattactgacaaaactaacaaaaccatatgtactattaatagattaca

SEQ ID NO: 38727 - DNA, 1979 bp, Oryza sativa
gttcttaagtgtagatattctgttcttgtttttgttgtagcaccaataaacatctctaaccaattgcactttagtgcttgattcccacaatccaggttcccacaccaaatcttcatacctgtaccgttgttccatatcaacttggatacagtgctaaaaaaaatacttacactacttctgtaagggagtgttacttactttactgattctttcccgagctcttctgaaagatggctcaattctatgtgcagcttgaggtctttatggagctttttaagaaattgtcccaaaccattccagttcgcagttttaacgtcatcaacagttggtactcctaaaaaaacacttcaagattattcacaagttgggctgctaaagtatgttacacaaattcacttgtgaataactgataactttcataacactccatgttttgtgacaaatctaatgcaaaactccatttctgtactttgttgaaaggaaatcttagattttagggcaaaatatttcagtttttttttggaatataggcaaaacccaactcatttcattgataaataagagtataaacagttaaacaccaaactcaaaagaataggggaaacactgaacaaaacattttagattaatcctggttcacatgcattcaatgtcttggcatatacctgtgctagaaactttgcccttggctctccggttctttctcacattgcccgttggtgaaatttccatcttgatgtcagttaataggacatgataatcccccttagccttcgactgataaaagattttactttcatccaaatccagtgccttcaatggaattttctcctcgtcatacagcacattgatatatctgactgccatacaaatctctctgcaaaaagataaaaacattatctaattttataactcaaagagcaggcaacaacccaaattttaattatgtgtccattaaatacttgcatgtttaaaagctcatgatatgttcaagcaaattaactcattcacctgcatggtcttgacatgtttgatactcctatttgcatattcttggcacttttgactaaaattttcttccataaatgcttggcactatactattcctaatgcactttctcattttaccattctggttgtctagagaataatctgtccatcctgggtgccaaacatttattcaactcaaaatttaaactcatgctaatggctgccaaatgttgcatctagatctgtcgctattaccagaggttgttacaagggatattttgggcattcacttatcaagaagatcaagcttaattatatgtgcactggtcagaagtgccaagtaaatgcaaaagaagcaagtattgtcgtaatctatacacattcatcaattgcagtcagaagggaaggaaagaaaattggggaaagaaacaggcctgcatgtatgagtagagtcatgcatggctaaaaatataaatcaagctaactgaatcagacatgaatgcagattcctgttatgcaaacactacttgtttctaatgaatatatgtgtttctatagtgtctcaacaatcaacatgcctttgttatgtgaatggctcagatggttattttctattgattaatgtcataatttctagctattttcaattaatacagtaatttctagtcaatagtattaatacgggggcttcttgtcacaccctaattccaaaatccacgttagctgagctcttcgaggagcgggcccacatacacaacaccttacttacactttcgtgcttgcttcatgtaaaaagactgaccagcaggtgctatggttggagagccaatgcttataagttgaccctcatccagctaaatttctaatgtggacggtacaaaccccatcaactacagcttggcacacatggcctcaattacatcacaaagaacagggcagtaaacccaccaactacaactacaccttaagccacattagcctcaatttgt

SEQ ID NO: 38728 - DNA, 505 bp, Oryza sativa
atgagaagctagcatacgcatgccatggcgagcccgtgtcagattgcattgagggagaagatgaagcctcggcagcccacactgcttcatcttctcacccgccactgcgccacccctccatgctgaccgccgccgcccctgccaccctaccggcgccagcgtgctcgtcgcaacggcggcaaggtttggagatggctatgagcttgtcgcagcgccatcgccattttttcttttttttttcctctctatattttttcaggagctaattggttccttgctgtagtttggggagaagatgacggaaagtgtgacagcgatggtatgggtccaaatttacaaaattggagtggcacccaaccgatatcgtgaataataatgatatttttctaatttaacatatttgcaatggcatacatcacattaacccttacttagttgatcgtggcccaaatcaacagcccaagactaaagcatgcatacagcatactccctatgcagtgcagtc

SEQ ID NO: 38729 - DNA, 1234 bp, Oryza sativa
tttggagagccaaatgcttataagttgaccctcatccagctaaatttctaatgtggacggtacaaaccccatcaactacagcttggcacacatggcctcaattagatcacaaagaacagggcagtaaaccctccaactcaacctacaccttaagccacattagcttcaattgtactaacaagctgctaacagctggagtgttaatctccacactagcctccaagtactataaaagttcataattttgtacttggaaaacaattcagtattgatacatgatacttacctaaagatcctgcaaccttggtcactgaaaccaaatgtataagattcagcatttgtagcatcttccacatcaaataaagcttcttttggaattgaagtcacaactccatcagagcaagggaaaacaataaatgccaggttcgtctccatttcttcccagactcccataggctgtatgatgtttctgtgagagcaatttcgaaggatttcataaagagtatgggcgtgttctgatcttcgtcgtactgctagacatttctcttgttgaccctctgaatataacaacatagcattatatgccacgctgccaggaattttgatagcataaacagtcaagtttctgactcggctttgtatctcaatctgcacaaattaaaatcttaattaggatttaagcttttatcttactattttatttgcattaaataatttaaaggttgcatatatgttagattcaccttagagtttccaggaactataactggatagctgaaaacaaaacattgattttgtaagataatttccattacagtaagaaagtactttagtaaggatgataatatccttaattagtaaagggagagaaataactaacaatgaatcatccgaagttaaattagccacagatagcttgttcactttcttttctgtagccattggtaactctgcagttgattaacttgatgtcagactacatatgtggaacaaattagaacacactaagtgtgggcaacacatagatataaatttgagacaaaaatggcatgttatcaagaggtagtgtttgattaactcgatgtgagaaatgctcagtgaaacataaagtgatataagctcaggtagctaagttggagtggttattccagcactatcagttccattaatcaaaagcattgagaaataaatacacaacaatagtgttaatgaattatgctaaattgaccaaaat

SEQ ID NO: 38730 - DNA, 526 bp, Oryza sativa
agggggaagccggcgtcggattggaggcggcgccgactcaagggggaggaggcggcgcgcgcgcggtgagatcggccagacttgcaccgtaggattggatccaaacctgtccaaattgcgcatttggtgtcttttttttttctttttgtttgggctaacctttattattctctttttttattattattattttgtatttttcaggttataagacctggatttttcacattttggtccttttgaaaaacttatttcgtaaatagacccctagaaaaacttatcccaaaaatggtcctttttggggcgccagagtggctggcgctgtcgttcgcgccatccccctgccgacgtggcagggcgatgctgaggtggctagggggagtgcgccatagtggtagagtgcattatgtttaacatgctgatcaaagggttttactaaaggagttatggtctaattttagtgaaggtgtaaagtagactaagtggtatgctagatattttcagacttagctaattggtagttcga

SEQ ID NO: 38731 - DNA, 517 bp, Oryza sativa
gcattgtcctattgagtattcaccactgcactgcttgattggattccgtcagcccgttgtgtgtaccttcttgcctctgggatctgtgagccctcattgcttgataatgcaaagcctgcaatcgctgcaactccctttgtaacccttcatattgttctctgttcaccgatacaaccccttgtgcttgcaccattttttgctagttctactttcgtcggagctgatgttcttgccgtgccttgacttcctcaatgattgtttcaacttgagtttctctcatttcagttcttccagtatcgggatctgcttatgtactattcatttatgctacctaccgcgcttgagaatgtatctgtatatcttgctggtactgtcttcgctcgttgtggacgttgcatttaccttttcaagctcgcctctgggagactttacgtccccatagacggcgccactgtcgtgaccttagggcacggacaaagttgggggatagacgagaaaaaagtaaattcccactgtc

SEQ ID NO: 38732 - DNA, 560 bp, Oryza sativa
attaccttggcgatggttgtttcggcacagttgcagggtggttttgagccatccccggtggcatgcttcatcgcagggtaaggcgaaagaccattgccagcaaggcgaaattcttgcataccccattttgtgcgctctgcggtccgtgaattcccaaagtaaaatgttagggtgcgcctcattcccaccagcatgcagtcgctgccacctccctggttgtagtagactggcttttctgagcctgccgacctccagaaccctttacttgtgatacggttgctacggcgactactagggcactttatctccttctgcataaagaagtacttccctttctccctctatgtcagtgctcctatgtccatgatcaccatcatggaacaagagagagaaaaagacaaaaacaaaaccaacaacaaatcggacattaggccatgcaatcaatcaagcctggtagacatagattaatcaattcgagatgtatctggatgtgctaacaatttttatgggagcaagatgatatggcagcataaagtaaaatatacttaccttggacgatg

SEQ ID NO: 38733 - DNA, 600 bp, Oryza sativa
cggattctattaaatgtcaaatttgtcggggatgcaaaaagggctatgttgtcagtttgtgttttaattaataaattctttgctgaacactatgcatgcttgtccccttagtctcggtaagggatgtttagatcatgatttgatcttgtactcctggtcgctacttttccttaaaaaagtggcatcactacagttattggtgaatcgaatgggggtgacactcctttgcccatattaggtactccctccatttcaagttataagatgttttgactttggtcaaagtcaaactattacaagtttgactaagtttttaaaaaatatagtaatatttataataccaaattagtttcattaaatcaataattgaatatattttcataataaatttgtcttgggttgaaaatgtttttttttcaaacttagtcaaacttaaagcaagttaattttgaccaaagtcaaaacatcttatgacctgaaacggagggagtagaaaattggacatagagaagttaccaaattcttctaattcagtcagtacatgagtagcacaaaactggcatgcaactattttttactactagtacacttcatccgtct

SEQ ID NO: 38734 - DNA, 1068 bp, Oryza sativa
taatgagggcggcaagctgacgtaccaaacggcggctcgacggcgccgtctgcaaaaaattgcatttagcccctaaagtttggctggtactttttgcatctggaccccttgccgccctactatagggcggtaaggggccaagatgcaaaaagtactaggcccgggctggcttttttgcatggggccccttgccgccctaataaaaaacggcaagggttttcgtgaaaaaaaccctccctcccccgtctgttgtcaccgcccgtccctccctcgtttgccacgtcagcttgccgctctagtggagggcgccagggtctatttttgtaattttttacgctgatggattatttctgtaaatattaaaagaaaaaaatttaaaaataaaaaaaattccacgaagatatacaagtgccctattgtgtcaagcttttcgatgcacatgtcacactccagtaatcacgcggtcgacacgagggaatatccgtgtgattttggctgcgctcccggctgtcggcctgtacggctgtgtgatctccgatccgggtgctggaaatgcagcgttctgcttgagtcattttctgtgtgctataggcaattgccaattgacatgagcttacttggttcacttgatttcttcgtgccttgcacgccgccactgcgaaggtaatggatttttcagagactcggagtattgcgttgattggtggcttaaaagttttaactatcgtttggttcgggtcaggtgcgttaatttgtttagctggctattggtaaagtcggatctgtgacagaagcacatgagttgcgaccagactgcagctcctcagatgctaaacaagtgactgcataataaaaatcgttgggctggatgagtttgtcagctgaggagcacattttcctttccctcctaaagctagctgttcgaagtcaaagatcaaatgctagcagattgagttggtatggtatatgccttggtccaacacagtatgcatgctcatatgaacttcacctctttgaggcaactgtttttccaaaaaaatgaattttttattcgcatgtaaacttcgt

SEQ ID NO: 38735 - DNA, 1435 bp, Oryza sativa
tgccgcgtggtgctctaataaattagggcaaatattagaaattctaagaaaaaaaataaaattatctattacttaattttcacttaaatcggtaggtccaatattataaaccgttagattaaattgatcttagaacaaactaaatattatggggtcccacctcagcataggtgcgcacctacgtgcgcgggttcgtacgcatcccctccctttttttcatttttctctttcttcttttttcccatgcatatgcttccctccctttattactatatcacacgccttcatgagatgatttaatcaaaagagttttgaatatcttgcactcgcatttttcatttgcggccatactacacggtatgtatatagatagactgtatgataattaactaccaatagtttcttatttactcgagaaaaaaacatgatttaaaagttgtaagtactaaacccatctcctactcaaaagttcgtgaatggttttctaagataccttaagaaaaatagaacccttaaattattataaaataaaattatccaaactttagtttgccctaaatctatgagacaaaatttttgaacaaacaataatcttaccttttaataatataagtgcccgcgcatacgcgcgggccaccttcctagtttctttaatttttttttctccctcattgtcatacacaggtaaaacttcttcagtttaaggaaacaaacgatgctttctgctccgcactgtctcgctttcaaagtttcagcaaaatctgccaaatctactacagtacctttttgtgattcccctgcatcctagagtctgtacttgcactaatgggaaagaaatttgtgcttttattcgtggtgaacgagtaaactaaggctgtgttggctcaggcgtgttcctaaccagaacggtgcacacagaaaatagaacgatccattagcgtatgaataattaagtattagctaattcccttttcaaaaatggatcaatatgatttttttaaacaactttcgtatagaaactttttacaaaaaatacaccgtttagcgatttgaaaatcatgcgcacaaaaaacgagggagatgagttggaaaacctatggtaaagaacatagcctaagaccattcacagggcattttgccggacttcgtatgccatatagacccaaaaacaccaaaacacaatgttagccacaggttttcacggtgctatatagtctcaagtagggtctatataaataaaaaaagtttctcagtttacttttccccatactctccccatcaactgacgctttctttccccctctctctcctcaacacgaagccagcggagctcggggtcgaggagacaaccgtagtcggcgcagatcggaggacgacgatgggctccgcagcggcgggccaagcggcgacggcgacggccgtgggcggggagcca

SEQ ID NO: 38736 - DNA, 626 bp, Oryza sativa
ccattctgcgtagttatctccttttagggtcggaatatctttaatgcaacccatcaaggagtacccacctgaaataatcatgtgcggtgagaacaaaattaacattaaaatattatgcattaagcctacatcaccgttgggcagaattagacataacacatataaccataactataatattgcaattaacaacgttggtcagaaaattacaacatcatagcacataattaatgttcctaaaattaaattctcccgttggttcgaaatttaattttagaaacactaattttcatcaatttcatctatttgcagcggaagactatataaaatcatatgaacagtagcaaaatctctgtaattctctctctgtgaaaattctcccgttggttcaaatttaaactgaggtaaaacatgcaaaaatctattcaaaattctattgaaatttgcatgaaaaattgacaaaataaaatggaaaaattgctactgttctcttttattcattttcggccccggagggaccttatatggactttttccggcctttgccggtcggcccatggccaccttgcgcgcgggcgagcgccccctcccctcccccaggccgcaacctgggcctgggccgggaa

SEQ ID NO: 38737 - DNA, 897 bp, Oryza sativa
ctcagctccagtccccaggcctccttacggagctcctccaccaaactatatgaatccacagacgagcatttggcatatctagcaaggcagctaatttgtggcgataagcgaacactggacatggtaccaagaaaagtagtttaagtagatatgcgcgagtgcgtgacctataagttccagggaacctttggcagttcggctcgcagatttttgtatagttatatgcacgcataaaccattctccgtatgtatccagtttacgacttttgcatgatcaattagtattggtttggccaacgcagagtgttatgtcgtgaacaactttcggacgctcggtcaggtacgcctgaatcatgaaaacgtatattctagtctctgaagaacacctactattgatgatgagaatcccttgtgcccgcatgaatgtcatgttgccaatgtacaaactgacatccagcatttagcagctacaagcacgtaaatccatgaggctaaggaatgtacaaatcacgcgagttggcgttccagtagttcattggaaacttaatttgccaggcagacttagactaacaagaggtcatctcctcctaacagctccgtagttcctagtgacctgcagagtaacacaaagtcgtaaaaccaacagtttgtaggtcgtattctaaaaaaaaaacagtttgtaggtcgtaaaaccaacggtttgtagtatcagtgcgtgtacacaacacaatgcaaacaatttaatgacaaaccacaagaagacccgtcaaactgacaaaatgtcaaggtgattcacttacccgaggtggaggtttcttcggcctgtcatcttcatcatcgtcatcatcatctttgctcatcagcatgctctggatggatgaaaaatctgtttttcaa

SEQ ID NO: 38738 - DNA, 780 bp, Oryza sativa
tagatctgttacagctcaaagtaacctgaactctttcagtgatgatgaagacaccagggagatgcttctcggtgcaagaacaactaatgctggaaggaaagcatctggatttacaagaccctctaaagatgctaccgatgttgccaaaactggaacttccagaaggggcaggggaagagggacggcctcaatgaagcagaccactctgaatttcagccaatcaaggttattaaattaattgctaccttgcatttataccataactgtgcaacctatgccaaaatggaatagccatggtacagtctaatttgcattttgagtgttaaaggtgtttgaaatcgtgtgccctggttttaactctgcagtagatgctccaatgctaattttaccatccaatattttgcaggtcaagtgctgctatccgcagtgaggaagtgcaatcttcttcagatgaggaaaatgagactaatgaagcaaacgaagttgttgaatcttcagtatgatcatttcctctatttgtagttctgtactttttctgtattaatacgcataaatataatgtgcgcttttgctcgtggcaaatgacctggtgaactgaaacattgtatattcttgaatactcacaggaaccggaggagagtccccaacaaactggacggaaaagggcagctcctagaggtggtagaggtaggggtagaggcgctactgcaaaaaggggtagaaaagcagatatttcatccatccagagcatgctgatgagcaaagatgatgatgacgatg

SEQ ID NO: 38739 - DNA, 1484 bp, Oryza sativa
gactcgttgtactgtagtgggttgatgctgtgttggttaagttgaggagagcgggtggggggtggtgcggtcttttatactggagtggcctggcgaaacaggcggcgggcgcgcgttggtttttccgggataccggtggttccactgcttagctgtggcgctgcacgcactcgtcgctttccgcgcgggttggtggctggctgtggctcatcacacgcccggcgcccacctcgtctcgtcctggttggttgtttgcggcatggtggaggctggggatgagttggagttggcccgctgcgtgcggctggcccacgcgtgcagtgataggataggagtagcggagtagtggatcccacgatggtacgtgccacttccatgtgggtcccacgaagcagtggaaaaatcgcggatctacggggagtccatgagcttgtcaatttagcagcacatttcttttttttttccttttttttttcataagtaaagtccttaatttctcgtttgagtaagtgtttgtttgacacgactccactctagctatatctttcctgaggttagaactcaaccaaacgatttcagcttaaaaaaaattggagtggatctattagagggctatcataaaatgaattacgcatattattgtaagttcgtagggactaaccaagttattataccgaaataataaatttacaatttagtatatctatttacactcaccacgtaaattcatgtacagtaagcataatttacttgtcgtagcacacaggttttcgcaagtacttgctactagagtactggggcttctaatgtaggctggctcgtcctagaagactggagttttagcgagcgtccgagcgattgcttctttttcctgcactagactcacatcagtgttgcacgcgttcaacagactgcatgtcgtcgaattgggaagcgtattatgatctgctgcctgctggtgactctgagagcggagttatgggaggtggcatggaaaaccaggggctggaggacatggtttcccatataccgggtgcgagtacgccaacagaaatgtttaggggccgttttgttcaatacttcaacttaccacaccatactttaggctgccacatctccttagccttgtgtttggttcattgccatagttatggcaagtcatactttcttaccatcttaccccacatgttatagactgaattctttgtctaactttgccataagtgtggctcataatttattagccacaaaaagtgtggcaagccacacttgcctaaagtgaggtataaatgttagttaataaccaaacagcccaacttcactcagtgtcatggtccgggactctcctgtctcctccaaggctccaggccccacgcttaattagtagcttcatttatactagtacttcattagtgccgttgttaccagattatactactttgaagaacttgtggttgttcttagcaattttatttgccttccat

SEQ ID NO: 38740 - DNA, 1074 bp, Oryza sativa
aggaatattagaagaggagactagagttcatatagaaatacaatttagaaatagttgaaatttggaattaaaaaaaaggaatattagaagaggagactagagtccatatataaatacaattaggaaataactgaaattcgaaattaaaaataaggaatattagaagtagagtatagagtccatatagtaatacaattaggaaataatagaaatttggtattaaaaataaggaatattagaagtagagtatagagttcatatagaaatacaattgagaaaaaaaaatagaaattcggaataaaaaataaggaatattagaagtagagtatagagtccatataggaatttaaaactaactaaaattcagaataaacataataaaattaaaagtagagttttgagtccgcataaaaatacaatttacaaataactaaaattcgaaattaagaaaaatatgggaagaagagtttaaagtcaatataggaatacaatttagaagtaactaaatttcgaaattaaaattaaagaatattgaaagatgagtttagagtccacatagaaatacaattagaaataataaaaatttagaaataaaaataaataatattggaagaagagcctagagtatatagaaatacaatttacagaaaattcggaattaaaaaaatatattaaaagacgagtctagagtccatataggaatatatataatttacataactaaaatttgatattaaaaataattaatagctaacacgtatataaaatacaatatgaatattttagttttgtaaagttattgcaaaatttaaaattatgatgtcattttaatatattcgaataatataatgagaaaaacatatatgctattatatgagagaaaatataatgatgctagccgcacaatctgcgcgggccaccaatgctagtttaccagtattttgtgtcaaaagctgatccatgcagcacaacttttcacaagaaataattaaaattcagaaaaaatcaaacaacttaatgcgttagagtgcaatttataaagaattttcgttgttccattgcataggttattga

SEQ ID NO: 38741 - DNA, 1472 bp, Oryza sativa
acgtgcgacatgcaacggagttccggcgtcggagatcgatggcggggcaacggcgaaggagatcggcgacggagcgtgagagtagggggtggtaggcgcgaggagacgtcggcggcggggtaggtttcgcggctgccgccggcggagaaggcggggccgacgacagcgacggcaatggggtaggcgtgaggaggcgtcggcgctggtggagaaggcggcgggcgacggcggtggggtaggcgcaaggaggcggactggcggaggcggcagggtaggggagtgggagatggatcactaataacttcttcttttttctttttgtttgatgatcgctaattaatttttgtaaccgctacttacacgacgtggaatcgctaattgtagaggttgatccaactcttgatctgagccattggatgaatagatctaaaggtcagaaaatatttgggtttgatgaactggtgctttttatattagtgtagactagtgaaagctacagaagtttgcatgtggattgaaaattttcgactcgagggtgatcagttcgtgaaattttgagttaagtatgaacaaaatttgaagttgaaatcttggtggactggaaggggagaagtttcagcatgctgcagtgctggatatatttagaagaggctgaagtgctgaaccccattacaacttgtttgctgcatttgccttctgaacgcgagtgcaaatatgtgcagcgctatcggaagtagaatagaggcagcgtaagcacatgtcagaactgcgatcgtctgaaaagacaacgtaaatactagtagtactaattacacgaaaacagcccaaatcaaaagtacggtaaaaatcgtccaagaatttctgaaactacaaatgaaaatctcacacagtttgaatattacaatgaatatatttagacaacagtacaacacagttgaaaaataccacatactcacaaaggaatgctaaatcttgtacatacagcaaagaatgcaatcatctcacaagaacagagccccaaagagtgaccacgaagatcaggctgaagaggcaaaccaagagcatcgtcctgcccactgctcgccggtttgccagatcacctgccacccaaaacccgacagaagcctctacaaacccgacgagcaccacggtgacaaggcttccgtagtacagccagtggagtgccttaccatggttgccgaagactccgctcggagcgatgaagaagacgagggagagtgcagccgcggcttggaggacgccgcacgagataagcgccccgggaagcttgttgtcgtcgaggcaggcgtccgcgatcgcctgcaggatcttggcgaggaactcaggcagatccatgtttttgtgtagctccgatcctgcgaatgtatcgaacgattcgcggattcggagaaatgctctgttttttgagtggtgtttcagagagatgctctgtttgtgcttcgtgtaatggc

SEQ ID NO: 38742 - DNA, 504 bp, Oryza sativa
tgtttcaatcgcatattattcatcccctttgtgaccatatgtttgtcattttttgcttccctacgatacttgttgaatactgctcagttgaaatatactagggactgtaatgcttggcctttttcttgttgccagctcccgttccatgtgttctgtgattctgtctgcttgctttttctatggaccagtttcgaacagcagtctgaaccagagagagaagaaatttagatgtctcggaggtaattcttttttcagatcttaagctacctattcccaattaccctgctctctccagtttgactggagtattaatagttctttttgtggatttaattgctggtaaaatatatttgaagatattgttcattgaacttttctgagtgtgttcctctgtttcaatttctgttttctatcatgtgcttctctgctccaaacccgataaattgcaaacatgttaatttcttgattatttccatgtatctatcgacgtttttttttaaaaaa

SEQ ID NO: 38743 - DNA, 829 bp, Oryza sativa
tggatccccctttttttatagatttccctatggactctgtcttttctttttctccgattaatgtgagaatttctaggtcatgagagcgaacgtggaggctcctttttctattcctttaattatataatagatactactgtaatagacaacttgcgttcctcttttatacatagatagtactcactccttctaaaaatctgaaaatctgagacctatttctttctctgggttttccaaaaatctaagtcctatttgtagtcactatgtgctaaattaaattgtggatcggaaaccaagaagccattctactacttattgattgcatgttcattggttttgccatatggtgagtgagttaattgcttcttgatattgatgaaaaagaaataggtcttaaatttttttgatggagggagtataagaaaagggtaattttaccgtccttgaaaaagtgcgggaagatactatactttctagggtaaaatttagtaccaccagatacctcaaggtaaaaaaaaaatagtgtaaattttagatatctcaagatactttttcaaagaccataaaatttctcgtaagaaaatcggtgttgtttgacaagaacagaaaaacaaaacagggtcactacaaggaaaacaaaaacacctaatctttggacaaatcgaactctaacctgattgttgggatatgaagtgaattatccgtcttttcttatcaacttaagtttttggttaaactggttggtgcatacgtattgataattaggattgctcaagttagcttcagcataggcgcctcttccaaataatttacccccaatacatacaga

SEQ ID NO: 38744 - DNA, 533 bp, Oryza sativa
actctgattgattgacctatgactaacaagccattgagaaacgaacgaagcaaatataatttatgggttaaacttatgggggatgctagcgcgcgtgcgcgcaagggaaaggagccggcgcgcgcaccagctgcatccctacgcgtttcttttttttaagatctcctattttaacgtcacttttttgtttccttttttaaatcgcttcttttttccagatttttttaatcgcttctttcttttccacacgcgcgaatgatttttttttttgatattttataaattcaatccttcactgtagcgcccgttccgtcgtggcgcctagcgggaaaattatctcttaaaaaccctaattgcgaaatttgtttctttgcttgttgtctagtgtctgtgccatctcaagatctcaatccccgatctatcgtcgagttcaattccgaatccaaatccttccaatcaatttcctccgcaaaagtctagtttgcctcccccgggttcgatgggccgaatccagctcggcccatctctccccc

SEQ ID NO: 38745 - DNA, 578 bp, Oryza sativa
  unsure (1)..(578): unsure at all n locations
tcggcgaggaggagcggtagcggcggttcagcgacgaagaggacgcacggtggtgaggagcggtggcgccagaggatgaggcagtggtgacgccaccgctgtcggccacctcaccaccttcgtctcccacctccatggccgacgagcgaagggcgngcggcgtcggaagaagaaggcgtcggtcgggaaagggcgggagcggcgctggcgtcgcgttgaccggcgtctgttgaggaagggcgggggcggcatcgatcagggaaggacgggagctgcgccggcgtcgggttgggcgtcgtcggttggggaagggcgggggctgcgccgacatcaggttggcggcgtcggttggggaagggcgggggcggcgccgatggcggacacccaatgcgcccgatggccgacgctcgccccatgaagtcacgactcgcgagaaggaggagacgaggaaaagaatatcggaccgttttttcataatggcagaggtgggtaatttttccctcaaaagcacttggagcaaaagcacttatgcttttgggtcctttggttgactcttgacttttgcaaaaggaaaagca

SEQ ID NO: 38746 - DNA, 951 bp, Oryza sativa
aggcgctaacggcggcggcgaccgggcggttgcgcggcgcaggcgcggcagggctgacagcggcaacgaccggccggtcggccacgcgcgagcgcgggaaagagcgaaggcggtggcgggttttgggcggcgacggcgggaagcggtgtcggcgcgagagagagagaaagagagagagagagagagagagagggagggagaaacagcgagagcgagagagacagagagagcgggcgacgtctctctctctctctcggctcgcatgcgtgcaacgcacgtgcgagggagggggagatgatgggctgggaggggagatgggccgggggaggagaatcggcccatccaaaaacacagggaggtaaagtagacttttacagagaaaactgctttggatagaattggagagatttagggtttggattcgaattcgaatttgatattcaaaatcgagggtttagggatgtatcaagggaaactcaaggagaagtcatgggaaagattcaaaaggaatacttgggtatttgttctcgggaacatagggtggggtcaaggaaaggaaacaaaacgggggtttggacattttgggatttggaaatgtatttggcgaggattcaaaggaagggattgactttcggatttagatttcggagacttgaattggaagaggagatttgaggcggaggattttgatttcgatgagagggaacaacgggatttgaattgatatccttggcacaacttagactcgcacacaaagaacgaaaattttcgcaattaggattttgccgaaatagtttttaacgactcacgaaaagcggagcgttacacttcttttccactgatcctccccaggggaaagtagggatggattactggcacgcagcacctcaggtcacatagcccacgcaggagacggaggccggtcaggggccagacgtgacaccacagcat

SEQ ID NO: 38747 - DNA, 1196 bp, Oryza sativa
ttacatattattaaaaataacttattacaaataaatggagaacgcgaccctgtcgaactgcgccagttcgacggatatcctgtcgaacaggggaagttcgacagccccctgtcgaacaggggcagttcgactgccctgcctgtcgaacgggggctgttcgacaggtcctgtcgaacggcagccttccgatctcctcgccagtcgcgctctggccgttcgataggcgccctatcgaactgcacccgttcgacagggacctactttcgcgattttccccggttgaccactacttttacgattttccataaaaataatattaattctcaaaaaaattcttcggtttgctgcttcctataactataaatacacacgcaagcatggagcttcttctttcatccattctccgagctccaaaatcaaaagcattgtttcttccagacttccacacagcacagcacacgcatacgcttgagatggagctgatggccatccttctcagaacggcgagcttgatctcgaggcctgccgcaacgccgagaagttaccggcggcgctgataacgggcggcgcagtcgaggccgtcgcggcgatcttcctctgccttttcgtgccgcccggtggtttgtttgagaaccacggcaaggggcccttcttcctctactacggcattctcatcgcggtggccgtcttcgggcttggtgaggcgtcggccggcttctgggtgggcgggaacctgaccggccggcgttctgtcggtatgacgatcttgtgggtttcgattttgccgcttgtcatggtggctgcgataggtggatttatcatcttcagatagttgcacactctgtttcttctgttgtatgtgtccgtttcttattcctgtgtgagtaattcccatattcatttgcgatgtgagattgtgatcgtaaaaaaaaaaaaatagtaatgtgctataagagcgtcaggattattcagccgtgttttccacttgtactagtatggtctgtttgtgagattttggttactagtattaagttattcttgagttttcatgtgaattagttttgttgtgcgaatgtgtagtactgctctattgatcccgcacaaaataatagccgaactgagaaaacacccggctgtttatttgaagaggcaaccacgatgcaggtctgcagactgagttaagtttcagatggggg

SEQ ID NO: 38748 - DNA, 1933 bp, Oryza sativa
agggttttcctccaaaaaaatcctccctccgtcaccgcccgttctttcccgtttgccacgtcagcttgccgccctagaggtgggtggcaggggctatttctgcaattttttttggtcgatagattatttctgtaaatattaaaaaaaaatctaaaaccgaaaaaaattcgtctacaggccagtacagttatgtttttctttttactcttcttcagacgatcgatagattaacctgtgcaaatcgattcccacgtgcacaacttgcaaacgagttttcacttctcggtttctgcatgaacacgtctggtcgcctcaccgctgcttatcctctgcctgattatgcaagagatttgggcatttttctgacgttgttgcacgttgttgcgcgccgcgagctagctgttctcctctcggcgtgagggccacgtgaaaactcagccgcggcacggcacaaaaccgagcggaatgttgttcaccgtcgcgttggccacagaccatgccaaggtgtacacgtatacgcatgcatatggatggatggatcgatcagattcagagatcgagatcgcctgcgttctgcgagatggtggggagggtggtgaaaaggccgggggggctgaaacgaagggaaagaatgacaatacaggcttgcagcagagataaggatacctactgtggataaatacacagaatatacacgtcgacgtgaccggacatccgtcgcctcttcttgctctccctagcgtgggccccactgccctcgtagctacagttccgcgccggcgcaccgcctcgatctcatctcccctcacttcggctccaggcccaagcggccaagcccaagcgcggtgatcttctgcgattactgtgcatgttgcattgcgcgaaaaggaaacagctgcctgggatcgcatgcttgggtagcataggaccgcataatcttttgaaaaaaataacagccaatttttttatttaaaacttatttttgaagttggttttaaggtgtttttaccatagtttattttcacttacagtattggttttcaagttgctagaaatatatatatgtacataaattttatacacaaattacattttattactaataagccgttatggcttaatcaaattttagtctactgataggacagatattagcactagcccattttacattatatgtcttgaggaaatctttgagactggggtttaaagcacttttagacttgttcatgaaatttagttacatgaaaaagcttagccaacacggacttgtttacgaaattatttgagagcataaataaataaaatacatagtcttataggaaatgcttatatatacgagtacggagtatgcaacaacttcctttaaaaaaaaaacagaatcgctccggagacctcaacaatatcacagtaacaaaagaaagattagagaatatctataactaatataaatattcgtattttttcgatcgtcacatctaattttcgtccgtttttcgtccatacaaaatccgattcggttagcaatagccaaggaaaaaattgcaaaaaaaaagaatcggcggccgccgacgccactgccaccgccggagggagaagagaggcggcggagggagcgccgatgccggatccgcccgcggtggccgccaccgccaacggatccaccctcggacgaagccgacgccgtcgtcgccgccgttgagaaggcgccatcgccgtcgaggtcgacggggagagggagagggatccatccgcggccaccgccgacgccgccaccacccgccgccggatccatcgccgccggatctaggtcgggagggagacgagaggggaggagggagccgccgccggcggcggcctgcgaccgccgccaccgccaacggacccacccgccgacgccaccgacaccgccatcaccgccggatctagggca

SEQ ID NO: 38749 - DNA, 3289 bp, Oryza sativa
ccaaacaacacttggctggctgtggcggccctgtttagtctaaagggaattggtatgtttagacgctaatttaaaatattaaacataaattaattataaaatctattttataatttagactaatccgtgatataaatctagtgagactaattaatttataattaggctatgtgatgctaccgtcaatatttactaattatgaattaattaggtttaaaaaattcgtctcacggattagctcttactctccgtcccataatataagggattttgagtttttgcttgcactgtttgatcactggtcttattcaaaaaaattgtgcaaatataaaaaacgaaaagttgtgcttaaagtactttgaataataaagtaagtcaaaaaaaataaataataatttcacatttttttgaataagacgagtggtcaaacagcgcgagcaaacactcaaaatctcttatattatgggacggagggagtatttattagtctatgtttaatacttcaaaattagtgtctacgtacacattcgatgtgacatgtactaaaatccagacaccccccgctttgcttccactagctggagttatatatactgtagtagtgatttattttaacccaaacgcattttccaagtttccaaccaggggttttagagcatgtgactgagagcaaatagccaggagtacaataaaataataatataagaatgttacatatactgtcacattaattttgtaccgagagtgagataaaaaaaaagctacacatatatgtatatccagttggaacatgggctctaataaaccccatgatagaaagatgtggtgtaattatatatctagctattataggatgaactactaaattgaccatagataatactctcagtcaattattgctataacggttttacctaagttaacccaataaatatttcaccaccgccaatatatgtaagaaaaggtgcaagaaaaaatgtcaagacaccaaacaattgcaatctaggtagtataaaatttcatggtctgcaaggtctaacaatgattccattttataattatacattaaatatatgaagtaaatttaagacatgaatttatatatgttccatacatataaacttgatattaaaatatattggtttctcactacaaattctagcaaacatcaggtaaaattaattagcgaacgtacgacatatcgactatacagaggtctctaaattaaaaagatatgaaggggagatgaggattgacattttatgtactccatttgctacacgatggccattaaaatctagggcgagaaggaattgatcaattagctgactagtaccattgcaatggtagttacaagcaattatacatacatacatacatacatacatacatacatacatacatacatacatacatacatacatacatacatacatacatacatacatacatacatacatacatacatacatacatacatacatacatacatacatacatatatacatatatatatatatatatatatatatatatatatatatatatatatatatatatatattacaatttcaattcagtattactgtgaattaaataatttagaaatatggaactactacgtactgaatgtctagttatagattatttaaaatatgtgttaactagtactccctccgtcttaaaatataaaagcatcattagttatactatacgtacattagtttcatataaacatatcatatacattaatacttggctcatctctcatacgcaaacactatctcgtagcacgttccgaatctatctttcttctccacgtttatttgtagctgatttattatctgaattgtattgtacttgctctatgaggataataattgagtactccataagcttatgtgtgacaaagattaaaaaaattatgagtgttggctttgctgttagagttagctatacatatacttgaaaatattacactgaatttatagtgagagagaaaaaataaaaccaagtttatagctaacttattatacatattagtatgttaatagtaatttagttatactaaactttttctaagccgaaccagatttggatagtcaataaatgaggcacacctacacgttcacacggtcaatgaaactgggacccactgacatggtgccctgagcaaaggtagtgagtgctgcaagggtcccatggctcagtccctgacaggtgcgcgtccagtaaaccccaaaccctcccggcgttcaactcaccgtgcggagaaggattttctacgccgagatgccatgttgactatcatttcatacttaaatagttatagaaaaaaatttagtaacatcgattgtaatgatataattctacacataaatatgtaggactaaatttgatctacaactagagagataaaactaataaaatcagatagtgagtagtacccctataacgtagataaaatttgttatttttgtttcttcatatgtcgatgaatttagacttgtaggtttgtatagtgtcttattatagtctatcttattaagttttatgaaaattttatataactgtttaaattacatgcatatatctaggtgacatggtatctacactccatctgaaaaaacgaatctacgactagatatgatatcttttagtataataaatatgaacataggtatatctaaattatagtactataatatatcactagattgattttttatgggggataagagagtgtaaaatactttcggtgtccctcaccgtgcccctctctcggcctgcaggaccgtggacgtacggatacagtcaacgccatggaccaccaggtcattggctccgatcgtcctacgtggcaggctacagccactgccacctcctcaacttctcctcttcctcctcgtaacctgcgccctcccgcgatctctctctctctcctcttttattggccttttcgcgcgctttttttcttccccctctcgagatttttttttgccgtcgcagtcgtggcctcgtcccgcacacggatcacccttttgcatggccggatcacccttctaaccggataatagcatgctccctgctactatctctatgactcaaactgtttctctctctacgccgtcgcggtggccattgacgggcacgtactacgtccgtaactccgtcgtccacccggccaccagcccaccacccaccgggggggctgaggtgtggggcccaatttcacgtggctcccgcgtggtgcgtgatcgtatgcgttgcatgcatggaaggagccaaa

SEQ ID NO: 38750 - DNA, 3517 bp, Oryza sativa
cttcttggtcatgcgttcgtttgttacattaattacaacttacaacactccaaatttcgagtctgtgtgatgactgatactagatttgaagagatctcccaaatctttttctcaaactgtcctcgtcggagtactccagtatataagcatttctttatggttgaaggatgaggtagcacgaagaatacgcatattatgggataaattacggattattattagtactttggaatggagtacttgattatctttttggaggattttagcttccgtcctgaaataggagtttgacgtgaattagatgagatatagtaacaggttgaaatggtgttgattgataaattaaatgatagataaatgggatgatgaggtcggtaaaaaaattgatatatttatggataagttttaaacgctaaaaatactatatttttggatgtgtgagtagtattttttacaactgttctgcgtgaaatttaatgtcgtctttaggaattttagtggaaattagtcctacgcaaaatttcttacgtggtcatttggatcgagatgggaaatcatatgagtttcttttggcttggcgttcacagggtttttgaatgaattttaacatgagatgcatgcaattgcttgaataaaatatttgtgattcctgattttttccctacgccctttctaaactatatttgattcaatccatgcatacgttttgggatgataggtactataattcctgtaattttcctattctgtgtctcaaaaatacttctttctgatgaagcagttcttacctaatttgcacgtcccctctttgatgtattcaagtaaaatcgaaggtttttaggtttcatttacaaccgaggaattttatgggaatactacaggaactgaactgatcaacgagaaaattatgaaaattcctctattccaaagacccttgaaataaatcatttacctctcaaacaaccagtaaaaattgcttaaaagagccaacgaaaaattaaaggagagatgaattcagtatctgtgtgacaacatgacagcgagaaattgtgaatacgggacaacatcaaaaccggatgagatgtttttaaatactacggttgcatatctaggtttataggactgtggttgcatgtccatgttcggaggactatcaaatgtttcatccagttctattttttttatatttagaaatatattatatgggcgtgagaatatttttaataggtcttaattttggtgtctatatatcctgatgattttcgtccacttatctctactactaaaggagggagtagtccacgtaaaaatcttataataatcggttgctctaaaaactgtttacttgaaaaagaaaagatcggtgcaaaaccaaatagcccaatctgcttaaatcgtttttaccaaattgaattaaaagccattgtaatgcacaatagcccaatcaacttaaatccttttaccaaactgaattaaaagccattgtaatgcacggtcctgtaaactttaaacatgtatcctgaggacgaactcacaaatatttctttcttctcgcaaaattttcaagctactagtataatctatgttgaatcacatcgtattatatgttgctatattctgaaatggaaggacttatagaccccttttattcaaaggaaattcataggaagtttagagcattttatttctataggaatttttcatgtatagccatttgaatcaaaggaaggaatggattttatagaatcctatgaaatttttatcaaatttttatagaatgtctgataccatgtaagttttagaggaattctaatatgagttagaacctcatggaaactttcctttgagtcttatctctcctctaatgcctacgttttttctatggtcaaatcaaccggttattgctgtgttttttctatattttgcaattctctaatttacatttacatttctattaaaatcctatgtttttttatattcccatattttttaaggtgcccttagtattgccaaattctgacgatagactaaacaagtcctagatgtgatgaatgatatcaattcaatttctcagggaggatggagcactggtcgtgtaataaccggccaatgtatctcgctccgtttacctgggacaacgccagaggcaccacgtgtagcggccgtgcgtactcgcgctatatttcatgtgtcgttactctccccttttcgtgcacggccgagctcaggtggctgcggtgcggggccatcatcccctccctggcctcgcatcgcgaccagcaaccctcccctgacacagcgccgagccgctttaacggccaggcccgtagtcgtagccagccacccagccacggcagcaaacgcacagcggcagctagctagcgctcgcacgccaactcatggccggcttgcatgccccacgacacaaacacacagcagcaacgccaccatctcccgcggcgaaacggaaaccgagccagccacagcccaacccggccggctaccacccgtgtgggctcgtgtcggtcctagtgctttgctttgacccgcgcgtgttctctctcgcaaaccataccgtaggataggaatacgtgcgaagccattttactagtcgtagtactaatgtgtgtgtgtgtgcatgcatgcgctgcgtgcgtgcgtgcgtgggatcgtacggcagatgatagatagattagcctgagccactggcgcgtggtcccccggagtagtggaggggtgcaaaacggctttgccgattcttgtttacacaggtgtgtgtgcgtgtcgtctcggtgatcgatgccacagctgcagcagtgccgagtcgcgatcgtgcagaaggcgaccttcctaaaactaatcgttttttttactggcgctaatgacacaaaaccgatgcactgcactcgtgcgtgcaggcacttcgatttgctttgctactgcaaactactcgtggctttagtaatttgggaggtgaggttagtttatgcagggtcagggtcgtttccagcaggtaggattttgtgcttcgccaaggtgaggtcgacgacgacgacaaggtgagttgcgccggcacacgtcccggtgccgaagtgagatgcactagcacgatcggatggctgaccgggtgcccaaacctgcgatttgcgggcgctttcgggttcaccgaggcagcgcattagtttgcgtgttccgaggcgcctgcgttgcgacccgaaacagtgggggtgctttggcgatccatcgcatcgcatgcaccaacatttggtggcttgtgttggctgctcgttgattgcaaaactgccaagatattaacgctactcgactgtttttttcttcctggggttaagaggtcaggagtactactactagagattgacagggaattgcttgctccgtatgcgtgtgtttgtgcgtggggccgcgggagggggggagtttgtacagccgaccgagacaggagaagcgttgataaatttttgaatatgttggtggtgcgatcaatctaccgagacac

SEQ ID NO: 38751 - DNA, 742 bp, Oryza sativa
tcgtgttacttatgtgacctagctagaactatatgcttagccatgcttaattaccactagctcagtcgatgggataattgcagtattagacattctagtatcttgttgagccgcgtgctcgagacatctggccatgttttgtggtttaattatccaactaaatgcgactgaatggtgggctgtgggtgcatggttttgtgagtcgcacccatggcaattaaggaccggttcacgggaaaccctggaagacttacagcgcttgccacaagcgggaatgggtaactgcttgatctgaagtatagctcgaccctttcctaggcaccggtggcgagggtgggcgtgatggagttgggtcggccggggtgtccggttgtccagctgccggattcaccgcggcgcaagaggggaccgcccactgccttttgaggggtgggggtgaaaccttagcgtggtgtggatggttaggggagggttatgcgaagggtctcgtcacaatcactcgacatggtgacgtgtgcatcatgggcacatgatgacgcggtgacatgtcggtgggttgtgtcttgtgggtacagttgtgcacctctggccagagtaaaactattcgaatagccgtgcccgcggttatgggcgatcgaccagattcaccgtgattagtctcacacttaataaatcgacccaatgcactgtagtacaggtgggttggttgggcctgttcaacgtggtgtagcgttgatcagtg

SEQ ID NO: 38752 - DNA, 584 bp, Oryza sativa
taataatgcagaatgtaatagaatcagcctttactcacaaaactaaaataatgatggcataaatcacagtttggcaaagtaccttaggaatttcgtcagagttagactcagaattgttcctcttttttactatttgcagatgtccatgcatgattcaacaatgtttgggttgtgataccagagtctttgtcttcaatatatgagataatactggaagggaagtggagctgcaagatacaatcagttcttttttccctgaacaaaagcggctggtagaagaaaacaagagaagcaaatgatccatatttaccttggttacattgacagtaggaaatgaaatcccaaacaagtaacctagcataacaccaataactgctgagaataggagcctcatgccctcatttgatcttggcaagccactgctgttgaagattgacaaaataataatagtaataataaaattatgacgcatatttatgagcactacagaaaaaaataaacatattgctaatagtgatcagacattagtacagtacatcagctacgtactactacctccgtttcataatgtaagtcattctagc

SEQ ID NO: 38753 - DNA, 1252 bp, Oryza sativa
cttgatttcttcgtgccttgcacgccgccactgcgaaggtaatggatttttcagagactcggagtattgcgttgattggtggcttaaaagttttaactatcgtttggttcgggtcaggtgcgttaatttgtttagctggctattggtaaagtcggatctgtgacagaagcacatgagttgcgaccagactgcagctcctcagatgctaaacaagtgactgcataataaaaatcgttgggctggatgagtttgtcagctgaggagcacattttcctttccctcctaaagctagctgttcgaagtcaaagatcaaatgctagcagattgagttggtatggtatatgccttggtccaacacagtatgcatgctcatatgaacttcacctctttgaggcaactgtttttccaaaaaaatgaattttttatttgcatgtaaacttcgtcgatgttagagaagctagcaaacacgctttctcttgtccatgcagcatatacaatccactctcccttttcttaaaaaaaaaaacttagtgcagtatgctcaattagacaattgagggtggtttttgtccctcgaagaatgggcatacacaatacactcattttgtacataccaattaaaaaaatcatattttttagaaaaataataagatagattaaacttgtaatatttcactttacggacatgaaaattaaaattgtatccatagaagtgtacataaaacaaatcacgactgtaaatatagtatacacttttgatcgttattgtttctatttatataagtcgaagtcattttttttttaaaaaaattaatgtttgtgtctttgggtgacggtgagctagagcggagttatgggagctggtagggaaaaccgttagctggaggacatggctgtgttcggagtccagtgatggaagccaatccctcccgtacggaaaacgaagcggtcctttagcgcgtgattaattaagtattagctaatttttttaaaaaaaaatgaattaatttgatttttaagcaactttcgtatagaaaactttttaaaaaaaacgcatcgtttagtagtttaaaaaacgtgcgcgcggaaaatgaggaagatgggttgggaacatggggatgcaaagacagctgatgtggtagagtccttggatagaccatgtgaggccggtttggctgttcaatggagcatcctgtttaggtaggacttggatttagggcctgatcggaactgctatctgctgctgccgcta

SEQ ID NO: 38754 - DNA, 811 bp, Oryza sativa
ccaaatagaatcctaatgacgattaaaaggaaagacgactggcaggtcgtgaagcaatcgattcaaggcggttggcgatgacttcaagaaagtaaaaaaataaaccccaatgataatcatatttgatttttaaaatcttaattacaataaaaatgagaggcggcgggagggtcgtataggagtacaatggcagacccgccgatggttggtgggtcttttagaaagtaaaaaaatgaattccaacgatagttatgttagatttttataatcccaattacaataaagagtatgcggcggacgggtcgtagagaagtatggtggtagcgtttgacgggatttctaaaaattataaaaaaaacatgaaacccaacgagacaataaactttaaaaactataaggttaaatttttaaaggttcgggcttcaaaaagtaaaaataaaaaacctcaatgataatcatgtttgatttttaaatctcaatgataataaataagagtggcagcgggcgagccgtataggagtacagtgacaaagtcgctaacgttttgacggaacttctaaaaagtaaaaaaatgaacctaaacgataattatgttcgattttaaaaatagcaacgacaataaaaagaacatgcagtggatggttgtagaggagtataatggcagcttttgacgggacttgtagaaattataaaaaagaagcctaacatgacaataaactttatagtttttagatctaatttttaaaagctccaaggagaatgaatagaaacattggtagatcgagtaagctaataaagaataatatgacag

SEQ ID NO: 38755 - DNA, 761 bp, Oryza sativa
aagtgtgtgcatgtgctgcctcatgcccatcagcacctgtgcatgcgtgtgtgtggagaggcagcatacgcaaaacgccgactggctagctactcctcccgctcctgcgtttgcagcagcagcgtttgcactgtactactactactggctggcttagctgctccgaccaggtaaacagtaactatatcgggcaaaatctttcccggccatttctggtgttgtagtagtaatttctaacgccaagccagcaaaagaagaaaaagaaaaagaaaaaaatcattgctctagctccatctccatatactacgtgtggcctactgggttgtgtggtctgtagatgatcggcgatcggtgtgtgaggctacggagatgcatggcgcagggtggggcgtgttatcggccgcgggtcgcgacggcaacctcgtattggtcccccgtccccggggcgacaaccccgcggagcacgtattcgtgccgtcgtcctgcgtgcccacaccttgcctccccatccgccaccgctcgcccggatctaccgtccctccacgtcgcaaaaaccgggaccgaacctagctatagccagtagccgatcgaggggcctatctatattttgtcaaacatttttttgaagatgtaaatacaatactccctccgttccataatataaaggattttaagtttttcttacaatattgaccagtcgccttattcaaaaaatgttagaattgttatttttttttgacttactttattatccaaagtat

SEQ ID NO: 38756 - DNA, 794 bp, Oryza sativa
ttcagaattaaaaaataaggaatataagaagagcagaatagagtccatatagaaatccaattaggaaatacttgaaattcagaattaaaataaggaaaattagaagtagagtatatagtccatatagaaatccatttaggaaataatataaatttagaattaaaaataaggaatattagaagtagagtatagagtacatatagaaatccaattaagaaaaaaaatagaaattcggaattaagaaaaataagaaatattagaagtagagtatatagttctattatattattaaaggaatagaaaaaggagcctccacgttcgctctcatggactagaaattctcacattaatcggagaaaaagaaaaagtagagtccatatagaaatacaatttagaaatagctaaaattcggaattaaaaataaggaatattagaagtagagtatagaattcatatagaaatacaattattattaaaggaatagaaaaaggagcctccacgttcgctctcatggactagaaattctcatattaatcggagaaaaagaaaaagcagagtccatatagaaatacaatttagaaatagctaaaattcggaattaaaaataaggaatattagaagtagagtatagaattcatatagaaatacaattaggaaataactgaaattcggaattaaaaataagtaatattagaagtagagtatagagtacatatagaaatacaattagaaaataatataaatttgggattaaaaataaggaatattagaagtagagtatatagtccatatag

SEQ ID NO: 38757 - DNA, 1874 bp, Oryza sativa
ttaaatcatgtttttttctcgagtaaataagaaactattggtagttaattatcatacagtctatctatatacataccgtgtagtatggccgcaaatgaaaaatgcgagtgcaagatattcaaaactcttttgattaaatcatctcatgaaggcgtgtgatatagtaataaagggagggaagcatatgcatgggaaaaaagaagaaagagaaaaatgaaaaaaagggaggggatgcgtacgaacccgcgcacgtaggtgcgcacctatgctgaggtgggaccccataatatttagtttgttctaagatcaatttaatctaacggtttataatattggacctaccgatttaagtgaaaattaagtaatagataattttattttttttcttagaatttctaatatttgccctaatttattagagcaccacgcggcagcttgagagcattttaagaaattttaaatgactaattagaatattaactgcgcaatatatatgtatgggatatatggtaatatttgttccaacttcgtccttgtttatataaatgtagagagaaattaattttgtggctagcaagccattagatgtctaactaatagcaattaattttgacacctatttacaattgttcagagtaactcttatatattcatcttacgacttcgataatccattgatcaccaatttactaatcaccatgacttgcatgaaaaaaaaatatgtagtaaggtttaggatagctgaaattgatgaattatataatttatgtgatagctatttgagggtataaacgaatgaattgacttctaaaacgttaaaatgttgtttaaataagacaccatttagaaacttaaaaagcgtgcaaacaaaaatccaaaatatggaatcgggaaaataattaatcgctgcatcacacctttaattttcttttcatgttattaataaaattaatcatctccatatatgatttgatatgtggcaaaacggtagcgctacatcggttgtgatcaccttagatgtctcagacactgcgctttgttacatgtgcgaaaggcaaaggtgcagacgtatattgtgcagcgagcaaaaagagaatttcggacgctttatttattagcaaacaatagatccgatgattataataatatgtccaccagttctagtgtaagtgtaaatgagttaatatagattttaaattgttattttaatgggtacataatataatggtgtagaccttactttgaaacagtgcattacgtgagaataatagaccaatgtaataaaaagtagatccgatgatttatataatggggccatcagttttagtgcacgtataaattagttaatatagatattgtttatttgataggtacatgatataattgtgtaaaatttattttaaaatagtgcattatttgaaaatagtagtacaaagtaaaaaagtacaccggtttaagttatatgatggtagattatttgtttgtaaaattatgattaattatttaaaaatatatccattatatatataaatgggaaaaataagaaaaaaaagaaaaaaaggaaaaaaaagggggggaaggaggcgtacgtatgtacgtacgtatatactacacctgccaatgtgtgggaagaggataggtgggaccatggtatttagtttgttttaagatcaattttatctaacggtgtataatattggacccaccaatttaagtaaaaattaagggatagatgttttgcttttttcttagaatttctaggattttctctattttattagagcgccacgtggcggcttgagagcgtttatagaaagtttcatggacttttagtatacataaattaaatgtgtaaaatttattttaaaatagtg

SEQ ID NO: 38758 - DNA, 513 bp, Oryza sativa
agggagagctggagagcgagagattccggcgtctccgcctcgccgtcccccgtctcaccgccgccaccgacgctgcagtagcagccgaggccggtcatgctagccgacctcaacgtcgacccgccggagagcgacggcgaggaccaaccaccaactcccaaccccaacgtaaacccagccaccgccgctgtcaccgcggcgacggtggtcgccatcgattcctccactaggtacgcgcacgaagttaattctcgatctgaccgtacatgatttcttctgcttgtgccctcatgtcccctgaagtagtttggaattgaacgtcagattcgcggccctcatggtcgtttgtcgcaaccctagaatttatacaggacaaagtgatttttgcgtctatgggacaatagtcctgtcatggcatgttttttgttgggcgtattcatctgaaatgagccatccgttagattttcgttgctagctgaaattatttcataggatcattctgtaaattttaac

SEQ ID NO: 38759 - DNA, 5681 bp, Oryza sativa
gagaaattgcacttgtaccgatcgctgtaccagcagaacagcaacacgctcaaaaaccgaagcctggcacgaccaccagaagagcctcaacctttggaactacgcttgcatatatgaattgtataaatgatccatgcgctgcagtactcctcgctgctgctggtcgctgcaactgcaaaagcctcatgttgcccgctggttaaaccgcggtcacccgcacccttccaagaggcgcacagcaactcgatcgaagcagtgcatgcatcatgcatgcattgtatggcagctagcgtacacacgcccgcgcatgcacatgcacatggccccctcgcctcagctcgccggccgctgccggtcaaacccggccgtgccgtccgtgtcctctccgagacgtaccaatcgcaagcccttgtctctgcctcggctgtttccgatccaagcacaagcacgcacaccgccgacacacgctctgatcacgctgctgccgcgcggttggtgtctctctgcgtgtgtgcgcgcgtgtcgtcgcgtttggtgtgcatgtcgtcgtttcggagagcggttagttctcggtaaagagaagctagttttctggtgggtaaccttcacgtctcacgagctacgagtacgacgcattggtgcagcatgcaggggcgtgcaggtgcagctttgatccaaaagccaaaagggagggcagcgagtgcctaccaaactgccgtcagcctgactgcatgaggggcaagacccggcacacgcgtacaagtatatacgtcgcgggttgttgcccgagacgcgaacgcattattttgcgcatcgccaggggaggccggcgccggtggaaggagtgaacgaacgatccagcgcgcgcggggccggacgccggagcgcatggaaaccaccgtaggcgcgcggccggtagctagagtgcgctcgggcctaatgtgttttgggtggaataccggggtacccggtaggccagtacaggccgggttggtgtaatcatgggtatatgatttcatccaataggatttaaatcattgtgcccacgtgagtattacgcattacgcatatgcagttgcgtcttcgcacccatgatgttttgttaaaaaaattagtcgatcacccaaaaacgctattagtcatctactcatctgcatataaccgtcgacgtccgaaaaaattggttgaccactgaaaaacgctattagtcatttaggcttcacggtaccgttggctccaccactacatgtgcttatagtcggtttataatattatagaagttgtttgcggttatctatccgacccattaaattttaggtattgttaaattcttggtaagttttgacactagtaattcttaaatagagttgagatggattatacatgtttgaattgctatccgtgtgaagccaaatattgatgatgtggagaagttttttattagtacttatagtgtactgtacactctctattacaaaaatataatgtgctttagctttttatatggtcgctaacaatgtactcctacttggcaatttgtttcgtaaaatatcattagtgaccactgaccagtgagaagccaagattatctcaagtctagagctgaattactgtagtttttcatatactccctccgtatatgaaaaaaacgttgttctagccataacctcgtttgcgatttaaacgacgttctgaaccgcagcagactatgtggacgaaattacccttgtgtctattcgatagccgctcccgcaattaatccgcagcacgcccgcgctcgcctcgtttaattccttaagcgtcgcatgcaggcatgcaacacgccgctcaacctcgccgctcacgcttgccgccgccgcttgcgtcgcgctcgccggtcgcgctctcgtcactctcgccgccgctgctctcgtcgcactcgccaccgccgctgcttgcgtcgcgctcgccggccgcactctcgtcgcgctcgccgccgctgctctcgtcgcactcgacaccgccgccgcttgcatcgtgctcgccggccccgctctcgtcggccgtgctctctcacgctcgccgccgccgccgccgccgctctcatcgcacttgccgctgccgctcgcattgttaaagtagtagagattttgattgtgtttttttcatcggaccggtaacaacctgtcgtgtttctcccgcaggaggaggcctgccgggcagtccgcggttgggccggcacacgcgtagtacgtacgcgcgtacgacgtacacatacacgtcgccgtttgttgccgtgacgcgtacataccacacatctcgcgcatctctcatcgggtgcactacgcagcagcccagcacgtaggcagcggctcgctgccggtggaatagttgagccggcgcgtacatgggcgcgcgggctcgccgcgtacatgcgtgtaggcagcgccgcacggcccggccgcgcgatcgcgatcgcgacgagatcatgagatgacggaggagcgcgtcacgcccacacactccaaagattgtccctatatatatctttggttactcttcatcaggcgagatcttgtcgatcctattttcgtacataagcggtaaaaataattgcagtgcccatgttatattttgaaccgctacaaattactatgtgcagaaatattatgataccactaatcttatttatctctgctagagtccccgcgaaaaaaaaaagaagaagaaagaaatctctgcaggagtgcaaccaaacgctccaatgggcaatgggggcattcggccactgcagagagaataaactgaaaccggtgcatgacctggctaaggagtaaatgcaaaaaacatgtaaatttcccgaatgtatcgatgaccattttcgttttgtatcaaatgttttgcctagtatactgtatagtttttttttagagctagtatactgtatagttgaatcatctagaaacggaaacccaaaatagtaacagtgtcccataaacaacaaataaaatgatatataggacttttttgtttacttgttttgccaatataccattttgtccagaatttttgagaaaccataacttttacaaaaagataaaaaaattatcgttgtacctggatgttgttatgtttacttgtccttatattcgatgttatcgtcatgcttagggatggcaggttttcccaatagcgaggacccattgggggtgcatcgccctgaaaccgactagaggtagagcgggtttgatagtttacccacgaggccacatgggggccaaacaataacatagtaactatccatcaaaatatatatacaattgattattactccatcaaaggatggatcagtccatggcagcccatatgccatatgcaatccaatccatccaaccatgcataataccatcgtcgcagaactcgtgtacatcgcacaacgtgctacctagcacctctcacgctcttcctcctggtaccaatgagcaacggccgacctctttttcctccaccaactcgagcaaggagatggcccagcaattggcgatgttcttgacccctaaatgcccaacgattgcaatcatccctaacatgctgatcaggtctgctaattctctttattactccaccattgtgttctgcatgcaggctttgtcaagccatcgaccatcatccttcctccttgtcgcatcaactctcgtcccatgccttgcagggccctggttaggggtacgggaactcgcttaagatgagatgagagcatattttgccccgaagtagacgttgaggattggggaaggggacgtttcaggttcacccgctctattgtcacccctaaccaacatggttcgacactgttgttatgtcttagagtggacatggcacggccgggctaggtagatcgatctagccatctcagcacttaacccgagagctcttaaatatatagtttagcttgaaaaagcaatggtgatgttggggtcgtaggtgcatacctccacttatcaaggctcaaatcacggcgaccacgttgttaggagatcgatagaaatttaatgagattaagtatttatcaccgaatttcttctttttaagcgtgtgttaaaggaacaaattcacggatgtgtgagtggtttgtatgtgcataaaggtgtttatggatatgggtctaccttgtaatgaaatgaaaatggttgggcctatctctctttttctactgttttatagtagcaccatttgcaccaatacgaggacactcctatccttgttcgatccgaggaattgactgacgagggatccctgtaaagatggccggttaatcgcttatgtacactattgcagtgatgatgctgtactcgtaccgtatgtgcccctgctgctactgtacattcagctgcacagtgcaacatcagcctgtacgtgagacatggcagtatggcactactagcagtagcagcttgtatagcatgttcttttcacaagctataccggcgaatttcagaattcagatgatactaccacagcactcgacagagcttggtcgttgcgtaattattccgcgcaaccagggacaggcagtgagtacccaaagctagcctatcaggtgcgccgctgtaagtacgtgacactgtgactgtcactgtagccacagtactgcagacaaacgtcccaggatctgatgggctggaagatggggttcctgtacactcaggccggctgcatcatcagaccttcagttcaacacatcgaaaccgcacagactgtaactctggccggcccccgcactgtcgcattgggctcagcccatctgatctgtagtctacaggcgaatttttttcgtttttagatttttttttaatatttacagaaataatctatcgacaaaaaaattgcagaaatagcccctgccgccctaatggtgggcggcaagctgacgtggcagacgatgggtcgaccgcgccgtctgccgccgtcggccaaaattgcgattaggcccttgccgctcgtacagagggcggcaaggggctaattgcaattttgccgcccataaagagcttgcggccgtacttttttcatctgggtcccagatgaaaaagtacggccaaaagatttttctatgttatgttaataataaataaagaagtatttattggtaaacttgttaatattgttataaaaatgtattgaagttggttgttgcgcaatttcatatgttaagtgaggtattattttgtaccttattcgatgtattattactcggataatttatataggcctatcgcagtctgggtcgtagaaacattatatggacttaaacaaggagaattatgtaacatgaagaaatagtagtacaatttgaacatgatacaactatttgcattgcggttacatagatgatattagattcgaactaggaggaaggtagtgcaatagttgaacacaacgacgatgtagtaatgggacaaggaagcatgacagtagaaatttcaatatgccaagttgtccgataatagctaacccctacgtgaggatccctctcctctctcaaaccgcgctttagtaaccctgtattgctctggtagttcaagctgcacaacacggctatgtggagttagaacccttctggtgtctatccattctctgtattgacatcacgagacctaaagacatgacatgccgaagtctgacattacacgacgaaacat

SEQ ID NO: 38760 - DNA, 511 bp, Oryza sativa
gatgttaagcgtgattagccacagtctaatgtgcaaatttgttctgtaaatatatataaaattgatggcttgatggggagaacagcaagtttatgtacagtggagtatgtaagagatataaaacgaatatcttgtattttgtgctggatgattatgactgttcagcattgcttatgacaaacgcattacccaaagaattaaagtatagaggcgttttgaagtgtttgaacatttggagcattttcagggggatttctaaatagttttattatctgaaccagctactccatatgctatacgaaacagaacgatatgcatgcgtaagctagagcgggagttgtcgcgcgtcttttctgttcaagatcatctccatgtcctcttagttttacgatcagtgcgttaggtgcccgtttccatggtgggcctgggtgtgcgatcaccgatcaacagtgacgattttgatcctattatcttggttaacctaatccaagaagagaatttgacgtctacc

SEQ ID NO: 38761 - DNA, 717 bp, Oryza sativa
gaaaagatgtgctgctacgaagtaattatctgatgaacagtataatcactgtataagtaatgtttatcaaatgttcgcgtttgccatagcagagacagaaactgtgcgtgcatctgcacacgagagcatgcagtttctcagttctcacggtaatcggaggcgactgtttggtttcaggtgaccgtccgctcactaactggaggtttgaacggtggttggatcagcccaaattcaggtcttctcactgtaccagttcagtccaagctgccatcttcttaacacttcaagaagaaccaaccaaaacccacctcgctaacgccacttaaatctcctgtgatcttgtccatcagattgtctaatgcgtggtgagatcttcactgcaacatttggaatgaaaatgacgatgctgtagccgtgttcattatttcacattctgttccgggcgacagattttagctgaaggcatggatgaaccaggtgaacctttgcttgggctagagaatttcttcgacgaagatgttgatttggtaagtacatttgttaggatgtcgtggatttgaagcattctttgaaaaatgccgtgattcttgtggatatgtgacaggagaatctgcccctggaagacgtttttgagcagctgaatacgtttcagagtgggctcttatcagcagatgctgcagaacgcttgaagttgtttggtgcaaacagattggagga

SEQ ID NO: 38762 - DNA, 619 bp, Oryza sativa
ctctgggcagccgagctccgtgcgacgtcaacgacagtggctatgcgggtgcggtggagctcggtgcggcgtcgatgcggttgtggttgctaaccaccaaagtggaggaagaggcagatttaggttttcctcttgaatattgtgatgttttagtccatgtaccatgatgtttcatcagttagatcaaaatgttgcaatgtggttttcgatggtgttccatttttttctcgatgtgctcggatttgtctcatgtttcaatacatttgaaactgttgcttctacgttgtagtaaaatgtttcattgtgtgacttgattctgtttcaccattttcagcactgaaacattttcaattcgatggtgttttattcttattctcgatgtactcggatttgtttcatattttaatatattcgaaatcattgtttcatacgttgtaaaaaaaatgtttcatggtgtaatttgattgtgtttcagcattttaaaagatcgaaacattttcaatctacttggtgaaacatttttttcctcattagtgaaacaacacccgatttttgacaaacaaatcggatgcccgatttgtaggcgcttcacgaaaaattgatcctcgaggctaacaaa

SEQ ID NO: 38763 - DNA, 1972 bp, Oryza sativa
gccgtggcggtggtggtgaaattgcaagaggagaatggtgacaccagcggctggtgctcgagctcctttattggtaaaaggtctttggatccttgataagggtccaagtggggttaattaaggctcccatcggattgcccattaagcaagaaaaaaagctaaattttaaattttcaaacttaattatgagattgattttgagatattttcaacgtagtttctatttcagtattgacttttaagtcaccaagaacacatatataaaagttttacctacaaatttatttttattttctaataagccgttttggcttattagaaaaaaagcgaaacgatggggccctaaaagtaagggcgatctgctcggaccagggcgttcggagggatttcagcacgacgtgctcgctccccaagctatccacatcgccccgcacggtggctttgccatggcgcgtgggatttttacacaaaaaaaatttaccgttctttctctgttcgctgggccatactttcatgtgggtccacatgtcggtccgcccgcgctggaaggctggtgaatttggagcgctctctttaatcgtctggcttggccatccgattgatatctgaccgtcgggatcgttagctcagcagcacacgatttccccgcacccacaccctcctctctgtctctccaatcgcaaccagtgttggaaatttcagaccgaaattttcggtcaccccagatacgatattattttggccgaaaattttcaatttttcaattttttcatgaatttgggtaatatttgttcaaattcaactaaattttgctcaaattttcagaaatttggaccgaaatttcgggatttcggtgacccccgatacaaatgcctcaaccgatagagtgaaccctgatcgcagcttcgcaaggagcctgagcaaaccctagcccgccgccgcccttctcctctctctctctctctgttcccatccccttgggaaacgctagcccatcgcgaccgccttcctccttcctaggtcgcgccagctccctttctccccttacatcctcattcctcacgctgccatcgacccccaccgttctcttgtcccttcgttgctggcgatggcgcgatggaagatggtgaggtcgtcgttcaagagacagcgtatcggcgtatcgcttgaactggcctgctagcacttgattcggagggaaccggcggtttggcttagcgaggtcgtcgttctgctgtcccagcgcagcgaggcagcaaagcatagatctgaggtggcggcgcctagctctgatactgggtgcacacactctactttccccaagacatcatacgcagccgtgcctttggcaacggcacctcaagcgcttgaggtcgatggcgctctattttctcatgtgagtaacgtctttgtcagttatacttgccatggtatccctggttctgattgcttgccaaccatctcagtcactatctcaaattactacatctaatgataggatttttcatccatattaccctggttctgattgctcgccaccatctcagacataatctcaaattgctagctctaatgatatgattttgcatccatattacaccaggattcaccagtgctatgaggcattctacattttggtacagtaatcggatgatatcagcagaaagtgaatcaactaaatgcttatttgaaaagaaaatttctgagtttttatgcgctgaagcttcatctgttatgtgttaattacataaaaggaagtgactgctaggagccacagaagctgtggtgggcaaactaatatactttggagctgtgagccagtgaggctagattgactaaatatatgtggagaaaactgcccacaatatgtattttagaactagccgacaacatgctggcatcaccaactaatttctatcatggtagcaccctggtcaggacagagctttgaagttttttggtgtcctctatg

SEQ ID NO: 38764 - DNA, 634 bp, Oryza sativa
ctttctccccttgcatcctcattcctcatgctgccatcgaccatcctcattcctctcttgtcccttcgttgctggcgttggcgcgatgaaagatggtgaggggctgcgtggagactgtagacaggagacaacgtatcggcatatcgcttgaactggcctgctagcacttgattcggagggaaccggcagtttggcttagcgaggttgtcgttctgttgttccagtgcagcgaggcagcgaacataaatctgaggtggtggcgccaagctctgatactgggcgcacgcactccactttccccaagacatcgtacgcaaccgtgcctttggcaacggcacctcaagcgcttgaggtcaatggcgctctattttctcacgtgagtaatgtcttctctgttgtcaattactccctccatattatttttttgtttgacgttgtagttcaatcctgaatcggttttttatttgacgccgtagtccaattcttcctccgtgcgaccgtgaaattccatcgttgccccttctccttgtcaccgccgccgtctcctcctcgctctcgctatcgtttcctcctcgtcctcctccgctctcccaccttcatcgcggcactgctgtctccgcctctcacgttgacg

SEQ ID NO: 38765 - DNA, 1289 bp, Oryza sativa
tctccaacgtcacatacatagatttgtctgaaatttattcctcttacattacagtggagtaaagtttctgaaagtatcactgataccgaaaggagaaggaaaaagataaaaaggaaatgagaagaacaacaccaaagagaaaagaaaccaaggagacgtactgcagcttcaaagcattggttccaactaataagctggttttttttatgatcgctgttaaagggggattactttcaacttttgtgccgtgccgtcttttccacgtgtgaaaaaccacgcaagtgttaaagccttagcccgacgtgtttgtacgaccaaaacccatttgatcatctcttgccctctgtaacttggaatgaagcatctgatcagaatgcaatgaaaaacaaaggggacacatgggctaatatgcatatcaggaaacacttttaaattcaaaaagctttttgggttattacacctgatctccattctcaagtagtatattatatatttcttctcattcattgcatcatgaaagatcactagaaaacaagaacagaagaaaaaggaagattctgatcaggtcatcaggatggttaaaacttctttatcttttgctgcagtaaggaccgaagtgcagagaagagattgttggcaccatcatcagcttagcatttcagaagatcgaatcagcaacagtgtggctagtatgcttgtagcttatccatccatctgaccatcttctattgggattcttgaaggtgaagggaaagggataaaccaaagcttacatgtcagtttggtacgagagatgaaacgttgtgtactgataatagctggatagatggatgcatatcagcattaatcgggatgtggcacatcagggcaccggtgatattttttctccttaattatgatagttacggatggctgctcactagattagacacttaattttggccttaaatcaactgtacttatttaaggtactccaggaaatgagtaatacttaattttcatgtatttggcattaaaccaatcatgctagctttgttgagttggaatattcaaattccttggaagttctttgtcagagaggtatgttgttcctaccaaatattccagtgaaatgatatactgtttgcaacggaaaatgaccatttttgggccaattttgatcctatttttcctccattaattacaaaatatttcattccacgaagctgatcgaggaagccttaggatcacttctcctaggtgtggcgtcattgtacttgtacatgttcttggcgcccaaaaaacatttt

SEQ ID NO: 38766 - DNA, 646 bp, Oryza sativa
aatcggagggtttccaggaggggcgggttatgcagacctgctcgtcgacgaggttgaggtcggagagcttgccggcggcgcgggcgcgcttcttgccagaggagggctccttctccttggccaggaagtagctcctggagaagccggcctcctcgtcgtcatcctcggacccagagcttaccccagcagccgccgccggtggccgcctctcagtgccatcggggttcgcttccgccgccgccgccgccgcaaggatggaggacgagaaaggggaaggacgcactcgtgcacagcctgccggtatataactgtaaatggttcaatacaagtagaaaataacaaataagtagaaaataacaaatagtaaacgatacggtatataactgtaaatggttcaatacaagtagaaaataacaaataagattgaatcttacctaaatgacaatgtaaattgttcaaaaggtcttagataaatccacgggtgggattggtacatcacaagatgcaactcctttttgcttcatgcttttgaataagtaacgcaatgcttgacttctccatgcctcaatctccaaccatcataccatgcaaaaatgtcatataaggttcattgttgcacacaattttgtggtaatttatacaaatc

SEQ ID NO: 38767 - DNA, 1137 bp, Oryza sativa
catagtaaaccaatttcccaggaaaagatgtttattgtgtatgttaaattcctttctatagctggaaatattacaggtagaaaaaaaccctttgatgtcctcttctactgttctattctacgaaatctgaagaagcatagaagaatttatgtgcatagaagcatggaagctttgaagtttggtactacgtatggattctaatttagttaaaagaattcagcctgaagtagcatatatgatgcaaaccaaaagaataagaggtatatttttattttctgcaaatctatatatactggagaagatctaccatactaccacaggcaacatctgtccaaactccagatgagtaaatcgtgttcaaatcataccaggaaattactgcatgctaatagcagtgcactattgactcctacacaacgaattgttatccttaatttgcagcataagtggttagttttgtagatccgtacctgtgcatgaagccaaccagctacctatagctcactgctcgtattgtgggctgtggccgtaggtgagcgtcctccgcgtcggctgctagtgcaatcgatattcttgtagctcatatgtttgattgagttgattctctccttgctctctgcatctccgctcaagccaagcactgaaggagtaagaggggtactaaatctgtcaatctgagataggggatctgtttttccctgtactagaagaatccagactgcttattgatagagtgggctatggggctgtgacttttcatgggcttttagcgttctgtgtccccgaagtgtcgtacgtagggatcttttcatacgcacttcgtaatagtttcttcgtgtgtatagcagtgttgttttccaatcgattgagccactgatcatccgcaaagacgaagctatctccttcgtcgattcatccttcccgaacacctcatactcatggccataaaccggatgccccatcgggtgcggacctagttgtgttcatcgtttatgggcatgaatgctcttaaatgttgactgggcttctaagtgcaagaggcatttttgacatcaacaaaacgatgtaagtgtacaattttccttttttttatttctccagcaatacactggtgaatacgagtttgttcactttggg

SEQ ID NO: 38768 - DNA, 591 bp, Oryza sativa
  unsure (1)..(591): unsure at all n locations
atcaaacatttttaaaaaagtcaacggcgtcaaaacattgntgggatggagggagtactactctattaaaaaaaggtaaactctagctataaatctggacacgtattttgggattgatttttttttttgggacggagggatacgtacttttagctgtcacactgtcaaatcaaattaatcccactcaataaaacctaatatatacagtatgctagtactactacttaagtaatcacttgatgaaactgaactttcaaaaagaaaaaaaaaagaactccgtttctgtcctacactgcagtattgcgaagaaatggagggcacaactgctgtactttggcttttgattccaatgcagtctttctccaacaactcatcctatgctaataatcctttcattcgcaacgaccacatttaggtttaggaggggatatatatatctccggtttactccaacaaattcagagaaacagacagttgacgttgatctgaacgctccaaccaccgtgagctacgaggcgataaggagaatctactcactcactgatcactcttgccaagttaccactaggatattacagacaaaaacgatgc

SEQ ID NO: 38769 - DNA, 1424 bp, Oryza sativa
aattaaaccgctgtctctactctatcatattaaatatcacgatcaaggacaaggtcacaagggccatcaagattctaaaattttatacacgtatactagggcctatttgaaggaaataaacagcaattagttgcagtcttgtatttttagacaacctttatgtcaaaaatcatttcgagaccggaagcacaccagaaataaaactagtgatcattggatcagacacacagtttgccaactacaaacagctatcctcaccacaacaatcatggagattcactctaatgtagacatgtattgcagttcactgctgaaatgaattgagacaaaaatatcaatgtatcatgaagcactatattccccatagaacatcatacccccccaaaaaataccatgtgcattcaatgagaacatacctggaaagctcaaagcaaggtagtgcaacaaccagctattccagcattaacaactgcaaatgaagaattcataattagtgctatatattcaactaccaagatgttacatctaaaaaactagcacgatgttaacagaaaatagggaactaaaacaatgcacatactgtcatctttgccacgcagccttctcaacaggcacacaactagacaatggacgccagagagaactgcaaaactttgatccgataaatttatgttatgagcaaggtgtctggatgattttcatgtacagaagaactgaattcacattatcaatagttaaccttggcggagaaccctgggggctgaacaagcccttaaatcccctcttagtgaacaaaccttgtcctgaataaagaatccagtacagaacataaagattttacacgaggaaaataactagttgctacaaatggccttaactaattcacatgtctggtacttaacaagattaatagcatcttcattgacataaatatcaaaattcagatgaaggaaccaaagattcctcacaagatgtgctattatctacacattctagatttattacaaattcttacagccatactaggtgagtttgaggagaaggggattgagaagattgggaagatacgcaaaacgaggtgagccattaccgtatgattaattgagtataaactattttaaatttaaaaaatggattaatctgattttttaaagcaactttcctatagaaaatttttgcaaaaaacgcaccgtttagtagtttgggaagcgtgcgcgcggaaaacaaaacaaactatctctctttctccagctgccgaacacagcgtaagaataggttaggaatgaacttcctttgcatgacatggaaaggaacaaaatctaaaactagaaaaagttcgtgattacaacaacatagacaacatgggcagcaccggaaacacataaacactgaacacaagggggcaacggagaaattgggataat

SEQ ID NO: 38770 - DNA, 1053 bp, Oryza sativa
tctgtagttttgtgataaaagtagacactaaatatgtagttttgtgaagcaagctcttaaatctgtagttttgtgataaattgtgcaaaatacctgtagttttgtgaaatttactcaaaaatatatctcacgaatttaagctagataacatttctcaagtacctgaagaccatgtgtacaataaatgatttattcatgtgcattagatatgctcagcagcagccagcaagctatacaaagaaaatatcacattgttcatacttctttgaatggcataatacgatatttgtaacagatagcagatgtttcactcactaaatcaacagtacatagaaaaaaaaaacatagctaactaactacttgaaacaactgtttccgaaggaaaactacaactaagcactgacatgatagctactaaacacaaaaggcaaaaactcaagttaaaatcatggaatacttatcacacatccataatgtattttttaatagtgccactgctaatttccttcctatttcattcgacctgaaaactcaataaactaatgctgaaatagttaaccttccacaaatcaggcattcaaattcatgcaaaatggaaattgctcaagacaaatgatggaaactgctatgttattttacgaatatccagacaacgtgttgcagtgagacattaaaatgctatgcagattcagggttgccataattaacttcttctccctggtaagacctcgtcaagcaaaagccaatcaacatgagctgcatctgaattcaatcaacaatgttagaagcagttgtgttcgcctaatttttctgaagatcaatcttgttatctgttagagagtaacaatagacccccactaatttaagtagcagttaagaacaaaaataataaattcagagagaaatgacaactcccatctaactctgcttaccttgcagaagcacaatccaattattcattgaatcctaaacctacagcaggacactactattaatatgtagtttaaatcattagtactttgttcactggaaattatgccaaatcatagatgg

SEQ ID NO: 38771 - DNA, 680 bp, Oryza sativa
attccttggcttgtagattcatcactccaacctctgcatccgtcctcacatagccttccgcctggatgtgtctcctccccttctcttctcttctaaggacgcttgtcatttggtttgggcccgtcctaatccaggttgatctcatcctgagatccttaacttaattacatctgcaaagacccctatccaaataagagcactgtcttagtccgcctgggctgctatcacacatgccgcagactgggtgtctaaaagaacaaagatttatttctcccagttctagaggctgcaagtcccacattaaggtggcagcatggtcagattctggagtgggcccttttccaggttgcaggctgctagctttacactgtattatcacagggtgaacagcaggatctccgatgagcagaatgaggctcagagagggtgggcgacttgcctatggtcacacagcaaacagctggaatttaagccctgctcaggagtagcccctgagctcaaactctctgtgactctgtgactccctggaagacccacccgttggagacccacttgtctccactcagtgcattagatttagcttagctctttggtttttggttttttctcttttagcctctatctcctggtcaggttaattaagctgttgttaccaacccttcttggtcagtgaggaagca

SEQ ID NO: 38772 - DNA, 632 bp, Oryza sativa
gctatctaatacattcagatgcagttgacatttatggtccctcagtgccgcatggcactcccacttcatgatcatgtttggtttcaccccagtggtgcggggtgggttttgctgactcagttcagaaatatgtggagactgaggccaatagaggcacaaagaactaaagttggagtcggaaatcaggcttctgccatcgtcctgtatatgccttgaatagatttgcaatgtgtcagagctgagtggggtcaatttccaacagaagagaggctgtgacaccaggagaaaaccccgagttccttcgatgggtcctcaagccaacagcgttattgccggcgtgtcccatttttcaggaaggccaccctgtgggtgaaaagtgacagttgggaaggcagagagcctgggttttagttgagccttgagaaagcactaaaacctttctaggcctcactttcctctctctgtgaagcggggatagtaatagtcattgtccttgatggaacggtgtcccacccctccaaattcaactcctcctggaacctcagaatgtggccttcattgaaaatggcgtcattttaagtgtaattagttaagatgaagtcatactagatgagagtgggcctaattctact

SEQ ID NO: 38773 - DNA, 669 bp, Oryza sativa
aaattataagggtggttcaaattatagctaaaataaaccttaccaaagccaacttgccaaaaattttggcgggatttcttatgtatttactaaagtttagcaacaaactaaatatagacatttttttagcaactttatcaaaaaaattggtatgattaaaaatgtcatcaatctgaacaaccccataatatgggcgaaatttggggggcatacaagaagaaaaatacaatgggatacctacaaaatcaacattgtgtctttaccacactagcttgggttttgtgtctctaacatgtataatcatatattgttgacatcattaagcatgttaaaactgtgcagagtactagatgtggatgcatgatctatcaagtccgttatagtgcaaggctagcagatcacaattaactacgcaatggtgcgaacgttataacgtggttacttacaacaagttccccgtatcctgggtatgcagattcaatcggtactatctccatccgaagtgcccaaccaccgtaaccttcaacgatcggtgtgactgagtctattaaggtgtgaagccagttgacataggtatattagtattataacaatgaaagcataatgtgtaattgaataacaatatcttcctttacctcactaaaactaagaacattgagcaatccttta

SEQ ID NO: 38774 - DNA, 573 bp, Oryza sativa
aatattaaggagtgttaaattaccaaatatcttctgagctagatatatgatatggtttgcttgatatatggcggttgagtgttctcaatgatcaagctggggagagtttgctggcagttgtttgaagttccattacggggaagggggggggggagggtgctcattagttcgcatggttgatatagctatttgattttaatatatatatatatatatatatatgcaaaaatgttaattagaaatataagattttggcctacgtgttctttacacgtagtgtgtctatcataaattactttatacggatgaattaagtataaattaattagctaggctacttatagtgcaacatgtccgacaatgtttgagtctcctctactcaatataactttggcataatgctgagtagaggatatgaatttggcatatggtaacgtgtggtgatttctagactagttttttaatatggcgcatatggtaaattggtcatgtctttctgggtaaacaatgcttgtggtgacctgtgattattttattagacaggtatttttcaaaggtgccttaattcgaggt

SEQ ID NO: 38775 - DNA, 580 bp, Oryza sativa
gtcgactctagaggatccccgctgcaatgcagataaataacgaggaacaattcagtcttcagtagagaaaggatgtgcaattaggcattgcacagtcaacacaatcttcaaacatggtgcacactccacaaaaaaactaatcttttttcgatcttgtatgcaaggagcagagaaaccatcaacgcaaaatctgcagaaacaatcgctacctgcggttttacctaaccagcattgccatgcaaacaacttgccgagataggcggagccaagaaaaaaattgcagattgtagatggaagtcaatcgggcgcctggatgcaaacatccatagaaaaaccttgcaacttgcaaaggagagcataataaaactcaaatgcaaaatgcatccaagaacatgaaaaaaaaagaaacaaaagaaatggagaatttcaaggcctacatagtacataccgaacgatctcgcaggcggtacaaaaacctcgcaaaagggggcaaaagaagaagagaggaaacgacgcacaattccccatagaggaattaacctcaaagaacagattgaaccaaaaaaacaaaaagaaaatt

SEQ ID NO: 38776 - DNA, 1740 bp, Oryza sativa
ctctcacttagacatttaatgcatttgtcttggagctagtgataaactagctcttacataagagccaacatcctaatttttcactatctctttcctccacctaagcttataataggcttatagctcactattatacttgcttttacagtcactgtttcgggataatcctttctaaccccgacgcgtcgttctaccaagcacaggataaattcatgtgagtaagaaaaagataaaatgtcggttgataaataagttcgctgtcaagatcatgaaactaaccgaaagtgagttctctccaaaaaaaaaaagaaaagaaaaggaaaaagggcaagccaaagagcacgcactggttctcttctgataggagtagatgtgtcttcgcaacagggacatattctgaaggaactctatatataagggaaataaaattagggacagcctatactagaaataataatttggatgatcagttgactatttgtgggttggtttagttatatgtatatgtagatgttagcaattgacttttaacttgagattgcacaagcatgcacaaatacccttttttttcacactgatgctagaacagtgacttgtgaagtgaaaataggcagtgtatagcaagtggtatagatgagaaaatgctcaaacgaccctagcagttgttttttccaatagctctggtttttgtggaatgaagggaacttctccaaatttggaaaatgagtacagtattatatgcaacaatgtgattgcataatgtgtttggatataggcatatagcctagcacagttacgcttaatgtagttattgatcgtaaataaaatggaatcacgtgtcctcaaaagatagaagggcttatgggtggaatataagctaggtatgtactaaaacagatgttggagaccagtaacttttatatatctatccttatactgtaaaatctagtattgaaaaatcaagtatgttgaacatatattaacgttaagcatatgtgccgttgtgtcattggtgacttaacatcatgtttatttgagagtattggtgtggatttctacctattatatgaaataaataaaatattttaagaaataacataattttaaataagaggtgtaaataatgagctaccttttcttctaggaaatatattaattaatttttagaagcgtagagcaaataaaaggaaaaggcatccttttgaaacccttttcaccatcattatgctcgtgtgtctaaggctaacatcaagcagcatacgcaaacttaaaatatcaatcaaatatgaacatattccctcatactttattgatgtataaccacacataacccttgtcaccacgggtttattgacacaaaatactatccacacgaaattattcccccctcccactcccatttcctcgcaaagaaaagatgcaaatattccaatcctcttcatccgtaaccttcacccttcagcacagattcgtggaggtaataataataataataataataataataataataataataataataataataataataataataataataacccatcataaattaggtgtagttttgattttttctggtaacgtttgaccattcatcttatttaaaaaatagtgtaaatataaaaatggataagttatacttaaaatacttttgataataaaacaaatcacagataaaataaataataatttcataaccttttaaataagatgaatgggtattatagacaa

SEQ ID NO: 38777 - DNA, 683 bp, Oryza sativa
ggtgtacttttcgtaccactagtagtactttttcttttttctttttggctggtctcggtcgagccagctgaacgggacaacttccgaccattgaaacttctggataaatccctggtataaatttcaagtctaaaatggaatatatatttttttaatctaaaatatagtacatcagtactaatttttaggctgtttgaatattcctttttagtcacagtttgtcaaattttgaatcgccttatgtttcattcctaaccttctgattgcttgaaaatgtttggatttctttgcatttaaattagtattagagaaatacttagattgatctatacaaattttttaatattacaaatacttgtattttggaacagaggaatatgtaatatgggtaaaaagttttggcgtgtcacatcggatatacggatacatatttaaagtatcaaacatagactaatacttgtaaactgcgagacgaatttattaagcataattaattcgtcattagcaaatgtttactttagcaccacattgtcaaatcatggagcaattagaaaaaaaaatctgcctcttatcttacacgcaatctatgtaattaaactttttctatatttaatacttcatacatatatccaaacatttaatatgataatgtgaaaagtttttccgtatgaactaaacgtagc

SEQ ID NO: 38778 - DNA, 1589 bp, Oryza sativa
ctccggtagatcatcttattttttttagcgtcttggtcttaatttcctgacaactaccggaatcatgtaatcgtgacgcataatatagcacgtaattgggactacgcatcttgttagctacttaattaatttcgatggaatcaattggttgacagaccttcattttgcaacgcaaaatatatttttctcgcaataagcagttataaaattacctctaccaaacagcacattggtcgttgacaatagctactcccatctctatttaatgtaacgtgctaattaaattaaaaatattaaccacgagatacacctgtatctacgcgtataatacagtcctataccaatccatacccgtaccttcccagtaaaggaatattgcaatacgtatatctctctctgtgttgcagttaattttcttttctttaaatatacttgttaatttgaagatcatttcctaatgtaacctgctcgaaatcttcaaccacaaaatacacctattccagctcagacgcataccttcccattaaagatatattacatacttattctctctgcgtttcagagaacaattccaaatataattgtttctttgaagatcatttcctatctaatctaacctagtagtgaaaaaaaattccagccataaaatatctgtattatacgcatcctcagttctatgcatctcagccacaaaccttcccatcaattgaaaaacaatttttttatatgtaaatgaagtaggaggtctgtcccttttattttatacctagaagggaacaataaagaacaaactattctaagatataccatcacaataccagtagtacatatttatctctgtatttcacggaattatacttccaaatacacacatgttactatcgagttaatttcataatgcgttgcagccttatcctgcgatcaattgattacacgattaatttagacctaaacgcagcatttgtcgcatcgggtcatgagtcatgacgcgaggccagcgacgtaattacattctaaactttgtggtattttcaccaatatattttccgtctgaccttcgcgcggcctgatcccctcacggtcgtcgtcgtcttcttcccaacgaccgatcgatcgatcgatcgatcgtcgcggcgagaagggagatcgatcgcgatcggagccgatttgatcggcggcgggcggcggccatggccgtggtgctcggcgcgttcgtgccggacaccgcggcgcagtggcgcagcgtggtgaagggggaggtggcgcggcagctgggcgtggaggcggaggcgaggaagctgggggcgaggctggagaaggtgggcgccgcggtgcgcgacgccgaggcgcgggtggcgcgcgggagcgacgccgcggcgcggtggctcgccagggtgcgcgccgcggcgtacgaggccgacgtcgccgtcgaccggtgcagggccacggcgcgccgcctgacgaggggccgggagcagcagctgcagcagcataaccaggtgagatcgctagccttgaattccgacaaaagcaagaacaccttggtgacaatggcgtcgcagagcagctaatttttgtttcgtgttgtt

SEQ ID NO: 38779 - DNA, 557 bp, Oryza sativa
cccgagccatactggtatcatggttcgcttgatgtagataggtcttatgtacccaagtgtattggaaaggcgtctccaataaactcatgctggtatttggcggacctttgtctggtctttaacaaatattcttatttggacaacttggcctaaaaatatggaaagttaacgactggtgtcccagggatatctatgtgacttgactggtacaatttacgaagtatctcatttttttggggtgtcaaaagtagttcccctgtcggaatagttatgaaagtgggttgatcaagcaattaacttaacgatatattattcatatcatgtccttgaatgtgtcatccagtgggtaaggccgttaggatccccaatgggactgactgtatataagtttgctcaagatttgacttgggctgaatgagctctgttgttcaagacttcaagtcacatctgtttttatcagcttcttttagcttgagtatatgagattgacaatttatttatttacagaactaaaaataatttcagaatgtgtcaactctgtggaccattagttgact

SEQ ID NO: 38780 - DNA, 995 bp, Oryza sativa
tatgtactagctactataaggagtatatgttttattcatatcttttgagaaccaattcagacttgattaaggtttatccttttttcattctaagtatttttcctaaaacacaatatacatatagaggctcatatataaacattaccacactcttattcaaagttagagcatcccagcaactcgtctaaatttgatcttccatatagctatatagatggtcataaaaaaaaggaaaaagtacgaattactccctctcaactattgcacgcgttcaatttacccccctaaattacaataccagatatttttaaccctaaacttttcaaaccggacaaattacccccctaactcacctcgaagcggttttgatccaacgtggcgcacacgtggcggtccagtcaaccaaaaataatactcctaaaaaatagtggctcccacttgtcagcatcttctcctctcttctactttcttccaccttcccctcccatccatctctctctctctctctctctcaccaaggagcaagggccggggaacggcagcaacggcgtcaccagcgtgggaggagacgagcagcaggcagcgcgcgtctcgcgaccgcaacggcacgagctaggggtggcggaagacggcgcgacagtctaggctagggcggcggcagcgttcccggggtggaaacgggtcggcggcgggagacgcttggcagtgcgccaggcggcaatggtgtgcgaaacgagggcgcaaagatgggacgcgaccttgcttccatcgacgcacaggagggccgccggacgttgtcgtcgtcgtccttgatgtggccgagctccatcgccatgccgaagacttgctgcaacctgcagatgctcctgaggaccacctgcatcacgatctggaccacgcagtactccatggacgcccccgactcgatccctcatcaaacagaaactatcctaccatgatccatccagccagagatcggtcaagaaccgaatcca

SEQ ID NO: 38781 - DNA, 683 bp, Oryza sativa
tgctgcagctgcagctacaccacggctgatcgtatcagttcagggcctaggttccgggtgtacagaagtgggcgaggccagtaatcgtcatggtgctgtgcgggtggtcagatgatgtgcttgggtacaactgttttcttcttcctgtaaccgatcaggattatgccggatgtgttttggcactaatggcggctctggcaattttagatgttcacaagaatcccggtttttttcccatgtttgatttcctcgccactacaaactgacgagaattggcaacaacgctttgcgtcgatccgtccacggatcagagacgaactacactagatgaagctaaaacatgaaatcaagaaggataagcttcacctccaaatacggggcagttgaggaggagcggcaccgaggcctcgcgccctcgccgatgattgggaccctgtcagatctgcggccaccggtcgccggctcgccgccgccatctctctctgatctccaattgagcaaggcaagttcaaggcttcgagaggctgtgggcccgcggccgaggatgaggacgtgaggtgatacctgggccttcatagatagtacagcccatatgatgtggcctgcacctgtaattccatgactagacaatcctgggcaaaatcttttaaaaagggaataagtccacatgatgaactacttgc

SEQ ID NO: 38782 - DNA, 680 bp, Oryza sativa
gttccaaactttcagatttagatctgattattggattgcaagacagatgtggcagaaacacatcttgggaaaccaacaatgtggcagttacatgcttgaaggtataactccatagtctcatctcgaatggtacgcagtcttgaacatttgcatttcaaatgatggcaatgcttcgatgctactgctttgagttgaccagagcattccagagcacaacataacatatgtcaggagatcttatttttcatgtttggactataaatagactaccatttgatccccctgtgttgctaattttataccattcctggaaaatgtgtatatcattttctttgctcgatctagtaaacaccgttggaaaatgttcttctcctcatctccattttctgaacattgagttatgtgattacttaatggccttctcattgctttccatgtaaaagtaatttgatttttgttctgtccactaaataaggatgccagtattcaacaagctgcccacttgcaacctcagtgttttgattacgatgaatttccagcgttttgatatttgcttttggctttaatttttgccacccatacaaagttttgagcattagtcatagctaacctagttcctccaaagattgtttggcaccagcgacctcatgatcccaccggttctggtcgacgctgggaga

SEQ ID NO: 38783 - DNA, 886 bp, Oryza sativa
aaaatttgtcgacaaatgtataggtggtcccatgtgatatatttggtccgatataaagtgtggtcgcgtacggtaacagtgagaagggaatttttctactacgtactacatccgtcccaaaataagtacagccgtagatatccgtgcccaacatttaaccgtccgtcttatttaaaaaatttgtgaaaaatttaaaaatatttaatcacacataaaatactattcatgttttatcatctagtaacaataaaatactaatcataaaatttttttaaataagacgaacggttaaacgttgaacgtgaataatgtaaaactacacttattttaggacggaggtagtaaaaagatgggtatgcaacttgagtacgtgcttgacataactgtgatgcagtccaagaacttgatcgcgaaggaccgagatcctctgagaagaccgtgactttgatccattatcagtcgtccgatctacagtatctggtgaatagtaaatcaaagcagtagtttttacttttttactgtgtctacagtaaaaaaactgcagagcaatgttttgcactgtaacaccagattcattttactatgtttatcttccgttcgcttccaaagtcagaggagccggatccgattggcgaatgctgccaacgatcctgacgttgttgacctgacctggcacgacaatgcaaatccagtacagctgctgtttcagatgattgacgacaagccgattgcctttcccttatctgaaaaaatttggtcagatcagatgagtcatgaaatggatggatgcatagaggtcggaactgttggatttgtctgacgctgaacgcgatcgatcgatcgatcgagtgatctctcgaaaatgatgccccgtacacgtaggact

SEQ ID NO: 38784 - DNA, 604 bp, Oryza sativa
tagttaaagaagattttggagtttgtgtgctaattaagcggtaacatattatacaagttgccttttattgatttagagcaggtttaataatgtcgtaaacttgctaaccgtaaaacatccacatcatctatagcacattagtatagattgctcatataacaatggtctttattactatcatttacggtaacaactgatatattttttaattgatacatgtcccactaattactgcattcttcactattgtccaagcatgaaccaatctccaccaggtttacttctctttcttcattgtacagtgtgctgcagctgggtgataattgtatcgtcggctcgcgttctctctctaccattttctcctccagcacagcagtggggctgacttggttacgctatcactgatccaggttgacctattagacatgctcttatagatagcatagttaaaagaaaaaagtacgaattacaccccccgacccgaactatcgcgcttgaccgaattaccttcttgaacccgaaaaccatgcattgctcaccctgaactttcaataccggatgaaataccaatctagagcggttttatcctacgtggcatacgcgt

SEQ ID NO: 38785 - DNA, 2206 bp, Oryza sativa
  unsure (1)..(2206): unsure at all n locations
tcatgtaaaatggattggctactaccatagaaggtgctaaagtttgtcaaaattccaggagcgtttctcaaccttgtggctctgctttctcatgttataatgtgctaagcagctgcattgcagttcaagatgtattattttatacacaatatttggaaatgtgagaattgccactaatcttaagtttctcttaagcatgttctttaaatacagcggtatcaccgcttagttaccaaagacaagaataacaaacttttttttgaacggaaaacaacacaagatagtgccttttcattgaataaagcaggagaaaatacaacccctaagggtaaagagagaaaaggtgttacacgtaaaatatacactatacagggtgcgggatgaactcacgtaaacgtttggcccctgccagagcccaaaggctaacctcctctttgattttcgttagcagggagctcgttgccatctctttatggtcaaagatcctccgattcctctctttccagatctcccagacaactaacacggtgagggatataagtcccttcttcagaatgtcgggcgtgtttgccatgttctcccaccgctgctgcaccgagtaggcttcttcccaatggcccggttccaaatatagaccaaacaacctgacaatagaacttgctgcacaaattatatctcatctttctattttgtttgatattagttttccatttctaaattaatgggtaagaggaagaaaccaaagccgggagttcattttttgtttactctttttttctatatatagtntaagtgataatgttgacacttcttaccgacatgtactataaagtgattatanaatctatcgattgacttccatgcatgactatctttgtacttaatattactcaaactggtcagaagtatgctttgctttagatgctctcagcagctcttgcatagtcatattatttgcttttctttgagtactattcaatgctatcctataatcatctgtaagctacataactctttaatgaatggcagggcgccgcgaagcgcgcctaaagtcgtgcttcttaatttcatgttacatagccatacataaaattaaattgatcaatgatcctggaaaaaaggattaattgagcaattatactgcacagcttttgcggtccatttaatgtaactctatattggcaatttggcatattggcaatttagcatattgatcgataccagtatcatgcaatggctccgttttatgctgtgtgtatgcatcatgcatatatgcagttagaccccccctagaaaggtcgaaaatgctgatggctaacctggtgatatgataaacacactaatatacatgatgcatcaaagaaagtgcaaactttacccctcgttgatttactggcacatttgttatgtcatggcagtcatgctcatgttacattgcggtatagtgttanagtgtacatggctaccggtcaggctgaaatagagggacgtagaaatcgtgtcagacagatcgtggatcatggatggatgatggatggcagaagcagaacacatcaccgaccggtcaaatgcacgccgagatcacttagccagttgggctctaaacagacctaccacccatgaaggtccaataaacaacctaggactgaacctttagagcccgtgacccactagttgggccaaaacattttttagcccatgtaaatgtccttgtcataagggcgattaggtcaattcccgagtaaacaaaaaccatagagttgcaaacatggggctttaaaactataaatagaacccaagtggtttgtatcagggcatccaattttgtttttaataaatcaatatacatcccacatagttaagtgataacttgcccttcagcagatttgtttgtcaatcgacaacaattaccaagttttggtagaatatgataaatgtgtttgctaaaatttgacaatgctaaaatatggtaatcttaatagtagcaataaactaaataagtcctgtatctacatacacatccacaataatattgtttatttcttataaatgatccatatgttaggtagcagagcctaaagactactataaagaatacttttataatatgtaagacccactctattataaacttttataaactagcaaaatattgttttatatctttgcaataaacatgacacttgcaaactaataaaagagcttt

SEQ ID NO: 38786 - DNA, 730 bp, Oryza sativa
attaatggaggaggaggaagaagaaggagctagctagctgttagtataagctatgggggcagtatggagcagagcagctggctcacatgcagtgtggttgaaagctcagtccagtgcagcgcagctctagcttcacgatcccatttacttctctgtcgatgagcgatggagtattggagtgtagtaccaaagagtgtgtacttctactgttctactacaacaatcatcactgtattctccttcatgttattataggtttttatgaaatttatgaaaacatggtggagagactgaaagcctgaaaagaaaatctattatgcatttgcccataattaaatcttaatattttgacgatcggaaacagtctaatacgatattttcaaaacgaatatctctctatatgtatatatatataatggaccaaaattcgtgccttctaataagggtgtgtttagttcacgtcaaaaattggaagtttggttgaaattggaacgatgtgatggaaaagttgaaagtttatgtgtgtaggaaagttttgatgtgatggaaaagttggaagtttgaagaaaaagtttggaactaaacaatgcctaaatggtaatggtacatgcatgtacatccttatagtatactaatatgcactacttgtagtagatttaataagggtagcatgctgtatgataaatgataatagtacatgcacaagcatctttatagtttactaatatgc

SEQ ID NO: 38787 - DNA, 2456 bp, Oryza sativa
tatatcacattcgtttaaaatctcttatttttttgggacggacggagtacgttttaaattgagtgaatattagatgttcgaaggtgcattgcagttttacttctgtttggagcaacgaagccttccatgtgattatgtgaaataattcaatttgaaaagattccttccaggtttctgttttccaatttccattcaaggcccaaacaagaaatttatttctcgctgttggcgcactatcccatccaaatggaccaatgatcatctagattcgttgcattatgatgtattacattcaactaaaatctttatatatagggactgagggagtacatgagctgcctgacttttgcttttgtgtcatctgtcactgacatcgactaattaattcgagaagacgcaaatgaggaattttgctacacttggcggttgattagcatttgggccttctaattatgcgtgattgaactttgcacgttgtttctttgccaaagagtggtttttctacgctttattagtgctttacagatcaactgaatggtggttcgagtcaccacaatgtcctttggatgttcacaaatcacaaatacttcctccatttcacaatataagttattctaacattttccatatttatattaaagttaatgaatctagatagatatatatgtctagattcattatcatcaatatgaatgtggaaaatgctagaatgacttacattgtgaaacggagggattgtgaaccggagggagtagtgcttagcactgttcgtttcagaggttggaggaaggagcaattgacttatcgcaaaaaggcacttaattgagaaattagttaaatattaactatgacaaaattaaaaataaaattatttattttccttaaagaaacttctatataaaattttacttttcaaaaatcacaacatttagcaattttaaaaagcgtgatcgcaataatttaatatagccaatagctgaaaagaatcatggcgcctaatgggttggtctcagagtgaagcaagacagttcaccttacgaatctttggagataatccggagtcacttccttaccatctggtaccccaaagccagatgaaaaagccgcaaaccaagatttgaaaagatgaggtttgagcaccaactgtttcctcggcttcatcatctccgagagagcagttcaaatcaaattgctggctcaagggttagtgaagtgaaatgcagataccatatgacacgaatttaaggttacgaagtactcctttcgtcctctaatataagagattttgacattttgcttacactggttgaccattattacttaaaaaaatttagaataattatttattttatttatgacttaatttattatctacagtactttaagcacaacttttcattttttatatttacataattttttttaataagacaagtgatcaaatcttacaattaaaatattaaaatcatttgtattagggggcggagcggcggagggagtatgaactatgatcaataatgaatcgtggtggcattttgcatcatgccatcatgtagggttgactgccgaaaataggtagatgaagggggtctagcttgtagattttagatggtgttcttttctcctgaaaatgaagatgaaaattaagtttttttacgcaaaacgatatggtattaatgtatgattgattgaattttaattattataaacttgaaaaatagattaatatgatattttagggcaactttcatatagaaagttttcgcacgaaacgtaccgtttagcagtttgaaaaacgtgccacgaaaatcttaatgttcatccaactcttattgaagaaaagatcaggattttttagaaacaaccccaccttttggcttacaattataatctgtaacggcttattaatatgaagtaatttataagtaaatttttttgatttatatgttctatcaggtatagtaagcatcgtggagtactaagaagaacactgaataaaaaatatttattattttgctatgtatttgtcctcacctctctcttcatgctattatttgctaaatggtatttcctccattttatacttatataagtcgtttgattttttcttagtatttaactaaatttataaaaaaatagcaacaactgcaacaccaaattagattcattaaatttaactatattttatattataagtcgtttgagattttttagtattgaaaatgtaattatattttctacaaactagtttaactaacaaaaaaaaagtatacgacttataatataaaacagagagcgggagtatactattattgcttgttatccatttgtaaatttttaacaatagtttttgttgtggttggtagagatacattggtctgcctgccgtagcagagtttgattaagctgggatgtactaattgatcatttctcacatataaagcgtataaattata

SEQ ID NO: 38788 - DNA, 2860 bp, Oryza sativa
ggactaaagatcatctttagccccggtttttattgcatccgggactattgtggaaatcggccgaccgacgaaagatggtttctccaccagtgttacttcctctaattaacgtgtcagcggtctaggtcacgtaagagatttctaatataatgtatgcgtttgttcggagaacaaagggagtttgtttgtttcgttttccacacgcacgtttcccaaactactaaacgatgcgtttttttaaaaaaaatatatatgaaagttgctttaaaaaatcatattaatctatttttaaagtctaaaataattaatactcaattaataatacgctaatagcccacctcgttttgcgtatctttccaatcttctctatctccttctcctcaaagtctcaaacacagctacacaagatttctctggtatactgtactctaacatacgtgtgtacaaacatgtcagcttcacaaaatcggagagagagagagagatcgacgtcgacgtcgctgcgaggctagtgcgtgctgtgccccgcaagctccggtacgtacttcggtacttactctatatctacacacgtacgtgtgctatagctagcagctgagcttgcgcgagctgcagggaattggttaatggcgtcgccgccgcgggaggaggccatggatcagaaggcgaaggaggcggcgccggcggcgagggggcacccggcgctgcggggcccggcgaggcgggagcggtacacgcacgggctcggggcggcgcagatgggggcgctcagggccatgtgcggcgcgctcatcccggcgctgccggcggaggaggacgacggcgcccgcggcggcggcgacatggacgtcgagcggttctacctcgccaccgccgccgagtgcaccgtccccgacgaggtgagcgcatgcgtcgtcatcgatcaggggcgacgacgcatatggtattgatttgatcgagatgattgcgtcgcgactgatcagcgctgtcagagaccataatcaactaatcaacctgatgactcaatgcttgtccctccatgagtacattgtaaaacttttgaaagcttcaatatatggccacttattattttgttaaaaaatactttttgccagtggcgagttgattagtgtttttagaactagggggccaagccccccattgtcattactaaaaatgaaaataaactacagcaagtcttaaaaaaaaaagagagatagctatcgatagaaagaccaggtcctagccgataccacaaaagaaacatccaccctgcccattaagactaacaggaaactaacacagctcgacccaagccctgataagctgtagcaatctaacagaaattccatctgtcttcacccaagctactccaattcttcgagttgattagttggcatttgatcagtcagttaactgaaacattagatgcagtgcatttttatcatgatctaatcttcgtagacgtagttttctcgtgctaattatgatagctacactaaccaactaaccacttttgcccccttctttcgaaaaaagaaacttcggacaataggcccgaaattattattattattattattattattattttttgcacatttcagtcccaactattcaagtcaactctcgaacaattgtcttttaataactactgaaaaatctctgattcttctaactatttcagataactttgataaacaccaagttgtgtttaatttaacatttttttttctctttgtctctaatctcttgcaagaaaaggttgctgagctgaccatgacacggtgcatctgggaggcaggggtgctggtgaggatcatcctgtggatctggccacgaggggtcggcacgctggcgctgtgcggcccgctgtgcgtcttcggtgaattcccctacgtgcgccggttcgccgacaagccggtggagcggcgggagggtgcccttgaacgctcaagaacatttttgcgcttataatgtcctttgccacttcgtcttctacaccgtggtaatgttaattctaacgaaaatggttttttttattacgcgtaagacatataaaacatgaacgggtgatatatccctaccttaactagtaattttttattgacagctcactcacgtatattcatcgattaccctaacgggtggagtcgagtcatacaccaacgaggccacaactccaccaccttacaactagtcgtactttccgaatttgtttcgatttgaactttgcatagtaaaaaaaaaggatattgctaaaaaaagtttgggtaaaaaaaactttcaaatataagcatgtagtgcaactatatgtaatcactctttaacttaaatagtaatctctatgattcaagctacatatatttttttaatacttatacagaaattacataaaattacaatgtaattaaaatatacttacggtataattatattacaatacagttacatttgaaagtttttacataataaacttgtggagtttttcttagatagcccctaaaaaatctactcctggtttggtaggttccaagtgttaatatatcatatagtaagtttagactgtgaagtacttccatcccataataattgcattattaagaatccgtcttaggcacgtacatcggtgttattagtggtctctctctattgccatgcaagtaaatttgatgacatggaagaaagagaaatgtgtatggttgttatgcatgacaacagctcagagtcgactcttagtatttattagagcaaattttgttgcatggtggtgaaagaaaggaaagaaaagtaagaaaaagtattttgatacattaatgattagagaccatattgtctctaactgttataggatgctagt

SEQ ID NO: 38789 - DNA, 2030 bp, Oryza sativa
aatattttaagagtatcttttaactaccatcaattaatattaatttttctttttttttcaccattatccttctctttcactcccttctctttcactccagaagtccagagagcttgagagaatgggaggacgcgagcgaaggacggaggagcggaggggcacgagcagctcgccgccggtgggagcggaggggcggcgcgagcggctcaccgccggccagagcggaggggtggcgcgggcgaaggggcggcgcgagcagctcaccgacggccaagcaaagtggcggcgggagtggaagggcggcgcggccgaaggtggtcgacggcgggagcggccgacgaaggtttgcctcatcctctctccttgatctaccttcattacttcaccctctgcctcgatctcgattcggatgggatgggagaacggatgggagcggtggttgcgggatggcatgaggagagagaactctgggaatagcgcatgcgccatctatggaggcctagagggggggtctaatgggcgatcgatcgctagggcgatcgcccagtgatcggtccacccccccagctcctatagacactcctcccacttccccccttcctcctccccttcttctcttcctatcagagtacaccacaaaaaaaattaaaaaaacaaaaagttagaaaaatttatgtataaaaaatttgaattcaaattcaaatttgaatcaggtatgtaaacttttgacttgtagattttggatctataaactttaggtgtataaactttagatgtatagaaatactatatatgaaaaatatttgaattcaaattcaaatttgaatcggatatataaactttaggtctataaactttagatgtatacaaatactatatatataaaatatttgaattcaaattcaaattcgaatcggatatataaatttttgacttataaacttttggtctcaactttagatgtgtaaacttgaggtgtataaactttaggtgcataaatttactaaaataggaaagtaatacggtgccaaaaaaggaaaccaggtgaagaaagggagggggagaagggagggaatcgatcgctcgctcgctcgcccagtagcattcccgaggcccagatggggtatctgttggagccggattttctccccccatacactattttttggatggaagatgggatgccggaattgatgggaatgctcttagatcgcaagttttatttttattctagtattaagtaagtgatgcatcattggttgatagagatgcaactcaatatgaatcattgtgggcagcacccatcagggtttcccaaaccgcgggggccagggttcccgcgcccggccggtaagcacggttaccgcgcagtaaccgcggtaaccgcaaaaaaccgtacaaaaccgtgcaaaattaatcaaaaatttaaataattttttaaatttatttgaatttaaggaggttacaacggtatttatattaccgtacccccgcggtaagcccggtaaccgcgataacctcacggttaccggcggtaaggtaaaccctggcacccatacgacctaaccatgtcaagattcgatcggtttttcccttttagaaaaaagtaagagatcaactacacttcatttcattaagaaagaaaacaaaccgcccatatttcattttttaaaaaaacaaaccgcccatataaccaaggcctcacgagccattcattaaaaaaaaaggctcacaagcacttcgtcaagaacttatccacaatgagcatcacacaagacgacacataattattttctttttttagaaacaacgcagacactcaccttacccctataagcatcttcaaagactgcgcctcactgttgacaggtacgtcgcctatcactaaaaacacagcgccgttaaatcctataaaattcgctctcatggggagtcgaactaagacctcaggtgctactgaggcttttgtaactattaggctattaggctacagtacggttgtctccgctatagacccgctctcaatcctc

SEQ ID NO: 38790 - DNA, 1734 bp, Oryza sativa
tacggtatctacggatactgtcaggagagacatagcgctgtctttgatctcgccggatgcagattcgaggagaaagactaccttgttgtcgactacgagtcacacttcagaccgccaaatcaacaacagttagataggctaccccaaatattgtactggtgtgattatggtgaataagagcaacgaccggcttcggccaacaggagtagggttattacctgacaattcagggggcccaaacctgtataaaaatcctcgtccacatctcttttattataatctcgcatatatcctagtaccaacgatccctatactatgtaaatgaaattgcgacatcaaacgtcggcaatatgaatcgaaaaaaaaaaggagggtttggcttacttatctggactgtttaattagctcttgcgttgagatatatgatatcatgatcgaacaagagaggcggggctagctgtaggcatgtatggatgcacgttatctatggtactgttacttgatatgtaagtctcacttgcactctctctctttcgactgcatgtaccaagatgcatgcattccccttcatgagttgatcatatcaaaatttggtcctgccaaatgattgttactgttcagtagttagctgttgatttagctggaattggagcttatgtacgtcgaattgaatgtgaagaggcggccggcgtcgcgtgtgtatatatgctcactgctcaacaccgtctcttttaatttcgttctgctgtactagagttatgagagactgtacaccgtactcatacataggctgtgtttagttcacgtcaaaattagaagtttagttataattgaaatgatgtgacggaaaagttagaagtttgtgggtaggaaagttttgatgtgacaaaaaagttataagtttaaaaaaaagtttgaaactaaacacagtcatattcccgtaatgggcagcaatgatgggcgtggccgtatttggttatgaggttgatcagtaatcaggcttaagacaaaattgtcattaaaattttttttgtcagcattcgaatattttggagtaatcacgagacagagcatcaccgggttcgatcttcacgtacctaaattgcaacaaggaaactttgaaaaagacgtgccatcaacaatcccatagccccatactctcgattcatagcccccacaacccactccatcttcttcctctcgtcgctgccccatgccgtcttctcccggtttgtgatagctcatgccgtgtttttttcattgagttgaaacttatcttccgcgcacttaaaatagagcgactcactgacacatatgattgattaagtattatctggagtaacttttttaaaaaataaaataaattaatgtgatttttagagcaactttcttatataaaaatttcttataaaaaacaccatgcttaatagtttagaaagcatgtatgaagtttagacaagtgagaaaaaaaaccacatccgtcaccatctaaccagttctttcttttattacttatttctgccatcaccaaggccgtgtttagtttcctccatattctcaatttttcatcacatcatatcatatcaaaaacttttctacacacataaacttttaactttttttccaaacttccaactttctttcaaactttcaacttttttcaggatctaaacacggacttttaggtacattctactgctagtatatactactagtatatttgatctaatggtg

SEQ ID NO: 38791 - DNA, 756 bp, Oryza sativa
actttattatattggttacaatagatattagaaataattggttagccctgcttagaaccattagcacactattgggataactcatgattcactattatttcgtgatggcttattgatagttcacgatggtcaatcgtgattagttaattaataaatgtgccaactataacctgataatggtgggttgtgagcacatggttttgatggtcgtgctcatgacaattaaggaccggttcacgagtttcggttgtgaaacattaatcgtgccaaccacaagccagcatgggcaacggctttatcttttgtatagcatagttcattgcggggccccagactgagaagtggcggagataagcccacgggggtcgctggggagtccatgccttgtttataaggggtgattatgatctaggaaggtgcactgcagtggattgtgttgtatgcggggtattgtcacaactcctttccgaggtatcgtggtggtattgaggcacatggtgacatgatgtggggttgtgtcttgtgggtacagtggtacacctctgatcagagtaaaactattcgaatagccgtgcccgcggttatgggcgggtctaacaatgtctttcatgattagtttcacacttctcaccatagtaaatgatgctttaactggtaataattagattagctcctggtttggaatggtatattcctggtttggagatagaaccgagccgccgggatggttgttcagaatggttgggcctatcaagg

SEQ ID NO: 38792 - DNA, 736 bp, Oryza sativa
tgttatcccatcctcagtcatgcctacctgacatacatgcaagtcactgaggagcaggaagcaacgaggagtcggggtgacgtcatcatgcatgcatgttaactttttaagcgaactttaaaccgatttttctcttaaattacttatccaaatcatgattcaattgcaccattaaattcgttgcaatcaaatcttcaaaacaagaccacacatggatatattccgacgaaaaaaattaatttattattgaatttttttaaaatgttgtacgatgttccaccagatatatcggaatggtttcactaagtagatcgaaaatatttcactcgtttaaattggatgttgtttcaacttatataaaaacaatgtttcagcaaatagcgaaagaatgtttcagttcactgcaacattagatctatacatagtgaaacattgtgagtacactaggttaaacatttttcggtggaacaaaaaaaaataaaccaaattcccttaataggagatgtccaaaatatgtgggctttttgttgcaatggaatgtttcgttcagtgcaacattagatctatacatagtgaaacattatgagtacactatgtgaaacatttttggtggaacaaaatataaaacggatttccttaatagaagatttccataatatgcgcgtgatttgttgcaagggcgtcttctataatatcaaaatctattgcaacatttgatccgtacacagtgaaacat

SEQ ID NO: 38793 - DNA, 740 bp, Oryza sativa
tgttccgatcgaacatctaaccaaggagaacatttagccagttgtttaatgagcagatcatatggaataatggcttgctttctgcatgaccgttgattagtagtacgaactatctatagttatgtatgatattttctatgagagaaacgcgactaatatttgagttgagttttctgtaacttctactcgttggagtgaaataaaaataagaagttttccttcgtttttttttggctattttagcttattgtgttatccaaattctctattgtcatctttgtccgctatgccccatctttttgtttcgtagttgctgactgtcgtgtgaattggagcagtacaagttcttctgcttcttctgcggatgtagcagaacatggatcgtagttttctgcttgtgtttgtatttgggtttagagatgtagcagaacatggcgaacagcagaactgggagcagaacatgacttattatcgtccagcgtgttcgtttctggtgaaaacataaacgagagccaccaccacctaatacattcgcacctgctgcaggactgcaaatgcaaaatataaagaaaacgaattaggaacagaaacgatcaagaaaagaatccaaaagatgaaaaaataagcagcaaaccttagaccggaattctccatatgctagagctttcatcgttatctgctacacagccgccggtgaggccactaatctgagctcagttcggttatgaaccatccaaacg

SEQ ID NO: 38794 - DNA, 721 bp, Oryza sativa
  unsure (1)..(721): unsure at all n locations
caaaaacatcgatggatcatatccgactcagagcgatttttttaatagacggtgtttttttcttgcacggttttttaaaaccatttgttaaattggcgcgttttttctgactgttttttcctcgcatgttttctttaaaaaaattaccgacgatggaaataattttaaatgactacgcaatgtatagggttgccaacaaagatgcatgccacgaaatgaagcttcacattatctaatgtgtgaaatgtagctgagtagtttttattttttaaaacagacgaatatccaagttcaatttggataacagtgcctcacttgcactatctactggttgagcgatacaaaagacaaccatgatatctccaatgaatcagcactatttaatcagttaaaagtattgtatgaaacaacacaaattgtacttgcatcattaattcatcatcttactctcgcagagttccacttgagctattaatagaaataacactgttgcattactcacctgagaaaatgggtgtacataaacaacatgattaaatttcccaccagtaacctatgatgtcataacataaaaataaattagatcagtacaggagccaatgatagtatatcatggtacccataggtacaaatgaacagcattttgaaataacatcagnctatatatatatatatatatatatatatatatacttatatatatacaactgattagaactac

SEQ ID NO: 38795 - DNA, 685 bp, Oryza sativa
  unsure (1)..(685): unsure at all n locations
ttcctgcagcccctgagcaagagcatgagattacttcgccatggcaaggacaaaagcatatctgcatatgccgcgagggttcgctgccgtcgacttttctcgatctctatcgagagttcagttttgtagcgatagtttatcttttcggcttttgacggaagaaaataggtctcggcgacagattgttcttttttttttcttcaccagatttttgtcacatggttatttacttccccaancncctcntcncgatcttcttttttttcaaatagtttggatcatttattctaagctatttgttctatgtaaaataatctattttaatagcccgtgcaaaaatcatatgtgttgtctcagttttccaaatatgtgtttatagaggtgagtgtgtgaacgttatactgtgttttaaaaaaacatatatattgtaggccagctatttgctctaaactattttgtgttaagctacctgtactaagttattttgtttttttaatgtttcttaaccgaaaaaatggaggggtatttggtaaaaaacccttttaaaagggggggggggaaaacccttttcccaattggggaaaaagggggggcctcgtcaactatagacttgttggctgacgggtggttagtacagcgctaccgatgccatgaaatggaatttggttaatcgtggagtgaggtc

SEQ ID NO: 38796 - DNA, 681 bp, Oryza sativa
  unsure (1)..(681): unsure at all n locations
attcctgcagccctatcaagaaaaagaacgccacaagtctcatctatggcaacccgggcggctaggaaattttgcatgcaacatcaagaatcaggtaaatttgagataaatgtacctgaccttatccgcaaattccactgctgaagcattatgattttgaaattgcaagatcaaattagtggaagagcaagcagcagccgaccagggacgaaatgtggtgggcgttgcgaatctaatttggnaaccccggcgagttgggtagacagagaaccgcttatggcagccgaccggttacggcgatcggtgcagaagggtgcaaacgatttgtgggttgggttggagtctgggcttgggcattgcgcttgaccctcgccccattctctagcaacagatcaatagggaaaggaggcgctatcggctgtatcggtgacggcgaccaacagattttgacggtctctccatggtcatcggcaaaggacttgcacgtggcatggtgggcagagagggggaaacgaggggggtgttcggttttcccgggccccttttttttttccccgcaaaggttgaagggggccccgaaaacccccccccagcgaaaaattcgcgagacaatgaggaattgaggaggcgcaatctgtagcgtggaagacgggaaggaaaggggaggaagaatcgcgtgga

SEQ ID NO: 38797 - DNA, 689 bp, Oryza sativa
  unsure (1)..(689): unsure at all n locations
catctcaattgttgctttctccggcatcctgaagaagaattggagccaacaggctcaaacccatcgaggcattggcaacttgggacggccgacggggaaaaagggggggttccgccaagtaaaagggccccccccccggggaaaaaaattttgggnggncncncacacgnnaagccataaaggtatcgcagccaggggcccttgggagttgatttgcgacagtccatgaggacaagctgctgttccaactcatgaacctaaagttgcccatgtagtcaatcatgacgcgcgtgtatggtgaatcatcagagattgtgtacttgaggtaaaactcatccttagtgttcacgactgttttatagacaaaagaggtgctgttgtgcaagtatgttgcaccggacaccgagacactatcaaacagaatgaaacggtaatatgcgccccntctngggttctcggtgcgccagaaatgaagatctgaaagtttgacgtgggatcgccgctgaaggagaaatccccggtggatgggtcatctgggcccttccaagcgatgaaccgcatggcgacttgtccgtaggatctcactaaaaacttcatgttgggcagaatggtatcagttggttgatcaaagctttgccatatggttgtattgttcgatagccgaagaaccaaatttcctgggggtgcag

SEQ ID NO: 38798 - DNA, 1606 bp, Oryza sativa
ttacagtctcaaccgtttaaggttattaaaaatacgcggaggtatgacccgctaaatccaatagaatgcattcagttccatctcaaaaaagtggtgataagaaattatggaggaaggaggtcagatgtcgactttgccaagttctttgttctgaatgcaaaagcgctaagagaaatggagttagctggccttaacaattgcaatcagaaatggttggccaatcaacacaggcggcttcaattagaaaagaaagcatctcaaaatgctcaatttacatttaaaactacccatacgagtgatttcagtatgaacaagcacacccatgatttgtcaatatctgatccctttgataggtctttatgaccatgctgctctcggatatgatacacatgcagtcttgtattatgttcaaatgttatatttgtaccttctcttgtttggattttagtgtcgtactatgtcagcaagttaatgagttatctttatttaaagccgcaacctagtaagtttttaccactaatacattcccttggctatggcagtcctattttctgatgtgtaatattattgctgcccttgaattgttccatacatttttccaactgaactaaattaaaaccacacgcacaattatgctacatgtggaaagtaatttggctggcatatccagaatagcctgaccatcattcctcgaatgtatttaatagatagtaatctatttgaatttttggtgcgtaaatgccatttgtggatgctttttggtttcacagattataccattctaatttgataacataatgtggattttatgtatcaactgattaatatatacagaagcgtgtgagttccaatcaacacgtcgatgtattatattgtattgttttgatgtttatacaaggttaaaatagtgtgcatacaaaagcatgtgaagttcaagattcaaatcaggatttctcaacatatttatatcatatactttagatgcttggagaaggtaaacctgcagtttggtcccatttaagcctatgtaaaatgaggaaaacgtgacgctactgtctttattttcctgcaatatgtattatgatgtactatatattatattttcacaaggagtgtttggtgttctatttaatgacttagtcatatggaatagtatgagaattaatgttagcataaaggctcggagttaaataaggcggcagttctttttactgaacgttcatgcgattagatctgtactaccaactaattgttatgttctgaaataataaattcagttaactgtgactggcagagatgaaatatgactttgttacttctgtgaagaactgttgcattgggtgtgctttcagtagtttgacgttaagcaatatcttttatgttcttatttagaaccgtgcagtgcagcatgttgagtcatccattactaggcctatctaaataaaagataatcccttgtatacctttttgtttaagccatatttgttttagcagtatatacacttctggtttaattttggttagtgttgcaaatccgttagtggagtcataacataatatcagctaaatacagctaccttttctgcacaacatattatactgtgtg

SEQ ID NO: 38799 - DNA, 739 bp, Oryza sativa
gtcacatcataatgagaggctttttagtctctcatcatagccggagtcgatttatccgctctggtcaaacaggagcccaaaagtcttcatcccttaaatggcgactgacaggggcacccctcgtgtcagtcgccatttaatttgacaggccccatcatcaagacgacatgcgcttggcttcccaagttaagagacaagacatgcatttaatgcaaagattgtaatatttctccactaagttaggttgttggacccatgtggtaaccccttaaggtataaaaggagatccaggcctacttagggagggggatggacggattgaggggggcagcttctgcccctcatgatcaacaccttctactccaataaggagatcttgtaatttctcccacaatcagcatagcaaaggagtagggtattacgcttctcagcggcccgaacctgtataaaccccttttgtctcatcgtcttggaggggcctaaccctctcaagatcacacagtttcgctctccaagccttcgaatctcacccactgcccccggtcaaacctaaaaagggaggcctcacggttccctggaggaggagttcacccttcgacacgcacgttaacgttgttgtgtactcgtagtcatccgaaaatcagacgatctagttgtgtgtgtagcattttcgaaaatatttaatctcggatggacgtcaagatttgtaccatgttatctggcctggaacacattttta

SEQ ID NO: 38800 - DNA, 649 bp, Oryza sativa
tgtggtggaaccggatatcagaagtttgggagtgaaatcggcttgaaccttttggaccaccttgtgcctgtatttagttaaaacttttcacttctgaataatatattttgttatatatctagatctgtcttacaaatgccactgcagatatggtttatatttattacttttattgcattactattagcaaaattgtgtgtgcggataggattgatttgaattattatatgttttgcgatgagtgctagcaattacattgatttgaaaatatactacatccattttacttccttactctgctgaacctaaaacttatcatagtatattaatgtatggaaaatatatcgagtcaatttgcatatttttttaatctaaatatacttggagcttttcttggaacatatcttagaatatagggatgcacatagtttgttcatagtagtaaatcaacaatatatgctttttttttactactaatactacctaaaatgtttttctaaaaaaactactacctaaatgttaatttctactctctcttaaaaaacatttgatgctaggaaaactaagttatgctcataaatgtacttatatagtgggtgtaaatgggtatacaacttacaaattactcggtcaatatattttttttttg

SEQ ID NO: 38801 - DNA, 570 bp, Oryza sativa
gaaacaacaacaacaaaaaagttacaaggtttctgagaaattaagcatcagaaactatcatccacttaagtatctcatactgttggtgtaatatgcaactttatgagggacctacttgtaattctgttgaataaagatatgtatgtgtgggggtgctgatcggtggtgaggccaacaagctcattccacccctctctcaggcgttaggcagcagcagcaggaaggcgggagaaggtagcagcaggagcagcaccggcgtgcggggcagcagcagcgccgccgcgccactcggcgcgctggtagcagccccgctgcgcgcacgcgaggccctcaggttcgtgggcttcctggaggagaggagctctgtgtgcgcaagctaggaggaagaaaagacggtactgttttgggagttggatttgggactgatttgtgagcttgttgtgggaaagagagcaagtttatttctgtttctttgttgacaggtgcgggaagaagcctggtccagttatgtgatttgggttgctaagagcacaagcgaggatatgttcccgttctttgcttgctgaaaac

SEQ ID NO: 38802 - DNA, 525 bp, Oryza sativa
gatattttgaaaaaaaaatcacaaaactatatatagttaaatttactataaatatcacaaagttacatatacagcatatcctttatcataaaattacatattataactgctccatcctaacattgttattctaatggaggcttaaaatctgtattttttttaataaatctaagatttaaaatatgtaggtttatgataaaactgatggtatatatgtgattttgtgatattataactaaaatctatcaacctgattgttttgcttacagctaaataagccgcaaaacaccatataagcaataaataataatttatatgtacaacttttatatttatattacatacagttaaaaaaacaattgctaaaattaaagtacaatgaaccaaccctccccccaccctaccaccaccacaaaaaaatgaactcagcatgtaagttttaaaatggtttatacgctgaaattcaagctccgaaatctttgtgataaatttagcactgaatgtgtggttttgtgatcaatttag

SEQ ID NO: 38803 - DNA, 578 bp, Oryza sativa
atcttttcaactttttcttttcttgagcctttttgctcatattgttctcttttattacgggtacgtccctgtcgtcaagactgtttccaaggattcggcacccattattttgctcacattgaatacgtccttgtcgtcaagactgtttccaaggattcggtattcattttttttcatatttttattctctttttcacaatgagcaattaaagctatttgagaaataacaattcaataaagcatatatataaagcatttagaaatcaaaccacatgctagcatcaacattgcatatttgcttaattcaagtagagaatttaagtgtcatgcatcatctcccttaaaagcaaaatctaaatctcatgaaaggactagaatacatacaggctatgctagagacaaatcaaccttcatagtattgctagcatgcacaagaaaataccatatgtataacaaagctctcttttctcaatttttctcattgtcatattattgcttgataaaaccatgggatacaaactccccctcaaaccatgccaaaaggatgaattgttcctaattcaccacgaagaaaagca

SEQ ID NO: 38804 - DNA, 1074 bp, Oryza sativa
cattcattccctcctccctcctgttcatcttctcagcaccaatggcagcagtacaagcatgggtgaaagcgctggcatagaaggcgcttaacgacactgtcggcaacgggaacatcaccatcttcgagccaaggaacgaggacatggagcgcgacctcgacctagagttccgccgccaccacgtcctccccgcctgcctccacggtggtcaatgagggtgggcaccgctcgtccacggacttggatgaccttgttcgagcgtgtagcccgcgccgccgctgctgccatcgacccgaggagatactctcgtggggatccatcagccgatcgagaacgacacctccggcggcggtggagaagcccctacggctaaagtgcctcactcagatttgggctatgaagttgccatcagcctcgacacgccgctcacgttcctcccggatgagagcagcagcgaagaggagacagtggcgacttggcggctgttgacggtcgttatcgatcagtttcaaccgtcaatattaccaaaatagaggagaactagtggtgcttgcaatgcatatgtttgttagaataataatattccactagtattaggtctactaaccttttgcagagaatgacaataaagtggaggagaatcgacatcaacacaaacgataaatcaatcggacgatgtcgagaaccagacttgtgtatgaatgggccaagaactcagaattgacacgacaaactgggccaaaattcacaagtctgcggagaagaacaacagaggaggccgccagccaaaccatgggctggttgggccggccctaggttcgaccgaacctggtggttcggccgaacccccctcatcgccgctggatgcagggtttcttctgaacggtgtggattagctcccaatgacggttggagggtatttctaactattccaaccgtcacaaccgtcattaggaggctatataaacccctcatcttctcactttactcacacacctcaaggaagagctctctcattcctctcaagtttagtttagtagtatctagctggtggaatagaattagaataggaat

SEQ ID NO: 38805 - DNA, 683 bp, Oryza sativa
  unsure (1)..(683): unsure at all n locations
attcctgcagcccctcttaccttcttgttgaccccacttgtcaatgagtcaaggatattctcgagaatatcttttccaatattccacaaatatttccctcttctagaaattcaaaaatcattttatcttattccatgagttaataaatctttttcccttgttccataaatcatttccattggtcccacacgtcagtgactgtcaataatattcttgagaataattatttattattaaatntttcnanaataaatcaatttccccttgttccacaaatatcttccttcgcccagaaattccacttaaacttccaaaattcatatctccctatccgtaattccgattgactccgttcaacttccaataattccataaaattgagatctatttaatggcactattatttagtctaaaataggatcttttcttggtctttgtttaggttttaattgtttgcgtacagttgcggttgccggattttcgtcgatcgcgggttttctcgaagaaattcgtgaagaaccccttgnagnccccaaaaaaggggggggccccccaaaaaaaaggggttcaccccccttttttttgggggaaccaattgctcctataattggaaaatcattattattttgtttgcaacttgcattagtagaatcacacactcaacttgattggcctcggtttgc

SEQ ID NO: 38806 - DNA, 613 bp, Oryza sativa
tgactctgtgagaagtgcgcgagattcacagtcacattttttatttttaaaactggtatataaaaattaaatttaaatctatatgttcgtgaatttatatatatatatatatatatatctattttttttaaaaaaaccgctttttaggtgacataaaaaagagggacgtcccataggaaaaatgactttcacacatacccgctttaattaataagtcgtttagtcttacaatataacaatcagtatatgtgcatatcattctgcatgccactcaagtactacatgatttaattagcgcaacatcatatatatactacaatgacagcaggcgtgcaaataaaatataatttgtagaggtcagagggtacgtgtgtaatttgtgtttagattgtgacgttgagtttatcttctagtgtgaaatgctatacaataaactaaagttgatgggaagattaacaataattaccaacgagaaagtaattcgtagagagttagattagagcaattgatgaagactatggtacacacaaacaagacttcctggtacagggcgggaaataggtgccgcaactcattacccctttaccggtaggggatatcatcaaacattccc

SEQ ID NO: 38807 - DNA, 631 bp, Oryza sativa
ttgggaccaaaggagtaggaatatatacatagcatgctcaatgcttacaccctctgtcctataaaaaaacaatttagcactggatgtgacatatctataactataatctggagatacctttgttcatgtttagattcgtatacatccattactagatttatttttttcggaacggagggagaacgtgtcttgtgtgggtctttgattagtagcaaacgtaggtaccctgatttatcctagactgagatcctttgatttaaatcaagtgattttaggatcactaacatgtggatacatactctattcgttccaaaatataaatatttttaaacttcgacacagttttcgagatgctattttgatcaataatatatatatatataatgttttaaataaaaaagagttgcatattatgatagtttgtttaatgataaatttagtaacatcaattttacatgattgatcttttttctactaatagttaaagttaaaaaaaataacttgacactattctaaaaatgtttatattttggaagtaagaaggatctatatgttggtgactcaaagtactccagtagaaaaaggaggtcgagagtattcgttcaacgtgtctttttttttaaaaaaaaaa

SEQ ID NO: 38808 - DNA, 517 bp, Oryza sativa
  unsure (1)..(517): unsure at all n locations
ctcgatctgtagctagttcctgtcttccagctgtaactgtaactgtaacgagaattaacaggcaaaagaactttgttatggggatgctttaataaagctggataactaggtgatcnnnnnnnnnnnnnnnnnnnnntgggactgatcgagtttgctgtttgccgccttccgacagttgaccttcatgtcgccgccgcagttgccttttgctgaaaattggatggaaaacgtgcatcgagggatgggtatttgattgatggataattggatgtcatcaaacaacaacatggataatatggagcatgctgggtggcttaccactagcttgactctaggcattgagagacaacacaaactgtcaaatattggtggaagacactagctaatacggcatgagtttgagaggtttgcgcaccctcatcctcctcatggtttgggagatatggaagaaaaggaatcaacgaatctttcagcacaaggaggctacatcatctttcctcttcgccaagatcaagga

SEQ ID NO: 38809 - DNA, 693 bp, Oryza sativa
  unsure (1)..(693): unsure at all n locations
ttcctgcaccccagtggcagcatcaagggcctgtgacaccacgtggagccatggaacgcacgtgaggtttcgcttttgcctgcactagcctatcactccaaagtccatggcagcagcattctttcgttttcgtgcagcattgtcacacgacttggagtatcatgaccaggtgacctggtcatcagaattcagacagggtcctttactgtctctgtccatggagtgtctgaaatttcagggaaaccttttcagccatctcacatttctcctgatcttcagatgaggtgacagcaagggaattgaactccaactacaccagtccatatctgcattatgaatgaaagatataacttgacccatgacaagcaaacgaagcagaaagtctaacaggcaatatggtctattttctcatgttcctcctgctgctctcgattcctctatgcaaaaccgatgaccagctgacactgggaaagccaatctttcccagcgagatgctcatctccaaggggccggcatcctttttgcccccttccggggccccttttttttccccttttttttttccccccccccccggggccnccccaaaaaaacccttttagcaatagcctctatgttggagtctggttccacaacatcccccagcgcaccgttgtgtgggttgccaaccgcgacaacccaatcaccacccct

SEQ ID NO: 38810 - DNA, 678 bp, Oryza sativa
  unsure (1)..(678): unsure at all n locations
cctgcaccccagccgcccgggttgccatagatgagacttgtggcgttctgtttgttgatatgtctgcaaatgggatggcttaaccaaattatggagttgtggcactttactaaagtctgaatgtacatttcatttgtattatggggtataggccaacaacttttaatatgagcttttgctgtaatcttgatttaattcgttgatatgctgagggatcgtggcattccttttcccattntnaanccctgttcctgatctgttctgtcagtgatgcttggtgtcaaggtacgcccactgggcttccacacgaaccatggcgaggtgctgttccgctgctgggacatggtaaaatcttttagaccaaaccatttgatgtgctagcttatatcgtgcttgtctatacctgctaaaatcacttctacaaaactgtatgatggttccggtaagaaagtcaaatcgatcggtaatgttcagaattgagaaacatgaatattgatctgtgcaagtcttcagggaaaggttggtttttttgggacaaaggattttttttttcccctttgtggtggaagggttttaaaaaaaaaacgagtatgtaagtaggggagaagcactgcaagtagtgatttgtctatggcatatatcatcatgatctgctccttgtataaagagcttcagaat

SEQ ID NO: 38811 - DNA, 629 bp, Oryza sativa
tgaaatagcaaatgcggtatggtcctgtgatttaagctggaagatccgatgctgtgttgggaggcttggacacctttcacattctgagtctctcaagtaggtttctatactacagggccatcctgtacctgttgtttcttgatgtgtagagtatgtcaaccttgcttgcttgacatgtttccttaagttctccatgttccatgcattcgacgtaatacaaactgtagaccatccttctgaaagaagggctcctagcaaaccatgtacatcccaagtgaataacccctaattaacttgctgttgtggacttgtggttctcttttgtgtcatctttgtgtatccttcatttgcggtgattgttggctgcttcccttgcttgtatgtgcttttccattcttagaattgcatgctaatacactgttaatgcacccaaatttactgaccaatgttgcgcctattgattaatcttgaaagttgaaaccaacaactgttgtgttcttttttgcttagatcaccatcagatggaatatgacatgctacctatatggtccatgtaaaacgactctatatggttggcttcttggattctttagacaatgtacggttaggcgttttgatgtgcttagcgc

SEQ ID NO: 38812 - DNA, 506 bp, Oryza sativa
tgacatttccttataaaatcatttgcagtatgagatatattttgccatggattatgttcaaagcaatgtcaccctcacaacttaattattgtcttttggaaagaggaaaataagatatataaacgatccattctgcaattctgaaatgatggtagcactccattaattgaacattaagtaatcaatcaattgatgcatagaaaaagttaagctttaattcattgtatgaacagagcatgtaagttataacaaaaaaatatgcacatcaagacttgctcctaaggtcattcgtgcaaagttatggtaattataaggcataacatgggccactctgatctacacatcaaacaatgctagccggctagcctaaccggccaatccctcctaaggaattgttggaatttttttgatggatttgctcttaatccatgaatttagtattaagaaataaatgcaaagattctgagctgagaagttgacttgagggacatcagttttaagttttg

SEQ ID NO: 38813 - DNA, 581 bp, Oryza sativa
cttccacataccttcatgagcagcagttacaagtctcgtccactttctctaacaggaggtaacaatgttgaaagtacacaccccactgtgaagcctaacactgtgcactataatggaattgggttcccttcacctgctattgcaagtggctacaagccatatgttagttatggccagggtgtttcaattgatgatgatgacggtgagtagaactatccttgattaacttgaaaagtatactgctgtaacttgcgattagtacaactaaagtttttcccttttgaaacctgtcagatgatgtctatgaggttctgcatcaaccatttccgttcagtcattcgagtttaggtgacaagaagatcgaggaagaatccacttggaagtacaatggttttcaaacaagttctgcctatggaatcgagatgcctacatctgcaatgtcaacaggttggaagctacctattaatagcaactgaaaagttaaaactgataatgatgatgttcatgtaccataattccctcaaatattctgatgggtgatcacataaaaatagttttactagtataaaatgcgatattag

SEQ ID NO: 38814 - DNA, 618 bp, Oryza sativa
tcaatttgtggaggaaacgagtggggagggagatcggcattccttgaatatttttgcattctattgccttgaatatttcactaaaatcagcaatcttgtcctcggagaatcacccggtttcaccttgaatcataaatgacagagcatagtcccaaaggcgtcctggtataaacatataaatcagtcgacaaatcaaaatgtttgtggctcttcaataatttgagaaacaaactatgcatgagggcaactaactttaaaaccaatttgagaatgccatgacatttccttataaaatcatttgcagtatgagatatattttgccatggattatgttcaaagcaatgtcaccctcacaacttaattattgtcttttggaaagaggaaaataagatatataaacgatccattctgcaattctgaaatgatggtagcactccattaattgaacattaagtaatcaatcaattgatgcatagaaaaagttaagctttaattcattgtatgaacagagcatgtaagttataacaaaaaaatatgcacatcaagacttgctcctaaggtcattcgtgcaaagttatggtaattataaggcataacatgggccactctgatctacac

SEQ ID NO: 38815 - DNA, 676 bp, Oryza sativa
acagattccctgactttgtgcagtctgcagttgtgccactgatatgtggaccttagtttggtatgacccacatatcagtggcacaactgtaaactgcacaaagttaggggagtctcatccgtccccaccacctacgcaaccgccctctgcactgtggactcagatcgtctgcattggctcttgtaatgcagagaagttctctgcattagcccagatctaccgttcatccaaaatccaacagatatgctcgtttggtgtctcttcgtataaaatcagcaaaagctcctgagtttatacagtgagtgagctaaaaaatacaaatttaataagatacaaaatggattccagataatatatttagcacgtaaatattgttgtttgctctcaccttcctccttgctacacttgaaaaaaggatacacttcctccgttacagaatataaagcatccataattttacaaaaaagtcaataatagtaacttttgattaatgttcaggctaatactagtaatatgtatgttcagtgttatatatgtgatatcattatattcatattttaaaatggtttcatatattgttaattttatagtcattgataatatattataaaaaaattaatggtaatatcgaagacagtgtaaaaaacataagctctttatagtttgggatggaagg

SEQ ID NO: 38816 - DNA, 891 bp, Oryza sativa
tttgtaacaatcagaaatcacaatgaatcagtgcagtcaatcatgatatggaagaaaataatctcattgtaaaccagagcctgtgcacctaacaagaagtatagtagtaggcgatataagatccacttggcaattttttgatgagcaatctaagagaggggacgagagagacgagaagcgggtgactaattagttgctagcctccacgctcatccactgcactcttcgcatccgtccaccgccgtcatcctcatttatcatttagtcgcggctatcatcgatgccctctgctgccaccgccgtggtcctcgtccacctcggctacggtcctcatccaaggctgccgctgccgccatcgtgttcgtcgctacagcttgtccactatgctcgccacgtcgcgtccgccgccgttgccctcatccatcaggcgccgccatcgccataaccctgttccgctgcagctccgtcctcatccaccctagccgccgcgagcgctgccatcgtccaacgcatccgtgtgcagtcatcgtcgttctgaagagaagagatgagtagaagagatggtactatttgtgttcatagtactatttgtgttatattatttattcatacttttgacattagatacgctatttattatttcttatagatgacagatattttctgaactaacaacatgctctcttattgaccttgctatgaaggtccgagagttggtgccattatgctaacaagatcactgccaaatcggtgtcatagtgcagccttgcctctatcccaattcacagaggaaaatttactatttgctatcctcctaaaatacacatggccaaatatcactctcctaaatttttattcccaaatacacgtgtactagcttcgatggagtac

SEQ ID NO: 38817 - DNA, 1506 bp, Oryza sativa
cattcgataaccttcactccttgcaatttgatttcttgcaatttgatttctccatggcgtagatggtaatcggctccttgatatgtatatttcatttatgacggcactcatacaatttccaataactaaattgcattattacttggttcttgtttgatcaagcttagttttatttttgacagtatacgaccttacttgaataggatcaagcttagttatatggctatgtttttatttacaaagttgcatgcaggattgcaaaaagtttgatgtcgctaatttgtagtattgctagttcttccccgttacctaatttcaagtgtagttaccgagtttatctcagcagttagttggaaacaaccgttgccttctaatgtgatatcaggtacaaaattacctatataaccctccacccaatttttacttaataccttggcccacatttgtaataccttcctatatctaccttttgttacagattgtcagattagaagccatcaacggatataatgcctcccaagcaccttagaaaatctgttatcttataaaatagtaaaaactaaaagtaagaaataatcttgcacgtatggatattaccttcatgttgtgcttacggagtatatgaaattagatacatcaactagaggccaatcaatggtaaataaaagaacaaaatctcctctgaccaacatcctggatagatatggagacatgttgatcatctatattaaggagttcatgtggtcctgctcctctgcctctgtctgaagtttgggtagcctgaaacaatggaattgttaaaactaaacacaagacagtataattagttgaccaacagttgtcgtactgattagttcgccaattccccttgacctttgtcaaatgcaccttcatatgcacaacaatttactcacatagaaattccattgaatatcttgcaaatgaatgaaattgtgaatctaacactacagctaatgatttctagaggaaaagcataatcactgaataaaatgaacccttttttttttcctgagagcaagcataatgtaccttgtttgtgtggatatgttgtttaaccaaaaggagctccaagccaccattgtctagagcctccatattatctagagcactataaccaaaatatgctgtgtactgtttagcagtcccaagtcacataacccaagctgctaggaataaatcataattgagcttaatcattgattttctacttttgtggagtatggaacaaatctacaaataaccaacaaacccattacttgatatgtctatatgtacatatcacgaaacataatgtatatacattaatattccccaaatgaagtcatatccacggtgttttgtgtagtgagcttaatcaagtagctcttggggattagcaccggatcaatagggcatgttgatctgttagtcgatgcagtagttagatgaacacaaccccccacatgaccactcacgggtgaaacataataaagaaccttagggtta

SEQ ID NO: 38818 - DNA, 692 bp, Oryza sativa
ccaaagctttacaattgaacatagtttccaaatgactttttctctgatatgttaccttcattcttaaacagatgacatttttgaacatatgcaagctgtcaaatattaaaggaaaaggtttattctacaaccttgcgcttttaaccatggtttagaaattcaccctgtaactttctaaaccgttcatcctaccgtcataaactgaggtagtgatgtggttttggcttattcagtatagtcccccatccccatgccgttcccctattttcttcttgctcctctcctcactccccttccccactctgcttcagacccccaaccaaagtacccaatcactgtgtctcagatcatccaatggaggcaacagcggaaaatagtccatatgccacatctttgttcggagttgtatttcgcctatggcttaaggtacgggagaaatttcggtactatatatttaagaaggttgggtaagttttggtgaaatggtggtgaagaagttgtggcattatccaattattggttatgagtaaacctccttttgtatattattttagtgctcttggttgataatatagtttattatgccttgtgcaccaataaccctctatgtagcttggttatcgaccgttgaataaatggttcttcagtttatttgtagaattttagctccttggataaaattgatgggggcc

SEQ ID NO: 38819 - DNA, 647 bp, Oryza sativa
atgtgtagaggacggcagactggaccatgtgccgttcggtggatctgatgccgctggtgaggtatggatggctgtgattgatcttgtctttcggcgtgcttaaccagggaataataatggagggaaaaagaagcgggaataggaggcgcacgcgcgccaaaattttgtttttgatggagcggtgcccgtgctcgagattttttttttctatatacatgatcagcgtgttttctatcaaatcgttactcaaatatttagaacccagtacgactcctccatccgaccggtgtaacagcttctgcctgaatttcgtcaagctaaggctgtgtttagatccaaattttggatccaaactgcagtcattttccatcacatcaatctgtcatacacacacaatctttcagtcacatcatctttaatttcaaccaaaattcaaactttgtgctgaactaaacacagcctaaatccagtgcttgctaactttgtctcaatattctgtttttgcgtatatacacacataataaaaggtatagtgacatcgaaaaccataaagtacgaagtatactgtactgtccaatcattgcataaaaataaacatgctaatgtcttgtttagttcgtcgattgaaattagacctagcacttgga

SEQ ID NO: 38820 - DNA, 2588 bp, Oryza sativa
caaaattggatctatagcaaagttatcttttttttgttttgtagcatcgaaagttcattgttcactttagtagaacataaattcctgccttttccctacatagcatttccatcgctccaactccctttctagttttctttgactgaaatcgacaaaaatggcaagacaattgacactatagggccaatttattcttgtccctattttgatgttcaatattaattttgcctctgctttttagggtttttgtttatgcccctggtttcttgaagcgaagccaagttttatctctactttagaaggagatgttagctgtgttaaatttttagcaaaaagacatccatacccttgcttgctactgtacattccgaactttggcagattcaaatcatcaaagaaaatctgacagattctagcgcagcaagaagtggcataagcaataaagcaagcaccagctccacatcttttcttcagctagcaagcaaccagcaactcctcacctcttcagcaagacagttgggcgttggcagcgatgccgcgaggccgtgagagacaacagcatgacgcctcaccgacgttgtgccgccaagcaggaaaggccacgccgaagccatccacaccacgatggttggacgtaggggtgaaaatggagcggattcgaacggatagtagttataccatatcctaaaccatattttttaagcagattcggagcgggtgcggatagtgtacggatgtggagcggattgtttcggatgtcggaaatggtgcaaagtcggtgcggaatcggtctggaaacagattaaatttatcggatgttacgtgtgtatgcaatcaatacaacatcgagttagcaatccaaggaacattaatacaataatcaataaatgacccatcgtaataattatatgattaagtgctaaacatcatgaatacatgatgtccataatataaaaactagtaatcgtgcacgtgcaaggcacatcatgcaaatataaattaacttgagatcagcatatcaccgatatgacaacaataataagtttattaaatttaaagtgtacgattcatttcacatcaaataaagaataaataaacatatattcaagccatgtttcattgaaatacaaaagcataagataaaataatacaaggtcctacgttgtatgaattaaggattagacagaaaaaaaaaacctcaaggttcaagagaatgtggaaaatggagataaaaggcactttgatcatccgatgctatgggtcataaaaacattgtgcttacaattgtataagaaatggccacttttatgtgaatgtgtgatcctcaacttctcctagaagttttaaataaattagagttgcagatatatattatgatcatttgaacctgacaaaacagcacaacatggtcaatcagctttgttagaaaatacaaaaaccctgcaatatttctagaaaatgaacagctaacttgtaactccaagtagcatatattgcaacctgctcttagaatagctttcttttttaaaaaaaaaaaacttacacttaatgatacttagacaatgtaatcccaagcttactgacagtgaatcgataagccaatatctgattgaacatagagagattttaacgaacaattgtgcagaatatgaagaatgagaagaactgaagatacaactaactcgtttgttttgaaacaaaccattccctcaagctagctagcaacattgaaaaactaacacaacttgcactgtacttatgaagtgcatgcatcgtatcgatcaccagattatgctaaagagatccatcaagcaaggatgcatttagaaaacattcagattaaaatcagttatgatatatagttcagctgctaaaacttttattgaggtcaacaggttacaggtagcgaatgactcagaaccaatccaatgggccaatccgtgataaaagaaaaggtggaacccgtagatctttatattagatgaggttttatactggtgtgatactggaatatcagttcaagctattttctgctagctatgtcataataaggtgtgagatttgggtacctgttacactttttttaatagcagcctaaaatctttttatcatcagcaaattgatccatgtacacataaggaccacttaggtaccacgaacctgcagcacaatgataatattcttcaacacatcattgatttgcttgctcagggatggaagaaaaagtcaagggggacaacataagagcaatcagacaacaatatcaagaaaaacagtagttacctttttgtatttgtgaaatttaaagaactactactatgctggaccatgccaatcaaggttgaaaataacaagccaatataaaggcaaaattaattagattcatggaatgcaatttggttgcacgctcctagcgcagaggtcgggaacacaacccaccttgtgcttcaataaaatgtctctaaagaaagatgcatcatttcttttaatatatctgtctttggatccactcaaaccaaattttaagagattggtccttggacaggttcattgtgaggcaatctaagccttggtaatgaaaagataaa

SEQ ID NO: 38821 - DNA, 536 bp, Oryza sativa
ccagtttgccatgagccacgttttctgaaccactaatttcgtgcaaaaactgtatatattttattaaaaatcaaataaattcacttctgtaatttataatagtccatacttaacgatgcgctaatggcatgcctcgtttcacgtggtgctgataagctcagccaaagctttacaattgaacatagtttccaaatgactttttctctgatatgttaccttcattcttaaacagatgacatttttgaacatatgcaagctgtcaaatattaaaggaaaaggtttattctacaaccttgcgcttttaaccatggtttagaaattcaccctgtaactttctaaaccgttcatcctaccgtcataaactgaggtagtgatgtggttttggcttattcagtatagtcccccatccccatgccgttcccctattttcttcttgctcctctcctcactccccttccccactctgcttcagacccccaaccaaagtacccaatcactgtgtctcagatcatccgggtaccgagctcgaattcgcc

SEQ ID NO: 38822 - DNA, 559 bp, Oryza sativa
ttagttggctacttcgcctctcctagtagacgaagaaagagtgagaattgcttcacgcaccaaataggagcagctaggaccccaagcactgagcagagcgtactgaggttgcttttggtcggggtcattgttggtgttgtcatgtctcgtggtcatagatcatcatattgggaggtacaactactttgagaaaagagtactccctccataaaaaaaaagacaaacaaaccctgatttccgtgcctaacatttgaccgtccatcttatttgaaaaaattataaaaaaaagtaaaaagacaacttacgcataaaatattaatcatattttatcatctaacaacaataaaaatacgaattataaaaaaatttcatataagacggacagtcaaagttgaacacggaaatccagggtttgccttttttttggatagagggagtatgtgtattagaatatatcacatcatatactaagtgcatttatattatgcattaagtgtatttatattgggaccaaaggagtaggaatatatacatagcatgctcaatgcttacaccctct

SEQ ID NO: 38823 - DNA, 623 bp, Oryza sativa
catgcatcatgtgttttctttctgttgtagctgatttgagcaatattaactgcattgcaatgtattttctggagtaactttgtatgcaaccgtgggttccaaaatggtgtactacttttgcccggcagaacttcgctgctggctcctgcatcaaaatgatggttatgccacgaaatgtgtatcggttcgtgccatatgatttgtaactctgtatttccctgcgttttagttctgtcatggaatgcgtattcattctccgtcgatgcatccactgaactgcagtgcaaatgcagtcagtgctcatgaagtttttcagttgcaaacttggaatatattccacagaaccacagaacttgcggtggacgaagattaactgcaggtacatgattaattgagggttattacctcaaatattaaaaaataatttatctaataatttaaaacaacttctatataagaaagttgacaaaatgcactgtctagtagtttgaaaaacatgcctataaaatgaggtaaatcaggatcactgtatcacaatgagaaatgaaccgactatgccctttttttttcttcttcaatcgatttcaagatgcactatggtaaacgactatgccatactcttt

SEQ ID NO: 38824 - DNA, 510 bp, Oryza sativa
acggtatggtaatctctttatgatacggaccctttcactaccacagaacatgtgaaaaacctcttaaggtatcggttttctcaaccgacactagggatgcggcaccaatgagtgctccagcaccaatcccattttaaaaaccacacctttgagaccacttgcgatctataaaaaggctcgatgcatggctgatccaattaaccattattgttatgggctctctaacccgtaacaaaggtggcccatagcaaatttagaataagttcatttaaagtcccttaatttgaatctgattttcgtccttgtactggaaaaactaggtatgatgggtccctcaacttacaaaaccagtgcaaacaagatccatcaccaacattgttctcatttttcgcttgacgtggcacctacgtggctaatttaattaggtttttggataacgtggcattgtcgtggcatttacgtggcaatttaatttggaaaataataaaaactgttagcctacatgttagt

SEQ ID NO: 38825 - DNA, 657 bp, Oryza sativa
tggtacaattgttaaaaagcgtgggctccacgtgctcttcatgtagctggcatgcgaaaatcacttacaggtatacatgcgaaaatagatttattttttaatgcgggtgagtaaagatgtccgtctgttaaaattgattttttttatatgagtcttttaagtagccgtatataaaaatacatatcgatttttcaggcatgatcattattgttcgcttacaaattataaggggtactcgtacagaaaaatcgtgaatggcatgcggtcaggaggggaagccgagcattactggtgcctctctggacgtctctgccgttcttgtgtgggcgcccggcaatgaggcgtgcagtaaattagccaggcgagtgtggcgaactgacgatgggtatggccctgcagcaagaatggcgggactgcacgagcgcagagagtcggttcgtggagattatcacttcgttcgataattagatgaatgaacatgggatcaataaacagaagggcaataccgttaagggataatttcgttactaccccaatattgattttaccattgttttataaggtttttgtttttagccccactttttccaattgaatgaggtgtttacctatttttgaccgaagggactggagccagattgaggtaaagtaataggg

SEQ ID NO: 38826 - DNA, 632 bp, Oryza sativa
ccctagcttatcaaataaatcatgaattttgtctaaggaaaaaaatacagaagatcaagcaaaatagaaaactacagtgttatgtgataattctaaaagcaagtagtaccttagcagtttcttttaagaaaaagttgtaccttaacaacacagcatccagaacatctagctgttcccacccggtaaaaaaaaaaatcagcttccagaagcttctaactgtacatcacttcgcaataaacatagagactttctagaaccactcaaatataaatcataatttaagataagtctagttaaagtatctagatccatagacttatacatctagattatagtcctttgcaacaacatcactcctagaggcattcaaatatccgatagaagaaaactcagaattattaaaaaaaaaaagggaaatccaataaaaaatatgagcaacagggtcctcagctatcgtatcaccgtgtagcacccagtcaattgaccatttcaattccttcttttttcagtttccagttaccatcgtatcttatgaaccaagtgtacttccttcactaatataaaaatattcccaatctttttcttagagagaaagtatggagtgaaaaaactataatggcatttattaaata

SEQ ID NO: 38827 - DNA, 516 bp, Oryza sativa
tttcgttggtaaatttaaagaacttttcggtccaatatactgagtattttaagaatttttatcaaattaaaaatggtattttagtaattttcattctagtttgcaacagcgcagtgtctcatggtggtgaaaataatgcctatctctactccctctgtccttaaataactcaacctcttatgacacatcctactattctagtaaaacgaatctagacactctaggatgttacgagatttttttttaacggagggagtatttcgctataagttgtgagtttacataattaccctcatccaatagtatggaaagacaattttaccccctttaattttatactataatatattaaagcacaaggaaatattcataaaaatctttgaattgtttgtactggcagcacatactagtagtagcatatattagtatatattgtacggtaaagttttcttgaatttatggataaatggagatgtgaaaatgtcaagagagaggaacgtcacccaggctggcggc

SEQ ID NO: 38828 - DNA, 738 bp, Oryza sativa
tttaatctcaaacgatttttaaggttaacggtccggtcaatgatttaacggttatagcttcttatcgtatgcctattggcttatctactatcaaaatttaaattttagaacttaattttaagttgagcttaattttttcggtgtttttaagtattattggcttttaaattactaacaacaccctttataaagtgtaactcataaattattttttattgtgtttttttggctaattagccgaagatcaaatgattgattatagacgattattggttcgttttcatttaaaagccatggtttcttccccagtttttccaactcacttctctcgtgttcggcgtgcacacttttcttaatgctaaacgatgctttttttaaaaaaagtttatatatgaaagttattttaaaaaatcatattaatatatattttttaaaaaagtaaataattaattaataataagaaaatatgtcgctctgttttccgtgcgtagagttcctaactaaaaaaacgaacatatctatgtggtaaactgtaatgtacgtatccttgtaaggcagctgtacctattgcctaaacatggcgatcaacaaaataagcacgcacatagcataaagattgacaaggtagtccaataataagcattctgaagtgttgtcattgtaaaacagtcacaaactctcaatactgccaataggtttatatatttattatgcagattagccacgaattagggtacc

SEQ ID NO: 38829 - DNA, 547 bp, Oryza sativa
tgcccaaaaaaattatcaattcacgaaaaaacacaactcaccctagaagaatccaaatggttcttcattgaattgtttaaatctttcagagaagccattgtttccatcatggcactcttctctttttgcagttttgagatgatgtccccactcttagaggcatcagcttgaagattactgttgtattgctgcaagctggtgttgtactcctgcagtcttttgttcgtgtcttggaccattttcagctagttcacaatttccatccatcagaagggaacattatatatgactcaaattcatgtaggactaatagaacatttttgaacacgtacttgctcactaaaccgttttgcttcatggctgactctttccaggtccaccgacagcaagtcgagggacgcctcagccgattccctttgctgcctctccttctcgtaggactccacagcaagctgccagtttaaaggtcaacaagtgtaagccgtggctgaaacctatcacacaggcacacagcgacagtacataactatgcagcatattatgcgat

SEQ ID NO: 38830 - DNA, 772 bp, Oryza sativa
cccctaaagaaaagaagatacctgagtggccctgttttgattctaacttttttcttcgaactttcaacttttccgtcacatcgaactttcctacacacacaaactttcaattttgctgtcacaccgtttcaattttttcaaactttcaattttggcgtggaactaaacacagtgttggtctatggaaaaatggaatctctatgacctggtataaccgtaagtctgtagatgcatgcattcacatggacacggaattttgactttgaaatttttgtcaccgacaacgtttggaaaaaagattgacagcgaacctgttcaagctttcctttactcacggtaatcaggtctgccaagtatttttttttcttggttataagcgtgtcctcgtggctagtttagcaagctcttcggatttcttctactcctacttgtaactagctgcgcggctaacaacaatacagagttatctattttttaatatgattttacttaaaatttgttaaatcgctatttcattgtcttacgattttgaaagaccaaaccttatcatcctcatgttttaattttatgattcttaaaaatcacgtcagatgctaccccttactttttttgtcacaccttctttatatgcttccccgatctacatgcttatatttattctccttgaaacatttaaaaattggatcctgtagtttttatagtttatggtctcattaggtttcttttttataatttttaaaagtcacgtcaaacgtcgtagagcacaccttta

SEQ ID NO: 38831 - DNA, 706 bp, Oryza sativa
tatgaacctatagggtcgcacgcttaatgggccggaataagggaattggatagagatccaatatgagcttaattcggataaggatccgaataggagtcctacgggccttggaggcccgagtgatggatcctatatattcgtgaggggtgtgaccggcggaggtattgcatcacgtgagaaaccctagccgttacttccctccccgagcaaaaccctagccgcgcgcgggtgctagcacatctgcgcgtggcgttccgtctctgtacgtgtggataccggtagaggcgccgctggtttgcggtgctgatcggtgcgagagtacggcgaggagaacgcacgaggaggagaaggtcgagccggtgcgatcgacgcgcgctacttcgcgagagttccttcgacttctcaacgtctttttccgctgcacagcgcgtcgagtggtagtgatctatgatctaatacttgcatggttcccggtttacgcgatagaaaattttgatttatgctatcatagcctacgcgtatcccaacagaaatgttacagcagcatggattcatgcagcatgaatttctgtcaaaaattgatcggcagggagtaaatttctcgaacagcttttgtaccaacttgaagaaaacactactacagtagtagaacaccacaaaactactatagatgctggaaatgctagaaccggcacctataacgttt

SEQ ID NO: 38832 - DNA, 571 bp, Oryza sativa
aattcgagctcggtacccattcagagaagagaagaaaaaaaaatgaaagctaagctcaggggtcctcagtgatgcacgagaggtgcggttgtcacggcgaggcatggctcccggtgctcatgcgccgccggtgttggtggtggtgttgcttctgcaccctcatcatccttgtcgtctccggcgacgcgctgcactggctgcccaaccaatcggcgacggcggcgttgccctccgacttgctgcggacgtggtgcccgtggccggcggcgccgccggtgctcgtccttctcttggcgtcggggacggaggcggccgggatgaggaagtagatctcgccgcactccagcttcgactccggcgacacgatgtgtatccggcccatcgccccctgctgcgacgagcactgccggctaagcacgtggttggggtgcgccgccagcacctcaccggcggacacagcacggccgtacgcgtcgatgcggccggctcggtgcctagggtttcgctgaggataggcggcggctggggaggagactcaccggggagaggcggcggcgcaactgttgggggg

SEQ ID NO: 38833 - DNA, 734 bp, Oryza sativa
aagaaaggcactaaaaacctttgcttttccacatcaaggtgaaagcgagatgcatctttatccaactggatactggagaactagtagagactaataactagtggcagcagcagaaagcaccaaacaagcaccccaaccaaacaaggcagaatccacccaccccaaaaacgaatttaaaggaggaaaaaaaataaaggaagctaacgcaacgtagaatctaattagcattgttcctctcactctcaggcacaaatcagattcttccaggagtcaaaggctctctctcaaagctttggctttcggttcacatggtgacatggttcagattcctcgtgtgagccagggaggagtcgacacggcggctgagagcactgagcagaatcgcaactcgctctgccggagattccaagtgccacaccaaagatactatttctctcctagtagtagtgcattctcctgcatggctgcaactatggacggctacccggctctatctttgcctttggtttttctctcgctttctcactgcttgcactagcatattaatttggtgattgatctgaatcagctgcatgcgttggccgtgacgaattcagaaaattgagggtcatacacataccaatggtctaaattgagcaatattgtatttaatgtagcctaaaacaacaacgagaaatggacattctacccggtgtcttgtgcgctaggtagtgtaccaccatgtataaccatgt

SEQ ID NO: 38834 - DNA, 564 bp, Oryza sativa
tcgagctcggtacccaatatccttggcatcaacctccgccggtcgtcaacgtgggactagggatggcaattgtgcccgtttgcccgtttacccgcgggtaaaaaccctattagggttgggtttgttctccattttatacccatgggtatcttattgggtcaaaagctatgcccgatgagtaaatgggcatgggtatgggtaatcactacccatgcccgctttgcccgtttacccacgaaatctaacttatatgtaggctaggagcaaaatccactagaatacataagcccagttctttgatttcttcggtttcccttttatttcccttattatttctctcctcttactctatcgccgccagaggagagacacgacaccgaggtggagaatatttgatgttttaagttcgattcgaacttagtagcttgtagactttttgttccactgcttttgttgtggcgggtaaacgggcacgcccgcgggcaatgggcataggtaaccatccttacccgtcatgtagtaatgggtatacccacgagcacaaataatctcacgggcatgggt

SEQ ID NO: 38835 - DNA, 551 bp, Oryza sativa
atatatagaaatttctttaaaatatcaattatataaatttattaagtttgtaataatcaaaatttaattaattatgtgccaataatagctttttcgttcttcatcagtttcaaacaccatctaattaggctaggccgatgggtattccgcattgtaattgtcccccttagtcaggccgtctttcggcccatttatctcccactcccccgcgtccgtccctaatattgggccgcgcacgtgcgaagtcattgccgggccaattttcacgggttaggcccatttaagaagagagatcctcctgcttctcccctcccgtgctcccctttcttcccctgcgccctcccaccgggagtccacacccctctactcctcgcccgaaacctcccccttcgtgccggcctccgaccgagaaagcgcggcgtctcccaagccacgcgctcgtgtcgggcgaccgccgcgccctatcctgcaggtacgtgcccctgcttcccccacgttcccctcccgtgcgccgtgcgccggggctctctcgggcttccgggccgagacgg

SEQ ID NO: 38836 - DNA, 1351 bp, Oryza sativa
aagtttggattttggttaaattgaaaatgatgtgactgaaaagttgtgtgtgtatgacaggttgatgtgatggaaaatgactgaagtttggatccaaactttggatctaaacacagcctcatttcatctctcaaccacatatatatttcttccatctgtggttatcacctttaatttctacacgtacgtatcttcactccacagtccaccccattacttgtcattttttgtttttgcataacaagattatcgaataattatttcaataagaatatggtgggcgaattggccagtttgtagaaacatcagagtactgctaactgcagtgtagatcgaccgacttgacatgttacttcctttcaaggattcattagaaaagaacctacaaaaatctactattgaatcttctacagtctctagtttggcaacgccgcaggccattattttcgtcatctagtagcatgtgtattgctttgttactgtgtgttgtgattaatagcatccggacagtaccattctttccagctggtagatagtcagatagccatggacgtgtggaaataatcagatgtgtataggatcagtgagcagcgaccggcagttgggcgagtcgttggctccagcaacgacagggatatctgatgggactagtgcccctggaattcgttcatatacgaggacaatatacaggcttggcagattgcaacaaaactgtttgctgctgatcgaaatactgtcaatcaatgtctccatatgttatatagcgcttggggaatcgctcttaatcttgcgtttacttaagtctctgcaggcgcacgatcagtataaattaagagacgacagacgttgcctctgaatacaaaatcgatctcacgcgtagttagcatacatatctgcacccacaaagctaggcaagctagccgatcggcgcaaagatgagctcgagcttattagtggcagcttgcgccgtctcttttgtgctgctgtgctcggctgctacgtccccagcatcggctgcagtctacggagttggcggagggctcttgtctatcccttctaatgattccctggctcattgcccctctcgttgcggagatgttggcatcgactaccccttcgggatagcgccgggctgtttccgggaaggcttcgagctcatctgccgcaacaccgccaaaactcctaagctctttctgggtgatggtactactgagatcacagacttgggttataggtatgttttggcccagatatacttcaacattacggtgagaccaggtacggatacctacaacatatcctgggtggccccaacagagggtattactattgatcattacaacacatttta

SEQ ID NO: 38837 - DNA, 785 bp, Oryza sativa
tttggatatcatgctcctttgttagcttgggttataacatgattagactttggctaggacttgcttaccatgcttagttcaactagcacacattggggatctcatttaaaacctagactataggtttatatgataatgttggtttaataccaccactctgatgttggttaaataaaatgaaccacatggtgggctgtgggtgcatggttttgctagtcgcacccatggcagttaaggaccggttcgcgggatgccctggaagaatttatcgtacttaccacaagccagcgtgggcaacggctgggcttgtagtgtagctttcctctagccgacgcatccaggcaagggtgggcgtgatggagtttggatgggccctgcgacggtctatgcggcttccggattcacctaggcacgagaggggactgcccgctgccttgcgaggagtgggggtgaaacctgaggtgtggtgtgcttggttagagggggttatgcgaagggtcctgtcacggcctctttccggtatgtcgtggtgacatgtcggcgcacggaaacgtgtcgtggggctgtgtcttgtgggtacagttgtacacctctgatcagagtaaaactattcgaatagccgtgcccgcggttatgggcggtcaaccagattcaccgtgattagtctcaccctagtgtaatctgttgaatttggatagtttaggtggatggttgggcctgtcgcaacgtgggttagcgttggacagcggatgtttaatactgtttaatttttacaactgttttcg

SEQ ID NO: 38838 - DNA, 770 bp, Oryza sativa
aacgaaggacaacccacaaattatggaagtggtgtaataaatctggatcaactctgaatttatattgcaatcagttctgcgatctacacttatctatatgatcacacttatctatgtagtacgatttattttatctacaatctgaatggcctcgtaatttctggttcccaattttaagccatttttgcccgaaatcgctaataagcgactagtcgcgcgtgtgagcgcgcgcggcgagttcacccctactacttctagcctaacactgtttctataaacccacgggtctctgttttttgggcttcttcgtgtcgtgggctttcctgaaatgggctaatagccctcccgcgcgcgacacgacagaggaggcggcggtcggcgcgtatgggcgtacggtttcccttttttttgtttttttttccgtatcttttccggttttatttttttccttttttttcttcccgtatatttttgtgtttgtccgttttttaatagtatatgtatgctaaactctgtgtacgtataaatacaaactttatatgcatgtatacaaactttgtatatacgtatgcaaacttttatatacgtatatacaaagtttgtatgtgtattttttggtttttatacatacgtataccaactctgtatacatgtatataaagtttgtatacacatatatatgtttgtatacacttattttttaggttttttatacgtatacacacaaactttatatacatgtgtatatctttttatacattaaaagtgca

SEQ ID NO: 38839 - DNA, 708 bp, Oryza sativa
tgtactacctccgtctccatctaatcctaggttatataacatttttggatggaggaagtattatcttagcatgaacacaactgcacaaggcacaaggcacatattatcttagcatgagcacaaagcacatatacctggtcatacatggcatgccgtagtcatgcccttcaagtccaaactgaaagttaatgaaaagcttcggaagattttcagctaaaaatttttctcctgtcattctagctggttgaggtgcacgctttcgatctatgtggacttgcttagctatgtaatctctttctactctcaatttcaaaataaattaacccagtacgagatataatatatcctattgccatgtaaagagatctcgtactaggttaacttatttgggacgaagggattattacagtacatttcagtgtgttacattgatcacacgtggactcggatcaatcaacgccccacatcggtggatgaaatagtaaccatacacaagtatgcttagaaataatttggcagctctaaaagagtgatacatacacgcgaagagccagactttgaacatgttcccacctaaattggactcatttcatcccaatcacatatatatttctttatctgtggatatactccaccccattacttgtccttgttttgcatattaagaatttcgaatagtttaagtaagaatatagtgggcgaattggc

SEQ ID NO: 38840 - DNA, 805 bp, Oryza sativa
gaggtgcgtgtttgttttattttttgtagctctttgttttgaattaggaaagtttcatgtatgccactgaaattgtgatttgtttatccatctatatctccaaagttttgcattaatgttatatggcattctttactaattaatccttgttttctttaaatgtctcattttaaaaagaaaattttatgcgagaacttcagtatttgaaactttggaagtcttaacttttcaagcataaatctgaattttaaattccccggatcccttatttttggtttggaaattcaagaattcaaaatcaaggttgagacatgaaattccatattttaaaatattccttttcttttcaaattcgtgttattttggtagtttgacaattgtaattttagttttatttctaaatatctgaatggaatacttaaatcttagttatagctagcactacaatattaaaagattcatcgatacggtacaagtgaacaatggaaaattcaactattgtctaaatttaagtgttgtggaaatttccgtttgtgtatgttatggtttagcatgtcctgttttctttctgaatgtgactcccgtgtttgcttcctctatatcatttatattcttctttttacttactttctcatctcttactgttcaagttatttgaatccctccggttgcgtggtaaagttggtttgtcttaattgatcaggcagttattttgaatgtacagatctaagatcgtttgattcccctacttagtggtgattccagttacggagttaccattatcagcaacaatattttaaaagtt

SEQ ID NO: 38841 - DNA, 540 bp, Oryza sativa
agagagagaatgagagatagaagagatagaagagagagataaactgacaggtggggcccacctattttttaataaataaattgctgactggaccgccagaccaaaaccaccgcggatttgggtcgaggggggtaattcgtccggtttacatagttcagggtgaaaaatgtccggttttgtggttagggggggtaattcgggatactgctatagttcggagggtaattcgtactttttccttatttttttttaatggagtagactttgcaaggcatggaaatgaccgagggttatccatccttttcttgatgctcaatttaatcctttggccatcaggtcagtaggtggttgccctacgtacgtattcttctgatactgacatgcgtatgatcaatacagcttaacgtcatttttcgcgtcagtaatcgatcattagtgctagtaccatgtgtcatcattcgattagtagttagttgcatttattcagcgattagttgcttataaaatagtacttacactgtgacagtaacctagtagttg

SEQ ID NO: 38842 - DNA, 579 bp, Oryza sativa
aaatgcattattaaatgatttttaatcccgaacgaaaatcagggcgttacacgtgctgtatcctccttaaactcggactcttctagataaattttctttaattgatccgactccaccaagaacacaactgctggcgatttgacgattcccatcggctgattccaagactctgaagccgatactaactctagaccgatgattactttgggcttaccaaattctggcgttaacaatatctaaaaacaacattaatatgcttgcgtgtagttatatcttattaataacttcaataaaaaataatatgaatgtgcttcgatactgtataatcatatcctaaacaatgtcaacttagatgaagaatggaagtatattgttagtgaaaatcagctcaccgccatggtcgaacccttaattcacctttaattctatatatggtttttatttataagtgccaatagatcaccgagggtttcgataaagatgtcactctcgttaagttcaggggcaggggtagaatgaaattgagaaggataccacttgcttaatttactctactttagatcaaatttaagttgatgt

SEQ ID NO: 38843 - DNA, 503 bp, Oryza sativa
ttgctaagtcctattcaactgtaagctgacgttgatctacacaccttattcagtataaaagcagcacaacattatcttaacaatgaagaatgagaggctttcaacccggaaaaaaaaaagaatgaggggctttcatatgtttcgagatgcatagtgcactattttctggtctaaaatggagctgattcatatgcttgtctatacttggagcaagcaattcagtccatgaatctcctttctatgtgtattgacaatcatgactccaacacagtatgcactaacctgttttagccttttatatgcccaggcaaccagcagatctcttgcttaattgcataaaaattttaattctatgtctttgtacttaattaaaattatttatttagggaaaacgagttacatatatcgtttgcagataatgttaccatctatgtgtacacgctctactaaatcattttaaaggataaccatagctttttagtccattattaattaatttgggt

SEQ ID NO: 38844 - DNA, 550 bp, Oryza sativa
gatccagcatctacaaactgagttatcagtcagatacctattggtgacccttactgagcaagacattggcaatggagtaataaaattattactgaacttgttcactttgccactgtagcttaaatacaatattacaataccatgtcattccttacaaggatattgatcacaaataattatagtagaatacaactgtcattctatcaactcacatgggctacacatacatgctgcaagtatacaggaagtgaaacatgcaaaaactcttctctggactgaactacgtaacataacacttcgtagaaaatatgtgataactcaacactccatgttacatatatagctagcgtggcaaactgactgaggatgataattcttgctccaaactgtagcaactggagatcccttcatatgataaatcacctgcactggtatagttgttctgtgcttgggatttaccaggtatctgggcttaaaaggtgctgaatctctccaccaattcctgggacggggagaaattggaattttcttagcctcttagttctcagga

SEQ ID NO: 38845 - DNA, 603 bp, Oryza sativa
atagcctaaagaatccgataacattttgatagttgggaacattgttttctagtttttcttttagaactcatgcactttatttgtttgaaagttttaaaaacacaagcaagagtgattcttacatctccttttcttgatcggacatacactttgttggcaaatatgagtactattactacagtcaaaggccatctgattttgctctgaagtttgtctagttgctctcgcaggaccatcagcaaccttgttcatttctctaggaatccatttgatttgatttgcatatgttgaccctacagaatgttatttattttgtaaaatgcaggccttagggtccaatgtcctagctcattgatgaagtcatctattcgaattgcttcggccaccgtctgtcatcagatagaaatataggttgatgataatgatgaatatttggagcttcagacagaccttatatttctgtaacaagaggagctcctgctttggagctgtcttcttcgagggatgtgaataaaattccaagcggccttttttccttctcctttcttctgcgacaacctttttcggcttttcctctcagaaacaaagctcacaacttatgcg

SEQ ID NO: 38846 - DNA, 635 bp, Oryza sativa
cttgtgaaataagtggtctgtgcctttaaacatctcaaagaaaaaaaaatacagtgttttaagatgagcctaatacacagtagataatggcaaaaaaaattaataccttatagggtatgctttggtcttgcatgtcatttaaatagttatctatatttttaaaaaaattaacagagatttatttggatgatacgtaagaaataaggagatgtccattttgagggaccaaggctccgttcatttggtctgttagggatgccacttgtttttttagccgcttcccaaactgttaaatgatgtatattatgaaaagttttaaagcttctttaaaaaaaatctaataaaaccatttgtcatatttatagtaattaatactcccttcgtttcatattataaatcatctagttaaaccttttaagtaaagggtttgactaagtttataaaaaaaaactagcaacatgtaaaaaaaattaatttcattaaatactacattaaagatattttaataatgtgtttgttttgttttaaaatattgctatattttttataaacttgattaaatttaaaaaggtagaatagaaaaaaaattcaaaacaacaatactatgaaaatggagaaagtattcaattaacctg

SEQ ID NO: 38847 - DNA, 594 bp, Oryza sativa
tttttctgtagatgtccatgcatatattatttgcctgattccgagtccgtatgagaaagttacgcctattttaatagatgacatattttgtccgtttcggtagagttttggaaaattctacatgtcacatattttgtccgtttgagtttattttttatacggttggttcctatgttctcctaagtgtgaaaaaaatatcaaaaaaatgaaacaaaaataaaaaattatatctctatgtactgtttaacttatatatgtcatttaatgtggttatattttgaattagattaagtaatttcatatagtggtagagtgcattatgtttaacatgctgatcaaagggttttactaaaggagttatggtctaattttagtgaaggtgcaaagtagactaagtgggtatgctagatattttcagacttagctaagtggtagttcgagtttaaattttttttttgtggttggttgtatcgtgatcctgagtgtgaaaaaacatccgaaaaaataaaataaaaatgacaccgttgtaactccatacagaaaaacaggatggaggcggcggcgccagcatgctggcgccctcctccctggggc

SEQ ID NO: 38848 - DNA, 597 bp, Oryza sativa
ccaatacaagttcaaaatcagcttacataagtagaaatgaaaacgacaaatttgactcaaataaaacgtgtaatttgcaaccaaatttgttatttttgttctaataattgtataagttgaaatttgaatatatctctggattggtatatatcttattatttttctagaatcttttttatcacaaagtaggactttctttctgttgttcatgacgacaattcagaaaatatgctactgcggaccaaagattccacccctgaatctgaaaggaaggaaaactttaactgtgcttagttcacgtcaaaattggaggtttgcttgaaattagaatatggaaaagttggaagtttgtgtgtagaaaagttttgatgtgatggaaaagttggaagtttgataaaaatgtttggaacttaacaagggctgaatacgtatgaacagaagattaaaacgggaaataataccacctgggtttctgaccgtcgtgttgacagcatatcccttctgaagcagcatcttgatgagcgccgaagcgatatacccgttcccgccggtcacgcacgccgtcttcatctcaaccgctgacatctcgtcgggagg

SEQ ID NO: 38849 - DNA, 520 bp, Oryza sativa
ggttaggtcaggtggtggttggggcctgttgcaacgtggtgtaacgttggacagtgattggttaatatggattaattactacaactgttttactgctttcaactactgctttgaaatgccggctttatgcaaaagaacctttagcctcccttggatatatcttgcatcatacctcctcttccggtgtgacttgctgagtacagtgggtagtactcagtcttgctctcttttcccccacaccagagttgaagtccttctcagttgaagatgtctcgaagaggttggtttcgtcgctgccgtcaaggatgcctgtggaatggagtcgcccgctgcaggagtcaagtcttcaggcttagctcgcttttctctttttccgctgcatttgtaatcttttatatttttgtaagacgtggatctgtatgtcaacaattgtcgtttgtgtaccctggccggtcctggacaggggtttaatgcacattcagcttagaaattctggttcgtgaatttctgggcgtgacaa

SEQ ID NO: 38850 - DNA, 586 bp, Oryza sativa
atcccccagcgtacttgccaaatgcaacctggattttgttcttcaggacatttaatactccctccgttctaaaaaaaactcaattcctgggtttctgttaggtccgtatctaacgtgttcgtcttatttgaaaaagttatgaaaaaaattaaaaagataagttatgcataaagtattattaatgttttatcatctaacaataatgaaaatactaatcataaaaaaagcattattaagtctttttaggacagagggagtaagtttgatgatgtcgattggcgaatccgctactgtttatttgccgctacacttcgtagtggcaggttcatttatactcggaataagatcactttgactccctcaactgaccaccgaatctaaatcgtatccctcaatcgcaatactagaaatctcgaccccctgaacttgcaaaaccggtgcaatttgactccctcaccggttttgggaggtggtttcgccgatgtagcgccatgtggcgcctatgtggtgatattgaccgagtcttcggtccacgtggcattgacgtggcacttacgtggcattagaattataaaaatgcgtggga

SEQ ID NO: 38851 - DNA, 603 bp, Oryza sativa
atacgaaatttctcctataggataaaaatccccacaattttaatgtttttcctccaaatcgaaggatctctttttcgtatatgcctcaagcgattttggtgaagccattgctacaactttcttttttcatggtttcacccaatgatggagttcgagaaccctttgaatcgcaggaatgacaaaacgtcagggttttaaatatcccgctatagctgcgctatctcccgttgtagctgtttgagaaggattctagctatttgctctcatgtacaatttagccgctatagctccatttagctagctatagctgccgttatagctgtttaaaaagcaacatgctaaatgccttagcccgctatttaaaacattggaaaatgtaggaataggaaaaacgtaggattttgatatgaatgtaagtgtaaaacagagaattgtaaaacacaagtatggttgtttgattggaacgcatgaaaaatacaggaattacaggagagataaagactcaaaggaaagtttccccgaggttaaacctcatgtaaaaaaaaatccggaacttgcaaggcattaggcattccataggaatttcataggattccgggggat

SEQ ID NO: 38852 - DNA, 623 bp, Oryza sativa
tactgggcagcaatgaagagagcaatggagatgttttgcaagaagatggggcttttggtgtaaatgacaaaaatgatatatctattcatgattatcttccagcaatgaaagccatatgcgataaactagaagaagctagtggaaaggtcaactgttccttcttttcttttccatttggtattctcctggattttattttttctctatagttttctaactctctgctattatttcatcgatagactcttgttgtttcggatataaaagtagatctcaattacaggatgacatatgggcacagagcatggagaaatgtaagtttgctcagaatcacttactgcatatgctctctagtttctgctcttctggttttcctccttatagggtattactgagacactgtttgcttaggtactgcataggctaagagacgcacaacttattgaagaatttgatgccaaagttgatgataaggtgacattaatctttcctcctgttctgttggcattttcaattaataatgtatgctctattcagtaatagttttgggcttgtcagtgcttcctgtcaggaactggaaattagaaaagactttataaattaccatgtccatatgtacccct

SEQ ID NO: 38853 - DNA, 642 bp, Oryza sativa
acacgcacctccactactcctggatattgcatggtatatccaataatacgacgacttaaccttcgtagacagtgttattcatgcttccatcaccatttatccatggcaatattgggtgatatatatgcctttcgcaagcatgacaacaatcactgcccctgttgtcttgtgctggagtaaacgaccttttctgacctacaggactttgatagcgtatctgaggagagcttgacttgctttggacattaagaaccgtcacagtgtgcccgtcaccaagcatttttacactcccttgcacatcactagacattgcatgcttctctctcagtagattttctgtatctccagtctcggccatctcaaaagcagaagctcgcaaacaactgcaatgacttgaatctgcaagtgtagttatatgatattttgacttatgtatagagtcaacaatctgcacaccatcatatgcattgacctgtgaagcaagaaaatagagtgacacctatatatgagtagggaaataaaaaaatgtggacaagaaagcagcagtaagtgtagcatcttatatgcaagtattccactcttaatcagtttgacataaatatttaactatcccaatgatgttttaaatgtttatataaaatt

SEQ ID NO: 38854 - DNA, 596 bp, Oryza sativa
ttaaatcctatccaattctttgaaattcctatggaatgcacaatcttatagagattttagagaaaatttagcatgagctttaacctcttggtaatttttctttgagtttatctctctcatccaattcctgcggttcaatcaaacggtaattcatgtgtttttcttacgttttgtaatcctctgttttacacttatatacctttttaaaatcctgcgtttttcctattcttatgttttcttaatcctacgattcaaagggccgttaacatactatacggatcgcaaaacgtagaaagaaatcactggaacgggagcctcacctatgatgaatggcatgcacttccaaccttgcggcgtcttccccctcttgcctgccacaacttcaccaccgacgacacccccgttctcaacggcgccgatctccatctccgtctccaaagcgtaccctcgctaccacagcaaccaccaccaccaccaccgcgcggaacggcggaggccaaccaaaacaccggcgaaaaacctcgctctccgcccgccggtgcgcgcgccagccagccagcaccagcggcgccgcgcgtatgtgaaagtaggcaagg

SEQ ID NO: 38855 - DNA, 533 bp, Oryza sativa
tccttctttaaaaaaaaaacagagagaatggttacctggacatcatcaacatccacatagaggaacagtatctcagggtgtgtctgagctagctcctcaaacttgtagttcatggacagcgaagtcacacaccatgaagccccaaagtgggcaacaacctacacaaagtcgaggggtcaataaccaagttaacttctgagtgagtaaaaagaaatttctggtgcaactgcagcggataattatcatcaggaaaattttcaatttggaactcagtttgtcaattacagttacagtgaaagaaaaacgagaaagacccagaaagaacgaaaagaacatgattacagaaatcaggttgcatgaagcatccatccccacaaactattatacatatatcgttctaacaaaattataatctacaaacagcaattacaaaaatcgtgggccgaccaaaatatgacttgagaataaacaacatcaatattcatcatgagagacaaagcaggaaagatgtgggggaagcccggcgaaaaaaa

SEQ ID NO: 38856 - DNA, 599 bp, Oryza sativa
tttttttcaaatcatggttaaaagttatcgaatttgatttgaaagttttaaatcttgagttaaaagttaaaaatccttatttgaaaatttttaaatctgacttgaaattttaaatattaatgcgaaaattttcaaatcttcacatgcaagcttttaaatctgagttaaaagtttttaacaagaaaggaaattggataaagtgttgcactacgtactttgctagcgcatatacactaaataaggaacccccgaggctgcatagcacgtttctttttgggcaaagtggatggccactatccggataagctcttttgggctgagtttggatgtggtgctagaaatttaggatttttcacaaatgctaaatgagactaaattattagtgtcaggttaattgaatactttctccattttcatagtattgttgttttgaattttttttctattctacctttttaaatttaatcaagtttataaaaaatatagcaatattttaaaacaaaacaaacacattattaaaatatctttaatgtagtatttaatgaaattaattttttttacatgttgctagtttttttttataaacttagtcaaaccct

SEQ ID NO: 38857 - DNA, 604 bp, Oryza sativa
aattttatttttctttcgccgactaccaatgtatcatgcctctgtcaatactccaataccggagattattgttgtgttcgttcgtactgaagatgaaaatgaaggaaaaaaactattaccatataattaattgagttttaattattataagtttgtaaaaagatttacctaatatttttaagctttatctatatacaaagttcttgtacgaaatacatcgtttagcagtttaaaatgtgctaatggaaacaacataaaagatatactccctacatttcaggttacaagatgttttgactttggtcaaagtcaaactactttaagtttaactaaatttatagacaaatatagtaatatttacgttaccaaattagatttattaaattaataattaaatatatttttataataaatttatcttgggtcgaaaatattactatttttttctataaacttagctaaacttaaagcagtttaactttgatgaaagttaaaatatcttataacctgaattataatatctcaagcagcgatcaatgattcgatggcaattgcgtggcaaagaaactgagaaatcacacaaagttgtggtcactcacgcttg

SEQ ID NO: 38858 - DNA, 561 bp, Oryza sativa
ctatagcattcttgacttaactcagacttgaaatttccaatgggatattctgtcttgcactgaaatggatcagtttcattatggtaggtgaatataatcagtgtagctaaggaaggtgttctatcatttagaaatgttaatgctaataatttcattcacacgttcaagataggttagctttattatcttctacagatgagttggaagatctctcttttaatctgatagtgccaatgaatatatttcatacattaatggcattggcatcagacatgttcattgtgtgtggaaaaactaagtttgctcctttctcctatctattttcttcttgatgtgtatgcagaataaacgagtttaatgatgctattcttttcattgaaaagcctaaacctactgatgctttttcaataaaggaaaggtacatacagacaaaggtaaattattctgtccatcctttttatgctgaacctagcaatgctttcttgatattgatgtatatccttgttagtcatgtgctagttgaagattgaattccaatgtaacccttgccttttattttat

SEQ ID NO: 38859 - DNA, 571 bp, Oryza sativa
cttgattaggggtgtgcattcctgtagtcgaattgtttgttttgttgggagttggctttgccgttccttgtcgaaagcgatgcttgcgtgatggcacactcagttcatgttgtgacaattcttccttctttcaaaattttggcccttggattaatagtaaatctttcatttgtgattttctttgaatagggtgctgcattttgatcaatacacttagcctaggaatgcattagtgtttacttccttaaatagttttatgtatcagtttattgcacatcactgtgcctggtttaggcaaatattgttcttgatgtaaaaaagtgttttttttaaaaaaatatttttaggtgttatttgcaacccttgtatgcaccaagttgaaattgtatttcctatctgggctattgcagtgccccttgaagaattaaaccacagttactgctgcaaattactgaatgcatcatttgttcagacttctgacttccaattcacaaattattttgcagaagatagtattcaagtgggttcatcaagataatttgtttgcagtgtgctggagatagtgtggtct

SEQ ID NO: 38860 - DNA, 645 bp, Oryza sativa
taaagatttaaaaaggtatatataattgtcagaactatcattacttagtacttttagctttctgctgaagttttatacatgagtgtatatagttggaaccagcattcaagtaggagaattggaacccagatgtgcaatagtttattttttaaacacaatgtctgttgtgagttccatccgatggttaaacgaaaataaacgttaattcaaatttaaagaatgttggttgggtgcttgcaggtaaggatgatgatgttaaaggttatagcgaggactattgggctgcatcacttggttttgttgaacttctatccatatcttcaaagatacgttcacgtatgttcttaacttggcatgtgttcttcttgtagcaaccttatggtagatataatgtttatctatactctatactaatataaaagatggtagtggtggtggacccacggactgtgagttgcgtatctcttaacccccacatgccatatatcccgtcgaaaggaaaatatgacaatagaatattatgaaaattttcatctttacgaaatgacagcaaaattagcataatgattatataatagacaattagaaaaaaaaacccgtgcacctcacgtgcattatactaagtcatactaattttgataataa

SEQ ID NO: 38861 - DNA, 571 bp, Oryza sativa
ggcttttagtcctacaagtctagatagcgtatgtatccatggttgtaaaaaaaaaagaaaaaaaagaaagaagaagcttcagaatcgatcccactattgaggaaaaatacaataatattattttctatatcaagtaaacccgtgcatattaccattacatgcaacacagacaaaatgcattcagaaatacgtctcattgcaaagaaaactatagaatgttaacatccaaatttaacatctaagcacgaaataggaaatcattcgaatttggaaaggactgagttttcttcttggtgatagtcagaccgaagcctatgggctagtctgactagctggtggtgtgcagtggggctggtcggacagactgtatgtagctggtcagactagctaagttcggttccaagtcgaatttcatcaggtctagagttttcttgcctgcactgaggtttttcgagttctacttgatctctaccacaagtaaaacatggagaagaccatgcagaacagcagaaagcaagactaacccctttgtaagagctatgaccggtataatcgagcacacattctactt

SEQ ID NO: 38862 - DNA, 608 bp, Oryza sativa
acaaataatttatcttgcgtcccgcgtatccacactctcttatatcagatcctttgtagttctaaaaaaaaaatcagctcctttgtgacgtggtgtttttaagattggtttacacgtggctcacaaagtaaaacaggaatggattttacaatctatggtgacgataatatcatttattagtcaatggctagatatttttggctaacgtggggatttctgcaaagtgttcaattaatataggtatagatagataaatagatagattagttttgtagatctgattgaatgttttttctatttacagaatgagctacttccatctgtcctgacgatttataattgcagggaaaatgataaaatgttgcttccagatttaaaattattttttactaaatgaaaccaatgaaaagttcagttagaaaattttattatgacttgaaattatttgctgaccaatgaaaagttcaagacaaattcaatgttatgtttcctctatgatcatttcctgactaaccgtgatataatttaggactattattccgcatgtttaattccttcgtcgcattactctccccttctcgctctccttggctaagctaggatcgatc

SEQ ID NO: 38863 - DNA, 826 bp, Oryza sativa
aagatggcaacccaaggttagtgtgcagataggcttacagactggatcaagaagaattcacacaaagaccttgtaattgtgtcgtgctctaagctcaaggggtggacgccctaaggctaaccctaggttgtcgttaatcatatttattcagtagccatcattgtttagagtcaggtttttcttagattatttccaacattacaatttcatcgctagttaggtttgtagaacccaacttcgagtgcataatcattcatctgcaactgagttgcaatctctcttagttttgtttgtgttattcggtttacatgtagggattagccttctcaatgaggtaaattggattttagcatgtttgattaccataagagatgtggtgctgcgattgtagagtttggattgtgttgatcagaaaccggatcatgcgcgtcaagttttcgtcaaatagagagttatcagtacctattagaagatcaggacctatttcctcatcagagtcagtctcaaggactacatatgccattaggaatagcaaattatgacaattaattgcaacaactgctgccaactaagctatgattattttgacgaaaggaaaagctatgtcaactttgtgtcgatggttgaaacacttcaagctacagttgatgaaatagttcatcgtaccttgttcgatcaatctggagttttgacggatatattgcaaaattcgatcaaaaggatagttgatgagttaattgtccaaagacgccagctcgggtggcagattgaagaacaacaacaatatcggctcggggggaaaacatatcagtatcagcatgatgag

SEQ ID NO: 38864 - DNA, 637 bp, Oryza sativa
ggatcgatgatcgatctgttccataataatagacgacgattatgtacagtcttcattacgcatgttcgcattggattattgctccacgattatgatgctcatgctgagtcattcacaaatcgcaaccacgatgcctatcgtcttgggctcttggccgacatctccggggtaaaaaaatttgtaccagagcattgaccacaagctaaattaagttccgatcggttaagtttatcccagatgtggttgatgtggttattggggaccacttgtacgaattatcttttatagtggagcctgacaatgggtctgacgagcctgtaccaatggatatggagaatctggatgatgggactttggagaaggaggaggggaatctgaaccaggatttggggaaggaatctggaggtgatcctggtaacaattccttaataggttctggtggtcaggttagtgagaggggtggtccttctataccggctgctcatttgagtctgatacctgaatctgatggcttgaatgtatctgatgaggaatttgatggcttagatgaggattctgtaatggttaagaaggttaatacccagcaaagtctaggggaaaagctcgctgctattcttgaagcagtaatttctctctc

SEQ ID NO: 38865 - DNA, 635 bp, Oryza sativa
ccggcagtggtcgggaaagggaaaaagaaggggaaaaaggggcttggtctcttgccataatgaggagagggagagtgaggaggaggaggagagggagagcagctgcttctcccactcttggacgggtgcggcgtggagtggcgggggggccatggatgacgtcgacgatgacggcggcggtcggtttggcatggagcgggggcaaggcggcagcgcatggcgtcggcagcgaccggccggtcggccacctcgcgaggcgcgcgcggtaatgggcgaaggcggtggaggttttgggcggcgacggcgggaagcggtgtcggcgcgagagtgaaaccgagagggagagagaaaacgagagagagagaaggaagacgagagagcgagagaaacagagagagcgagcgacggctctctctctcggctcgcatgcgtgcaacgcacgtgcgagggggaaagatgatgggctgggaggggagatgggccgggggagaaaatcggtccatccaaaaatacagggaggtaaagtagacttttacagagacaaccgatttggatagaattgtagatgtttagggtttggattcgaattcaaatttgacattcgaacttgagggtttagggatgtatcaagggaa

SEQ ID NO: 38866 - DNA, 686 bp, Oryza sativa
ctaaaagaatattcgcaaccaactctgaatggggtaggagatgatgagatatctcatgttcctaccaccagaacagaacaaatgatattatacatgattgtttcatcatgaggttgatttttcctttttcagcttgccatcagtatttagattcgtgctgcttatgtttatcagagtaagcttttccatgttagagtagtttttattttctacttttatggctgacagggcctttgatttggtcccggtctaggtctagctattagcttgcttgatctgatcaaacaaatcaatttctttgttcccttggaagcctgtatgcaagtttatggaaattgaattgtgcctcactacctcccaccatatcgtgcgctttcagcttgaaccatgaaaccaacactatattcatggtcccaatgccccaatgctaattttatttttgtgtgcctgttcttttggttacccacacattccctggtgtggttctcatcaatcaaggtatagattttaatatgaatctaaaacactgaatgggacctcaaaactaaccaactatatggtattataaatttaatacattgaacaatcccctattagtgtaatacttctttatcataagactaattccatttccaatgctgcagaaatcatggcatctatggaagacattggaagtgcattaatcc

SEQ ID NO: 38867 - DNA, 504 bp, Oryza sativa
aattcctgcagccccaatcagtttttgctcttgaaaatgtaagggttggcaatgcctaaaacttgccagaaaatatttggttaattgggccttgtcccaaatagtggcggttttggtccctggatccttggcttcttcaccaaggatggtctacttatgtcattataaatcctttgaaaaaccgttcgttggtcttgacctgatgtatgctaacaagttatcaggctgtcatgatagcaaaacacactctgaaattaaagaacttccatataatcatgtagttataatgttcacctgtatgcattaaattttagctagagaagtgcactgactcttgaatctgactaacaatatgtatgttccagccaatggccggagcttgcaacaagaacttaacaaagaggctgctgatgaacaactgaacaatcaggctcatgaagaggccatgaaaatagatgatgcaaatgcagtaagtactgacgacgatgttcatccagatccaaa

SEQ ID NO: 38868 - DNA, 2117 bp, Oryza sativa
gacatagtgctctactagttcttacttttgtgcctagtgtatatctgatttgttataatgaattctctagatctgttcagaatatttattctgacttacgatattgtattgttgtttttatgtatcaagctaattatttcagaacaatatacttggaaaactgtaaatatgactcatttgctcttttctgtttatatttcaatacatcgaaacccatataagactggataaatattaataagacacttctgcctagataaaatcctttgctctgtctctgacaagctatgaaaaaaattgatcgaaataatgtgtaaaaattatatttatgttcctagcaattaaaaacaaatgatagaaaataaactataatgaaaatcatctataaaaaaaattggttgtaactgataaggcaacagcaaaagataagaggttaaacgattatttgattggcggagtgataattacatggtaaattttaaccaaaataatatctgacaggaagaaactctaggacttgtttagtttattgccatttcaaaccttcccaaaaattttgtaatggcaaaatatggcatttgttattttttggtaagaagttactgtttagtttgatgccaaaaatttgccaagtgcttaggttctcatttttagggcatgtataacggtttttattaatggtctctttattgtcatgcaagtaaatttgatgacatggaagaaagagaaatgagtatggttgttatgcatgacaacggttcagagtcgactcttagcatttattagagcaaattttgttgcattgtggtgaaagtaaggaaagaagagaaagaaaacgtatttttatacattaatgattagagaccatattgtctttaactgttgtaagatgttagtctctagataacgtagagctcatatctgactctacctttgtacatgcccttatattgttgtagtgtagcaaccaaatacattttttttggaagggggcattgctttttttttaatggtaattttgagcatcaaacaaaatatgcccctattgtcgcgagtcatgactcgtaataaaaacactattgaacaaacaatctcgctagtaaggaaactttttttataaaccaattggcacgctttattaatatgtaaacatagtcgcatcgttttctagaacattcagcaagaaaataggagccaaaaaacccaattacaagaaatcttcaactttaaaaggatgattagctagaacatatgccacacaattttaatgctcggagagtcggagactttaacaaaatcatatatcaaaatatagcattcatgtaaaatcgttgctgacgttattgttgaaacgcctccatcttgcatcgtctccaccaccttgagaattttttcaggaatttattactcccttcacttcatttcaaaatgtttgacaccgttgactttttagtatgtgtttgaccattcgtcttatttaaaaaaattaattatttatttattcttttcatattatttgatttattgttaaatatactttcatgtacacgtatagttttacatatttcacaatttttttaaataagacgaacggttaaatatgtgttaaaaagttaatagtgttaaacattttgaaacgaatggagtactagttaatatggcaacttgcttttacgttccttccagtcattttcaatttcaataaatttataagttgtactactttggtacaaattcaatattggaccgttccactagtaggccaacctaactgcacctaaccaaaaataggaccaggttttggacggaccgtttactttgttgtcctgatcttagaataagatcactttgactccctcaactaaccaccgaatctaaatcgtatccctcaagcgcactaccagaaatcttaacccccgaactatcaaaatcgatacaatttgactctcttggtggttttggatagcggattcgctgacttggcacacacgtggcagtgtagacttggtgttcatcccacatagcattgacgtggcgcttatgtggcatttaaattaaaaaatatatgggggtgccaattggtattaacacacacaaaaaatgagggtgccacatgt

SEQ ID NO: 38869 - DNA, 733 bp, Oryza sativa
aagtttgtagaaaaaaatagtaacatttgtaacccaagaagaattattatgaaaatatatttaattattgatttgatgaaactaatttagtattataaatattactatatttgtctataaacatagtcaaacttaaaacagttcaattttaaccatagtcaaaatatcttataacctgaaatagaggggcagtagctatttgtccccaactccccgagtggtcaccgcaaaatggcttgattagagctagaggtcaacgaaagcgaatggacggacaaacacagacacaggtttgtgcaaagcgaatggacggacaaacacagacacaggtttgtgctgcttagtactactgcatgatgcccgcggctcttttgacccttttttctgccgtggtgcgtcccaggaagggcagcaaaaaggaccagattccgtttcattagggcacccgcaatgattatctataggctctctacaagagatccatgtcagcatattttcctactttgaagaaattaaatgaagagagagcaaagctatctactaacctggagatagtttatagaaaaaaaaacgaggccatgcattagagagttatagatacccatatagacatactattgagggaggttactttaatctagtctattgctgagatgtacatgtttatagagaacatcttactttaccattgggggtgctcttaatacttgaaggaggtaaggactactactag

SEQ ID NO: 38870 - DNA, 1426 bp, Oryza sativa
aaagaagaaagaaattaagtttcaacttaagatcatcgggttaacaagtgacctgtcagccacacctcgattgagatattctatattttttatacgattacaaagcagacgctcataaacacacagcactacacacgtaagatcgctctcacaccccctatgcacgtagacggaaatgaaatactacattcacactccctaatacacgatctaaagaggcggaactagtggcacatccctaatctcagtaaaatcttgttaaaagccccctacatatgtgtaatatttataaacattaaaatttgaacctggtgaatgaaagcatgcacatataactctaccaccacactactaatactttcctatatattttgtatacctctatagtgaacacgattttgcatatatcgtgctacgatgtagttttatccgtttctatgtaagatgactggattgtcgaagaacaaaggggttgtttggttcgatgccgttggtagccagccaggttgtggcgctgccacaattttatggcgaaggaaaggctcgccgcacttgtggcgaaaactatcacataaatgaaatgtaacgtggtgtggctgcctcaacttacgtgggaaccaaacaatagcctattttgcgtggctaccgcattaaaggcttggcgaagtctggcggggaaccaaacagccccaaaatgtctcagataccaagcgaagtctcagattacgaattatccaaagggcaaaagacatgcaaaaataataatatcataatattgtactactcaataaccaacaaaacataccaattttatagtatccgcaaaaataaaagccctagttagaaaacaatttcaccgtgtgcgtatcactcatagtgttttattatgcaattttctcacatggatgcacgtggttttcaagaggcgcctacaaatcgagcgttcgatttttgtttgaaaaaatcgggtgatgttccaacaagtagatcagaagtttttcactaagttgatcgaacatgttttaatcgttttaaaagttgaaacacaaccaacccaccttctaaaacattttgctacaacataggaaataacaatttttaagctatttcaccatatataaaaataatattttagcaaacagagaaatgatgtttcaattcactgcaacatttgatttatacatagtgacatgaatatacttgctgaaacattattggtggaagaaaaaataaaacggattctcttaatagagcatttccataatatatgggtgatttattgcaacggtgcgtgtggtggagcgcatagtgaggacgacgtggatgcttttttgggcgaggcgcgatgggaggagcgggcgcctgatgcatgcatgcccgtatcggatgcccgatataaaaaaatttcgtggttttcatcttgatt

SEQ ID NO: 38871 - DNA, 983 bp, Oryza sativa
actacagtagctgcatatacttgcatgttgcatccatccgtttctccaatacgaggtggtttttttgtgctttgatccaaagagagtggtggctactagctttgctgtgtactgcatggtacagaagtaaggcttgggacgggacggaagtaaggcttggtacagtaatagtttttgaaaccacgtaattatacgatttttacagtgaccgccaaaaacgataaccccaacacaaaagatttgataaacactgcgaggcagcagcgtagcagctgctgctggtgaatgcatgagctgctgcaatggcaatgctgcgtgatcttgcttgggcctgtttagttccaaagttttttttctaaatttttaaattttctcacatcaaacctttcatacacatacaattttttttctacatcttatctagtggagtactctcctagtggagtggtgtactcctacctgcgaaatcaatgggagtacgaatactgggctaagtgcatgcgtgcagtggcaaatgcaaatgcagtgcagtgcagccggttgggttggggcagggtgaccacgaaaaatctgggagtcgcagagtgaccacaaaagatctgtgcgtcatgttccatttgaccgctgagttgatgcgtgtactattcgctcagatttgaggggggtgtttgggcctgtttggtttccaggacttatttcaagtccatgtcatatcggatatttggatactaatttggagtattaaacatacactaattacaaaacacattccatatctttggactaattcacgagacgaatattttgagtctaattatgtcatgattttgacaatgtgatgctacagtaaactttttataattatagattaattaggcttaaaaaattcgtctcgcggattagctcttatttatgaaattagtttttttattagtctgtttaatactccaaattagtgttcaacatccgatgtgacatgggct

SEQ ID NO: 38872 - DNA, 4806 bp, Oryza sativa
acttaattaaacatactttaacgaaaaatcatactatttttcgtgcagagtgggagaagctccccaccttagtgctttaaaagtacggaaaataaagtatgatatcaaaacattaaaatcaactccaaaaatacctaaaaatcatatctaaaattaaaatttaaagagtagttaaattctataaatctacaattaactagtttataaaaaaactatcagtaggctgcgtattccatgaagcattaggagctaccacaagaatatatagcatatgattttattagaaacctacaacctatatatccgaaaaatttggggccactgccactacacttaagttcttacaagctaggctcacctacatggtataaaattactttttttggataaaaaaaatactatttgttattcttgtaattttttatactatttgttattcttgtaaatttttgaagtatccaaaatattacaagttgtagcaaaattgggctattcagcaggcgactgctgctacgtgtgtgtgtgtgcggtactgttcatgctggctgtgacgcagctccaaacccaacagcgaaacagtctatatactcatagtttcgtgaaatttatttaaaacttaaattttggctagaactggaggtagtgattgcaacgcagctccaaaccctctagcgaaacaaccttgatacttagggtctgtttgttagagctctaattcataaatttaactccagcttcacatctctagtttattttgtgagagaattttatctaactccgctcccattttaggtgaagcaatggagctggagctacccttatagttccgtgaaatatatttattatttaaatattggctaaagctagagttagtgattgtgacgcagctccaaacccagtagcgaaacagcctcaatgcataatacagttctgtaaaatttatttaaaatttaaattttggctggagcttgggggtagtggtcggttgctgtgaattgggatgatctgatgcgtgtgaaaagggaagggactgatcaatggaaggaaggaggcatggtgagaacgagtcaattgttgggcagatggtgctaggagtacacttctactaccactgcctgcctactccatgtgcacgcctgccccaggcgaccgcatcccaacaccggcccacccccacgcgaccaccaccacacgcatccaactcgggaccacccacccagcgacccaaggacccaaaggccaggccacacccagccccgatctaccctgcactgcactgctcctaccagtacaacggaaagatgagagggatttgcactattactactgtacattaggatactagcagcagctccttcatgttcctacagcttcgccaataaatacccaacagtgccctagtacatgtatatgtacgtcgtacacccctgtgtccaagtaagtactcttgctgtattaaatcctaggccctccatcaggaaatgttacaaacattttaggcctccttttaattggagaaaaacaaaggaattaaaatcctacactattcatgcctttgatttgtaggaatgagaaaaggaaaaacgtaggaaatttcttattcctacaattctagagcaaaaacgtcggaaagttaacatccactctaacctcttggaaaactttccttagtctatctctatcatgtcattcctgtatttttcctgcggtctaatcaaacggtcattcctatatttttcctgtgttttgtaatcctatgttttacacttgcaatcctattaaaatcccgtatttttcctattcctccgtttttttcaattctgcaattcaaaggggccctaagcatggagaaagtaccaaaatataaccaaatataaattttagagttttttcaatcgtatatttgtcttttacttcccttgtcttaaaatacgtgataagacatatattattattatgaatttagacataaatctgctaaatttataatattttgatgtatccactattctatactaaattgctttatttttgaacgaaaagagtaaagttctagctttatcctttaaacctgatatgtactataaaagttttatccaagtcagtcagaggccatgggaataggcttcaccgctaacaaaaacaagcagatgtgtggaagggtgtactaccatggtttgctacggagaagtgcgcagcgttttaattgcaggtccaggcatgtggctggggcacttggagggtgaatttagttcgtttcgtcggttgcgcgcatgcatccgcccgagtgggggtgtgtgtggggtgcgggtgcgtgcatgcatgcacgaacgcgtgcagaattctgcagatggagcgtgcgacgcaacggacggacggacggatcgatgatccgtgtcggcatcgacatccttccggataccgtaatggccaagcccggtttttggccgtttttgtcggagtagacgacggatacggcgctgctctgcctgccgtctcagccatcaccaaaccgtttaaatgggattaccgtcattctacgaaaaccggaaggttatcgtgaaaaccatacgtttaccgtgaggtttattatgattataaaacctaagaagattagcacagatgataacggcgagaaccgcgagattttacaaatcctgcctgccgctgtgcttttcttttgcccatctgagagcaggtacttgtactctctccgtacttaaaaaaaccaacctagtattaggatgggacatatcctagcgcaataaatctgggcatagagcatgtgggctacagatttatagccagctgcaacacggatttcaagacacaatatgtgtatgataggatagaatcagatattaataatgtagtatgtaactattgtatgaattaactattaaattaattatggataatttaaagttattagttggctatataacttgctgtgagctgatgcatgatgcaaacgctgaagcctgaagacgagtctcttatctgatgaaaccgtgatggtacagggctaaggggggcagggagctcagggacaggggtagtgttgtcttttcgcagccactgatctggttttagggggcactgctgggtgggccccctgtcactgtgctcaatatcagttgctatatgttttttcttcccctctgtttcttggctgggctcactaggaatacaggtttaggtcactgtgccaattgaagtgcctgcgatcgatgacagattaactcaggtataattaagagcaagtttaataatatagcccactgctagctccaatttatctatagccaatctaatagctcattcatataatagttatatactacactattaatatctgatcacacctgtcatatacacgctgcgtcttgaagtccgtgctacaactggctacaaatctgtagctcactgctcttctctctccttatttatctctttaaaatgtgtttgtaactggcttataacttactattatacctgctctatggggtagtgacaacacaacttgtgtttgttcggagtggctacctataggataggaagtagaagtactgtagcgcaaccttcgtgttagaataaattttttaaattaatataagatgtgacatattttaacattatgaatttgaacagacatatgatgagattcgtagtattagtgtactagattaatctattctaagatggagggggcactattaacttagtataattatttaaaatttattatcactaatattaattgttatctcacctgtactcatggagaaaagaatgaaaacgagggaagaaaaagtatttatggtttttatggttttctcggctttatcctcatttaatttccaatcgtactttacgtttgtaaaagttgagtagtctgcatagatatgcatcggatccatattaaaaggaatgattctttttttttttgcgagtagtacgtacatacgtaccttgatcaccatccatatgcatcggatccatattagtaggaaagattttaatagatttaatctaatggtctaaaatatcgggtccaccaatttaagtgaaaatcaatggctagatgttttgcttttttcttagaatttctttgatttctctaatttattagagcaccaagtggcggcttaggagcgtttgtaggaagtttaatggacttttagtatataataatagatagatagatagatagatagatagatactaagttataatgacattgccaattttccatcattttgaaatacgttattcgcattactagtattatagtgaattatctacttaactataaaaatacattatttttttaaaaaataaacttgataaataatttagaacagacggtctgaacaatgtggtagaaaagaatatttttttaaaaaaacatactgtaattttaaaagcatggatcaaatacaaataatacacggtattaatccaacggagtaggagtacacccctgaaaaagtgaaaacaacagggccaaagtgagtgctggcctgttgcctgttggcagtggcctgctgatgaattgcgccggagtagcaacaacttcaaacactgtatcctataatcaaaagctctctccatgctgctccggccggagtggcgcacctacctcactatacctctctagcgactaatcctatacgtacttgcagtagtacattggtactggtatttctacagtcgtaatggtgaatgatggctggtctggcagcttggctggtttgccctgctgcttggacaatgttagcaggcgagtctcgttgcacggttgcc

SEQ ID NO: 38873 - DNA, 931 bp, Oryza sativa
tgcgaatattggcacacgagggtgcgatggttttgacgggaatcaaaaagctcaaaaaatgccaaaacatgatttttggacatattggagtatgttgcgtgcgttcgtggcaaaagctcacttcttgattcgcgcggcggacttttgtgaattcatggcaacattggcacatgagggtgcgatgtttttgaccggaatcagaaagttcaaaaaacgccaaaacatgatttttggacatattgtagtgtattgggtgcgtacgtggcaaaaactcgcttcgtgattcgcacggcaaacttttgtcaattaatgccaatattggcacacgagagtgcgatgtttttgaccggtatcaaaacgttcaaaaaaagccaaaacaaagtttttggacatattgaagtatgttgcgtgcgttcgtggcaaaaactcacttcgtgatttgcgcggcgaacttttgaaaagttcaaaaaatgccaaaacatgatttttggacatattggagtatgttgcgtgcgttcgtggcaaaaactcaattcgtaattcgcgcggcgaacttttgtcaattaatggcaacaatggcacacgagggtgcgatgttttttgaccggaataaaaaagctcaaaaaacgccaaaacatgatttttggacatattggagtgtattgcgtgcgtacgtggaaaaaactcacttcgtgattcgcacggtgaacttttctcaattaatgtgaatattggcacacgagggtgcgatgtttttgaccggaatcaaaaagtttaaaaaatgccaaaacatgatttttggacatgttggagttattgggtgcgttcgtggcaaaaactcacttcgtgattcgcgcggcgaactttcgtcaattaatgccaatgttggcacacgagggtgcgatgtttttgaccggaatcgaaaccttca

SEQ ID NO: 38874 - DNA, 1107 bp, Oryza sativa
aaaaatcgtgttttggtgttttttgaactttttgattccggtcaaaaacaacgctccttcgtgtgccaatatttgcattaattgacaaaagttcaccgcgcgaatcacgaagtgagtttttgccacgaacggaccttttacgctccaatatgtccaaaaatcttgttttggtgctttttgaactttttcattcctatcaaaaaacatcgcaccctcgtgtgccaatgttgcaattaattgacaaaagttcgccgcgcgaatcacgaagtgagtttttgccacgaacgcacgcaacatactccaatatgtccaaaaatcatgttttggcattttttgagctttttgattccggtcaaaaacatcgcaccctcgtgtgccaatattcgcattaattgaaaaaagttcgccgtgtgaatcacgatgtgagtttttgccacgaacgcacccaatacactccaatatgtccaaaaatcatgttttggcgttttttgaactttttgattccggtcaaaaacatcacaccctcgcgtgccaacattggcattaattgacaaaagttcgccgtgtgaatcacgatgtgagtttttgccacgaacgcacccaatacactccaatatgtccaaaaatcatgttttggcattttttgagcttttttattccggtcaaaaaacaccgcaccctcgtgtgccattgttgccattaattgacaaaagttcgccgcgcgaattacgaattgagtttttgccacgaacgcacgcaacatactccaatatgtccaaaaatcatgttttggcattttttgaacttttcaaaagttcgccgcgcaaatcacgaagtgagtttttgccacgtacgcacccaatacactccaatatgtccaaaaatcatgttttggcgttttttgaactttttgattccggtcaaaaacatcataccctcgtgtgccaatattggcattaatttacgaaagttcactgagtgaatcacgaagtgagtttttgccacgaacgcacccaatacactccaatatgtccaaaaatcatgttttcggcgttttttgaactttttgattccggtcaaaaacaacgctccttcgtgtgccaatat

SEQ ID NO: 38875 - DNA, 700 bp, Oryza sativa
taatcatgttacttatcaaaggtcttttcagtcttccgttatgagaatgtgagtataaccccaccaggattagatttaattctctttataagatgtaattttttgcactatctatctatctatcaggctatagttcatccagacgttggacaaagccctcctcatgaaatttccattctcttctgtctctagctgtcctagtcaaagcggccgttcccatgtatgatgttaggtcatctctccatcttctcttctaccttcctcttcttctctttcccatccttggttgccattctgttaaacgatttgtccatctattgtccttaagtcttgctacatgcccagcccatctccactttgattatctgactttctccatgatatctttaacctttgttttctggcgtatgactttgtgattaattttgtctcccagagataaatgcgacatctttctctccatagctcgttgagtagtcacaagcttctgttctaggtcctttgtcaatgaccatgtttctgatccatatgtcatagttgttagaatgcattggtttaacattcttcttcttagagacatgggtatgtttttatctgtcaacatgtctttgtatcttccaaagttcatccatcctgcttttactctcatcataacttcttcttttgtggtgtcctccattttcaaagtttggggctgcag

SEQ ID NO: 38876 - DNA, 1423 bp, Oryza sativa
tgtactgactcttgctattgaattaatcttttgtttgcaggttttagtcttagtctttgagtgatgcgggtaatcgactgcttcttctaggacttgaacttaatggggtaaacccctagtcggtgtgcttgtggattgggtagacaagcttccgttgttctatatatttatttggccggttggccaatgtaactaaagtcgatgtagtttataatcgctttcatcttagttgtgtttgctatgtataatcatgctcgagatgaaagtgtgaatctagtgcacatcctgggaactagattcacatgagtatgagttaggaatatttgggatgttgcagatctttagccatttttgtcaagtctcctgaatgtgtaacacatctggccgccgccttcgagtggtttgacgggcacatctcaggctgaagttgactggcaggctaagggcccagcaatgtctccaatattcctctctcgaggcgtcggatgtttcattatgcttgtttgatgacttgaattattcacttcatctctcaaatataatggaaggtctggagagcctatgacagcatggtatcagagcaaataccgactacaggagccccttaagttgtcacttagaattgcttcttaaaaattattttgagtgctatgctctcagttacaaattatttgcaaaaatcatgttcaatcttatatctcatccttctttagagattattttactttatgtctcatgttttgattttaaaactcttatcttgctctataggaccgaaacattttggaaatactatttttgttgaattttatttgaaatcacttaataatcacagcaaaacagtaacatagtgttttgaaaagttttgaaatccatttgcaaactactcctatgtattagcacggatttctaaaatatcgggttaaacatagcccctagtaaatgggttttgaaaatgagtcgataaaacttaaaacttgctagacaatattggaattccatctccctatgttatctctgaaccaaaaatgaatttggtgggattttgtactttcctctcccgatatttcaaaatttcaccggtatggcctaaaatgtgtagttgggtatagaatagaatttgctgtgcttaaccctctagattgtttgcttagatggaccacccaaaattcatctagcctctggaccaccctaacataatacgactaaaaggtgataaaatttatacaacctaaaacttgattaaagtttcattttgtgccggttgttcttttttttttctggaatcttgagtcagtctgcttgttatttttgtctagactaaaccgtaggtgataaacctgagaattttttacatgcatcatgtagactaacccagtaagcatcatgaattttggcataatttttagacccgtgcatcata

SEQ ID NO: 38877 - DNA, 748 bp, Oryza sativa
cggccgctctattctagtggatcccccttcaaaattttccgtccgtacgtgtccccgcgcgcggtgcgcgcgctcacaacgcgcggaaaagatcaaattcaatttgtttacatgatttagattcctcttaccgtaaatgacaatttacattaatttcagtcactcttgacctttcataaggccgtgagcgcgcgtcaaagttcaaattccgcgcgtgctgctatgggcaatataatgtaaatttgatcaaaaacatgctactttataaatcgaaatagctcttcagatagtccgtcgacccccattttttatatcatggtcggaaagagcatgagttaaagatatgatttcataccaccctgactcgtacaaagtgaaacaaaatcttcatatttgcatctaaactaaagaaaatgtattttgttgatgacgtcatttttgtctttgtttaattgagattatctcgcttatcagtgatcgattttctcccatatttcgatatgttgtagctgagataattctctatcacaaatatgtcatttatttttcatttagatgacgtcatcatagttaaatattcgattaaaggcgcgatgcataatttgtcatatttgcgtgttatgtctatggaaggtcacttatttcaaaacatgaatctgcatgacaatgtgttttgaccagtatctcggttgttatacaacagttttctcccaaattttagtatgttgtcgctgagactatatgttat

SEQ ID NO: 38878 - DNA, 529 bp, Oryza sativa
atccagtctatagcacgacatgcaccaccacccgaaaacttcctctgctcggactcgccgctggcgctactccgatgtctgctgtctgagaaatgtataggaatggaatcgcaatatcatgcccttcattttctattttggtcgcaaccccaacggagtcaccgtttgtcgccgacaccggcgagcagagatgccgcccatggctgctctgctgcttatcgaatggaaaaggagacagggacctcgcttggagaatttaaacaactataaggttcattatgtaatgttttcactcaatgacatatgggcctaggactgcgggttttttactgaaactctaggggtctttttgcatattggcctgggactgacaatgcacacctaggaacaaaatctgaaattataaaagaacagtaactaaaacttgtaaaatccatataaaattaaatatagctcattttaagatgattcaaatttctgtgaactcaccaaattgggaactttgatgttatggaacaaaacttgcact

SEQ ID NO: 38879 - DNA, 671 bp, Oryza sativa
ctccttcgtgtgctaatattttcattaattgacaaaagttcaccgcgcgaatcacgaagtgagtttttaccacgaaatcacccaatacactgcaatatagccaaaaatcatgttttggcattttttgaactttttgattccggtaaaaaacaacgcttcttcgtgtgccaatattggcattaattgacaaaacttcgccgcgcgaatcacgaagtgagtttttgctatgaacgcacccaatacactccaatatatccaaaagtcatgttttggcgctttttgaactttttcattccggtcaaaaacattgcacccgtttcggccaaaatatgccaatattggcattagttgacaaaagtttgccgcgcgaatcacgcagtaagtttttgccacgaacgcacccagtacactcgaacatagccaaaaatcatgttttggcgttttttgaactttttgattgcggtgaaaaacatcgcaccctcgtgtgccaatattggcattaattgacaaaagtttaccgcgcgaatcacatagtgagtttttgccacgtacgtacccaatatactccaatatatccaaaaatcatgttttggcgttttttgaactttttgattcagtcaaaaacaacgcaccctccggtgccaatattggcattaattgacaaaagttcg

SEQ ID NO: 38880 - DNA, 623 bp, Oryza sativa
ggtaggtaatgatggttgcgacggttggaatggtcggtaataccatccacccgtcattggggatcaatcccagccatccatccaaaccctgcatccatcggcgccacgggaggttcagccaaaccccccgagacatgggttggctcaacccagcccatcttcgactggcggcctcctttgttgtcctccttcgtagacttgtgaattttggcccaatatgttgtgttatttctaagttcttgacccattcatacataagtctggttcttgacaccgtccgattgatttatcgtctgagttgatgtcgattctcctccactttattgtcattctctacaaaaggttactgtacctaatactagtggaatattattattttaacagatatatgcattgcaagcatcactagttctcctcaattttggttatattgacggtcgcaactgatcgataacgaccgtcaacaccgattcacagctagtcgatttggctttccagtgattgattgggtcgataagagagaaattttcatcacaagactttgagagcttagcacatctggctcagaagggaacggctcatgagcaacgttttcaggaggccaagaaggtcaagaaggttaa

SEQ ID NO: 38881 - DNA, 607 bp, Oryza sativa
caaatatacttacattatgataactatagagataaaatttcagttgcatattaatctaactctatacatgaaatatcaagctccgtgcaaaactgcggggacaatcccctagttttaaaataaaccaatgtaattatcaaggaaaatcatagttaaaagggtggttttatatatttatatatattataatgtgaaaaaaaatataatcccgcagattatgttttcttttttcagtgtatatcatacagttgaattttttttaactttttagtaatatttcgttgtcttaatgtttctaccattactttgttagttgttctgttttttcagttgtttgttcatttttatcgtgaatatagctaaagttttgcatgtaatcacatcccaatcaatgcgatgttaaatcttaatcaaatttcttttatcctgcctgtattctcatctattaagtatagaacatgctaattttttctatctcacaaatcgcacatgatatttatcatcagttacaattgaaatttcttcgctacctttttttttttgcaaaaatttttcatttgtagactttcgaacaaaccaaacatgctagagaagctaaatattgcag

SEQ ID NO: 38882 - DNA, 586 bp, Oryza sativa
ttttggcccaaacgggtactatgtttttgactggaatgaaaaagttcaaaaagcagcaaaacaagatttttggacatattggagtgtaaaaggtccgttcgtggcaaaaactcacttcttgattcgcgcggcgaacttttgtcaattaatgccaatgttggcacaagagggtgcgatgtttttgaccggaatcaaaaagttcaaaaaacgccaaaacatgatttctggacatattggagtgtattgggtgcgttcatagcaaaaactcacttcgtgattcgcgcggcaaacttttgtcaattaatgccaatattggcacacgagggtgcgatgtttttgaccggaatcaaaaagttcaaaaaacgccaaaacatgatttttgaacatattggagtgtattgggtgcgttcgtggcaaaaattcacttcgtgattcacgcggcgaacttttgtcaattaatgccaatattggcacacgagggtacgatgtttttgaccggaatcaaaaagttcaaaaaatgccaaaacatgatttttggacatattggagtgtattgggtgcgtacgtggcaaaaactcacttcgtg

SEQ ID NO: 38883 - DNA, 650 bp, Oryza sativa
ttgaaattgacatcattggaaaatgtttcgaaatatgaatctaatcataccataatgatttttattaaggacaaagaagttttgctttcagacttttgttaaattatttgaatgcaattcaggtttggagcgcgcggttgtgacttttttttaaaaaagtaacaagaaaagataaaaaaaattaaaaaaaggctaggcatggcattagaaatgcatgatgaagatgaatactgcgtacctggtaccaaaagggagactgatggcattagatcctacaagaaaccactggagaaagatgcagacaagaaccgggacaatcaggccaagaacatagccggtgtgcctgctgtccctgcagctcccggcggcgtaggcgccgccgagtcccaagatcgccgtgacggtgagcccgtacagcgggaacttgatgcgcttgaggtcaagcttctcgtagtacacgttgaacgtgatggcgagcagggacgcgatgaaggagatggcgttggagaagaagaagaacttgtaccggattggatggaggcccggcagcaccgggtcgccggcggcctcggtgctccgccagaagccgccgggtgggttgagcccagctacataggcgtcggtcgccacgaagatggcgatcaacatca

SEQ ID NO: 38884 - DNA, 1039 bp, Oryza sativa
tcatggttccactagtatgaatttaggtagatgcttcgctgattaattaggcaacattaggtggttttataactttagactttgggaattctcaaatcacttggatactatgaaatggttggcttatggtggaattggacatacccctctcttcctctttcaaaacccctaaaacatgttttctggtggggtattgtatgcatgccagttatgggaagtagcaccccggccaatataaggattaagctcgggcctctgttgcaaagcactaccgtactaaccacatgtctaatgggtaaggcttaactcggtgctcagtctagtcctgaacaataattgacaaaagttcgccgcgcaaataacgaagtgagtttttgccacgaacgcacgcaacacactccaatatatccaaaaatcttgttttggcgttttttgaactttttgattcctttcaaaaacatcgcaccctcgtgtgccaacattggcattaattgataaacgttcgccgcgcgaatcacgaagtgaatttttgctatcaacgcacccaatacactccaatatgtccaaaaatcatgttttggcactttttgaacttttcaaaagttcgccgcgcaaatcacgaagtgagtttttgccacgaacgcacccaatacactccaatacgtccaaaaatcatgttttggcgttttttgaactttttgattccggtcaaaaacatcgcacccttgtgtgccaatttttccattaattgacaaaagttcgccgcgcgaatcataaagtcggtttttgccacgaacgcacgcaacacacttcaatatgtccaaaaattttgttttggcgttttttgaactttttgattccggtcaaaaacatcgcaccctcgtgtgccaacattggcattaattgacaaaagttcgccgcgcgaatcacggagtgaatttttgctatgaacgcacccaatacactgcaatatgtccacaaatcatgttttggcgctttttgaacttttcaaaagttcgccgcgcgaatcacgaattga

SEQ ID NO: 38885 - DNA, 583 bp, Oryza sativa
tccccccgaattacgaagtgaatttttgccaagaactctcccaatacactccaatatgttcaaaaatcatgttttggcgctttttgaactttttgattccgggcaaaaacatcgcccccttgtgtgccaatgtttccataaatagacaaaagttcaccgcgggaatcacgaagtgagtttttgccacgaacgcacgcaccacacttcaatatgtccgaaaattttgttttggcgttttttgaactttttgattccggtcaaaaacatcgcaccctcgtatgccaacattggcattaattgacaaaagttcgccgcgcgaatcaagaagtgagtttttgccacgaacggaccttttacactccaatatgtccaaaaatcttgttttgctgctttttgaactttttcattccagtcaaaaacatagtacccgtttgggccaaaatatgccaatattagcattaattgaaaaaagttcgccgcgcaaatcacgaattgagtttttgccatgaacgcacgcaatacactccaatatgtccaaaaatcatgttttggcgttttttgtgctttttgatttcggtcaaaa

SEQ ID NO: 38886 - DNA, 702 bp, Oryza sativa
attcctgcagcccaacatgatttttggacatattggagtgtattgggagcgttcttggcaaaaattcacttcgtaattcgcgcggcgaacttttgtcaattaatgccaatgttggcacacgagggtgcgatgtttttgaccggaatgaaaatgttcaaaaagcagcaaaacaagattttttgatagattggagtgtaaagggtccgttcgtgccaaaaactcacttcttaattcgcgcggcgaacttttgtcaattaatggcaacattggcacacgagggtgcgatgtttttgaccggaattagaaagttcaaagaaagccaaaacatgatttttggacatattggagtgtattgggtgcgttcgtggcaaaaactcacttcgtgattcgcacggtgaacttttctcaataaatgcgaatattggcacacgagggtgcgatgtttttgaccggaatcaaaaagttcaaaaaacgccaaaacatgatttttggacatattggagttattgggtgcgttcgtggcaaaaactcacttcgtgattcgcacggcgaacttttttcaattaatgcgaatattggcacacgagggtgcgatggttttgaccggaatcaaaaagctcaaaaaatgccaaaacatgatttttggacatattggagtatgttgcgtgcgttcgtggcaaaagctcacttcgtgattcgcgc

SEQ ID NO: 38887 - DNA, 681 bp, Oryza sativa
ttcctgcagcccttgtcccctggatgttggtgttccagccggataacatgggctccgacgtgatgttcatcaggacgagcggcgcgacgccaactgcggccgaggtgttgacacggccgaaggcgtccatgttgaggatgtcctcgtcggagaagcggagggcgcactcgtcgtagaagacggcggcgtccttgctgagcgggcagagccgcgccgtcgcggccgcgtacgcggcgtcgacgcagccgctgcaggcagaggcgttcgcgtcgccgcggcagagcgcgacggcgtagacggtgtccggggcggcgccgcgggagcccttggcgaatagggcgccgctgctggagtcgccgcttacgacaaggaatgatgaggagagaaggctgtcgaggttggattggtagatgctgttcgccgtgtatttgctgctgccgcagatcatccagggctgggcggcgaccataggcatcggcaagaagaagaagcagcagccaaggatgagcaggacggtgagaatcatggctagctatgctgcctcacgcgtaagcgtaaggtttctctgaatctcttgcattccaaagacagggtcgcatgttaagcagatcgaggcagcgacgacctgtgtggacaagtcactgctatcactttcatggagcgggtgcaatgtatagtaca

SEQ ID NO: 38888 - DNA, 511 bp, Oryza sativa
cttgcaagattatgatcatgtaccttatttgcgtcatgttggtcacttgccatgtgttgtcgaaggtgaaaatgtccacattgagcacgaacagctccaaactctttgtgtaaccctgccatagttagtagcaaacaagaaacatatacaagaatatatacgttcctatcaactactaggtagtggaagctcacaaatcacacacactcaagctttttatcgagctcttacaagttcttaccaatgcaaactagaatatggtgtccacaccgactcaaccaaacactcgatggagttggatgtatcgacactttggcacacatgttcacaatctgtatagctgcagtcaaatctgtggagctctgggtaggcttaaatatgtagcaagtatggcaaatggttaaatcagagaatgcaaagttgaataatcgttcaaagtcaagtatcgtgctggtcctaggctagaacgaactagagacgcgagcctagaaacaaacaataccacaagata

SEQ ID NO: 38889 - DNA, 743 bp, Oryza sativa
ataattttgacaacgtctcataatagttcaacccaaaataatgccattaatcttcttattaactactttcttaattcaggacattaagcatgtccctattttttgcaaagaacttacacaagaaaatttcaagagtagcatacataggacatagaggcaatttgatttccccttgcgaggaatatgagctttattatcattaaatttggaagttgcaacactcccccttagtgagcttcatctttgccatcaaatgacaagattaacaagatcttacttagtttgtctcttagtcttcaatatttcttattgatttgaagagtgatgaaccaagtcaattatggtccattttgtcttagtattacaactccgaaaatgaccgtagtctaatgggagaagaatcatatgaaatggacaagtggcgcatatgaaatgtgcgatgtccatcccactaagtttgcacgccaattatggcggcaaatgtgcataggcactaaatttgtactaagcattagtcttgacaaacttctaaagttcatctcaacatttgctagatacagtttcgcaatgtcatgctcaaaattctcccctaacactaacagggatgataatcttaatatttatgagtgacatgcgaaacataacattatattggccttctcccaggctaaagatgcctctagagtttaggaaaaattagtgacattagctgcgggagacacaaggaatccttttttaatgct

SEQ ID NO: 38890 - DNA, 540 bp, Oryza sativa
ctatatagtgccttttttttaattacatggaagctgtgcacaaatacctgtgagtatacctcttataacacatgataatggaagagatgaagtctagtgacaaattcctcgtcttaataaattcctgttaatcagacatatacgtgtaacacttgttggaaccaggatttaaatcctattaagtgacaatttggcatagtgcctctcttgtcctctctcatgttcctcttccaggcctgccactaaagctaaagcactgatgatggcccttggtcatataaattttacacgcacgatgttttcttcatggtttcttcatgctaaagacatttaaaagtctattgttgctggtatgttttcttaatcaaacaagtatggttattttgtcctatgcattcatgcagcgcaattcgtaactcaatttgcaacttctgttttgtttcatgtcaattttacaaactgaattacactttggggcatcttttattgccatagtttcactttgaaccaccccaaatccaattttgaccggtatactcc

SEQ ID NO: 38891 - DNA, 539 bp, Oryza sativa
taattagagaataaccaatgggggtttatcctatacatatagagaaggcatatgtagtaatgatgtagaccaacataaaacatataccttcatgatctccatgttctcaatgtaaataagactaaataagataacattcgagtaaacattagtctcacacttatatatcaataacatggaaatcatatatatgaacctatcaaaaagtaggagataagaagtggtacatatcgttttatctccatgcatttcatccttgtcatgattaaggtccatcacaaaagaatgcatgtcttccacatctcattatcgggaaataacctagtaggcaacttatgcaaaagagaggttaatcccataaacatcggtttatcatctattaccaaagtaacaattacacaaattgtttaatccaagatctttcaatcttttctctctttggtgatggataataacccgatataaacaatatagagagatgagatgaaaaatgatttcaaatcaagatagaaatcttataataaacaaaatatagaata

SEQ ID NO: 38892 - DNA, 635 bp, Oryza sativa
aaggcaagtcccacctccctctctttgatcactttgaacctatgttttggaggttattgaaaatgtttgcaaatcctgcatgtcgattgtatactaacaaattaaaatggtgttaaacttgttagacaaattcctattatttgcattatcaccttaaccccacatatatccatatccatcattcctaaccttaggaacaatatgactataccactttttatatgagttttggtgacactaggttactataaagcttagccatgcttagaatggtcttccttgtcattatgggctcattacaaacatgaaaattgatttataattaatctgggcagaactttaatacttgtgattttgataaataaaatggtggaaaacatggattttaggtttaggcctcaagtggtgcacatatggtgattagttgtgtaccgatagggggagagtgtgcccaaaccgacctaaggacttcactcaatgtcagttcatttcgtatacagtacaaccacatgtgctagtatgggatagcccaagcttagtaaattatttatggtttagccttacattctggtaggccggtgtgtatgagttcggataactcagaggaacttcctatttaccccgacgtggtagtt

SEQ ID NO: 38893 - DNA, 657 bp, Oryza sativa
tgagaatcaaacatgcatgtcttaggaggcttacccaccgggccattctttcaccaaatgcccaacctcacgacacttggagcaatacttaccattactcttgacaaaacgagtggcacggtgagaaggtttcttacccttctttggaatgaatccaagtccctccttgttaagatgcaccgttgctcactcaaaatcttgtcaagagtgttcttacccttgaagcacctctccaagctttattgagcttagccacttgctccttaagctcattgtttttaacaacaagtgaggcatcacaaatagaaacacaagagttagagctagagctagacatatccacaagatcatcacaagaggtagaaatgctagatgatgcaacatgagcaatatggcaagtagcactatcatcaagcaaatcacaagatatgccaacatcaatgagagcttcatgttgagtagtggaaaggaggttgtcatgagcttccttaagcttctcatgagaaatggtgagtctctcatgagaagtctttagctcctcatacaagacctccaaagaagcatgatccttctttagggccttgaacttgacaatctccttctcattataagcatggagctcctcaaacatactcacaagctcatcataggaaacat

SEQ ID NO: 38894 - DNA, 591 bp, Oryza sativa
tcttagttttgggaaatatgattaatcataacacgctttaaaatctaacttcatcgtcgactatgcagtaagagattatttttggagcttttacatggttattgctcccctatgtgtgaacatagcttaatctgaataatcttcataaatatccacacatctcataaaataagtgtccaaatatctttaaacttctgagatcaatggactttaggaaaaaagagcatgttacttaagattgtcttgcaaataatggaaaacattattataccagtggtttagtctggatttaattaaatactgccaagattcccagtaaaaaaaagtatgccaaatctgtatgcatccagatttgagctaatctcaagcttctgtcagctgaatcataaagattatctttgtaacttaatgtcagcttgactaactttaattgaattctctcaaattatttctttatgtcagtgtatgacttactgatataaacccagtactccttcggaccaaaataattcatggaaaaaaattccttagtttctaagagcaatatgcattgcttgacaataaaatgtcattagaatggagtaccggtga

SEQ ID NO: 38895 - DNA, 602 bp, Oryza sativa
ttgttctatttgatccatctatgcatctgtattgtattgtattttcacgcatgtatgtcttataatatcctcttatccggtcattggtcaaacagactcgcaccagctgctttcgctctcccttattaaatcttcaccggcgggtcggatcgcttttcccctttcttttggtttcaaatctacacccttggaaaaaaaattgatcccttggtaaaaaaaaattaaatcatagggacatatttagataagcactgtgtccagattaatctatgggattggtttttttttgaacggagagagttatttgattagcttggtattttctctcttcgcctcccctaaaaaagatctttcttctcctttttttctatctaaaaagaatatatcttgacaatttctgctgtttttgttttgtttgtgttcaacgatatgtatgtttgatttttattttgttaacttttgatatactaatgatctgttccgtaggcagatttattggtcgaacaaaacttccaaatctgtttatcgaacaaatcatgaatataccaagcgtagaaaaaaaaaaccatcaaacacaagtaactcagattgaagttataaaa

SEQ ID NO: 38896 - DNA, 910 bp, Oryza sativa
gttgagtagtaaggggatctaaggggtagaagtagaagggatgatccaatcttatctaaatatcttggtgaggaatttctcgtgtgggacttggccaattagagatgggagagaaatatttactcccggttgaagtttctaaccgggactaaagatggatttttagtccaggttggtaataccaaccggaattaaagatctaaataaactttactcccggttggtactaccaaccgggactgaggtggtgatttttagccccgtctggtagtatcaactaggactaaagatccttggccccctgacatgcctctgacaggggatgaaccgagactaaaaatgatctttagtctcggttggtaacaccaaccgggactaaagataaaaaatctttagtcccggttggaacgggactattgtgaaaatcggccgacccagcaaagatcacttctccagtagagaccatttatctgctttaggatccatgttactgatcaaaacagcgtattagatatgttagcgggttaaacccgattagagatggatgatatgtcatcccaagatccagctttccatttttactatactagctgtttccatataagcttgcatgcatcaactttccaaatgaatatttgtcacgtcccgataaatttatcccgaaataaaattcattctctaaaacgaaaaatagaattaattaaaattcgaatgtggcccggagaatttttgttaaattctccttggtctaaaatgagcccttaaattttacttgaattttcagagcaccagaaataattattaagcaacaaaaacaattatcagagtttattaaaaagaaaaactaaaaataaaccctctcctccctttgggccaagcgtccctctctctccctcggcccgcggccgaa

SEQ ID NO: 38897 - DNA, 1208 bp, Oryza sativa
agccataaaacttatgcgagcactgaagatgtatttttgatatttcattcctttgttttcatctgtgtcgattctctagattggcaagtaaatttatagggtgcacaagatcgaggagagatggtgatatatttttatactgattaagaccttggaagagataacaccctacttcagttgtttgtagattagatctgtatcaaagtgtgcgcaacacggtgtgtgaatagcacgtaacacgtgtatgatcaccctaattgtttccggcctaccgttatatagacataaggaggccggctacggtaggtagcgtaccccatataatccgggtacctaccacctatttatatcggataagatttatattcttatctttgatcccttttactccctctgttttgtattgtaagacttttacatctatatgaatatgaacaatgcttgaaagtcttacattatgaaacggaggaagtattggattacaatgtgccatatgggcttagacttcttagcccaccttatgtaatatagcccaaaggcctaacctcggctactcgggtaccgtgtcccctacaatctgcaatccacattacgtttgtttgttgacgaaactatattgcaagactgccacgtctttggtttttaatcatcaaaatattgtaccatttttttctctaatacgtacataacctgatacagtgaaagagtgattccaaagtcatatatatgacaaatttgcaacacattacgtctgtttgttgacgaaactatgttgcaagactgccacgtcttgggtttttaatcatcaaacgatcgtactactatttttttctctaatacgtacatagcctgatacagtgaacgagtgaatccaaagtcatatatatggcaaatttgcaacaagttgccaaaatgtctgaagatgttttaccagttaaaaaacttcattgactttttctacaacaatttttcatcccagatagaataccaacagatattaataaataatggaacacatttcattactaaaaccatttgatcccataaccaccgtagtaagtatttagctgccaattaattgatataatcaagtatttactcttatgagaaaaaaaacaaacaacaatctccagctcaaaagcaccataaacaaaattaaaagctactgatcttatagtcttattcaaacaaaacctttatgtttagca

SEQ ID NO: 38898 - DNA, 762 bp, Oryza sativa
atcctccacttggaaccactggaccgtatggaccgccagagtatgttcaatggtatggtcgagtcttcaagctgaggatgagagattaatcaatagtcctatctaacctctactgccacggtagtatgacttaaggacaagcttaaggaatagtctaggtatgtggtggcccattttggaagaaaatcgtggtatgtaatatatgtaatatggctgccatgtactccatttatgtaagacttgttggatggatgtaatagtaactaagaactcgtttgtccttaatttagaaacctctgtgcttgctgtccagaactttggaaaatctgtaaacataagttcatctaagttagaaatctgttataagctcctgttaatatgaccgacatttatcttgtggaactaaccttctctagtgtcaatttaaactaactatctaagcttccataaacccacaactgagtagaacttgccactcacccgcgaaaataaaagtttccaaattgtttatggtagcaagtctgtcatacaacttaaaaaaaaatattatctgctgtcaatgtcaatcctctggagatagtcataacttaagccaaccctacccaaatctcggggacgagatttattttaagggggatagactggaccatacccgaaattttaggacttaaaatttcttgtcaaaatagttagaggttaacttctccaaatttcgagagccaaaaatttccgttttaatttaggtgatgatcaacttaaacc

SEQ ID NO: 38899 - DNA, 2887 bp, Oryza sativa
ttcctagaaaactcaagggcctttgtgcatattggtccctcacagccatgtggacccatcctttaaaatctgaagaaaaattaggaaaatgcccaaacaattatatgtttagcagaaaaatgcacaagttgtaaaatctatataaaatcaaatatagctcattttgaagtgattccagtttctgtagattcttgaagttatgaactttattccaggaatataaaacttgacactcactgtacaaataatgtctctaagattatttaagataagtcatgcataaaacatgtacaaacttataaaatacaaagaaaattcatttcaactcattttgaaacaaactcaaaaacttcagattcatcatcagacactctctgattaggaaaataaaagtaatgacttactttgcatcaaaagcctctaaaactattatctttaaaatgactagttttagataagctaaactttagaaattcatgtagaacccaatttagcttcaatttgaataaacttaagttatgtaggatcactaacacatgtatttccaagttatgaaataatattatatacttgctgtgtagtaaaagtctctaaatattcatataaggatttactaacatagagcagccattaatttgtaaaacttgtagaaaattcatttttagtccaaatgaaatgaacaaagtttctatagaaccagcaaatagttatcttcaacatagtaaaataaaatttggcaccttctgtagagaacattgatcaaaaccttaacttagtgaaataagaatttaaacacatagtgttgtttaagtaatacataaacatgtataagtatatatatacactttaggtctaattaaacctaaataaaaacttgattgaccagtgaagccatagttccatcctcatccactaaacttagaagaacttggctcatataacaatttctaggttaatataatatattgctagtttagattaaagcgtctctactttataaaatatgaaccatagtagtaaagaccataaacatgtgagataaaaatgttttagttaaccaaattattccttttattcaacttaaacatgaagtagcatgttctgaacctataactcaggagtcatacatatataaaacactatatgcctaaaacacgttgtaacttgtaaatgcataaagaattcattataaatccaaaaattgtgaaaccaaatgtgttagtcttagaaaacacatctccacaccctgtgaagtctaatctagtaaaaatcactttacaaaagtattccataacactacctaagactatactactataaaccgataaaacttctaaaaattcataactccctaatggaataagataaagataaaataaaaattctttcacctaaatttattttagatcagtaccaacccactgtgcataaatcatgcattttagagcattttggattttcaactctttcggtgtttaattgcatatcgtgtcctttatctagataattgcgtaatcggtgaagaagtggattaggtgctaacaattctctgatcaaggaaagttttctcctcccatcctttgaacacattgaatcccatgatttgaggaatgaaaatatttgtttacaaagttgcatgtgaacttagactatatcggtatttgaaattgggttaaggtagttatgacctatttgctgcatattccaccttgaataattgatcctcttgctgtttgaacccctagaaatggttagagtacactctttgtgctcaaatgggtttatatatgctctatgtgcaactacttgcttagccatgcttagaaatatgcaaatactcattccatctataattaaaatgtggtttgatacttgaacctttgctggaataaaatgaatatgatgagtatttgcgaactaaaatgtgtaaaatgtgattttacacttgggcagcaagtggtgtgcatatagtgttagttgcataccgatagggggagtgtttgcccaagtccataaggaccgaacttgtgtcacccatttaaagttattcgtacatccacatgtgctagtatgggatggcctaagctgattaatctatttaggactagccttgcattctggtaggccggtgtgtatgagttagtcgataattctgaggaattagtcgatgattcagaggaacttcctatttgccccgacgtggtagtttaggtgactaagtctgtcaatacaacggtattgtgccacgtgggtgggttcccgttgtgtccgccaccacggcgttaagtttaaggcgtgggcccgccacttaacggttctagacatatttccaagtatgcctaggatggagaacacgtatcgtgctggtgcaaggctagattctaagtagtgtaaaggcttcgttatgacctctagatcacattcaacatgaagagtgtgatggagtcttgcaaactcaaaacaaactagagagtcatatcatgtgggtaaagctgtacaaactctgcagagttctttaaactaattgattagccgtgctcacggtcatgagtgctttggtgatgtgtcatgagtatagactatgttttaaaaatgtaatcatgtgacattggtttgaaattgataaatgtgttgagttgtgtatgtggtgatacattatgacttattattaagtatggcaataagagattgtttatgacggaattatgaagaagctaataatgaaacttaaaacttgtctttgttaattgaagcatcaactcctttacaaaagaattgcgaaacaaaacttgctttatgctgaaaatgaactacatattgccttcctttgaatatatgccttacatgtagtatggtaggattgacttgtgcttgccagtacattaac

SEQ ID NO: 38900 - DNA, 833 bp, Oryza sativa
caaagaataagtgcatcttcctcttcacatgcaactcatttatgtcattggacgaagctctaatcttgaccacccagcgaagtcaagagctctctttgttgaccgtattcccccaccctcttcctattaccattgtgaaagagcgaagtgtcaaactaatagatatatagtacacatgtactaaactaaggccatatatatgccacaagtcatcagttaggaaaagcacgtcgtattaatacataggctaacaagagcattgttatggcatataggcattagagcacacctataaggagttaatgttggctgattgatccatcacaatgtgctctaatgttgtgttaccacaataccatagaaataggcaaattgaccatattatcacaacaatcataggtgattgtagaccaatgctaaatatggattaaatgatagtgcaaatgatcatgcaataattctcattgattgaggaaataatacataaagctaatccgctttccttatccctagtcctaactaataacaacaaaattatgcgagattagaagggcaataatgggagtggacgtatggtgctaggtcgacggagaaggcccatccagtctaagactaaatacgagtgtatgcattacgagaagactactttcttcctaaccattacaattaattgtgcatgggtcccatgctagattgaaaagggaattaatatatggtgggtcccctttcatttgatagattgaatcaccactaggatgccctaactattataggtttaaatgcaattagagtatgctagagttctttgaaacaaatttctatcattatgttga

SEQ ID NO: 38901 - DNA, 1935 bp, Oryza sativa
gccccgagattgtattgaacgtgtgttagtttgataacatggggctcggggtctatttatacccgagattacaaaagatgtccatgtcagacatgactcttatctctaacaaactctaagataccataagtctttgcggcagacttttgcccaaacatatctctaaggaaatttcatgaaatatcctaattaatagatacaattgccttatcaggactctatccgtgcgtggcaatcctcatgaagtagattgatccaacccaacaacgcatgccgtgccatattgtcggattcggcttgattggctaaccctgtccaactcggactctgccgatcccgatcgtagccgatttggacttcagttgatccttactctgtttccaaaacaatcttggacttggatttcgcttcgatctgatcttcatcttcgatactttaggttaccaaatttcgtcgttaacacatgccccccaagtccggaatattggataatgtttcgaatttgctatacgtcgactccgagagaaatccgcgctggtcgttttccgaccgttacactgttctttaaatactaaccgttgtccccgagaaacttcacctcgttacttccgttttcaccgcttaagccatctttgtcccttctctctccggcgatctcctcggtgcgcaaggcgatctccaggtgatctcctctctgtccaagtttccacccacgacgatgccgacctccgtcagcccatctgccgtgccatcaaccgagtacgctgaggtaagttcccatccgctagatctcttttctctacgcaatagatcgattttcttaatctcatctcgttttcttcttctctattccttctggattcatagcatcgttccaattagtcgcaattccaagcctgtcgcatgagaatcattattttcttcgtccgattggtgatcttgaccccactgaattcattgttgccgaaaccaacagaatcccctttagattagccaaccctaatctacgccattggaagaacacttttaagtcttggccatccttggaaaaaaacttccactgagaaaagctagactacatggtacaagcgcatatcggctagtaagcaaacacactgggatgaaattggaatcggccaagcacttgccctcaccatagacaattcggccaaagatgaacccttgatggctgccgctacttatttctggtccaatgccatcaacgcttttctattcaatcaagggccgatgaccccaactctgatagatatcaccatgatcactggtctggatgtaacctcatcggctaaccccatgagagtgaacaccaaaaatcaatatgattttaggacaaaaagcataggtggctggtctggttatgtggcagcatatatgggccaaggatctgtcactcctcgggaacatgtagcttttctgctcatgtggctaaaaaaattcctcttctgcggatccagttgtggtcctacaaccaattggcagttcgtagccgatgccttggaatcaaaacgacaattccccttaggcaaaatcctcctcagctatctgtaccaaacattagataatgcatcggccaagatagctgtcggctcagtggttggagcaggtggaccaggtggctgctgcaaacttggttgaatctggtagccatgaaagctgtcaatcggccatccgtgacagaagccgaatttccaaggttaaagccgattacggatgacgatggagaagaatgcacccatcgaagatgcatgtcttatggggaatatgcatccacaccagccaatgccggagcaaagttatcggctgagccgctcaaggactggttctgcatcttttatgaaggctttcagaaagatgcccatgtttggttcttttatgagaattcagccgacttggatctcccatcggatttcagat

SEQ ID NO: 38902 - DNA, 1323 bp, Oryza sativa
gccaagataagtttgtgaagccggatctagcctccgcaacgaaagagatacccttagtggaaggaggagtgcatttgtgcaacctcacgaggatagggttaaaaagacccggctctttgcgagctccctcaacggaaattagaatcccctcaattgaactccgggaaatacatcgacgcgtaaacctcggtgatattctcactctctttaccgtcttgttccattgctttgtgctatgctaatattgttgttggtcgagctcacctctttgcttgtggattgaatctagagctcttaggttgttctcttgtttgtattgttgttgtgcaggtcagatagtctgatctcagttcagactatccgatcacataggactatccgacctgatatcagacaatccgaccctattttgttttagcttccgcatttattttaaaaaaccgcctgttcacaatcgacatattttaaaccgcctattctctttcccttcatctaggcgacatcaaggtcctttcaattggtatcagagccaagtctctctattaagggctttaccgcctagagagtaaagatgtcgattagtggtttggtggatattgttcctttactccttttagatggttcaaattatgattcttggagtactcgcatacatgtgacatatttaggactatgggtcctcaaatagagcgagttgtagatgtgagcgtttctcctcctaatgataaagagctatcatctgaagaggaagagaaatgcatacatctcaatgctcaagctactaatgttttatttagtgttttgagtgaagatgtatttaaaaccatcatgccgcttaaagatgctcatctcatttggaccacactcaaggagagatatgacaagtccaaatgtgatgatgtactctttttggaagaaccatttgaggaatgttcaacttcatcaccaaattgcgaagaacctcaagtgactaccttcgatgatccagataatcatcccacgtccaccttatcaacacatgactacattgaaggcaatgaattggtgagtaaggttgacgatcgtccaattctcccattggattccaacaacactgataatgaaattgtcatattgcattgtgttgttgactcatgcatctcacctagccccaagtatatgtgtgaggatgatatggataaatgctctacttcctatagtacttgtggaactaaccttttgaagggagaagtaaatgagcccaatggacaagtgaagaatccacctcaccaagatgctcatctttctatttccaaagatcatgctttctttatggaaaagatg

SEQ ID NO: 38903 - DNA, 601 bp, Oryza sativa
gcttgacggcaggcacgagctagacaccaaagccttcatcttccagggactcctcttctgggtttgaaaaattgagcaagactgagtacaaccactgtactcaacaagacacacccacaagtgcaggataaatgtaaaggagtacaagggggttatgatataaagggttagggtttgcagtaaacagcattaaaagacacttagttgctcaaagctattttgtaaacacgtttccagagctatataatattattaatcaaggccgtgaacccacacgagcctgccttaacccaaggcctacgatgattcagaccgaactggcaacccgaccctgggtcccagctcgtcccaagccaacccaggccatccgttccacattttagttgttaagcaggttttaagaattaaaacactaacttgggtacattgctcggcttgcccataaccgagggcgcgactattcgaatagattatactctgattagaggtgtacatctttacccacaagacacatcttcctcacgtgtaaccacgtgccacataccaccacgatatacggacggaagacgtgacatagtttccaaccatcctagccatagac

SEQ ID NO: 38904 - DNA, 648 bp, Oryza sativa
ggggccgggcagctgacggccgggccccacacggcgcgcccagaggcggccacgtcggcgcggccggcgggaggcggcgcccgtgccccgatggttgccgccggcgaccatcggcgcagcggagcggcgaccgagaggggaagggaagggggaaaagaggcggtggtcctcagctcatcccgggtgatggcggcgacgaaggaggcggccggagcggagggaggtggtggcgcggctcgggtcaacggggacggcggcgttccggcggtcgacgggctcggcgtggtggtggacgacgtcggcggcggcgccgaggcgggaggaagtccgaggcagcgacggagggcggctggagcacggcggcgacggcggagagagagggcgacggcgcgggctcgattccgatggggaggctgggcggcaaacggcggaaacggacaagggaggtacggggagggtttgtatgggatcggggcgagagagggcggccggaggagggggaaacgggcgtgggagacccggctgccttcaatggcgccggcgagattaggggaggggtttccaagcgaatccgagggagagagaggggaaaatgggagaaaggaggagggaatcgggggaaataattcccccattcaattttgaatg

SEQ ID NO: 38905 - DNA, 1150 bp, Oryza sativa
agggttagtccacataggttatgatcagagttgaagaattcatagagaaaatcttactggtggagctggcttgggtggtgctgctacagatttcttctttacagcagtcttctttttctgcaaatacaagatttatgagtaatcggttacgaatataataattgcaaaaggaaatcaatgtgagatgtttacccttgagaagtgagctggagcagcgggagttggagcagtttgcttgcgtgaagccaatggtgttttttctccttcactcaactcggctaccgcctaatcgacatcttccccgatttcttcttcatccaaggcttgctcgatagatggatctaaggcaggcaagtcatcggctggtttgggcttatccttcttggtttttttcttgggagctaaagccgatggatcaatagccgatgttttggttttcctcttcctacccacatcggctggttctctcatttgcccttgaagtagacttgacgtcctgggggcatggtagccgatgacagggggagctagtccacctccatttggtagaaggcttggagcatattctatgtccctgccacggttgcttttgcgaggaggggaggattctgctgtctgtcgaaagagggaaaaagttagttaagatttaagtcgcctaacaattattcaagcaaaattgacaaagtaaagatgtacctgagggacaacatccggatatagatctgtcatgtacatagaggctggctgatggaatatatgttgcttccattcaccccaccatctgtcaaggttcttactcctgaaccttgccagctctatgttctatatactgcctaaaggaggtcctgggatgttgatcagccgatcaatcatcaacattgatgagatttctcctctgcactggatcttatcggcaaagaacaagccgattggtagctgtcccattccaaactgcctagctgagcttattggatggtagaactcataagacacctgtatgtttctcccttggtggatgtcaacagaaaggatgcatggactaatggcagccgagaagacttctttggactagtaaaatttcttagagttgatgtcttcgaatctgaagtccgatggaaggtcgaaattcactgaatcctcatatggaaac

SEQ ID NO: 38906 - DNA, 895 bp, Oryza sativa
atctgaaaaactcacaacaccaatgtggatcaaaaccaccattatcttgctcataacatcctacatgctgttgcttgtcatattttttctggtacttgtcaaaaatcctaccgaattcatctgaaaattcctatttttccctccatcagctattctcccagatgtgtgcaccatattaacagggaaaggtttactatcaaccttcatcggcttttttgagtcatcaaatttaatcttccccccttcaatggcaacctggatttggtgtctaaacactttgcaatcattagtagaatgagaaccagaattgtgccatttacagtaactcctcttgcccagttcttcagccgatggtatgatgtaaccagcaggaatttgaatctgcttctcccgaagtaacaagtcaaaaatcttatcatcctttgtaatgtcaaagttatacctctcttcttttccagaatttttcacccattggcatggtataaccttcttgcttctaacccattcagctgctgctatttcagaatcatcatcatcatcattagatccatacatgtaaggacagacgtgattgattttcttgaaattcttcctagcttctgcaaatctctgttcatgcaaggtcaccttttgtgcaagatgtcataaactatcaaagtcctgagatgagaacttctccctgatcggagctatcagaccttgaaaggctaaatcggctagctgaacatcggtcaaactcaagctgtagcacctgttcctcatctccctaaacctatgaatataatcttgcacgggttcatcatgcctttgtttgattgctgtcggtcggacaatttcatctcatgaatcccactataaatgtaactatggaattgcttttccaaatcggcccatg

SEQ ID NO: 38907 - DNA, 690 bp, Oryza sativa
accggagggctaccgtgtaggggttttttctgcttcgtctcgtctgcaatgggggtggtcatcacaaggtgggggtggtcatcacaaggacacagggggcccgggctgtcggtgtaaagatgctttacctggtgaaaccttttccctttcatttttttacctattgttaattttgttctattaaagcttggtttagttcctaaattttttttaaaaaaacatcacatcaaatctttaaacacatgcatgaagcattaaatatacgtaaaatctatttggagaggcctctcgtttttgccttaaccagcgacacctgaacgtgtggagaaatctactatagcgtactacatgcatgcattttttagaagtctactacatcacatgtatgttattttcctcttcaaacaaagttttctctcaaattacttatccgacctacaatccgattacaccattgtgttcgttacaattaaatcttcacagtaagatcttacatgattatattacgatgaaaaaatatttatatttgtaaattacttttattatatatgtaagttactttttatcatatatataagttacttttaaatttgactaaattacttcttagatatataaaagtaaattcaatagagtctaaaagtaatttacatatattataaaagtaacttaaaacaaaacggaagtaac

SEQ ID NO: 38908 - DNA, 573 bp, Oryza sativa
gagaatgggacatcatctaaaataacaaatctggatagggggttgattttttatgggacgaagggagtgttaggatacgataggcaaataaacgatgaagaacaatagatcaatcacagaagacacgaggttttaacatggaaaaccctcctaagatatgatagaaaaaaaaaacacgagcgccagccagcaaaactgcactatatcagatgaggttacaaaacgcccaacggctgcttcgctctggcccaagcctctagcgatgggcctccacttcgctcagtccgaaattggcctttatatatatgtgtgtgcaaatgaatttggatcacaaataaattatgaacatataaatacaaatcaaaacaagacaggtgctaagtatgtcaatgagaagaaatgtaaaccaccaacaggtgataggatggatattgatgtacttcagaagaattctactttcgcaggcacaatgacatcaaccaatggtcacatgtcatttgatcaaggtttcagcttaatgaataatgcctgttcctcaactgcaactattcttcctgtcggtactcaaagggt

SEQ ID NO: 38909 - DNA, 718 bp, Oryza sativa
caccttctccttcaaccttgtcttttgacttgggcttgggcttgacctcgggatctcttcatctccggagtgccacacttccgccatgtgtgcctccgccacatgagcacgctccggcttcttcttgcctcccttagccttagcttcatttgacttgggacaatcggcaatgaagtggccatattcgccacaattgaagcacgctctctttgattgcctctttcccttgtcatcatccttcctccctttgtcatagccactcttgcgaagaaagtgcttgaatctcttgacaataaaagccatttcttcatcttcactttcttcacaacttgactcttcttcttgttttgccttcaaagcaacttcttgattttttatcatggcggcattattcaccatttgtctcacttcacgagcttcctcttcttgcatctcatgagacacaattcttccaagaatgtcacttggggtgagtctcttgaagtgtttcctttcccgtatcattgataaaaaagagtgggatttcttggaccaaatgcacgcagaagtctcttgaccacaaagtgatttgtcatgtcctcactcccaagtcctttaatcttgttgacaagaatcatcatcctatcatacatttcttgtggtgtctccttgacatccatcacaaatcttccaagccttccttccaataattcaatcttggcctcacgaacggcgggtg

SEQ ID NO: 38910 - DNA, 537 bp, Oryza sativa
cccttccttgtgttctacttccttctttccaaaaaaaaagaccaacccttaggttttgggcccaccaataaatggtccgtcttatacggaatttttttataattagtattttcattgttgttagatgataaacatgattaatactttatgcgtgacttatcttttaatttttttcataattttttcaataagacggacggtcaaacgttggacacggaaatcagggtttgtctttttttgaacggaaggagtaaaccatttggcagtccctcttttggcaccacctgcagctccatttatgattagggtgcacatcgaaccaaacaaaaaatgtatgattaggatggctcatacgataattattgtattaaattaaatgtatttaatattttatactccctccgtttcaggttataagatgttttgactttggttaaaatcaaaatactttaagtttgacaaaatttataaaaaacagtaatatttttgacacaagatactttattataaaagtatataattattaattaaataaaa

SEQ ID NO: 38911 - DNA, 962 bp, Oryza sativa
tgattgagctatcatatagccaagactcaaaatgctccgggatggattgtcccaccagatatatggaacttgtcaatcacacgtgtcatgtctagataccattgaccaaataaccatctgacctgaccctgttagagactatattctccccttgattttgccattttgggttcatgttcatataaaacgtttgtcatgtggttttcagataatgaataccataataatattcttcagttcaggtcttatttcttgatagcaagaacatagtaatgctttctctttgggtcaattatgtagaaatatgaaaatatgaggaaacattttaagatcagagagaaaggggaagggggggaggggggcttacactgtttgaaggaaactggagccagacaagaatagcaaacttcacgtgataatagaaaggaacactgcagaatatcaccagagtataaatgttcgaaaagtttacaaggacatcaaactttacaagattagaaacatcaagttaataaaggcaatgtaaatttaaacccatgcccggcgaaactttcaaccaaatattcctagtaatgcaatttctttcagttcatgctacattccgcacatatactgtccccatgcactgtcaactattgtaagggtctctttcacacatcctctccactggaatgtttgatttattccatggtttatataaacataccagaaaggcagttagaagctgatcaataaagatcagcaactccgcagggtatacaggaaaattccctggtagattaaatggtgtgtcttaatgcaccatggtcgctttttttaacttgaacattgacaagctgattgaccacgaccacccagtagtgagaatggtgatgaacagcaaggattacttctttgggttccgaagtactcggcattgtcttggccgatttatatagtttttggtcagaaaaaagaaatga

SEQ ID NO: 38912 - DNA, 612 bp, Oryza sativa
  unsure (1)..(612): unsure at all n locations
gacggccagtgagcgcgcgtaatacgactcactatagggcgaattnnnnnnnnnnnnnnnnnnnnnnnnnnnnnnnnnnnnnnnnnnnnnnnnnnnnnnnnnnnnnnnntgaaggcgcgggtagccgccgtgctgcgtcgccacgggggaacgcgtcccgcgcagcatgaggtgcagactttcaacgacctcagcttcgacgatgccgagctgaccgtgacccgggccggcgcgccgatcagcctgaccgagcgcgaataccgcctggcccgctgcctgttcgccaacctgggacgaccgttatcgcgggaatatctctacgagcgcttctggccccacgaggaagtgttgtcctcgcggccgctggatacccacatctatcgcctgcgcaacaagcttggcctgaccgccgagcgcggttggcagttgctgaccatctacggctacggatatcggttggagagcgtggcgacggtcgactgagcggcgcggggtggcgagaccgaccttggcggtcggcgagggagaatgaaaaagccccgcggctgcggggcttcttttcggcgaggcgcgcttacttctggaacgcggccacggccttggtgatctcgg

SEQ ID NO: 38913 - DNA, 503 bp, Oryza sativa
cgggggctacacctaattaggtgcatctaatcgatgcacctaacttttttgtttttccgcccttcatagtctttgattttggtactcggagatctatacagaagaaattgaagcactcggattattactttatgttccaagagaaggctatttcatcgactgtaaaggtctcgggggctactgtggagattatggataccccatatctacacggcatgtatagtccgactgggtacagggtaccatatatagatagaatatctttacgaggactcgggttaggtttagacttgtatgtcaaggaaatatccgagatcctagtcggttacgattgtattttatctataattacatattccgttagggatatggactgtatcttgtaatacggaccccttcccctatataaggaggggtccgggttcctctaggggcacgatttttctcccaggtcatacgatcgataatacactcggcggatcaatccccggacaggagtaggg

SEQ ID NO: 38914 - DNA, 759 bp, Oryza sativa
tgaattaatggggggtagctttgaatttccgattacgacggttcttgcatctagaactggtcttatccagcaatcagggactcatgacagtaatgttgcaataataattagtatcctacttagttaatttatttggaagaccaattaagcagaaatggacggaagaaattcaaaccttcaactcggcgacggcgagcaatttaggaataccaggaaagttttcatcagtttaattattttatatgcagatggatgaacttactctgaaacctgattttctgaaagggaaacagacaaaacagaagattaagaacgtacatatgtccagaaagcacacacattaaactactttgtgcatttgtcggtgtcgcttcgcaccgattagaccggagttcatcaatccgcaattatccgtgctcttactcctcctgcttatctagaaccaaaatccagaagcagcatttgtccgaaattcaaacccactcattacagtgtgtgaacctttagcatttggggtcatagttctattaaaccgtaccgtgtctcccgggtatatcgcagagatagaacattctattggtaatttggtatgcaaccagtcacagtaaaaaacaacggaagaaatgataataatcaaaggttacacgctgaattttcatgctaatcaacgtccaaaaggttgtgctttttctcagggaaaaaagttaccagtatacttttactcttcgactcgcggcccatggcctaaactgcttcgcg

SEQ ID NO: 38915 - DNA, 658 bp, Oryza sativa
ccctaagccggaatttcttcgtcttgccggcatcggatgcagattaggtcaggtagcatcggacaagcctctgttgcagttgaagctaacccggcttgactcccaccttttgcctggtagcactgaactaccatttcttttgtagttgttgccatgttggcatattcatgccatattatcctatttgtgatttctgacaacatcttgtggattcgggtcaattatatttgattatatttaatatattgcgttgctattttccagttgatagtctgatattgtgcacttgtatacccttctggaacttctggttttcggattcactggtcacattttaaggaccaatatgaactgtatattgtagacagtacaagtacaagccaatatatgaagtaaatacgcaccacattgtgtaaaatgttgattttattaggttttaataaaggtggtagttgaaatgggtctacagcttatcgaaaaaaaattgggtcaaataaatatcatcgtgaactcatgatacattgaagaaagcttgtattgctgctgctatctagttagatgttagccagaacatatatcggcagtgagacagtttttgtgtaggttgtacttgtctttgattctcagtaagtttgtaattcagagctttgaattctga

SEQ ID NO: 38916 - DNA, 666 bp, Oryza sativa
tcctgcagcccgattacaacaattgaaagattgggtgtgcatttaaaatggtggtgatagccaagggcccaaggcttaacatatttcatagtaaaatagttaggttaaatctaaccagcaaactgaagaggaggttttgatgcttaaagttacaatgtcactcaccccgtcctattttaagtgcagttctaattttctgtgtctaacttgtgaccgttcgtcttatttgaatttttttatgattaatattttttattattattggatgataaaatatggataatacctcatgtgcgatttttttttaatttttttcataatttttttaaatatgacggatggttaaatgttggataccgaaacccacgataacacttcaatgggacagagggagtatcttggaatggcaagtccaaagtaaagggacaaagttcattcaaaagttaattttaagtgtttatctgcatgatcatctgtacaactgccttgagaaagtttaagcatcaacctcacatttatcatatagtatttatttatcatacaatattatcttatagtaatgcaataatagaaactaattctcatgttgaaaattggaactcattccatagcccaagactaatttctaaagtgagtttggatttgtctactccacccgtaatcatg

SEQ ID NO: 38917 - DNA, 3741 bp, Oryza sativa
gggggcagcggatccggcggcgcgcggcccctcccctccctccccttgcagatccagcggaggggaggcatgggggcccggtggagcggcggcatgcgtcagcggctggcgtggaggtggggcgacggcgtcggcgaccggcggatctatctcccccttccttccctctttgttatttgtgattctttgtaatttgtgagatacgttcttggagttcatttgttgctgcgagatgtgttcttgtgatgtgagagttcatttgttgatgtgagatgtgttcttgtaatgtgagatcattgtttgtcgatgtgcgactacggatccggcgccggcgacgggagcgagcaacggatccatagccagcgacgggagcaggcagcagatccgtagccagtgacggcggtgggcctaggttaggtggcggtggcggattagggttaggttttttttctttttttttgtttcgattttttgtttttccgtgcgggcggcgtaaactcccgcacgcgaaaatcacgattttcccagacgactgggtgcgtgcgggccgccctcccgcacgcaaaaatcgtttagcccgcacgggataattggtatttgtcggtaatacgggcccgggggtacgcacaataaagggaaagaatcttcctatctgaccacgtggcagcgcggcttacttttctcccccctcccccggggggtgggggggggggtcggcggttatgaagtggccggggggcctcggggtgccccggtgcacccctcgggcccttggagcacgatgccacgaggccctcacccggctaccacgtggcggctgagtgagcagagcaggaggcgctgcccagcgctttaaatgagcagcgccgcaaccgtccctcgccgcatttaatgcggcgtgggcaggcatgcggcgccgccctattgacgcacgtcaatcggccttgactggtctgcgaccggtcacaggcggatgggatgggtggcagtgcacccatgtcccgccctatgtcaggcggagtgggggcaggtatgccccgtcccatcggcacgcagccaagtgcgcccttgtacatgatgaatccaccaaagtctccatggaattaagagggaatgacagggatgtcccccgtgtcaggcggggaacagcactgggccccacctaggggcggtcgaccgccttgcttccggttgaaggtatggacggtagcttgccccaggctatgtgggtcccctccaatagggaaataggtaaagacggtgcatgtggtatccccttgaactataaaaggaagaccttacccaccgagaaaggggacgactcttgatagcttgggctctagggtttcccaggaactcaagatctcttgtaagaactcaaccataattccacacacaggagtagggtgttacgcttcccagcggcccgaacctgtataatccctcgcttctcgcacttgttggcaaacgagctagttagccagatcctaggtgaagatacgctcttgatcatcgcgccttatcccccggccgaactcacagaagggggtctaacgacctcccgctagagaggatcactcctcgacagtattgtaatagtgttcgatatgaaaaccggggtcaaatacacaaaatattaaaaaaataggacaaagttggtagttaactaccaccatccttgtccctatgcgtttatatatgcacaagaatgatatgcataccaccatccttgcacttatacatgtacttccttaattataaacattatcttgtgaaagtgctccgattggaaattagtcccaacctatttaatatgttccggcatagtacaccaagattatcaccaagtaactagatattcatgtatgtaatgcacaaacccactacgaggcttttaagttgagatgttttacaatagtctctacagtagtataattaatatagccgttcatcttttctaatctaatgaattatatatatttgcaccaccatatcaattagtatttatagaattgtttttttgccggtagtactcgtaactaaaaaataattagttgagagattgcccctactagtaataatacttggtggtaaaataataccaatagagatcaccgtaaaaacacccttttaattatttagtccttgcactcttaggagtttgcacctgatatggtttccatgtgtgaacgacatttgcatcaggcgtgcgtttgtactactgtgtgtgttgagagtgtacatctgtttttttttttccggggggagattgtaatcgatcggttaattgtatttactgtcaatagatgtatagatgcagtggcggacgcagctttaaaatataaaatatagatggagcggagaacggagatgttcactcgataagagcaatcgaacataacacatatcatattaataacatatcatattaatagttcattcgtataagtatctcaatctattgggtgtttataccttgttatacctaattttgatggtccatgactactataaagggataagggggtcttgagagtgtagggcgatacgagtcgtagctgagtcggtcgacccaacctgcctaatgggtagatccgcctctttaatagacgtacataggataggaggacaaggaagtgacaagtggtaaaatgttccaatataatacaggtacgcatttgggagtgcatggatgcagcaacagcggccagcggcgcggtcgactgacagtcaccggccgggggacaattccatgtatcatcttcctggacttgtctttgagttttgcatgctagatgattgttacaagctgcgagagagtaaaaaacacattacatatatatatcccctcttctctcccaatcctaccgttcatcttctacatggactactcaagagacaggatcatgtacttatcggtataggatattagtttttcactgctacagaatcggtcatcggtgaccaggcatcactaatgggtgaacgtgaccagtcctagatgatcttatctttgccaaggctaataaatacccgtttaaaatgaggcaatgagggataacccatcatagatgtggtgtcatttgtgatgtgtcgtagatagtagtgatccgtcatagaaaattcactacgataaaattcatttgtgatgtgtcaatgagggcactcatttttatcggatgataaatacaacatgtcaaagataaaaaaaatgagaaaccatatctagcgggtcctttttttacccgttactgtaacaaccgagaccaccgtacctcttcttttctgattcccaccgtgatcggtaccaattgaccaagacgatgagaccacaaaaatcttgtcctcttatatctctatctctccctcccccttcatcgattcagacttccactagtcggtaagccccgagtgctcatcgcccgcagcctccgcctccgtccccgagtaccctccctccattggtgcctctattcccgagtggcaactgccgttgccactgagccccaaagacacgagatccgggcttcctgaggtctggttacgctagatctagccaccccgcccccgacctcatgtagctcaatttggcacttgccattgtcccccctcccccaagaacaacgatgacaaattaacaaaaagtccatgctattatatttgcatttcaagctactttcttatattattttgaaacgacctacaccagaaagtgcaaagtttcatattgatatagaagaa

SEQ ID NO: 38918 - DNA, 511 bp, Oryza sativa
aaaaaatatcactagaaattgagtgagatgtcgtgatgatgtgttccgtctgcaataatgcaggaggccaccacctgcaataatgcatgaggttctgtacaacaagttggatcacagcatggctccaagttggcaggcagttagtgattgtttttagtgggcccaaccctagccgtagctcaagtgctcaaccagctaagaaggccggggacccagccggccagtcatgcaaagacaaccaccccaaccgggcaggacagccaggcagcctgccaagctcagtcgaaggggacgtacggccagccaaacacaacgcccggcgactcgccccgccttcccttccacttgcaggatccagactcacatcggctctactgtatttaagggtgtaaggagctaatccataaaattaacttataagctaaagctgcaaacttgtttatcttgatttataagtgggtgcgcggatcagccatctgcacacctgttaacatcaaaattcggtaagccc

SEQ ID NO: 38919 - DNA, 586 bp, Oryza sativa
ataggaatgatctcacaccttaaagtaaggatcccatctaggatttcctgctattttagttggagtgtccaatgaggggggtctgataagttcatctcgtagctcaccaattgcatgaaggactttgttaaaataacgacttactgtttctccagacctaccataattagcgcggactaacctatttctaaggggtatgtcccaccgtatgcagaaacatagccacttgttcctcaatacacatgtggatggtatcttcaagtaaaccacgatccctaaatagcttacaaaaacgaataaaacttccttttctaagtctaagcatgctgcaatacaagttgtatcattgaaccaaatcttcgtttctaggtactcaattcttatcctatccctttcagccattgggccatatctaataccttctgtccttgaacctctcgttctttcctagaccgaataatcatggcgcatcattgataacaataaattgtagcagcaatacaaactaaaagctggtcctctcatccatctacaatacaacaacaaaaataacacatgaccatcatctactgtcaagaaatttacc

SEQ ID NO: 38920 - DNA, 737 bp, Oryza sativa
  unsure (1)..(737): unsure at all n locations
atgtgggtcccacgtgtcagtgactcaatgtcaccgagaatgtcacggggaatgtcactgaatgtgcgtccgatccgacgtcccctccctcccacgcgggtcttggcgtcttgctcgggtgaaggcaggcgcgctgtggctcggtggctcaagatccccatggagctccatcactgccgcccgacctcatctcgcctagcatttgtgtgtgcgcacctgcttttgggcggttagcgaaacgaaagtaaagacactaatgtaagacagctcaagcgagtctagcctgagatataaaatcacactagccctgccctctctccaccgctgtttgtggtgcgccgcccggggtcgtcggggtcgtggccgtccgcctccagtccagtctcgctgctagctccgcgccactacgaccgcgccccttggtttgtcacccccccccttcnatcannnttnttatcctaatttgcancatctttatccccacctatttttgcttcaacaaataccccaaagccccctttcattatttgttcatacagttgggggtgcacgcgccctttttatatatatacacgccgctgtcgggaacaaagtgtctctctactgaggccgaagcctccggttatttcttcctcctgaatcctgtctggtatggtgcccccggctccttaatgcactttcgttcacagagagtggtcgtattgtacagggttttcctttccttgtgctcaaagcac

SEQ ID NO: 38921 - DNA, 797 bp, Oryza sativa
  unsure (1)..(797): unsure at all n locations
cccgcgccattggttgactcggcttcgactgcaattagttcatcagaagattgttggctatggaaaatttagtcctcgcactcgtgcgaagataatcgtttgcatagaattattatggcttatatttatctctcatctcatcctcgcggtcccgcggtacccatgtgtcgcgcgctcgtttgccccccttggtaacgaaaagtttgtattcgctttatccatccaaacgattttttgctaaaagtgtggtggctacgattcctagctctatcctagccctgcatcgagctttgggtaccgtcgacgcccggggccccctgtgctagctcttccgtagcagctggctttggccccgtcgactcgctacggcgccgagcttagcttgatcgcgggtgaagattgctggctatggaaagttcagtcctcacactcacgcgaaaacaatcggttggatagatgaagtagaacacgaacagaggttaacaaaaggcatgggcaagcgaggtacgcgacgtgaggtcgcgggcccgagagaatctacaacgttttgctgatgtatacagaaaataagtttacagcctaagtaccggcttgcgaggtcgcctcagcttgggccgaaaaagcgcatggtnctaatgctagcaaagaaagaagaagatccggcccacatatcatagactagagagtggctcaccttgaccactggggaaagtttggtagggctacgccggggctactgccgtgaatggccccgggtttcaggttaaaggaggaagctcccccaggggggagtcagg

SEQ ID NO: 38922 - DNA, 1576 bp, Oryza sativa
aaggtccttctaaagttgttagagaaatgggaagaatatgaaaaaaaagaggttgaaatgtttgttctagaatattagaggaatgggtgctatagaaaaggaatattagagaaatggtgctatagaatagaaaaggttggaatgttacaaaatctgattagagaaaataatgtgattttgttggtataatggaaacagtgaaacaagactttttccctacaatgctgaggggattagtggtcatgaatctttgtgctggaactggatgccagcttctggcaaatctggaggtattcagttcgcattaatactaaaacatttgatatcttggaagttactaaaaaaaatttgtttcaaagtaaagctgatgaatattactaccaagtttaaatgggatttgatggtaatttatggagcagcctagaaagaggaaaagagtagtttctaaactcatttggcaaatcttttacaacaaccaaaaaatggaagtaaagaaagtgaaaaaaaacaaagctagtggctataacaaatggagtttcattttcaatgcgattattgaacaagctagtctaagagaactttgtttgggaggaaggcaatttacttggagtaatagccaggacagcccaaccctagaaaaattggacagagtttttataagcaatgaatgggaggttcaattcccactcactgctgttagatctttgccaaggggcttgtctgatcataaccctctgatagttaccactggagaaaacacagtcagtcaatccatttttcattttgaacagagctcattccttagggaagacttaaataaagtagtggaggaggtctggaacaagaattattctgggaccagtatagaaaaatggcaattgaggcttaaagcccttaggaaaaaactaaataggtggaacaaaaactgggaaagcttatataagggagaaaagaaggacattctagaaagaattgatgccattgacattagagtagaaagcatgggtatgagtggttctgatagagaggagagaaaggaacttgaaaatagactcaaatttgttattagggaagagaaactgaagtggattcaaagaagtaaaggaagtattacaaggggattgtaatactatgttcttctatgctaaggcaaatgggaggaagaggaagagtcagattcatagtttggtgcatgaaggagaggtgattgaaggataagataagtttgttgcttcatattagaaatttttacaaagatctctttggacattcaaaggaaaacatgttttcaattgatatggcaaatgtatctaaggtggcaaaggaagatatgaagatgttaaccattcctatcactttagagaactcaaaacaatgatttttgaactaaaaaagaacaaagccccaggtcccgatgaataacaggagaattttacatgcatttttgggacttggtcaaacatgacatgattgacttgataaatgattttatcaagggtttaataaatattgatagattgaactttggagtgattacattgattcccaaaacaaaagatgcctctcaaatacaaaa

SEQ ID NO: 38923 - DNA, 686 bp, Oryza sativa
cctgcacccctattttgctcttttttgtgcatttaaaatacgaaaatcaagatgttccatcgattcttttttttttttgttactagtgactgtacattgtgaattgttaccatttacaagcggtaagttagggaccgtcgagtaatcagtggaagatgactcatttgtgatgagtcagtatatatgaggatttctgatcactgacgagtcgcttatccgacagaaatgaagcttatgaacaatcacaggtgacatgttcccttgtagttttcacatcattgagaatcgaatatattatgcttttggaaaagactgcactttgccaaacttaaacccacagtgttatgtaatctgcaactttgcatcattataactataactttgttgttatatttggtttactttattttatccaatactcaataatttcacatcaaacttctaagtgtaatgattgatgggactgatacaatctactgtttaattatatgagcaatttgatgcaagactcattaattaacagctaacaattgttctgaggatacgaaggattttctaagagcaagttcaatagtatagccaactactatctccaatttatctatagccaatctaatagctcattcatacaatagttacatactaaagtattaatacctggtcccacttgttatacacacagtgtc

SEQ ID NO: 38924 - DNA, 688 bp, Oryza sativa
tactttttcttttcaaaaattcgaacagccagcgtactttgtgcatcgtgtggaggaagaataaagcgatgcaaaaatcttctatgcgcgcatatatatggtgccaaaagtgcctaaaaatgcaatcaacattttaatttgaaccgcgatcatacagccattaagtgcttacaatattacttccttggtctagggcgtgtagcaattaagggatagaaaaagtctacaagtctaatagtagttactaatgaccacattgccctaacaaacgattgcgaaacttttgaagacgatgttgtttttccagcaatatgcatgtcgaaagcaggatgatcacagggaaaaccgagagatgtgtagctcgttatctggtgagaactcccaaggctggagctgccaccgatcagaaagggtttttcagatgggcggagaggattttcacatgcggttggctggcccgacgaggaaatgagttcaccactaatcagaaaactaataaacatcacagcaaacataaatttcataagcctgctagtgttaaaacaagtaccttgaacaatttattatttataacaagaatggacttgctttgcttgtgaggaaatatgtgcaaagcttattgcatcataaaggcctcttggaggagaaattagaactttatgctgattgaaacaaatgggctgcagga

SEQ ID NO: 38925 - DNA, 612 bp, Oryza sativa
atatataaacctttccctgtctccaagggctgaaacattaaataaccaacacatttgagcaattataagtaacagttctagagaaaaaccagtactgtatgtgctgattttttctaaaaaaaggaacctttaatttatcataggtaccatttcattaaaaaaatcaacatctataatatattataggtgatggttttttaataaaccgacgcccgtaaaaccgagccgagccgaaccggtgggtgggagggagatactttttgccgaacccatgagtacttgtactcggccttatcctctcctctctctctctctctatctctgtctcttccttcccttccccaccctcccattctcctccaccaacacccgccgccgatcaccaccgggatccacgaggcgatctgacgtgcattggattgggatctcctacatccttcctttcccctatccttcgagctgatcaagccgccttttttttttatttctggaacctcaaagctaccggttcctaaactggcacctttgactacctcaaaggtgccccctgttatgttatgtgtcatttgggaaatttagcatccatggggttttcccaaccggtacacattg

SEQ ID NO: 38926 - DNA, 641 bp, Oryza sativa
catttttctgttcatcttggcaggcccttcctgtatgatgatttagagccaagaaaattataccaaatggtcagtcaatgatatttgactcctttttttcctttggttgactcaggcaaattctaataattcagtacagctgtatgcttatgattatgactgtttccacttatgattatgactgtttccatgcttttgaccaaagaactatgacatggatttctacattgcccgtccttggggttaggtccttttcaaatatatttttgacggttgcatatgattggtttgaaaacggaatttgttctttttatatttaagcaaataaccacaaattaaatagccttttttttaggaaattaaatatcctctgtttagagtcacaatgatatttcgaatgggttttccccctgacattgattaaccggagacatcgatattttggaactaccaaaaacatgtggggaactggaaggctaaaaaattcacattgcaccatgatacaacacagagacgacatacatactcatctacatccataacgcattaggtagatcatttgccctttttgctaaaaagaaaaaaaacagtgacttgattttaaacctagtttttttagcaaattaaatttttagagttgg

SEQ ID NO: 38927 - DNA, 611 bp, Oryza sativa
tttcaatgataaaatggtagaacttcagaacctaccaccgtccctcacgtcactagaatttcattcttgtccgaagcttcagtctctatcagggcagctgcatgccctgaagtttttggatattaggtgctgcaataaactggagtcactgaattgtttgggagacctgccatcattagaaagactttgtcttgtgagctgcaaacgtctagcatccttagcatgtggtccagagagctactcatctctttcaactattgctattcgatattgcccagccatgaatatgaagccgctatatgaacgccttaggccacggttggatattcttaaggaaagagatttgtcacatgcccatgcaaaatgtccttatggaggtacctttccattgcttattccttcctttttgtttttttttccctacatactagtattgcatatccatatgttgcagagtatgcacttaaaaatttcaatcacctccccctctgttttatagtcaataatacaattacaaggttgtcaacagaatttccttatgtttcaacaaacacaggagccatggttaaatgttttcttcttctgttttcagatgcatgagcattatttcc

SEQ ID NO: 38928 - DNA, 2529 bp, Oryza sativa
ctcctccctagggcggcgccagccatgttggcgccctcctcctgccacgtcggcgcgcgtgtgccacggtggcaggaggacggcgccagagaggctgacgctgtctcgttggacgacagcgccagccactctggcgccccaaaaaggaccatttctgggataagttttttcaggggtctatttgcgagataagtttttcaaaaggaccaaaatgtgaaaaatctagtcttctggagagtctagtatagcccttgtacctttcccttttcagtaagattctactttatttaatatactattcttttctctactttacttagtctttgtgcaacattatctttgtcattgtgctgttgtggtttctcttagttcatatagttgtatgccacacgaggatacaaacgcatgcctgcaacacttcatggaggggtatctcttagttcatatagttgtatgccacacggggatacaaacgcatgcctgcaacacttcatggaggtctgtggcaccttcaccatcaagggaatcatattggacgccatccgtcttcgccttttgccattctctttgctcaggagggcaaagcaattgttttgtgccaaccgtgaacctgtcaccacctaggatagctatggcaagtccttactcaagttcttctcgataggcaaaaccaatgcccttcgtggaaagatttcaagcttccaacaacacgcgaatgagttgattccggaagcatgagaacgtctcgctccaatagtacatccgagcgtgccctaaccatggcatcaagattggctcttgatccaaggtttctaccatgggctcaccaataccacctgtagtctaacgttggaagagctttcttctcactcaatgtgagggaagagacgaaactcatcaaaaatatggtctccaacccaagaagcaagggatgcacaccatcaatgaggtggacatgccctccgccaggatggacctctagatgaagatgatagaagaaagatccaacttcaagaaggaccatgaagccatccagcactatgccaccacgcaggccattgaaactgatccttggtgcgatgtttgtggaggagatgaccactcgggcaaccattgtcctgaaacaaaggaggatgtgaacttcatcatcatcgtcatcaacaacaatgggtatcgatcccaacaacaacaaggatggaattcacaccccttctgccaaggtaacggaggtaataacttcaataatttcaataatcaacctttattaaaggatcttgtgttaggccaagctaaaattaataaaaatataaataaaaagttgtttgctaatgacaagatcttagacaatttaaatgccaaaatggacagtttttcttctgctctcaaaactcaatcaagctctaataaaatgttagaaacataattagctcaattagcaattgttgtcccatccttcgaacaaggtaagatccctagtaaacccaaggaacctatcaaatctgtaaatctagtcacaacgaggtttggtaagcctccactaagatcgaggtatggtcatccaagaagggagacaatggtcatccaacaatcacgtgctctgttggatctcaagaattctacaatgccacctgggaccttggctcaagtgtcggcatcatgtccaaggtaacatatgataatttgttatgtggtcctttgtccactacttgtataggcctacagctggtcaaccagaccatcccctatcccaaggggattgccaaggatattatggtgaaacttcatgaggactatgtccccacggatttcatagtgcttgacatggggaacaatagtgacacacctcccattcttgggaggccctttctcaacacaatgaacgcatgcatctatgtgggtctagacaaattcacttccactttgttggaaggaaagaaagtttcctttcacctcttctactccaacgaatcatactaacgagcaggttaagaaaactggtcaaaaaaagaagccatgatccacaccaaggagagaaagacaaaaccaccaagacacaaccaaaactgaaattggtttggtggaaaaaggaggtgcaaccatctataagaccaaccgatgcacctgaacaatgggcccaaaggaggagtcctactctacggacttcaaacattgaggccttgccgaaaggtaattcggtttgtatctcatatttaatttccaattgtattcttcctttgcattttttttgaatttttcatatttcattttgcaacaaaccttttttgctttttgcatttcaacttgagacgagtcttcataaagatttgaaaacttttaggggaaattgggggttcggccaacccccctatgacctctagtttcgctttttgtgagtaggaaacattgatttaactggtgggacaaagcacaaaagataagtagaacaaggtggtcggacagccacccccttttgcctttctcttttcagctttgccttttttttctgtctggaatctcatgaagtttgaa

SEQ ID NO: 38929 - DNA, 695 bp, Oryza sativa
aatagtattgccaagagcctttacaaaaagtttaatttatttggacataacacgcttatttataagggaaataaagcatattttgcactagaaacaaaaagcaaatatacccagtttatactacaaggcaaagaaacggtgcaaaaaaataaaaacaacacaaacaaaaaagtagtactaatacaggaatggataagctggtgacctcattgcaaaaatagaggggcgtatttgcaaaacgtgaagactttctagatgtcttcctcgataaggttccagataagtccaataacttccatctttttatttttttcttttgaaaaagctcacctatgcactttcatcaagctaacatgtcattttaaactaaccaccaaactgttttgtgagctctgggcaaaagaaaaaaaaagacataaacaaaaacaaaatgtcaaccaaacatctacaggtactgtagatgataataattataggttttttactagacaacatatctgtctgaaatgagttaattaatgtaatagcagagcataaatgcaaaaaaacctctacaattctagatttatagagggataaataaaacagaataatccaacaataaatgtgctttttaaagctaaataaatctaatttaacacacttaagcaaagcagctgagaagaaaaaggtaggaaaaaaaaaaaccccggcgt

SEQ ID NO: 38930 - DNA, 542 bp, Oryza sativa
gatatagagggttggtagcaatactgggcagaaaagcaagaagaatatccagaactaagaattgacaattcacgaccccatttgttcatgctttgatgcagattgtacaaatcattcaattgttgctgagagcctgagacacttccatcaatagcttcctcaattacatcatactcccttattgatactctttcaagggaaccagatgaactgagcagccttctaaagtttcccaagcggatgtttagtccttattactttaagttcactcttcactaccagccaaccaaattattactccctccattccataatgatcagcgcataacgaaagtggagatattccgatttgatcagcatattaacgctggtagcatgtgcatgttggatggattaactagttatcacggagatcgagtaggccatgcgattttcgagctgcatgcagcatggaacattccttgcctgtgcaatcatgcaccggcagtaacgtcgtttcgtttctccaagccgattaatatggagattaattacaaggatta

SEQ ID NO: 38931 - DNA, 620 bp, Oryza sativa
atgtcaatacaagttgtatcattgaaccaaattttcgtttctaggtactcaattcttatcctatccctttcagccattgggccatatctaataccttctctccttgaacctctcgttcttttcctagaccgaataatcatggccatcattgataacaataaatttgtagcagcaatacaaactaaaagcttggtcctcttatccatctacaatacaacaacaaaaataacacatgaccatcatctactgtcaagaaatttaccaaaaaaattaacacattgttgaaataattatactacaacattcttaaaaaaaacagacatgcacagatctatataaaagaaatccccattcagtgtttagggtatttttaccttgtacaatggaaactgagctctgcagtttgtggatggggatggagaagatgaggatgagcagcaactggcaatggaggctcgcgcgccgctggcttgcccctactcccacagctgcctcgcccttatcgcgccgccgcgtcacctgctcgtgccgccgcgtcgccctgctcgcgccggcgccgcgccctgctcgcgtgccgccgcgtagaccctgcgcgagctgcccccgtgccccgatcgcgc

SEQ ID NO: 38932 - DNA, 677 bp, Oryza sativa
attgaaattggaacgatgtgatgaaaaaattggaagtttgtgtgtgtaggaaagttttgatgtgtttgaaaagttagaagtttgaaaaaaaaagttggaaactaaaccagtttaaaaatgcctaaaatttattgattgatggataatttgattttatgatagctgtttgagggtataaaaaataaattaaccactaaagagcagaaaggttgtttttaaaaggtatttcaagaaaaaaattatatataatttatttaaaaacacaccgtttagaggcgaagcgtgcaaatgaaaatgagcatctcaaaatcagaaaagaacgggccttaatgctgcctacaaatcaaatgggtggaatattgcatcataacttgcaattaacgctaattaaatacacttttttctctaacaaacttaagcaccaggtggtggtttgatgcctgaagaggaagacatctagaaagtcatcacgttttttgcagatacattcatgtattattaccttcttttttcaccatttctttgccttattataaactggatataatttgctttttgtttctagtgccaaaaaatgctttatttccctttgtcaataagtgtgttgtctctccaaataattgaaactttttggtaaaggctcttagcaattgacaggtaatagtacacaagtactg

SEQ ID NO: 38933 - DNA, 647 bp, Oryza sativa
ttagtcattttagtggtaaaattttgaattctgaatagcttatgttccctttccaagcatctcactggctgaaaatgcataaattccatgcatatattgaaatcaatgtcccagaaaatgctatattatgatataaattttaaatcttaaacatacttatattttgaaacatagggaatatcgtaaatataatcagaaaaagatactatatatacatactaatttattcttatagaacttttacaaacactaatgtgtatatagtgttgcaagtacatctaattaaattctctataactctcatattttatatagtaaaattaaatggttgagattattgtttggaagagttcttttagtttcgtgtagaaaaccatgacgactttcattaatagtagttttgatacgattaatatatagtcaaccgtgacaaatacatattaggatatactagtaacaattgtacaatgattttacatttaattagcatattgacttcttgattttaattaaccgcggctgttacttgctcctgcatcttcttcttcaccaagacaacaacacacctctgaattaattatacagtagattctgccatattcactgcatctcgttgtgtgatgaaggtattgcatgcattgcatgga

SEQ ID NO: 38934 - DNA, 685 bp, Oryza sativa
attcgatgtgatgggtgaaaagtttttgttttgggaactaaaccaggccttacccacatgtcaactactcccaccaactacttttgtgggaggaaaaaactgtggagctaacaaggttcacatgtaagtaacaaatgtttacaacaattaagatatgataataattttcttaaattaaaacccggttgcaacgtaagtgcaataagctagtaaatacaaaaatcataagatgaagttggataagaaatgcttatatttgtgtacaaacttcaaatgttgaaaatgacatactagtccctccatttcaggttatatgacgtttttgactttggtcaaagtcaaactactctaggtttgattaattttatagaaaaaagtagtaatatttttaacctaagacaaatctctacaattataaaaattgaagatgtttttgccagtatttttttacgtcatccgtgtatgagtcggtttttaagttcgtttgcttttgaaaatacatatccatatttgagtcagttctatcgttcacttttgataattcagaaggaatcatataagaaatatgtttaaaaaaaacgtgcatgctaacttgagacgatcggactcctaactgattttcttaaaatatatatatccaagcgaactcccacagtgaatttcatcttaactaaaccatataaca

SEQ ID NO: 38935 - DNA, 1305 bp, Oryza sativa
aactcatacctcaagcatcagtgagaaagcaaatattgtcattaacaaaaccaaatcccagtccgatggacaactaaagctcgtgacatagtgcagaatgtatctgattacgtagagcacttaaggcataatgacgtgcgttgtcattgaattatgccagattccgtccttgaaagacatggtttttgtctttacaaactgaagccgcaattgaaatgcaggataaaaggcaagtacatttattacattttggcataatacataatgaaaagttttatatatatatgacggtacggcgatataatagaactgcaattttaagattcagaaagcaacatagttagggcctgattcaaatgcaccgtggttctttacaactcataagaacgtgcaagtgcaatattaggctactggtattaattattgaaaaaacaatggagaattccatgacctacaattgctagtgctcaattatctcgaatctagtaatatagaactcatgaacaaatgcacgccgtccatatctatactattcaaaaaatgaaaacttttattgagaatcttcaggtgttcgctcgggaacattggatggtacatttgatcaaaagatattaaaatacgctactagatccaaaacactaactaccttaatcattacattcctatcagcataacgaattacggcgcggaaagcaccaggagtgttcaagcactgaacccccaacccgttacaacaaaacgttcaaacctcccttgccacagagccccgatcttcgactacgcggggcaattacaacctcgacgcatctcaaactattcccaaaacagttcatcaccacccactgcgcacatccacgccgccgctcgcgaaccacgaccgcatcgacatcgcatcccccacgcaatgcaatggaaaataatttacatccgcaacgaaggctctctgatccagatcggagggggaggctcacctcgcagtgcagcggggttagcacggccggggaccgaccgggatctggcgccgccgcgccgacgacgacaaccgctaccccgaccgtacgagggacacctgggatgggaagacgatgcgccgacctggaccctggagctcgataacgacgagcggaaaaaggaaacccaaaaaaaaaaaaaaagcggcgcggcttcgaaccagaccacgacacggccgcgcgtcgagcaggcaggcggcggcggcgcgacagcagagagagagagacggcggggtagtataccgcggatacgcggtggtggtgaccgggacgagttgatgacggcggcggcgtc

SEQ ID NO: 38936 - DNA, 1054 bp, Oryza sativa
tttttacatggatatcatacggtggatggtcaaagaatctaagccttttttccctgacaaaaattgtgactgatagataggaactgatccacctaaggttgcacctctccatccatgcactgcaactgatatgactggttggcattatctgtcttttgtttctgcttcacctgattcattgatgaggtttatgctccatatctaaaagctaatctcgagccaatggtatgtaaacatcaggggataaaattacactgttcgtaatcaggacaccagggcgggacaagaagggttacttcactgaagaatttgtcccgtatatggcacaatatcggaacgataactaattactctgtttgccttcgttttcagttttcaaatcgactgataaccttcctgcagaatcagggcattttagggcacatgacaagagatggcagattagagaggttgcaccgccggtctgccgaaaccgcaaaagcgagagcaaatcaactaatctctttttagcgcagctaatcagccaatgaagcacgcactagtatgctaatcgatcgattagtagcccactttgtcaagtgcaagtactgtttttcctgtaaaaagtactgttcgcaaagacttgacatgttttgtttggacattggagcaactgtatgggtctgaactctgaagaggattaattgttcagcacaattggtattttaagcttgaacatattttaaatctgcagttattctaataagtaaattacagctacggtgcacgaacttaggtgcaatagaaacaggtgtaacaacctatataaattgttcgcttcagacaacaatttgcttgcgtagtcacatgcaaaccaaagtcaaaatgatctatatacgcaatcaaaacatgcagccaaaatttactaccggatattctgatgttgtggttttagctttagacatgacaaaagttgatgcctagaaaagacactgtcaaaatatttatctccagttaaataggactataggttagaaatgcccctagctagccccaatgatcagactctcttcct

SEQ ID NO: 38937 - DNA, 562 bp, Oryza sativa
agggtatggggaattttttaaaattttgaatgtttctaaataaattaatgattactcctacttactaacttcctgctatttctgaacgttggcacgccagtgtgagtgacaatcacgacaataatgccgcggctatgatggtttggccacaaaactgtgggcagctcccaccatggcgaggcaacatggtgtgtatttcaaagtaatttcgaagtaagtttcgtgtgtgtgttttctttaaaaagcttaaaaaaattcctaagctatgtatgcacatgtatagctagttgatgccacttactctcttctcttctggcgatacatatttaggcccactttgattcaaaggaaatttataggaattttaaaggatttcattcctataggaatttttcctatatatccctttgaatcaaaggaatgaatcctatgggatcctatgaaattcctatggaatgcctcttcccatgcaaattttggaggaaatttaacatgagtttctacctcattttaagaatcctttgagtctttctctctcctcaaattcctgtgttttttctac

SEQ ID NO: 38938 - DNA, 679 bp, Oryza sativa
ctttctctctttctccctcatgtgttatactgttctctcatatctatcttctttgaggtagtaatatacttgagcaaattaagctgcttaattatttgtgtatgatgatcagctgctgatccggcctcatttcttgcatatatgaccacaaccacatacatgcttgttcattttttttcacaaagaaagagaacagtttaatttaatttcttggggttttggatcagttaatttgtcttgagaggggaagagatctctatgggttttggaggtctgacagaagagagtgagcacacacggtgctttcttagcatgcaagagccatgctgggagctgtgcgtgctcactctctatctgtcagccgttcaccatgcccaatatgattaatctccttctctcagttgacagtaatttctttgccagatctcctgttaaattttctgcctagctagctattatgcacatgcttattatgatgagcctgccaatatcatctccacggcaaaacacaaactagctatgatttgattcattatatttcttttcgctgtttaattaattatatgcaggcatacactagctagtttccagctagtacaaagacgagacgaggtcgttctgacgattttcatagtcgtcagaagaaggtgtgcattggtttaatttttgttcttggctg

SEQ ID NO: 38939 - DNA, 1214 bp, Oryza sativa
tgtggcctccgcctccgcctccgcgcggcacctcgatccgggcggcgccgcggcccccttccgcgcggggtggccgaggagcctcgccgtggcgggggcgacgcggaggggagggcgggagttaccaccaccaccgggaggaacggagctcctccccgccccgtggccgggatcgggggcccgggcgtaggggctccacctcgtggggccgccggggccgaggcgggaggcgagggactaggagatcgtcatggcgatcggatctcgcggcggcggcggcggcggcggcgagagtgagtcggcgcgacggttttgcgggggaggcggtggcgatcgtcagcgtgaggtgagggaggcggtaacgggtgctctctctctcgcataatatttgtgggcttgtggcggggaaccgacgagacgcggtcggggtcggactaggtgtagtaatttttcctttcttttttcttacagccgcggccagttagttttgagggagttttagactgagttcttattatcttcactttctcaactcacctttctcgtttttcacgcgtatattttttaaactaataaatgatgtattttttacaaaagtttttttataggaatattactctaaaaaatcacattaatttatttttaaaatttgttttagctagagtacttgattaagcatgcgctaaacactgcttgttttgcgtgctagggacacagccagcctagttacctactccctccgttcatattaattaacgttttgaataaggttgaggtcaaacttttataacttagactatcaataacttttaaaaatatttagtttaaaggaactagaacaacatatatagatttgtcttttaaaatactataataaaagtaaacatgcatttatttattatatatattataatagaaaaataaggtcaaaaatgtatcttgtagaccgtgtcattgtccaaaacgtcaattaaaatgaaaccagagggaatactcatcttcctcgttttctgcgcgcacgcttttcaaacagttaaatagtgcgttttttcaaaatgtttccatatgaaagttgcttaaaaaattatattaatctatttttgaaaaaaaaaatagctaatacttaattaatcacgcgttaatagaccgttccgttttctgtgtgcactgttctggttgggaataggctctagcgaacacagccttaggaggga

SEQ ID NO: 38940 - DNA, 649 bp, Oryza sativa
atacccatagcactaaatgtaggcaatggaatttattaggatttaattgggcctagcctattaatctaacagttatggcatatcaatctctcgtctagattcacttatgtacatatgaattttaacacatcaaatacacataaatccgcatgaacctatccaagacccaaaacttcttataagtaaaacagaggaagtaaaaattaaggcatgctaaaaacggatgaagcctcgattgatagcgatcagtatacatatattctacaatttccttcatttcaaattataagacatttcagattttgaatagattcatgcgcggatcaatatatgtgctccatatatatgtaaattcatatgtatgttaatgaatgtagacaaggattaagaggctaaaacgttttataatatgaaattgaggctgcatttttatttgttctagtcccatattttggttttgtggtttaagtaaaaaaaattatacttaatcatcaaattttaattttaaaaatttatatagtgtaacattgtaagatttaggtttttggattaaaaaaaaacttctatactagcagtaattgctagcataggatttttttgacacaagtagtaatactgccatttttaagtgtaactgtgcctttttttt

SEQ ID NO: 38941 - DNA, 559 bp, Oryza sativa
attgacacttctatctggggattcgatcagtagctgtcgtagttatttcattgatgtacacttctatttgggaattcgatcagtagctgtcgtggttatttcattgatgtgctgcaaatcgtactgatcatgcaaacggctcgttgcttcaaaggataaggatgttcaattttgattagttatatctctctttctgttaggtgccttaataaatgcttctggtggtagcagaaatcaaacaggtcagggaagggcttttgctgttggggaaaataggagatttgcggcccattacaatggggactaaaactatgtgcttattgcactcattataatcgatctaaagaatgacaaacactggtggtacacatggagattgcttccataatgttacaactgatgatttatatagacagataaaatgccttgcagcagcagcaacggcgacaatggcaacacaacatagcagtatctctactgcattggagacgagcgaacggagaaggctgcgccgtcgttgagaggcagcaagctataataggcgccatctttgtcgatg

SEQ ID NO: 38942 - DNA, 963 bp, Oryza sativa
gtcaaccagtgaaacgtctgataaacaatatgcctgtattatactttgttaatctccagcagtttgactacatttgagattatactatgaatgaatagtaaataatttccttacatatataactatatgatccttttcttcatcatgttggcaaataaatgctaatctttgtacagaggatatcattttcttgtaccaatcagattatttatcccagtctaaatgaagggaaatagggcttgaaagtgtcagatgggcagaactcttggttatgcatctcttgcagagaccaagagccggtccttccattatctagatagatgtgcataagcgataagtctagtgtattgactagaaaattagcgtgccacattatagcccgtgtgtacttgctaagtagttttcaaaattcatgtctataaaaggttggtaaatgaaatattcaatggtgttattaaccgatgcaacaagttaagctaaattagcttccatggcacttatgctaaaaaaaagtaactattaccctttaagaacaaaaaaagtaactattaccctttaagaacaatcatcaaaaactggataaaaccatagataaatatatatttacatgaattcactaagaaaaaaagcctgatactaccatagttgtatacagtctttttttttaaagaatacagtcgtttccggtctagcttctagctacggcacaaagaagaaacacaacaatgtagttacacaaaaaaatttcagaaccatagtctttcacatattttaaatccggaggtcatgatttcgagcaccttgtaggcggcaacaatttatatctttggtatcttgcatatccctagaaatataaggaggtgaacacaaattagttggacctatactgactatagaaggagatcaagagcaagagacaaggttaagccagattgttctggtgggctagtggcacagcagcaa

SEQ ID NO: 38943 - DNA, 640 bp, Oryza sativa
cattttcaataggtcaaatccaatgttcttttccatccgattgattttccttgccaaggaggtcagcccagccgccctttcggctaggatgacaaaaggatgatctatgaaagggacgtatgcaaattatgataaacatatatataaaaaatggagcttgtagttttttcaacccgaattctacatgaatgacgggggatcgaaatgacaatgatggagggcgtggccaaggtagatagtgttttaaatatgctgagctattatttttcttcaagtaaaaggtacacgcttttatccgaggccagaaaagtctaccaaaaagtttttaaaaagatcatttggcgaggaggggaaaaaagtgtttgatacatgttaggtgattcgcaaccataaaaagcacgcaattccatgattataactttggtacgtagtgttgtacttaagagggtgaacactctctctattttatatcataataagttgatttgacttttttcttaatcaaacaaagcaacattttctacacaaaacaaaaatgttatcaaagttacatgtaatgacgaagctaatttaacgttgtgaatattgctaatattttctataaatttatcaaataaaaaattcaaaaacaaaatgactt

SEQ ID NO: 38944 - DNA, 748 bp, Oryza sativa
gtattcccacatgaaaatcgatcctccattttctcacctaagccaactaggctggattttacatcaacacttttctttttttattacacgggtagtgtattaacgtacacgcacacagaccacactcacacatccacgagtgcaccctctaacacacactcacatatccatagtcccattgaattcctattgaaaacgtactttacgtgtgcatagtattcgtggatagcagaatttaaattatgatggataaagtcatgcatacacccacaactccaccatcacacctccgatccattgtaatgtgcaaaaaaaaattactagtctttgtaaaaagacaaagtcgattgcacaaatatactacaaatatatcataatcgaatcgtaccattaattcatcaaagttactacatttcccttcatggtcaaccaagatctttaatataaccttcgagaaacaaaatctttcgatgcacaaacctactgcatatatatgttgccatgttggaggatgctgatcccaccaacatgagaaacaactaagatctatgaccacagaatcaatccaccatctcggctaggaggacacgcacgttaggcagaagatgactgaaaacttcaggcacaagagatgactgaaatacggcagaagatgacctaaaaaaacttcatgggtgacacacgtacggttggttacctagcattgtatgtagctagcttacattggcagatgcatacatgcatgtac

SEQ ID NO: 38945 - DNA, 1292 bp, Oryza sativa
agggagtcaaattgcactggttttaatagttaggagagttgtcttatctggttttccggttgatggatacgaattagattcaggctatttttaagagagtcaaagcggacttttccgccccaaattgcatctgtttttaggtgggctagctactcgtctgaatcatggatgctaaagattagcagagggatcaagcacactaatcacgttcatttgtgtcggaagacacgacaaatcaatttttgttgattgttattatccatcgccacgtgcagagtgacgtaacgtgaatgcacaggagactggtgtttggcgtagcagcatgtgattagttagttagccgtcgggattgtctacactactgctgatataatagcaaacacgaatatgtaaattcgaattcatatgtcaaccactgttgtcgcgtcagcaatattgcataggatttgcatccaaagttggtgatgaacaagcctcaggtacaccctggatcctagagtatttggtactacaagcagatgcagttttcgtttcttacttttgcaaagtcggaaaaaggaggagagtacttttggggttacaagtcaacatgagtcaacactactagagactgcgcacatgacaaaggtgacagataagagagaacaaagaacaaagaaagttcccctgcccatccatagttgatcagattcggacgtgacactaaaattcacaagaagaaaagaaatctataaagttcttaataagtactgctagtattctctctattttataatatacatatattataaatcgtttgtctttttcctattaaaaatttgttaagtttaataatacctttttaaaatatattttgataatatgtttgttttgtattgaaaatactatttatttttcgataacttgatcaaacttaaaaaatatttgattagcaaaaagaaataaaataatttataatataaaacagagggattaataaagaaaaagaaaaacacaaatatcaatgaaataaccaaaaagaaaatccagaaaggggaggaatttttattggcccaaacaccctgaccgtcggaggccaccaagaaagaaagagagagatccctttttgctttgcgcttttgcaaacccttttccaattcttcttctttgcgcctctccaaccttcctccgtatatatcaatcatcgcccaactccagctcccaactcccttccctctcctctcctctcctctcctcatccggagacgccacgccgacacgcagctgcgtgtgcgaggaggaagaaacccaga

SEQ ID NO: 38946 - DNA, 553 bp, Oryza sativa
agtttagaacagtaattaatctcgattccctagctacttgctcgatcgagatcgatctgagcctttttgcgtctcaatgattagcatttgtttactactagcttgcaaactgtcaattttaactaggaacgaacacctgtgcagagaagataagataaaataaatgacagacgcagcatgcaggcactttgcgtagtgcatacagagttcagattatacatgagatccaaaataaaagatagaagattatgaaaacgacatggacgtctggagtgagcaagtgagttgctatcctagatgctccaaagttgcagagaggttcctgacctactttggagactttggagctagctagctctttcagacagataccgaaagtttcttgccccctttttatctgaagaaaaataaataattcagagtcaaaagtatgcaagaacatgtttatgctcttgagctaacacttatatatctgaatttgcagtacacacgcagagagataaatcggtaatttatacctgttttatctgaagaattggggtgtgtggagccg

SEQ ID NO: 38947 - DNA, 674 bp, Oryza sativa
aactgtgaatatgacgtagtactatttgcaatcaaaattattattattatttgtggggaaaaatattatttttgtttttacatgtgcatgacaaatggactacattgatgcaaagcataggaccagtacattgattagtacaatgtggccgcagctgtgactggcagtgccatccaaccagaaaaacgttgtgcctacttcttcctacgatcccaacttaagtcaatatttctgaaccagctgtcataaaaacacagaagaaactcgtgccattcatgtcaagcaaaatatttcctcatcgtcatcatgagcgattcggtctgatctgaaatctcgcgtattaatccagatgataatcgagttcgttatataatagtatgtcagacagtcccagcatgagagatcgtcaacggtacacgattagatcttcgattatcttcgtagatctggagaagttaaaattggccgtgtcaaacaagctagaaggcttcttctgatggttcatcgatcggtgtcactaatgatccttgtacctaatgagatcttgagttttgtgtttaatcctcggatcatatattgatgatcatgaccttcgatatgatatcgatcggtctggctttgcatgcatcagttcattaacatcatatctgcttgattaatctctaacacttaga

SEQ ID NO: 38948 - DNA, 1704 bp, Oryza sativa
caattaaatttagtaggcactgattagcctagcttaattatctcttagtagttcgtcatcatgggagatacagatgaaggcgtatctttggagccagtcaagagacttcgatacctcagcgaatctcccaaatgacgacattggacggctacgtgtaattatacacgtgtcacaacaatggaggtcctcaattaagtatagttgaaaaatcaagcgaagttaagtttaaaacgcctcagtcgttttaatttacaagtcacaggcttgcatgtggatctgaatggtagatgccaaaaatcatttttacatactctgcagagaaaagtaattgcttcaatagtttctccctatcttacatactctgcattaattttttacttgttcagaacatatataaggtttccagcgagaatgattgatcattggttcattgttttcctattcatatattcataaaaaaaaataaaagtacaagtaaatcaaagatttttttttgacaaatctactaacattgttttcaaatctctcaaaaaaattcagtatattagcgactttgcatgcatcctaaaatgatctatccaacaataaatgttatatccatttcttctacctggtttcactctggatctatggtgttattacagggttgcaggatactttatgcagtggtgcaataaatctatgatcaagagtctttcgtcctactttaggtggtgtacgtagctagttcctataaacttctgttatagaaatttatgtgatgtctttttattagttcaactcatttctttgaagggagatggggtttgtcacatggaagtatatgtattatgtgtacacaagcttcttatgcatattgcatagcaactaacaaatatcacaataaattaaaaaaaatatgtatatactttcaatagtattacatctatgtgtaaagttttaaccttaagttcattatattccagcctaaaaaaggaattttgacagttttaagactataaatatgtcagaattctttctctctctgtgtataatgaatttgaagatgtgacactatacgcatatgtagtactattgaaagtatatgtatattttttaagaatattttatgatatttattagttgatgtgcacgatatatacatgagaaagcttatgtgcatataggatgctttcccttgtcacataacctcgtatcttttaaatattttaaattaaagtccgaactaaattgattgcctaacgatagaggctggaaacacaaatcattttctttgacttttttaaaaaagaaaagctaagaacaaagggagcatattttttaagttttgaacaacctttacctccaaggcactttaacttacaaatagagtagctatacaatatccgttagttttttaaagctttcacatgtaactatagaattagaatgcaacttatatgtattttgtataccagctggctagcgaagcaagctctcgtatgcccaaatctcgagacaatcaaatagccataaattaagttttgagtaaaaagaactgatttggtcctactccatcttttttcctggagtgcgcccaagatttcaagacaagtattccagaggattttgaagaaaaaaaactttatttctttttttattgaaagtttggtataaaacatatgcattagatgcagtggcggaggcagcgtgggggctgggggg

SEQ ID NO: 38949 - DNA, 884 bp, Oryza sativa
attgttttttttttaatcacaggatgctctaatctatccatcttttcgctccattttttaatagataacacgccgttaacttttagacacatgtttgatctttcgttttattaacttttttatgcaaatgcataagatataaattgtgtttaaaatacttttagtgataaaacaactcacagcaaaataaatgatagtaattagtaagtgtaggtgtagtatgtgggtgagggcacgagcgtctaatattgtactcaacagcctaagatagtttaacaaggaagatgtttttttttctcatttggtgcccccctcattcggttacattatggagtcattctatggttacattgtggtgccccctctctatttaagagatttgctaggttacaaagtccgattctaactctaaccctaaccatctattacaactccaaatccatccgtaactaaataggactaatatattcgacacatattataacaataaatttaatactgaattacacattctatttaaatttaaatttattattttatctttctaattgtataagttgaatttgaacctgcgtgtttatgaattgatatattaattatgttttagattataagtcattttgactttagttaaagttaaattactttgacaaattttgtagacaaatatattaatatatacaacaccaaattagtttcattaaatctatgattgaatatgtttttatagtatatttgtcttgtgttgaatatattactattctttcctacaaatttgattaaacttgaaacaatttaactttgatcaaagtcaaaacgattatagtctgaaagagagagtaccatatattgatatatcttttttttttcaaaatttcacagta

SEQ ID NO: 38950 - DNA, 1160 bp, Oryza sativa
tttgaagctgatccaaagaagctagatagccaagcgacgacgaagggcccgcccgaccaatgcctagctagggtggctgcgaattgaacctgtgattgccaattgggcgagagacaaaactgggccgagtcacacaagcagctaggatggagcatgcatggaggaaagaagacgcggtcgtccaagatgtagcgatagtagacactagacacttagagcaagtttatagtatagacactggctctaaatcatctatagttaatgttatagccaatttatacaatagttgctgactataatattaatacctggtctcacctgtcatacacatatttctcttggagtccgcgctgcagctggctacaaatctgtagcccactgctcttctctcttcttttatctctttaaaatatgtttatagctggcttatagtctgctcttacagtgtgttctttccttcaagttcccaacccttctccctcgttttccgcgcgcacgcttttcaaactgctaaacgatgtgttttttgcaaaaagtttttatacaaaagttgcttaaaaaatcaaattaatccatttttgaaaaaaaaaagctaatacttaattaatcatgcaataatgcgtgctccgttttgcgtgccagggaggaggggttctcccgaacgcagctggcagggttgtaactgcaaaatctgcaacttagtactccctcattccctaaatatttgtcgccgttgacgtttttaaatatatatttgaccgttcgtcttattcgaaaacttttatggaatatgtaaaactatatatatgcataaaagtatatttaataataaatcaaatgataggaaaggaattaataattacttagattttttaataagacgaacgatcaaacgtatttaaagaaattcgacggcatcaaatatttttggatggagggagtaagcactaaacagggtccttttcgcaagagttccgaatcgcatgggccgtattatgggcaggagagttagctgggctgctgggctttaattgggcatagtgagtcggacgtaatcacgtaataggctggaccgatggaacctcaagtgaaagcatttcatgctggctcgtggttagtaaaaggaataagttcatctaaggtcccttaacttatgaacg

SEQ ID NO: 38951 - DNA, 1319 bp, Oryza sativa
tcctcattttcttttccgtgcataagtatccaggaactaaaaaatgaagtccccatggtttggcttatttcctaataatccaaaacggtttattaggaaataaaaatgaatttgtaggtgaaatttttataaatgtgttcttggtgacttaaaagacaatgttaaaaaagaaactacgttgaaaatatctcaaaattaagcttgaaaatccaaaatttagctttttctttggctgattaggctatccaataggagcctgaacatggtaaatcttcattcaactcttacatggcacataagtacaaaccttcaactggacagtacagccttgaacatactctacttgcaacatatgatttgcttatacttgtactctcaatagccttagaagcacatgtcgaggaggcaacagcagcaaagggcagcacagctgcaaaacaacagaacggttaagtatttcagttcttcagtctactttcgcatatcactactattataaaaattgaagatgtttttgccggtactttgtacgtcgtccgtatatgagtcggtttttaatttcatttgcttttagaaatacatatatgtatttgagtctgtttttaagttcgttcgtttttaaaaatacagaaagctcctaattgtagcttatgattttgtaaaataaatatccaaacgaatttccagagtgaatttcaccttagctaaactgtacaacagtgataagattaaaatagcttttacccgttgcaacgcatggatattttttttctagttatgaaaaagagtaattgtctcattacgaaaaataggggtaaaaaagtctacttcataccccaattctagcaacctctttttaatcataaataaaccctataacttaggtgttgagttaggttttctataaacgtaggaagatactatgggcttgttcattttataatcgcttttaaccttattaaattttagtaagataacaaactaaatatgatgtcaccaatattatcatactactaaaatttagtagttctagaactttcctatcataaaaacgctagtactaaattttgaaaagacatcaaacgctactaaaattcgataacaccaaagcttgtcaaaagttgatattgccacagtttaataaggttaattttggtaacaaagtgcacagcttatgttgtccctgctattaggttatgatcgattggagtaaacagaaaatggtaggcggtaggctcagccactgcctcacacaagacattattatcagtgacaccgagcttaattaccatccttccaggaaggccttgtcaccgcgg

SEQ ID NO: 38952 - DNA, 524 bp, Oryza sativa
tatacaacccctgcattaagggaaaattgcgtctgctgctgtgacaaccgacaactgccgttcaaaccttacatcttgatccaaatagagtttaataatttgtttcctatacttcctaccaaatgttctgattttactgaacccggcgttggtgagctgttccattgtgtctataggcatcaagcttcagtggtgcacaggccagcatcactgcatctgccacgctataaaatgtctaaacaatacattaaactttttacactatattcaaagaaatgggcaccgtctagtgccaatttgttcaaaaaatacgtgctgattcgttcaaaaatacgtcttaaccatacattatgttctgatcttactaagcctgacccgtctaatccttttggacattacgtggctgctatctgaaccacgtcaggctcaacactgtcctccaagattagccttgtccccggtgcgacggccgacgggggaggaagaagcagcagctccatgcacggcttcctctggcctcacgg

SEQ ID NO: 38953 - DNA, 882 bp, Oryza sativa
aacgattgaattaaatagcataaagttgaaaagttaggaaacatgcaaacgaaaatcccaaatccagaataagaaaagaacgtggctttaaaactagcattggattcatgagaaacttatttgtgtatttgtttagaaaataatattgttatattaccaagttaataaaataattatgttacggtaattccttcgttccaaaatttgactcagtcacgtaaccattttttaattttaagttcgaccaaatttatagaaaaagcataaaaacatttaggggttgtttatattgcagccaaaataaaccttaccaaattttggtaatgccaaaattttggtaatttggctattatgtatttactaaagtttgataataaactaaatgaacgcatatatttggcaactctatcaacaaatgttatgatttaaaatggcatcaatctgaacaagcccttaagcccttagaacatcaaacagattatatacatatatttagcggtggatttaataaaaccaacttggtattgtatatgttgctatattttctaaacttaaagatgtttgacttagcacaaaaccaaaacatgttatattttaaaaaggaaggagcagaaattagttgttaaaattatattttcaagactgtattgatacccaaaagacacatttctaaggatagatggagtaatacactaggtttacatataattagaataaccactaacacagtaagtttatatgtaattagaatatcaattaattaaatgagaacatgcactggcccaaaattctgtattagacttggactataatttaatatgacgtatattaatttacataaatatgattttccatctctgtataaattaagttggttattca

SEQ ID NO: 38954 - DNA, 509 bp, Oryza sativa
gcccgttcagtttctcccactattcctggaccgactgcgtaggctcccatgccctggttcaagaagatgattctcccaatgatcgaatgtcttccgcattgactagtcagccgaatcgttgctagatactacctccgtcccaaaataagtgcagccatggatatccgtgcccaacgtttgaccatccgtcttatttgaaaatttgtgaaaaatttaaaaatatttagtcacacataaagtactactcatgttttatcatctaatagcattaaaaatattaatcataaaaaaaatttaaataagacgaacggtcaaacgttaaacgtgaatagggtaaaactacacttcttttaggatggagggagtatgttaatcaatggccagggttctgatgcaattaaaagccgttcctttatttcagttagtacaatcagagccatttatgacaaaggtttaagagcagggataacagtgaagcttacttcctactattagcctatcttaaagcc

SEQ ID NO: 38955 - DNA, 702 bp, Oryza sativa
tcctagtatgtgtgtgaacaagattggttggctagcatcgtgtggttcatgtgtaactgttgacatcaaaatttaaaacctgacatcctgttgttatcgggtggagttatccatctacaactccaccaccatacatcatctttttcggttttcattgtaatagtatgtttatcaggttttatttgtttcgcagtaatggttaaattgtatttcaaataccatgtattatattccaaataaggcgtttttaatccggtgaccgggggcggacatcaggggaagaaattttcaaggaactagcttggaggtcattctttcaagatgtcaaacaaactcctcttgtgtgcagtaataatggagacagggtgcaactccgatacaccaccacatgcaagatacatgatcttatgcatgacattgctctatatgttatggggaaagaatgcgtaactattacggataggtcctatcgcaaagagttgttgtcaaatcgttcgacttaccacttgctcgtgtcaaggcatagaactggagatcatttcgatgattttctgaggaaacaatctacaactctccggacattattgtatccaacatggaatacttatggatcgatacatcatttatcgaagtgcatttctctacgtggactgcagctatatgaaatcaaagaacttccaattagaccgataaagttaaagc

SEQ ID NO: 38956 - DNA, 1236 bp, Oryza sativa
gtgtatgagtcggttttaagtttgtttgcttttggaaatacatatccgtatttcagttggtttttaagatagttcacttttggtaatacaaaaggaatcatataaaaaatctgtttaaaaaactcacatgttaacttgagacaatcggactcctatctgtagctcatgattttctaaaagaatatatatgcacgcaaacttccacagtaaatttcatcttaaataaaccatataacaataataagattaaaatagacttcacccgttacaacgcacgtgcattttttttctagtaccataaaaattctcagtcatccgagtaaacatatctaatttttactactactaaattggttgtactagatggttgaacgtcggggattttattggcttgaattcctgcacgcatacattttctaagtttccgataattagttgacaacccattttccaggcaaacgttaaatcactagtgctggaatctgaggatacatttttggagaagtcaagggacatgtttgctacacgcgctgagtcaccgaccaatgggacccacccctagcccggcacggtaacatgcatgcataagcttgtatttcaaattaatttgatagttttttattgcaacctgatttaagtttagtgtggatttttacatgtacggattcacctaaatgtattttaatttttatgaatgcctttgcacattagcttttttatatctatactagcttgtagatatttgccaaattacaatactttgttttaagttggaataactttttttctctttcacctggcaaagcatgagtgagtgctgctacacatcgatactttctatatagtcttctatatagtcggtacccactaacaattattaaaagttaaaactcaacatgcaagtatgccacatcatcacccactagcaattactattctagcccatttaaaatcctatacaagcatgcaacatcttcactcactagaaagtactattctagcctattttaaatctcatgtaagtataacacatcatcaacaagcatgtgtcaaatcatcttactcacattattttttcaacatttcaactttcatcatttcgacaatatttaatatatacttatccataaatctcgcagcaaagcgcggggtatcacctagttaatatgttggttgacaaggcaatggcatatcatgtagataagaaaaaagtaagaagttacccacctaaatttc

SEQ ID NO: 38957 - DNA, 1043 bp, Oryza sativa
caaccgctacctgtccattgataggaagatgtttgcttcgggttcagctcgattcgcatcatttgacgctacgaaagggcatttgcaaacgatgccttcgcttccggggtagtttggctgtgcaatggctattgtttttatgacctcagggggatgtcatgcttgtgttgaaggcatcaagcaacgattggcaagataaggatatggagatgctccgtaaactatacccatctgtacagatatcagaattcagagatcatgcagtgatgatatgggaaaacgtatatgatcttgagtggcagtaacataattgtactaaacttgcttatggaatataaaagctatggaggctgcgcttatcatagtccacctggagcttccaatcagagaatagctgttattggtggtgttgccggaggatctttggcatgcacttttgcacttggatttttcttcgtttgtttcaacaaacgtgaaaagaatcctcagaaaaaagactgctcttctacaagaagtacgcacccttctacacaagtttgttcccttatgcttaatttagatagtactcactctgtcccaaaatatagcaaactagtactggattagacacaacctattaatacatatccagattcgtggtactaggttatatcaaatccgatactaagttcatatattttgggacagaggtagtaggtgttttacactcttgcaagtctctttttgctgtttcatttgcatttatgtgtccgtatgtgcatttcgtgtgcatgcgataagaagccttcatttggtagatgaagccgctcttatatatgtctcacactttgttagatgaacatgcatggtagtaggccttgaaatttgagagccgtgtagtaaacaggtttatccaatttttgctctttgatggaggctcatcaacagaagtaggagctgcattcatcagttcatcgtgtcctataaaataaaatacacctcataatcacttattgtctaaatactcaaaacaccaataaattctttctataatgttgtatgca

SEQ ID NO: 38958 - DNA, 696 bp, Oryza sativa
cctatgaacagatcctaaactcgaattaatgttgaaggagatagtactagcactctctggattggattagtcagagggtcagacagcggcagccagtctttgcgatttctgttgctccgtgggaaatagaaacaacagatggactgaacctacagagaaaattcggataatttgatatttcagaaaaattcaggattcgacacttacccattgagcagggaatcgtagtatacaagtgggaactagaagtagaataaaagcaagtactacctctgtcccaaaataagtgcagctgtagatatttatgtccaacatttgaccgtccgttttatttaaacaatttataaagaaattaaaaaataatcacatataaagtaatattcatgtttatcatctaatagcaataaaaatactaatcataacaattttttaaataaaacgaatgatcaaacattaaatataaatagtgaaaaactgcacttattttggaacggaggaagtatggattaattatatcagatattaattaatgcaacagtttcctgtttcctgtttcctatatctttcttcgatttgctctgctcagtttgattattgtgtgtagatagccaataaccgtgtacaagtggctggactgccggaggaacgggagctttgtctgagccacatcagattgtaattgtcagagcgagcatg

SEQ ID NO: 38959 - DNA, 500 bp, Oryza sativa
accacgaactgctacgtaccgcgcgtttatctcgtgctagatacagagcattgacccttctgccggtctgcccccccggccccgtgcacgcgtgcgccgccccggtcagcgtccatctctgagactctgacgacgacgacgccgccggcgacggcaccggcgccaccgatccatccatccatccgtgcatcctactgtatacttacctgtctctcgctgccctgcactgcatacgtccgcgcctagctcgatccccgcaggatttctctgtaggtgacagacgccggtttgtctggacaccccctcgcggcgcgccggtgcgtgcgtcggtgcgtgcgtgcgggccgtctgcttgacgttttgaccattattcctctctgtcgatcgtgtggtcagtgcgcatgatctaagattaactgaggaaggactcatcttgtgcgttgacagcgttgtccgaagcccccggacagaacgggtctaagtttgcactgttattttgg

SEQ ID NO: 38960 - DNA, 814 bp, Oryza sativa
ttttaaatgtatttctaagttaactcttaacttatctttcaatattctttaatttttgatttcaaaatctagttactattcctatattgattttaaactcttcttcccatgtttttttattttgaattttatttatttgtaaattgcatttttatacggactctaaactctacttttaattttattatgtttattatgaattttagttagttttatattcctatatgtactctatactctacttctaatattcattatttttaattccgaatttctattatttcttaattgtatttctatatggactctatactcttcttctaatattctttttttttaattccgaatttcagttatttctaaattgtatttctatatggactgtagtcacctcttccaatattctttattttttaattccgaatttcaactatttctaaattgtatttctatatggactctatttttctttttttccgattaatatgataatttctaggccgtgagagcgaacgtagaggctcatttttctattcctttaataagttaatagatatctactctcacctgtcatatacacattgcatcttggagtccgtgctacagctggctacaaatttgtagctcgctcgctgctcttcactcttttcttttatctcctcgaaatttatttatagatggcttatagtctgctattgtacctactgtaaatagggctagattttttttattttttttgccatccgatatgctttgaaattcgtgctatcagggaagagacctgctgtcagccgattgcagcactgaccgcttg

SEQ ID NO: 38961 - DNA, 753 bp, Oryza sativa
ttcgtcctaaaataaaagtatctttgaataatgctaagtcaactattttcaaatttaactattaatagcaaaaaaattaaaaagatcaatcatgtaaaattgatgttactagatttattatttcacaaactatcataatatgtaactctttttatctactgttactatccttggctttattatatccacaactaattacctaccccgagaaggtaaccatgttttttactcgaccctctccttaatacctgtgtcaaagactaaaacttgctgcgttttaagataaacggagtaggatttttttttttttgcatacctccacttcgtaaaccatgtgacttacataactcctcagcttggtcggcttcattgtatcaccaaagaaccggaactgctcttactgcgtggcataacccgcatccagggctggtcctggggttttggggcccagggcaaaaacttatatggaggtccttattgacatgagtgtggctactggcgagctacgatttgctgtgtccacttgccgtttccatttacgcgaccgagaagttgccgcgagcgcaatagcagcgagtagcgtgatgtgatcaaggcggcgcgacgcgactggcgtgatgtgatcaggcgaagcgacgggagtcagatgaatatcgcttcggcttcgctgaaacatgcctggcgatagactaaaattcattttctgaattgggttattcagctgtctaacttaatataagcctatggtctatg

SEQ ID NO: 38962 - DNA, 589 bp, Oryza sativa
ggtaatccatatctattcagacaaggtgtgatggtaacaaaatgtcccataggtgacagctctactttcaatcttcaaggcatgaatatttgacactatacttcaaatttgtaaaacacgatccattcatttctttaattatcaccaacataaattcatagatagtacaatgcaaaaaagacttgcctgtgcaaaaatcttttaggctaaaattcaccaaattacctgcactatttccttcttcttatggacctcccctttggggattggaacatactcctcagcttcaagatcgtattctgtagcaaaagcatcacatctaccaactcttttgaccgcaccactattagcttcaatgtatataacatcacccactgacacctgcatcccatgtatcactgatgtaatgaaacaactagtgcaaaaaatggaagtaacagaagtgaatctcagtatcaaggcatctaatcagcttcacgatgacaagttatgaatttccaatcatgcaattttttttttacaataaacattctccaaagtttactttatagattaaatattcacaacaagacattcttctgaataagaa

SEQ ID NO: 38963 - DNA, 567 bp, Oryza sativa
caacatgaatgaaacattggaagttttaccaaaaatgaagcagatgtaagacattgaacgaaaaatcttatagttaacacaaagaatttctcatatagattgtgaggtataaagtaaaaaaatgtacaggtatctaataaattgacatcaaattccagtgatccaccattagcagaattattttcaaggaagggaaacaaatatattgaaccagcaagcaacagaatccaagcctaaaagaaatgttgaaagccaaaaacatagaaaaaaacatgctaagtcgaccatttctttagaatagcaatttagttaggtgaatctgaaatttaatccaaccatcctcccaacagttgaactaaaaaataataaggcataggttctcaaataccagaagctcaatatgaatgcctttctggagctagatgagcccttataaatgtagaattacttgtttacactagctaatgaacaaaaaggattcaaacttacaaagaaatggcttattatgaacaattgtccacggtgcccttattgcacttaaacacgattcatcagtttttattggcc

SEQ ID NO: 38964 - DNA, 630 bp, Oryza sativa
aaaattatggtgtagtaggaagaggagaaggggaggaggaagggggagaggagcgtgttatgggggatagcgatcacccgcccattagcgacacccggagtagagggcgagaaaagaggagtttgaagccgttgacacgttgtggccacgcgttgagcgcgtccgagagcggtcggcgccggttttctttttctctctcgcgttaagcggtgaggaatgaagatggacagggactgggctagctggggaggctgccaagtgggtccaaaccgtggtaacctaggctagagagaaagggaagggtagaaacatgggtagactagattttggatgattttccaggtttatttctcttcccatctttcttaattcatatattaatttgtggtgcagataaattcatgtagattttactggagttaggtgattatacctagatttcatttttttttacacttaaaaattatgtgcagtttgctctcagaaaaatggataagatgggctcaccaaaattttgtttgaattgttagaaggcctaaacagaagaattaaattctggaaaattatacttactcttaataatcaacctagtatttgaataaattatttcccttatacacttcccacttc

SEQ ID NO: 38965 - DNA, 566 bp, Oryza sativa
atagtcaacttataataaggtgtaatcaaatgttgatgacttatcatagttatattatagtgctaaatacattacaacacatggagccgacataataatttaatataaaaatactttttcaaataatttgtgtgacatataataattaatgttatgataatctttgaaataatttcatattatattttatggtcaaatatcacttgataattatataacactaactgaaatctacgtgcatgaaaatgaaacaacgttatgttttgtcaattatatctgactttattttaatttttgtgagattaagattcttaattgtttattgtatttttcagagttatttgataggtatgcctaggcaatgatgttgctacaatacaactccttaatccatcacaaaaattatggtcatttacatttgttattttgtgaaataggtttggtaacaaatgaacaatcttataacatgtacataaacctactcatgatatattttcttacaatgagaaattataatatgttgggcataagtgataattgataaatgtacgtcaaacatcccactg

SEQ ID NO: 38966 - DNA, 1480 bp, Oryza sativa
aagtcgttcctaatattttcttaatagggtactccttcgtcacaaaatggagctacctagcacaggatgtgacattatttgctgtccagaatcgtagtaacagataatgtcacatcatgtactaggtagctacgttttgggacggaagtatatatgatagtgttatgtgactgtgttatatgtatgtaatatactgcatgtatatgtatttttgtttgattgtttttttgaaacatacatcgtacaaattggaatgctttaatatttgtgctgcatcttttatttggatcgcatgatcataacgtcataatccttcgtggtaaagggcaaaaaaatgacagtcgctaccgtaagttgtagccgggtggcttatagctgtaatctcgttggtttgacagggattcccaaaagaattcagcacggtacgcggttgttaggttgtattttacatgggaccatacatatgaaattttgaatttgtagtcctcgataattttgggaaaagaaaaaggatagatcgctcgtagtcatagatagatgggtggcataaatagagtgagtactatgattgacgaattgtgaagcatcataattgcaaatccacaggtgaaccagctagccaatttttttttaagactaccaactagccaatttaattcctatagaatttccgcggtccaaacaagggcctaaaaaaacttaactgtacctgcaatcagtaatgcagcagctaagcaaaaattgcaatgctgtaaatctaccgtaaaattgcatcttgcagctgcctaacatatattagtggcattgtcaacaaaaaatgaagaatcaagaaatttcaaggattatgaagagaggaccgagggaggattcaactggagacatggaggaagaaaattgaccaagattggagtagtgaaggaactaaacagcaaattgttcaagccatcgccccctttgaaaaggctgagtgctttcttaccaacaagatgttgaaagagacgagggaaatggggaatacctttttctagcactgttcatgtcacgacattaacaagcaatatccagtgccatcacatggaatattatcaatgctatacagtactagagtgtgatttatcttccagaaaaaaaagggaataaatgatatgttaaagaaaccgggaccaaagcctcaatgccacagaatgtagcagtaacaaacgatagttttcctctaattgccagttcatgtgaaactgatggtcagctaaatctgttggcaattcatttgactggattattaacatgtaaatggttactactacatatgaatgaaatgataatcgtaagcgtaaaaatttgaccccgagtctcaattcacctaaaacaacccaagtttgaaccagatcataatttttgacatgtgcagactgatattatgaactaaggtaggcaacataccacgctggctgctaccaggaaggagatatacctactgggc

SEQ ID NO: 38967 - DNA, 2062 bp, Oryza sativa
attcctgcagccctgatgcactagatggatcagctacgtgagctgtaggaagtttgaatctgttggaattcagtgctgtcatgtactaaaggtacttgatctcaagaatataaaggaactcccagaacaatacattttgaggagatggagaaaagacgctcgttctgtcagaataggggaagaaccttctggtggatctagcagtatgcgttcagcctcagaagtccgcttcagtactatgtgccgttttcttagcttgatagcttcaagggctgccagatctgaggaggcaacgtcttatatcgaaagtcaatcaagtgttcttctgaagcatctagatgatattttacaaacaggttatcctgatataggaaatcatgttgttgcttcaagtagtcaaccaatttcttttgtgggaaaccaacttcctgaccatacatcacaagcaagaggagttccacagaccacaaatggtataaatttgaacatttctgccaaaatcatttattactgatttcaagtttttaacggaagtgatgaccttgtaggcctgatgggggtttgacagagcaattgcagtccagaccatactggctactatggtacgtatgatgtagctattttcgattactttttacatgccagaaatgtactgtactttgtggtatgtagcaatttgtacatgacttgaaccataacttgacatgttaagtagtactcgtggttctgaagggcataattatggagttgggggttcaagcattaaaattctttttttttttaatctactgatctagtcccatactcccatgccatgtgtccaatcaatagtaagtcttggtaattctctatttcaggaaaatgatttggtaacagcataacacagatgctatttgtacttgatgcctccaaccactgacatatatgccagtatatatgggtttatggtgggcactcagatgtttgatgcgtataggaatgatgctatattactatttgagaagtttttccttttaattgggcataattgtccaaaaactcttctcaacaagaaaatttaactctattagttttagtatttttgtgctttctggctaactcctttttgtactttctgttatatcggattaacattgttgcttgtttgcacttctgaaactactgagtgtttcggctattacacttgacttttgcatgttagagcttatgttaagtttccatgtgtcaatttcttattgttgatgagtacttctttggaagtactgataattggcttgtttcttaacttttaggtctgacatcattgttggggatttcaacggttgatgagtttgtaaaatccagcagacaattgggattgaccagtgggttctttgtagtgttagtcaaatgcaggagtatggctaggctatgtacagtatttatctggtaccatgttgatgcaagcaagtgtattctgtagatcctgtctttctcaaattatactttggtagctgttctgctaaatataaccaatcctgatgtctctgtgctttagcattttgccatggccttttatgattgttcaattatctggattagaaaaaagagcagtagtgttttttttatgaccgttgcaattgaaagggacaagggatgataaatttctcatgacaacttatccttccgtgttcaaatttattgatatatctgcaggcagtcacagcctcacaaattacaacaaatactttgaatatacattaccagaaaacaagggaataatgaaatattatgaatacatttgcattggtagaatttttcttttaattttatatagctactgcagctgtacttggaccccagaatcatatgtggcccctgccgtccagttctggggtactatgttcgtcggaactagccatgtgtcaccaccacggggagctccgctactaaataacatccttatagacagaggcccacttggtggagagacagcagcccacactgcaccatgagtccggctcataagttggcatgtcaaattcacagtctgcatcaagtcatgaacaggtatttagtacta

SEQ ID NO: 38968 - DNA, 1988 bp, Oryza sativa
ctggtgggggtgcgcaggcgccgccgctaacacactggcgcaggcaagccaggtggtgacaacacatggtattttggttatttggacaaaaaaaaatatacagtactaaagaaggctaaccggatgatgatggtaattatagaagttaagtaaaagttgatggtttattatagaatgtgataaagtcagtggcaaatcgtagacatgtgaaaaactcagtggcatataatagattctttctggaaataactatgagcaacactaacactacagtgtataagaatcacccttgtaatttccatcatttaaagccttgaactagatataagagaggcaaaaaggaagctacattaagtcttaagctcttgattctcttagattattcaactttgaagaagtatttagtagcaaatagaaggaaatacaatggatgtaacaaagatttagtggattttgaatagagcatcgcaaattgaagtcaagatgattagagatcaataaaatcagtctcttcatctctgcatgcaacaaaagggaggcatatacgatgttgtcaaagctcgtcttaagagaagagagaatgagtaaggaatagaaggcaaattagcaatagcgaaggaagccaattcgtcactatgagaagtactacgagtgtgatggaaaggatgaaacaacactccactccttaatcccgactccttcatgattgcaccagacgatgacatcatgttcgatgggctaacatggccacttgtctttttctttagttactaccaatttctatcaaattaaactaggtgaatattattgttatgcatataggctaaaggtccatcccttacaaggcttaaaaaattgcctacccagaccggccatggtacaatccataagcctttaccattgaacatctacgactacctccgtcccataataattgtatttttaggattcaaatgtgtcccaaaataattatcgtaatagagtacgccctctgtcatagaatataagaatttttagggtttgacacaggtattaagaaagtaggtagaactaaatgggagaatgttgtgattggttgagaaatgtgggtatgtgagaaaataaaatgccggagagttgttattggttgagaaaaagagaatgttggtgaagaagaagttatattttgggacgagagtactaattaccccattaatcactttttgttgaaatttctctctattctaccctctaccactctctcacttttacctatacactatttaataaaggatatcatagtctttgttatcaaatcttaataactaaacaatttagaatacctcagaatttttagatatttaaccatttgccacatttagatgtggcaattaactttttgccacacatgttatagacacgtgtggacccacatgttattgagataggggtggcaaatagttatttgccaaatttaaaagtagcaaatagttaaaagccccaagaattttaccctcaactatccattcccctctccccaatttaccatacacacatggatgtagataggctacaaccaaagcaacacccatccatcacatcaccacatcaccaacaatggcatcactgctcaactcatcaccatcctccccttgcgaacccacacacgcgcgcccacagccgcggcgcccgcacccgatccccatccccgcaaaccctccccccacttctcccttcctccaaaccctagctcacgctctcatgtccaccgccgcggacccctcctccctctccggcgactcctccccgacctcctccggcgacgccgaatcctcctcctccccgtcctcctccgccgccgccgctgggggctccgacgaccccgcccccgtcgaccaagtcgtcgcctcgggctccggtgcaggcggcgatggcgacgccgccgcagccgtcccaacctcgccgcgcattggcatgtacttcgagacggaggaggacgcgtacgagtt

SEQ ID NO: 38969 - DNA, 679 bp, Oryza sativa
aatattttttgtgtatcaaagaatcaaatgaattatctgaatagagagattccataatatgtggttactttagtgaaaaataattcttctattcgatgcaacattagatctatacatagtgaaacattgtaagtattctaggtgaaacatttttagtgatacattgtaaatccttatttaatcactcactccatacatatgcaacgttttcatataacctagtgaaacgctatgaactacttacgataacatacatatagcgccatgagatacattaaagaaaagatatatccattgtgacaataataaatgtgtgcagcataatagattttaagctgagacatatgattctcacatatcaaacattaagtttaattggttgaaacatatgtgtgtgtttttattataaaatagttatgtgaggtcttgtgtgtaaagatttaattataacgaagacaatggtgtaatcgtattgtagattggatgagtaatctagaagaaaaatcgttttcatatttgctaaaagggtgttatgcacatgcaaataacctcgtgtcatctctcctttatgcatattaatgctcagaaaggaagcatatgtagcagatagaggatctgacaaaggctgtatgcggcaaaatcataataagaggtgtccgatttttttctcaagatcgaa

SEQ ID NO: 38970 - DNA, 664 bp, Oryza sativa
tttcactggaattcggcttgatgagactattttgcccctccttgtcggttgaaaggggatcgagatcgagcatggcgaggtggtcaccgttgctgacaagggcgtctacggtggtgtgagatggggcaagaccgagcttgccggccgagcaacgcgagcgcccccatggccgttttcatgggcgctgggacaccgccgcgccgtgtggagcaccgcctacttgcgcgccgcctctgccttcgtgaccacccagcaccttcacctctgcctcctttaaccggtgccgtcccggcaccttctcgccggaccggccttcttttcccatccacccgacgccgcctggccgcccttaggctcgcgccgcgctgggccaaccgccatcgtcttggtcgggtcgtccgccgtgccgccgcacccagtcttggcactgcaccagctgcgccttctcgcttgcttagaaggaagagagaaaaggggaacatgaagagaaaccccggggaagaggagaagataagagaaacccctccgtggcgaccgcaatgtgggtgttcagccacgtatgacgagacacaacttgtcctcccggacgttgctgatgctgaactcgccgccgcttgccgcaagtcccggcgcgacctacgaccaagacagttggtggcagttg

SEQ ID NO: 38971 - DNA, 3300 bp, Oryza sativa
ctcgcgcacgatggttgtcttttgctgaggttgggctattttggatctggtagtcaaagagctcgactgtgcttcctcgccgagctccaccgtccccgacatccgcagccagcccgcttggcggagccgacgacctctggaaaaaatttcagttgctacagtttggttaccggccacactttatcatagtttgtcatagacaagtttgatcaacttaacaattgtttggttgaagccacactttgtggcagggttccaaaaaaaaaactaagtctcataaatcaatgattttagaaaagtatggcaaaatcccccttagctaaggtgtagcggtgaaatttgatcaattttttgttatacattgtggctaagtgtggcaggcaacacacaccacctcaagtgccaaaaacgccaaactaaattgtgtgtccatgctaaagaagtggaagactttcgtgctagtttctcatattttcattcggttacattgtacatctaagagacaatgctcccattatttttagatcatttataggattattgccactaattatttactccacctatttaaaaatatgtttcttaaaatactcttttctattagattactagaccacctgttctaagccaatttttaagttactttaaaaaaataatttgtagctgtaattaagtagataatccgtagcaataatttgttaaataatatgtttaaatgggccaattctaaataccctcatcatagtgcacttgaaaggtatccaaaactgacgctggaatggctctttgacaaagtttttttaattgttggctcaagaggtgagttatctagaggaataaataagatattgtttcatacgccactaatgttcttatctcaatactgggcaatgatggaaataacttggaatacttctatgtgaatataaatgatgatgatcgaggcccataaccagcaccaaggaggatgctttatggaaaaattattatcggtaacttggaacttctagaagcagagaaatgagttgatttttatcaaaagataccttattctccttcttgaatcattgtactgttattgttttaagtttctaataaaatactccctccatcccaaaaataaccaattagccaggaattggttctttttgggacggagggagtatatcctaacagtcaatggcggagacaagcctgagatagttagagcttgagccctaggtttgtatcctagactcctgtttaaatctttaaagcattggtgagaattttgaaaatataaggtgtatatataagtcgaaccctactcctacagagtttctggctccgcccatgctgacaacggggcttcctttgctcggttctcaaagaaaatattcttagctcaataaaatgttataaacatataattaaatgccaacgcagatctccttaaaagcttattgtgaagctattgcccaaatgttaaaaaagatagtttgcttttgaaagatcaattagatgccatgtcaattgaaagtgcacttataaccttgacatcttgatcattataaccttgacatcttgatcactccaagcagctatgcctatgcagaggttatcctctgattttgtggccatatgccccctttacctttttgtttttcgctgttgcagttttgtttcacactgccagcctgggcccaccccgatccctctcgtctacctcgagctgaccctgttggtactcgtatcgtcgggtttctgaattctgatggttgaggtcaatttccctgaaaccaaatttgttggcacaacaaaaccgacgacagcatttggtcatgagataacatcatagtcattcaaaacgcaccacacgtgtcatcttccatttcataatcaatgacaactacagttcatatagattacatgttcttcctttcacacgaaattcgaatcctatttagtactaacagagatcacatatcattccctgaaaccaaaaaacagaggaagacattgacatatggtctacgaatatgattcctacaagcttctgcacttattagtagtagaatatgattcctagttcctacaagcttctgcactaattagtagtagaacgcagtccttgtaccatgactgataaagatacgtttttcatgtgtaatttctgaaaaataatacttcctccgtttcacaatgtaagtcattctagcattttccacattatctagattcattaacatcaatatgaatgtagaaaatgctaggatgacttacattgtgaaacggagggagtagtagaattgagatgcagcagcacacagatagaataagagttttgttgagttcatcagttcctagtgtaccccagccttgcagcaactgaaactttcttgaaagaaacagaattgtaactgaaactttcttgaaacagaattgtttagttcaccaagattcagaactttggatttcctttagcaacagaacagagaattgtgaatttctgattgtgatctgaacacttggctcaacagaaccaatggaggcatttggtcatgagattacagagacaaaaagattgctcaagtacaaaaaagatgttatcttttattcataatcaatgatttatacaattcatagattacatgttcttctttccagttaaagaattcatcatcctatctaatctaagagatcacggtgccttccatgagaccaaaaaagaagaggaagacaagagacctagtctgataatcttgattcctacactagcttcttgcaatagttagtaaattactaaattagtgcactatatactaataatcacaatgccaagaaatcttcagcagcggcggcggcggcgttccggccaccggccgccgcagaactcgcagtgctattcggcggccttcctcttgcggccgccggagcaggacggggaggcggaggccgacgagctggaggacggcgaccccgactccgagcgacgggaaggctcgggggagcggaagatcttgcagagcacgagctcggcgacgccctcgccgccgtgttcctgggcgacgccctcgccgtcgtgttcctgggcgacgccgtactccaccatcatccatcggggcgccacgacgcccgccgccgtcctctccttgtacctgaacctctggcagtacccgcctccctccaccgccttcttggcgcccatcgagcaccaccgcttgccgccgccgccgccgaccgcgcgcgacgccgccctcttggatccggcgcgggcgcgggcgcgggcgcgggggcgcacgctgaaaaagtaccacgcct

SEQ ID NO: 38972 - DNA, 663 bp, Oryza sativa
ccctttcctctcctcccctcccctctcccaccttttctctctcggcatggattccggtcagaacaagcggtggctgcgcagagggtggaaccagtggcagatcccctccctcttcctagatccggtggagggcggaggcggcgtggagggtggatgcggcagcggctccgtcgggagggagaggtcggtggcggcggcgaccctcccctccgaatctagcgcggtggctacgcctgcggctggatccacagccgccgttagatctggcgaccgaaaaagatggcgcggtggaggaggatgaccgcgataggcgctggtgacggagtggcgtaggccgatgggtgcggcaccatcttcaccttcatcgtctgccgcccttgcacgggacatcgcgtgcacgtcggcgtcagtgcgcccctcgccccttctccttcccctcgcggcgatgtcgaagccggcgccagtgcccctacccctttttctcccttccctagcggcgacgttgggtcggaggcagcgtcggtgtcgcccccccctccctccgctcacggtggcgtcggggcgggtggtgcgttggtgcgtcggagccgacgccggtggccccggtctactttgagtgctccatcgacgtcgtgtcctacaattgcgctgcctactccagtt

SEQ ID NO: 38973 - DNA, 705 bp, Oryza sativa
tggaatagacaacccgtcaatgcccactaaatttgcaggtatcgagtcgagcgtgtcgacggggaaaagaaggtgcccacgcccgcgcccgtcgggtatccgtggatactcgaacccacgggcaatactgccatccctaaattggagctctaccaaataagctcttatttctaaaatctaaaccatttggccacgccaggcgggatggcgtggcaaaacaaaattcacacgtcacctacacgtcacaccaacgagagcggcgtggtcaaataacgttgccacgccactcgtcagtgaaaccagcgtagccaaataacattgtcacgctaacaagatcagcataacaatagttttgccacgtcagtttggctgcgtgtggttaaaatattcagatcttaaaaataagttttaaaagtgtttatttttaaaattaaaaattgaaaaggttcagaaaaaataaaaaaaaaataccgcaccttgatcgcccctgcttggcagcgacgcttccgtaccccgactccgactacgagtccaactcgcctccccgataaatccagcccgcctcgcctgctgataaatccagccctaaccctaaccccaacccaagcccacccgccggccccattcgcctcgcactcgccctcgcctcacgccgcccgatcccccagcgcgcacgcgcgcgcgccgagacgacggccgcggcgg

SEQ ID NO: 38974 - DNA, 655 bp, Oryza sativa
gactctagacttgtcttttaatatattttttaattctgaatttttattatttctaattgtatttctatgtggactctaaactcatctttcaatattctttaatttttaatttcaaattttatttacttctaaattgtattcctatattgactttaaactcttcttcctatgtttttcttaatttcgaattttagttatttgttaattgtatttttatacggctaaacactacttttcattttattatgtttcttctaaattttacctagttttaaatttctatatagactctatactctacttctaatattccttattttttaattcttaatttctattttttttcttaattgtatttctatatggactctatactctacttctaattttccttatttttaattccgaatttctattacttcctaattgtatttctatatgaactatatactctaattctaatattttttatttttaattccaaatttcaggtattttctaattgtatttctatatggactctagtctcctcttctaatattccttattttttaattccgaatttcaactatttctaaattgtatttctatatggactctagactcctcttctaatatttcttattttttaattctgaatttcagctatttcaaa

SEQ ID NO: 38975 - DNA, 575 bp, Oryza sativa
aaattcctttgttgcatgagtacaagggccctgttaaaaaaacttgaaacacactggaggtttgttcaaattttttttctttccctgaggtggttttctgtatgtattctgcaacttggttgtaattacaggaggagagaaggctattctatgttgcaatgacacgagctcgaaagaaactgtacatcttacatgtcacggttgactctaatcgccaggcaggtgattttatattgtattcatccttataaagtatctagatttcactgacttaaactattactggcgtctagctgctgcaaccttcacgcttcctcagggagattcctgctcaccttcttgaggtacaggtgagcactattttgagatcctgttttgaatggtatcgagacctgaagaatggtatctctatcccatattgttgtgtattccaccatacaatctgcttggagcattttaaaaaattgtaaattttagatggtatacagctatatatcaatctagaaagtcatttatatgagtaatataatctattatagcaatagtagcttaacataattttctcttttcaataa

SEQ ID NO: 38976 - DNA, 590 bp, Oryza sativa
gctcttttttttttataagggacatgagatatttgtggtctcctattaaggtattcatattaatttatttctatggggtttttttagttgtcaattatactatcgatattatctatcgagaataaattgctctgttgcaatttgcaaactgctttatttataatttatcatgttagaaatgtttatctgtgtcactctatgataaatcaatgtgctttatatagagtatatatattagaagtaaaaaaaatcattaatttcttaagggctcatagtgtaagttcgcagttcgcctagggcctccaaaatgtcaggaccggccctagcaatggtgtcatcgtaaggatagcaaattattatgtgtataattacaaatttacaatcaggaccatcatccctccacatatggaaatgaactttggaaactcttttaaggcaaaacctttcaaaagatttttttaccccagacacacttccacctggagcccacaaggccacaagagaggttaaaactggaaattttcacaaatacataaatacaagaaacacgtccttccaaaggcccacaaggacctgcatgcactggagca

SEQ ID NO: 38977 - DNA, 653 bp, Oryza sativa
ggggcccacgtgggtcccatatttttaataattttctatgtgagactgacatgtgggtcccactggttttattattttttcaaattgaattgctacataagcgccacgtcaatgccacgttagattaagacccgagttaaattagctacgtgggcgccacgtcagccaaaaccgccgagagacctaatctgcactggttttgatagttgagggactcgttgtgtctggttttcaggttgagggacgaaaatcggattcgttgacaagttaagggacctcaaatgaacttattccccccttaaatactgacccattttgctttcttgtgggctggcatgatgtcatggcgtgcaggtacatgcgctcctgtggacacggagcggagcagatgggaaggcaacatccatgcgtggccttggcccactgcgttgttgttctctaaaaataaatgcgtgtggccgaacacattccgactcgattttgctatatatttgtcgacaaatttttcccccaaaatttgacagatgtaattacagtacaatcgtagtgtaattacactgtaacttgcatgtagttacactgtaactatagtgtaacttgtatgtaactttcaaaaatctctccgttacatgttatttcggtaaaatggaggt

SEQ ID NO: 38978 - DNA, 709 bp, Oryza sativa
tagagttcatatagaaatccaattaggaaataatagaaatttagaattaaaaataaggaatattagaagaggagactagagtccatatagaaatacaatttagaaatagttgaaattcgaaattaaaaataaggaatattagaagaggagattagagtccatatagaaatacaattaggaaataactgaaattcggaattaaaaataaggaatataagaagtagagtatagaatccatatagaaatacaattaggaaataatagaaattcggaattaaaaataaggaatattagaagtagagtatagagtccatatagaaatacaatttggaaataattgaaattcggaattaaaaataaggaatattagaattagagtatagagtccatatagaaatacaatttagaaataatagaaatttagaattaaaaataaggaatattaaaagtagagtatagagtttatatagaaatataattaggaaatagttgaaattcggaattaaaaataaggaatattaggagtagagtatagagtccatataggaatttaaaactaactaaaattcggaataaacataataaaattaaaagtagagtttagagtccgtataaaaatacaatttacaaataactaaaatttgaaattaagaaaaacatgggaagaagagtttaaagtcaatataggaatacaatttagaagtaacta

SEQ ID NO: 38979 - DNA, 675 bp, Oryza sativa
cattatcacaggttgtattttcttttctgctgtattcagtatacatctatcactgtctcagtatagactattatatatattggtagctccaatttgcaggttctggtgatgggactattggtctttttgatatccgtgcttgttctgcattaatcatttgtcagtgggacctggtgtaatagtctctttactgctttctgtgggttaccagatatatactagtgggttgtatcctattttgagtaatttctcttgaatatttgctttgatttacgggtgagtgtgatgtttgttgtttgcacttttactaaaagctgatattgccgtagcatataattgattgattgctgagtggcttgaataattatctgattattctgcactatctgagtcctcatttatccttgcaatttttgtgcctcagtccctttgggatccccattcaatgtagtgaaagaaaattatcgcaacttcaattgtgttgtttgggaattccttttcgctcaaccagcacaggccacaactctaagcattgaatttttcttgttgtttagtacatggattacttcacacatcccatggatttggtacatttgcacataagttgtatttgttggatgttggtgcatggatcatctgcacctatcattggctcattcctgaaagtgtgtcttt

SEQ ID NO: 38980 - DNA, 533 bp, Oryza sativa
gaagatccaattgtaagtttctactgctgcaaatgacaggttgtgatctcaaaaatgaaaaaagaaaaaagatagtcaatctactggacaaaaacaaaagaaactaaatgtagatgataattgcacgtaagttggattctgagtatctttgttcaaaaagttactgtacggcgtaccacaaatatgaacaggaaccacactggaatgtcttttgcaccactagcaaccaacatgccaaaatatattacctacaagccaaagtaactgtaaatgttaatgccataataatttaaaaccacaggagctcttttagtagctcagtgccctactgcatcaactgtcaagtcaaaaagcaccaattgtgctacacggaaacatatgtgctgtcatgttagaatcatctagttacttcacgcaagtgagataatatgaaaactcaaaagatattatccagttttatcatctttaagccatgcaaagaatgttcgcatatgtcagtacgggggggatcctctagagtcgacctgcaggca

SEQ ID NO: 38981 - DNA, 622 bp, Oryza sativa
tcgttttatttaaagtttagtataaatatgcaaaagtgtaaattaagattataatttctttgataataaaacaaaccacaataaaataaatgatatttatatcaattttttaatatgatgaatggtcaaacgttatatgaaaaaacgtcactgtcatacaaattttgggatggagggagtatccttttagttttgttacaagtaataatactcataaatacaccactgataataatcatctgccttcgaggtgaacagatcgaatagtaggcccgttgcaggactgtaacatacctaaattctagggtttaaaattccttgtcaaaattgttggaagataaattttttatttttgcgagcttaaaattttcattttaaacctaggtaggtcaacccaacttttgcatatagggaattttggggctagttaaaacttttcctttccaaaccaaaatggaatttgagtaacaaagtgtaagcatgcatatgcatatagatcatggttaggtttgagtccttgtgtgcatgttgggtatgaaactaagtttaataatatcaccttaggtaaagaagtgttcaaatataaaatctataaatgctcaaatgcatttcgagatgaaaa

SEQ ID NO: 38982 - DNA, 581 bp, Oryza sativa
aattatgaccaaataaccaacaattggttggaacttgttgtaaatttaaatcgtttttctaaaagatgctgcaagatctggcattctaactagatctcagcatctcggaggttcctggaatttatgcggatggagagcctggacaaaagcagcatggcttaatcgtatacacagtagacagccaaagaacattccatccaaaagatttacattgcaatgttcatcggtaactagcatttctgtaatcgagacacacttggtgatgcgtggatttgttgttggctacaaaaattggtcacaccattgagagatcccaagctgccacacgagttcccaaccaagagacacacgatgaagtgttcaagggtaggaatttcatggtagtagaagaatccgttgataatgagttggatgatgatgttggggtgacgatggtcatcacacaattgatgatgtcgatgatggtcatgtcacggtagatgatgccgatggaagagatattgcgtcatgctgaacctgaagttgtggctgggtctgctcgtggtttggataatttcaatgtattacaaaaggcagcaaag

SEQ ID NO: 38983 - DNA, 672 bp, Oryza sativa
agtattaaatataaacgaaaaaaataactaattatgcatattgcgtataaattgcgagacaaatcttttaagcctaactagcatgatggcccgcgcagattgcgcggctaacatcattatattttctctcatataatagcatatatatttttttattatattattaaaatatattataatgacaatataattttaaattttacaataactttacgaaactactaatgtataatattcatattatattttatatacgtattagttattaattatttttaatatcaaattttagttatttgtaaattatatatatttctatatggactctagacttgtcttttaatatattttttaattctgaatttttattatttctaattgtatttctatgtggactctaaactcatctttcaatattctttaatttttaatttcaaattttatttacttctaaattgtattcctatattgactttaaactcttcttcctatgtttttcttaatttcgaattttagttatttgttaattgtatttttatacggctaaacactacttttcattttattatgtttcttctaaattttacctagttttaaatttctatatagactctatactctacttctaatattccttattttttaattcttaatttctattttttttcttaa

SEQ ID NO: 38984 - DNA, 582 bp, Oryza sativa
accccatttccatagattatgaattcagatgtgcggcctagcctttaaaggatttattagaacatcagaatcatacaataaaacaataaataagataagattccaatcatctaaaatgattcctacacttgctaagatgtaggaaataagagcgcactgaaagcagggaaaatgtgctcatcatactagcaaatatgatacaccataacaaattgtcagtcggtgaatttagagacattaaactacaattgaagatgatgactgctttgatgtactaaatcagattaagcagggaaaatgtgctcatcctactagcaaatatgatacaccataacaaattgtcagtcagtgaatttagaaacattaaactacaattgaagatgatgactgatttgatgtactaaatcagattgtgctggtatctctatgtaatgggtattttaatgcatttctgacttttatcacaatgaatagcgtgatcataaaaatcataagttaaaatagaaaacaagaatttattttcagcttcattcttttccaggctgcatcttattcagatattactttctcagaaccaaatgg

SEQ ID NO: 38985 - DNA, 588 bp, Oryza sativa
aaaaagaaaaatagaatttcaactaggaatacaatgtataaataactaaaatttgtaataacaaagactattgaaagaagggaccatctagaacccatgatgagattaattaaaattatgaaaatttaaaaataataataagagtttaagtaggaatataatttataaataaaatacatcggaatgaaaaatatgaaattttcaaactcaacgatgataaatgacaataaagatgggagaagccataagcctgtaaagaagtaaagtgatgacggttgaaggggcatctaaaaactattaacaaaaccctaaagagaattcaatgatgattaaaaagatggatgacggacaggcagttaagaagcacgatctcggcggttggcgagacatctaaaaagtaaaaagtaaaccccaatgataatcatattcaattttaaaatcacaatggcaataaagaggggaagcaacaggcgagccgtagaggagtacagtggtaaagccgtcaccactgacggtttggcgggacttctagaaagtaaaaaatgaacacaaatgacaattatgtttgatttttgaaattccgatgac

SEQ ID NO: 38986 - DNA, 667 bp, Oryza sativa
cattcgttgcacaattggacagctacaaaatccccagagtcatagatactgtgctcatttgactttaccatgcaagtaagaggatccaaaatccaatcattagagtttgttacgtaaggctacaagcctacgactgagacaaagcacgttttactagctggtttgtccatcacatgcatcttattttctagccaatttgctatacttttttttaaaataatagaataaacaatccgacctttgctcaataagctataatcaattattacaaaatccacagataaacacacatagcacgcactgacataacataaaataaacacaaactataaacaccaacacaagataaaagaatccacaattactgaattatagtatttgagaatctccctccgaagttggtaaaaaggtgcataatcgtcgattcaagtttacgacatgcatcatttattagctttatatcatcatcatgtctttgtagttgagcccaaccctggagccaatatgttgtcttgaaaagtacctacaaataagtttttgagagtgtttttatcaaaaaaatcatatcatttctactaagccaaagagcccaatatatagtggacgcccctaaaaaatagttccttaattttttttattaacacgcataaccaattcccaaacatat

SEQ ID NO: 38987 - DNA, 764 bp, Oryza sativa
tagtctattgtattagttgtttgtaatattagctataaaatgacatggagataatggagccagcagcagactatactattaaccttgctcttactccagtatatactcgctggcgttgtcagaataaagaacaccggaacgagttgcatgtgtatcatgtgcccagccgtccaagaacgattcggctcttcaaattggccactatcaagccagcacgctctcgaagggacagcataaatgaatcgatctagcgaaatctaaagttgaattcttttcccagttcaagcaagcgcaagagcgaacaaacggaagtggctctcgtcggtgatccacgcgcgttaagggtggggagaggaagagagtacacgcgcgaatgaagaatcaacaccgtaccagcggggattccgatgcgattgacgatttttgttgatatatgttcccatacatgttttctccgtgggaatcaatgtttatatcctattcgatactcccatttcttttacttcgcgggacaagaacccaaggccgtaatagttgtaactttgtttagtgggttttctttgctagaaattctagtcataaatcggtatattttaatccaatagcataacataataaacatgatatatacaataaagaatggtttttccacggtgataaacataaatatgctagcaagaacagtagcaactaaaaatatgtttaacactgaaataagaaaaacataacagagaaagctccggatatagaagaggaattgttgg

SEQ ID NO: 38988 - DNA, 745 bp, Oryza sativa
accggagaagagaaagaaactgtaggagagaggggcatttggtcagttgaagtgcaaaaaatggtaaaaatcttgtgaaatggcgaatatggcaaagcaacggtttggcataggttgaaagtggcattttaacgacgccattccgcggaatggcattgtggcaaaacccaatcttagaagtggtagaatgtccaatttctcggtgttgatggtgttattttgacctttgcgatagtgtgtagatgtgtgcaaaatacactcattcctatattttttaataatgatgaaatgaatttattcgttacaaaatattttttaaagagcttatagagtagtacatatacaattactcgcctatgaggctatgattttcatctttcaagattggcgctccgtgtgctcttcattgcactcgtcatatgcatgtttattctacctggtgaaggtaaaacaaaagcaggtcatgccgcacaaggggactgataaaatgatcgttctagaactttatccctgctggtttcagaatcgagttttcctttggacaaattttgaactagtcaaagagcacgcagctgtgtttgttgttcaggagacagtggtccatccttcttccgtagaaaagacaccggtttcagagtattcagggtatgcataaatccgcaagttgcacatataaaattcgcaagttgagatcgaatttggaccgggtgtaaactcatcatgagatgaaaatgacgtcgagaat

SEQ ID NO: 38989 - DNA, 1139 bp, Oryza sativa
gtggcgcccatcaaggagatcgccggcgagcaacgacggtgcggcgaggaggccgacgacgacgatgaggcggagagcccttcaccggccaagaagccacgacgccggccaggatgagatcctccacgttagtatatatgaagtactaaccatccaattatatacatatagctcgttgagcatgtatgtatacaaccggtagagaaagcagaggctgctcacgtcgtcacgcgtgtgctccgatcgataactttagggtgtgcaattgtaaataaaaaaagggagattcggagggaaagacgtcctccagacagagattaaacacgggctcgatgttaaaattacacatctcttttcactgcatctcgtgtgcaattgcaaatcactaaataagtccatttcttgcttgaggagagacgctgtgtgccatctttcttttcctgaaagtgcaatactcaacccatttttttttcttgtgaatcatttgaactttcaccattagatttgcaccggattcatgctcctgcacaagatccgtctgtttttgcaagccccggtggagtttaacgctgccatctgtttctttcatttttaacacaatataatttatttcggtttttctttaaagaaactacaatcaattgtcataaaaattacagggcaaatgactacaaatgaaaaaaaaattcccagtttgattaaaaaatgaatatcactttaaagattaaagaatacttctatctgcataaccattgttttgcccaacagtgtacaagttatatgtagtccttagtttttcccaacgtcaattatttctataatcgaatttggcatacatcaccatgagtgactaacgttaaaccaaagcagaaaataacattgaaggtaactaagtaaatcagtcatttacccaacgtcatagccatcaaagccaatccgatgccaataatgcctcaccagcacactatctccaatgtatgtttccaagaagatcacgacattgtagatattgccatcattgttctgaacatttataactagattttcacttagagagtcaaccccgagatacgaagttggggaagaaggcatcagctaacatcgtctccaaaaagatgtgtgacgcccataagcatcac

SEQ ID NO: 38990 - DNA, 758 bp, Oryza sativa
gattctgcgtctctagttcagtacgcgatccatggctagctatgcgtgctcgaaagtcgaaaccagctgaatcaggccctgtttttttcagtttgggattattataatctagattattgagtcagattactataagctagattgtaataatctgtagtagaataagcagttagttgtttcttttctagattattagagtctagattattgggtttgcaagtctaaagaggaagtggggtggcatggtgggtaatttttcactcaataatctggaaaaagctcacctaaatgagcttatcagattataataagttagctccagattataataagctacttcaataagttgtctgtttctttcattttactcccaataatctggattataataatcccaagctaaaagaaacaaggcctcggtgactttattttcaccatatttattcagttttctctccaagtagtacttctcttcaatttctacctacattatattgacacactagctagtttatgcgcggatattctcgatcggttggcaacatatttaaaatggatatttgtttttccacattatcgtatcttggattaattttggtagttcaacacacaccatacatcaactataacatacaccctttgtccggctggttgttcatagagtatcaattacacagtagcaaaccgaaaaaaaaaatcgtttagtttacaggaaactttgtaaatcttgaaagagaaacacttatatgtatctgttt

SEQ ID NO: 38991 - DNA, 605 bp, Oryza sativa
agaggttcattaaaaaaatcatatcgatggtgttcagatccatacaaagattattacaaatttggtcattgactcattgctacatttcatcaaagctacttggaaaaaaatatcatcttctaggaatcaagacagggatgaacgatttcatatcactggaactataagcccatgtctcacccttttgccatttcttcatttcactcttcacaacatagcacactgcattttagctaaaaagactttctcagccacttcacaagttcacatgaacagaacaccatgttataacgaagtagccatttaaaaaaacaccttgtaaatgttataaccagaaattattgatcaatttgtaatatatactacaggaaactctggtatggtgttaaaaaaatggaaaaagtacgaattacccatccgaactatcgcggtcgtccaaattacccccctgaaccacaaaaccggacattcttcacccctaactatgcaaaccggacgaattacccccctcgatccaatccgcggtggttttggtctacttagcgtacacgtggcagtccagttaacattttatttatttaaaaaatgtgggacccacctgttat

SEQ ID NO: 38992 - DNA, 2139 bp, Oryza sativa
  unsure (1)..(2139): unsure at all n locations
cgaatgagtttgcacgttacaaatgccactgctttctttccgtacgtacaaacgttgtacatgattgaaaacaaaattttcctaatcttcgctggaagaaaaaacatatacatgtacataaaacagacagaaaaaacatacattcaaatatgaatttctacaatataaagataaaatatattacttcccaaatataaatatatttagttaaattaagaactataagaaatatccaatcaatgttcttttaaaccatcttctaaatctatctgttatatactaaaattacattaaactttctctcaaataaattagagaaaccctagaaatctattatatactaaaattctattaaatgtcttgtaaacactactacattatcgcgtgacgctctaataaaattagagaaatcctagaaatttagagtaaaaaaagaaaaccatccaaccttgaatttttacttaaattattagacccgctattttaaacattggattagagctcttaaaattcccatgtgttgacgcgaaaaacacgcactggtctaaatctggcacattaaaattccctagtttaacatatccttaatacccctgtcacagtaaatctggcacacgcggacctctcaggttgcctcccgtgggtgactccaaggagccctcagcagccctagtcgtcgccagctgcctcaacgcctgttctgcctccgccgccgccgttggtgacgatggtggtagttttttttaccgcccaacaccacgatgaagtagatcggagagatcaacaccatgtgcgaattagcaggaagatcggtcgatcgctgttgtgaccgtgctcgccatggatgtcggaggagttgaatcggtagttagcaaggacaccccttcaccgctgatcctctcttccaaccggcaatccgctttgtntgggtcgataaacatgcaatgcggaggacatcacatcaatccgaacgtgatccaagaagggatattggtctagctgatgaagggcgcaatggcaccctcttatccggttgtgccaataagttccatactgatctgttcagcgataattttattcatgttttcggtagtccggttcgatgatggcttctttcattcgcttggtggtggcagatccagtaggctagtactttgtccttggtggctacacattggtactgcttggtctgtatagttagcaatctgatatattggttgcttggtcagcgaatgctaaaggcggttttgtggaattgtggttatgatcagattgtgagtggattgtgctaagtccatccagatgatggcacagagtactagcaatcactccagagtgaaaacctaatgattccacaacatcgctgcttgtgtgttattcctttgttgaaggtgtgatgtcaggcttcgaataacaatctagccttgtgttccaatagcagcggcagacaaaatgtcatgtatttctcgagggcgttgtttcggagtaaataactaggattaacctcttgtcttggttctatttgagtgagctgctacaagacaacatgatatgtttaggtttgtcttagtgtttttttctattttatttttctagacttttgtgcatccctagttgggtcggatttaattttatttttaacaaaactcttccccttatcttaaaaaacactaaaagctggtaacttcaaaaactcacagaaaataacatttcctcgaaatcattattctactgcactatttagagcatttgttctaagctattctgaaaattctatttataaaaataattaatttgtagacaatccatggtataatagtccgttcaaatcgggataagtccattttacacccctcaactattatatttatctaaaatacacccttaactttaaaatcgggtattagacgcccctcatctcttaaaaccatgcaatttatacccctcatccaaaccgctctggttttttcttaggaggcaatccagtcaacctaggaccacctgtcatttttcctttcttccttctctctactggagcagaacgaactacgcctcactctccggcagcttggcgcaggcgaggtcaaggttgagcggcacattcccgagcccttcctttggtatctcggcacaggtgag

SEQ ID NO: 38993 - DNA, 1125 bp, Oryza sativa
atttctctcttttctcattaagccatatcacctcaaattgtttctagccatcaaattattaatctatggtcgcaattatctccctcattatcttctctcataaagccacatcatattacttttacatttggatcatcattctatatactatttaaattatgataaaccacatcaccttatgtaagtttatatcgtcgtctagctatcttacacattatttctaactagcaatagtgcccgtgcgttgctacaggaaaaacaccgtttgatagtgtgacaccttgaaaacctcaattctgtaaaaatcaagtctaatttgatatattaacaaataggtagaaccgagtctaattttatcaattagcatggatttaggatttagttttagatttatttttcgagcctacttaagagtttatccaatggactttaatttgaaaaatgtgagccacattgtttgatcaaatttgctttcggcccaggtcttcccaagccggcccaaacttgggctagcccatctttggtgagttgagtcaattcgacggcccgcaagctgagcaactgagcgcggcccacatatgcggggacggaccgatacacttctgcggcccattgggcgcagcgtaatcaacggcggcgacggcctaatgctgggcgaatctgagccgtccaatctaatggacggctccaatcatccccgcgacgaatgaagcatcgaccggggagaggggcaaaaccctaggtcccaaatccatctctcttgatcccatttctctccggcgacgagtgagcggaacgacggtggtccggcaagctggtgcgcgcgtgcagcgacgaccactgagcggctcctgcttcgccggctaggaggcgcacccaagggcggcgcaaagccgtgccacgacgtcggcggtccggctaggtgggcgtgcaaacggcgacgagcgccaagcggcctggacctgtcggcggtaggggcgatgccaagccgacgcttcccgtcttcggcaaaggacggtggaggggtgctccaggacagcgcgcgcgcagggaacccgacacgactgcgaggaggtgaaggtgcggcgatgccgcttcccagaaagctccggtgagctcacgggc

SEQ ID NO: 38994 - DNA, 1263 bp, Oryza sativa
taaaacatcaacacaagtgagaccacatgaatcctacaaccaagtaaaggaaatgcagtactaacattaacagtttcacacgctagaatgtaaagcatactaatattaatcagtaaataaagaatgcatagttaatctttcctgaacagaaccaagtgcatctgccgtgatgtatcatcgagctaaaatcctgccgttggaaaaattaaccaaaaatccacaccgccccattccaacagataagaaaaatgtagattttgtagattgctgtagtgcaaatcccaatttacaagtaaacaacaggaaaatttagtttttttttatcatgcactcaacattttctacaggtggctgaatcatctgaaatgagtagcatgaggaattcaattgcactcctgccagatccaatgcacgacgtctaggcgttaatcctttgcaaagcacaagcaagcaagcatcaggcaggacacaggaatccagaagcagccatttgcaagaagaagagtagagcagagagggaggagggtgctagtgattccttgttccacaaccaggaggcctcagattcgaagtacctggggaacatgaagtggcctgcgccattctgccgctggtgcgggggacgccgggggcggtgaggcgcgggcgacgcgacggcgtgcatcggggcggcggatggggaagtggtgcggcgaggggggggggatggggacaccggggagggaggcgtcgtaatggcgcggggacgcggcgtgcatcggggcggccgatggggaagtggcgcggcgagggggcgatggggacgatggggagggaggagccgtagtggcgcggtggaacgacagaggtggtgaggcacgggcggcgtcagcggagaggtgaagggcgaggctgcgagggagcggcggcgccgagggcggcccaataagccaaattttaaattttcaaacttaattttaagattgattttaagatattttctacgtagtttctttttcagcattggcttttaagttacaaagaacatatatatatatatatatatatatatatatatatatatatatatagttttatatataaatttatttttattccctaataaaccgtttggcttattaccgttttgacttatattagaaaaaaagcgaactgataggggccggattttttcgcgatctagaatcgatcgggatgaaaaaagggcgaaattttggggcgcatgggcgagattacgcgggagctattccggccgtcagatct

SEQ ID NO: 38995 - DNA, 567 bp, Oryza sativa
cgtgcgcgtcgcgcctctcggtggccattcaggtgatcgcggagatcgccggtgccacgaggtgaaggggtggctcgatgaggcgattcccgctgttcagggttttcgccatcagcaccgccagttggtggccattccgggtgcgctgcagcagcggcctcttcgaacgcgttgctgaggttagtcactgattcccgtagccgttctgtccaccgtgcgagatcgtcattctgaacgggatcgtagggggtttccctcagtattgcgttgacggccctgatgtgctgggccggtgtagtcacttgattttccgcttccgcgttagcgcgcgctgacgtgccggtcccatcgatagccaatacctcgcgtggcgtacttgtcgagatgagccatagtcttcgagcaggtgcaggactgacggttcgtggggatcgatgtcgattacccccaacgaatcgatctgatatcagcgttgctccttgttccttgtcctcatccctgagggggatacgtgactgctggaccttaggaggtgacgtcttcatggcactgagaaagaccttgcag

SEQ ID NO: 38996 - DNA, 895 bp, Oryza sativa
tttaaataaaacgaatgatcaaacgttggtcgaaaagtcaacggtgtcatacattaaaatacggaggagcactacttactagattgagttttgacgtcatatgtccatattgctcattcgggcttccgtcattctcagccgccaaccatctcccccaaaccagaataattgctacctctgatatgggttgacatgttcccagcccagtttcacaaacccaacatgaaatcgaaaaagtctaatttagttccctttgtaaatgtcagatctaattcatatctttcaaccacaaacctggttatatcgatttttccaactattaaaaccgtgcaaaatgactctctcaactattttgaacgtgacgtccacatagtatcccaatcatcggagaaataaaaaatagacatgagccccacatgtaagtggtgagtgaaagaaatatgaaaattatggggtccacattgccacatgttagcactcaacacccactcattctttcttcgctgtttcgcacggacaggtgcaagaactacagtaggcaagccggcgcaggtccgctcaacactgcttccactgaggaagcggttttgtagttgagggataaaaaaataaaaatcatatccaacctatatttttgagggtgttaaattagactttattcggtatgcaattgtttgcttcaaatgggcctcactttgaaccttgtttgattttaatggcccatgattggcactgcttatgggctcagaatctgcccaatcaaaaattcataaggcttattcctgatgcattccctgagcaatacagcaaaaactagcaacaaaacaaactggatccttcgttggcagtaggaccgtaggacggtaggagtagtagaagtagttggcagttggta

SEQ ID NO: 38997 - DNA, 595 bp, Oryza sativa
cctgctgtcttgagggagcttggcatactgaaatatggctccaacttatcttgctcaattgattcgagcagtgagattgtgcctggaagtgaagaggaagtggagattcgtgcttgttctgtatatgccgtggaaaaaatgagagagctcatcaacaagaagtttggaaagcaggtaggcacatctgaatcactatcacctaatactttcataccatttcttggtagatacaaagagggggtgttgggtccatggccacactttgccacaccacattttttgtctgccgcagtttgttaggcatgtgtttggtttactgccacagttgtggtttgccacactttttaatacatatgccccacatgtcagagactaacaatttgtccaccacacttttgtggctatcacaatttgcctaacgttagttgtggtaaagtgtggccagcaacaaacacacccctagtcactgcacgctccgctacattgatgagcaatcagaaaaggttatattatatttactcttaagtattgaaaaagagcaaaattgaccattctgctttagtttacggtcaaaacattcatctagtaagagttt

SEQ ID NO: 38998 - DNA, 1189 bp, Oryza sativa
gttagcctgtggtgtgacaagccagtgtggaggtaaaaaagtaccgggttgtttgggctttggacaccaacacgtgctctatgagcatcgtgctgttacttgcgtaggggccgtcggctgttacaccgaagagcaacggccaatctgtggcaggttgagttgacttaagcgagtgatttctaatccagctttctgtagcatggagtatttctgcagcaacctagcagggtcggtccatttccaacaccatgttgaagctatgtcatggcacaatcatcgatcttaataaaacgttactccctcagtctatagcctcattgtttattagtaaaaaaataatttataagtacatattttctatgcgtgttcttagtgactaaaaacaaatattgtaaaataaacttctttaaaaaattaaaattaagttctaaattttaaattttgacttataagtataaacataaacaaaacaatgaggcttctaatgtggaatggtaggttgctatattttgaaatggagggaatataacctaaataaatattattatatcatgtttttgctataaactttgtgcttttaaatcatcaaaaaacattcaaattcattgcgtggttttcatggtttgccgggtgacaaggcaacttgggctgcatccctactccttagcttaaatagccattgaaaatgcatttcaaagcttcaaaaacaaaaagataacaaagataaaattgtgccctacggttggaaaaaattctggctccaccatggctggaggtggatccacccatgctatggcaaaatacgcttcccacattcaaaacggatgcaagtgagacagggttgcgatttgcatatacaccgtacaagtttttccttgttttagtacggagtagaaaataaactagcatgcagggtttttgatgtgggataatgtgctgctcgcttgcatccctagctactcaaaacaattgattaggccataaatcagtacacggactgatcaaatattatagattatgaagttagatagcttagaaagaagttatctgtagcgcccgttccgtcgtggcgcctagcgggaaaattatctcttaaaaaccctaattgcgaaatttatttctttgcttgttgtctagtgtccatgccatctcaagatctcaaatccccgatctatcgtcgagttcaatt

SEQ ID NO: 38999 - DNA, 837 bp, Oryza sativa
ctcaaataaccaatttacgaacccactacttatatcaagtaataactcataataattttttatgttatggttagatttatcgtatctatagatacatgtgagacgattcataaacctatttacagattaaattgataggtaacttatgaatcaatctgctaattacctatttattttacatgtaagcgagttctcataggttgatccgcttgcattcctatcgcgagtggagacggggacagccacgcgtgcacagcgtaacgtacaattacgtggtgttgccgcctaccaccgagcacacggcagcagcgagcagccgaaccgaacgcgtggttccaccgcgcgtcgccggaatttgcgtgccgacggcgaccgcccgcgggtcggtgcggtgcagcagaatccgctctcccgacggcgacgtacacacggcgtccatccctttcccaaaatctcacctggaacgcgaaaaaacaaaacgagaaaaaggccactgtagctggctggctggagctcatgtgcaacgcatgcattgtctcgccggttggttcgtgctgcactgcgtattcactcttcagatacttgtggttttttttgttcctttttcctgcgtagatcgagattaggtgaggtgagcgtgagcgattcttggagcggttcgtgagcttttctttcgacgattaggattagctcatccaacctcacctaatctcatatccttttgcacggcattttgggtcgctactttctgaaaaaaaggttgttgttgccacatactacagcttggtggtcgatctcatggcttgcttgccggatccaaactttagtggaaagaga

SEQ ID NO: 39000 - DNA, 1082 bp, Oryza sativa
tgtttctagcgaaatgtacgttctcttgaaaaatttctgaccaaaatatatgaccttgtttttcctctataaatcaaacaatttcacatgaaaattctatgcattttttcacataaattaagctctctatctctctgttatgagataggagtaatgttttttttaagaatctgtttgctcatataaactctactggcttgattctaaacttgggtgggtggtttccgttaccacatcctgttgataagcccgttaccgtgataactgacctttagggagaccttgtttcaactatcactctggttatggaattgtgtttttttaaaaatcggtttgctatgaagttaatgaatttcatgcaaactctactagcatgattctaaacttggataggcggttaccgttatcgcacctcattgataagcctggttaccgcggtaactgatgttaagggagaccttgatttaaactctctcttattacgcaattatgctttttaagaatctatgtgcttatataagcttgtgaattccatgcaaactttactagcatgattctaaacttggtccatacgttacacggtttccgttaccgtatcccgttgataagtccggttaccgcgataaccgacaataatgaagacctttgacttggatttgagctaatgagacaagcattagtagcttccaatccagatgatatccttccatgtttgtaccaacattgaccaatgatggctaccaagtgtactaatgtactgacattttcttagggccccaacaacataaaattgaccggagtagaccacctcatcagtgtgggcccagcggcgcagccaccacaaaatcccctgcgtgtcttccgagttttaaaaccgaacagccaaaaagaagaccaaagggaaaaaaaatctgaccatttcttgatttcttcttctcccttctctctctccatcactccatggaccaagagaagcatcaagccatggccggcgctgccgacgccgccgccggcggtggctctgttgcgaaggacacgggcgacgattttgagttctgtgtactgtcgtccggtgggctcgt

SEQ ID NO: 39001 - DNA, 1402 bp, Oryza sativa
acaaaagtgatcttatccttctgcctaacaattgtaacatcacagtcgcatgcccatgatgatcatccccttaagatcttgtccccttgcccatgtatctaagtgggtgtattgtgtacagacctggttatgtaggagtgttggagtcttcagaaaatgtacgaagcatggtgcatgcctgggggtatggaaaggaagtatcaccacatgcgtgcaagcatatataacctacaaaaaaacatatgcaatacatgtgtaagaatactctgcaagttactgtgccattgtccagtctgcctcagctctttttcaaggtgacttacaggatgattatttgagaaaaaagtatctaccttgcaggagcatctgaaggtgctcgtccaagtaccataaactttccaaagtcatggtctttgacaaatctattgattaccattcctttaattttgatgtaccttgaaaaaggaaaccacagggactacaagacgcgcaaacaccaggtcatagtaacctgcatatcaaggcacgtccaaaaaaatgctaagattgagacatcaatacatcataaaaatcttttgttctatttccccccaagtcaaataaaggaagaactatgtgaacttaattagtttgttgagtaatgaaaacagcaattgcttgcatggttactagaaaccccatcctaatctatcagcatggatccaatatcattactgtcaaaacttttttgttctgggagtactaaatcatcgatccattgcatccttagtgttaaaccttttcgtgaatttagtgttaaaccttttgagttgggagttcataagatcaggatatataacacacgtcaaaattttaaattgtgcaaatggtatatggtatgtaactatgtatatgtaatgtatgcaaagtttgaccactaataagacttgtctggtttagtttctgtcaaatcaagcttgtgtactgctaagtatccaaaggggccaccgccagacatacaagaagtaacattcacaggaaacaccttacactatgggaaagtacagcaatacatacgctaatcaacaatttcattgttccacattccaagcccaacagatacagcgagcaactttttttttcaaaaacattgagacggtagttactattaagtagtagcaaaatatggcaagaacaaaataatcctttttttaagagacgaagcaagaacaggatagcacattagacatatatgtacaagaaaaaaagattagagtattctgaaggcatgcatgtgtactccattatagagcactagaacaactgatgagattctccctaccaacaaggcgaaatgcccagctggtttgactgcatgccaaattgctctcactcttttccaacatgctgcatacatgacatg

SEQ ID NO: 39002 - DNA, 856 bp, Oryza sativa
acagcaagcatcctacggttccaatcatacggaggtatccacggcaatcgaatcattcagattggacagctatatatatcaaaggggtcaacgatcatggggctcactctcaagatcttggatgatgtcccagggagcttgtacttaaatttaagtatgtattagtggtatggaccactcaaattgagcgtaatccgcactggcaagaaatccaaatcttttgccagtgtagaagacaagaaccaacttaggagaagatgatgaagatggctgtagctagctgtggacggacagggagaggataagcagagggcttgggaatggatggctggatgcaaacactgggcggtggtagttggtggttggtagcccacatgacatcagcccaaaaagacagcagcccgtgtcttcttcttcttttcacaaattcctggcctgtgcttttggcaattgctctagtcccccaccgcatctcatctctcgcacctccctttcagacgtcattctcggctggctcgggtgagttttttatggcttttgggtgaagtgttggtttttttgtggtggggtcaccttctagaagcacaagtgatccaatgtcttccccacaaatggtcagtggatgcagcgtccgtttgcaactatccttgtcaatgatctactagcggctcaggcactgtttagatcctccaaaatagtaaaagttttatcattttaaagcactttttaccattttggatctaaacactagcaaaagttagcaatttgccatttgccatttgctagtccatagtagcaaattgtgccaaaaaaatgctttggatcactctctctctccaccaaaaagtgctagaat

SEQ ID NO: 39003 - DNA, 725 bp, Oryza sativa
atattccagtacaaattccaatgctagaagtgcttacattttgaaatagagagaatactattttgtctgcttgaagtcattgagtgtctttttctggaagatagttggggtggaccttaccaaggggtgaggattgtattattataatatttaatgataccgaggagtgtattttgtagctagggcaggaggaaaggctttaagtctttgagtctgtttcattaaggagagtcatgtctgaaactctgaaagcagcatcctcttccatctgtatttgtttaatggtactattgtcaaatagcagacaaatatttcaacaacacaaggtagaggtcttttttggtcatttttaatcttgtattttgaatggagtgacaagtgccatgggatgtcacggaacacaacaggtagcactcaagttgtgagagaagaacggatggtcttagttttctaacatcattatttctctatagagcacactgatcggatgttacatgttattttttttcattcacatgattgcatcacaagatacacacaccctataggaagaaacttttattgattgacttcaatatcattccggaattcatttccttgcatgaacaaaaccagggcaaacattgtgaagtttcaagtttatttatgacaactttgatactggttatgttgacacaggcaaaaatccaaaggactcaagggtcattatctttgcacattaccga

SEQ ID NO: 39004 - DNA, 752 bp, Oryza sativa
ggctccgcgtctccccggccggtcggggagcgcgcgggccgtcggatcgggatcggcaggctcggggttcgcacgcgagcctcgggtggtgcgcctcgcgttcgccccgtccgtcctgctggcttcttggggctgggcgatcgagtgtttttcgccgctgctttttggggggtttgcgggatgcgtggatccgcacattgggacgcgctgcgcgtggaatggatggatggatggagggaaccttgtgtgggggccactttgctgcggttgcgggtggctgcggctgggtagtcggtgcggtgcggagcgatggatggacggggcgcggaaattcaccgtgccaccgtatcagcttgctggtatgtgtaacgtacgtaagcatctcggctttcgtgtttacaagtctactacgcgaggtaaggtttgtaaatgaagagcttacccgacatgcaatctgcggtcaatactcatttcacaggaaacccacgtagtcttcttattactccctccgggttgataatattaggcgttttggaaaacctggtcttcaaaaagtaactttgacaactaatttctattataaaatatatagaaatttcaacaaatatatgattttattgaagtactttctaagactaatctacacattggttttcatatttttaagataaatattttagaaattattcgtagtcaaagattttaaagtttgactttacccttgttcaaaacgactaatattatcagcctgg

SEQ ID NO: 39005 - DNA, 1409 bp, Oryza sativa
tcagtgaagcacacaagctcaaccccatattttttgctattaatcgtcttcaaacacctgaaagtaggtaagtgattcaaatacatataactgaatattgaccgccaaaataaaatcactacttgacaaaatttagatataaatcaaatactttgaaaacagatacagtattgaaagaaaaaaaatacaagcactagaataggtaagcccttgcccttcagaataaaatgtatgtagtactgcagtacagtaaaacaggagctgaaattgttgtacaaaaaaaatcaagactgagtgactgacaactaaatgcaaaaagggcaattactaccttctttgatttttataaggcttattctaattttaaagagtcctcaagattaaattttgaccgttgttttctcataaaatatattctaggtatccataaaaaatattgagcaaaagagctttgaaatgtgtctatattggcttttacactaaatgtacttgtaacttgataaatccttgatcaaaatcaacaaacttgagttttgaaataaaaatacaccttataaaaatcaacagaggggatgaaagtaagagctgttcaaactgtttacacatggagacacaaaaaagaacattgagattaattgtttatactcacacagcattttgaatgtcatataggcgaattgattcatcatcacatgctgtcacgaggtaatttgtagccttgctgtggaaatccatagaactgattcttccattctgaaatacaaataagccccataagaagaatgaaatggccagtgcaagaatattttaactaagtcagtagatactaggcaacattctaatgtaaagtgaaatatgtacaaatggttcatcaaagaatatgtactgaatatacattaattttcagagtacacattgagattgctaattgacatcccgaccaacatacccgcaaggaattattgaagaaagagcagccaagaaactgacaggtgtgattgtacatgatgggtgaaaggcccgaattaaacaacagtagcatgctctacagttagactagatgaatttctttgttcttcacattctctgtttagtttcactcacactttatgaattgctaatatctcacgatatgaaatgtaaatatattaagtacaccaagagataaactgatatcttttcgattggttaacattgtttacaggacttattacatgcaaaaaaagtttccagtccaagctaccacttagctgtcagggttgatctacttagccctctgactgcgaaagtgtctagataaccccatgaactatctaataccatctaaataaacccgataaggttttacacatgccttttgccaccatagcagctaatgtgtcaatgcttcaacaaatctatactccatt

SEQ ID NO: 39006 - DNA, 4246 bp, Oryza sativa
ttatggtgtatcaaagacaagacaataaattaaaaagctcacatggtggttggatgcattattgttttttttatattggaaatggtaactggatgcgttattgttaatagacattcatgcttttctgatagaacatgcctactcacagtatcccaacaactaatcaaggcacttaatcccaagccatacaagctaacgtctactcctccgtcccaaaataatctaatctagtacttgctaggtcaattttttttagaacggagaaagtatatatcgtctcacaaatttcaatctctgaaagcatttaaagcatccattagaaccatttggcatctctgagctagcgttcatagaacttggcttggttagactaagtacatatcgtatcatgtgagatatgcatgcatcgatcggtgggcttatttatatacatgtcattaatatttatgagagttcttgcaactaacattttgggtgaatttactatcatattaattactctctcagtttctaaatacatgagagtttgtcctaaacgtcacatataaaaacgaagagactaatttgatgttagggtttgtaatttacaaaacataaagttccacgcatggcaatcatagaagaattcgatgtgtcaacgatttcgcgctctataaaatagggagaaaatcaggaagaaaataaaggtggcatggtgactcccgaacgatcatgattgtgcacgtcatatttaatttcctcctccaatttgttggatgtagagtttttaattactgtattttcatgcaaccagattaatttgcactctctcctgtcctgaatatttgactttaagaaaaacattttatcaacattttaaaacattaaaatcaatagcttctgaaatgcttcgttaaaataaaaggaaaaatcgtatacatggatttgccttgaaaagtagtactatgtattaaacttattagatttattctaatgtagaattgatggtcagagttcgaatggtttgatggaatcatgtttgcaactgtcaaatagtattaattatcagagggactataacacccccactatatattttatatatccatccaaacatatgcttttgttggtgtgtacttaagttattacaccctaaaaggtagagattccaaagaaatcaaatgcttgcatgtcattggcaccggccacttggtcaatgttttcatgttctcttatggttcactcaaaaaatcagcactaatagttccggacaaccttctctacttgtcattaaaagctgccagaaagttctgggcctcttgccaagaagttccgggctctatatttaactgctaaaattttaagtaattttcagaaacatatattcaacccttaggtgatatctccgggtttcagaaacaaggggacatcatatccccttgagagaaaaaaaaacatctacccacactggggtggatctatccgggtctagggtagttagagttcaagccataggcctagaacccaaactctatgcaaattccatttaaatatcagaaaatcttaggaatttgtagagagtttggataagatcaatagaactgagcctatgtacccacatgcctgcatgtatgtaagcaaggacttatttttttttctttttgtcttcagtcgttggctacctaattaaacttattggaggatcacatcgcaaaacctaatcgatcagctgtttataacgaatttgttcgtcaatattccacacttccacaggatagctagctaggacgaaaaaccaggagctattaggcatcaaaccagaatttgttgtacatgctttcttccctcctggacgtattcttgagatcctaattaaagacatatattctaagctacattattgtggatgaatcggcaacgtgcagtttatatttttgaccagatggtattcatgtccattgtacatctccaactttagaaagatcacgctgactgaagtagctgaaccaatatgcaaatattgtaggaaagcgatagagagtgtaaaaaaatcgtataataaatctggtcgtcggctacattattcaaacatgcatacaaattaatgtatgcatgtcaactccagccaatagtttgtcagccatatatatatataccgttaaagaaaacggcttgctcatcatcatcatcaatcgtagactttgtcatatactctctccatccctaaatatttgacaccattaactttttttaaatatgattgaccgttcgtcttattgaaaaaatttaagtaattattaattattttcctatcatttgattcattttaaatatacttttatgtatacatatagttttacatatttcataaaagtttttaaataagacgaacggtcaaacatgtttaaaaaaatcaatggcgtcaaatattttacatatagttttacatatttcataaaagtttttaaataagacgaacggtcaaacatgtttaaaaaaatcaatggcgtcaaatatttagggacggagggagtatatgttgcaagtagtattcgtttaatatatataataatccccctttaggtcacacaaaaaacattatagatttaagatcagagaatgctggccaccgttaattaattgatatatatctgcatatgccgttctacatttcatatttaatttgaatatagttatatatgctctcaagttgatctggacccatgcggcatatatacaatgttccaacacactctcagtcatcaacatgtactaaaagaatattcaagacttaccctaatcacatgcatgcatgtctctctctaatttgatactaatctgatcaccttttgcgctatctaacacgctacacattcttaacatatagctaaacaggtgcatgcacacatgaaattcaactatataagtatatatctttggccacttgaattggaagaattggaagcattgtcaccttgtggctgtacgtttatatatacacgtgttcgatcatatattccatacacggatacactgtacatgtgtgctgcacccacattcatatatataggtagatattacatatgcattgatcacacaacacacatgtatctcttgtagctttcattttcgtactaggtgcaaatcctcatctgtaaagaaaggtagcatttttaaaaagggatcgaattaaattaaaaaggttggagatcgatggagatggaatttcgtcccatgaggggatgtcgtccctcgcttcttcaagtcatggcatgttctccaaatagtaccaaatagagttcaatgtgttgtttgtgttacaactcatataaatcggatttgaacttgtattcatataaatcggatttgaacttgtatcgttcttgagtgatatattacatataaaccgatttacatacctgattaactttttaaaattaaattataaccgtttagattatatgcaagaaactatatatatgacatctcttaaggagcaaaattattttcccatcgatggatatgaaagcactcagtttgtcggtataaatagctatcagcgtcaaactatccgttaggaaagacatttgccgacacgcagtctaccaccagcatctacgagggatctacagcagtcgggaaaagtttttaccggcagaatgatccaaatatatatcactgatctgcatcatatcgtacctgatactgttcgaaaaggccggcatctatctatctatctaactgcagctgaatgatccgatgcagctgcagctggtatatatcgagcacctaaacccacttcgatctgcaacttgcagggaggcaccatattcgattataaatttcgttttattcgatcgatcgatcaagagagagcattagcacatgcaggcacgcgtaaacgtttcagatggcgacgatcgaagacgacgacgacgacgatgatgatcgatcagttgctctgctgctaatgctgatcagttgatcgatcgatctttcctatcactttcgcatgcagagaattaataaagtttagttgagatcgatcgaatcgttttatgttgttgttgttttcttcggtttggaattgattaaagtagtatcagtactaatcgatcgcctgatgtattgctggagatttttgttgttttgtcgttcatcctctgtgggagaaatttataaaggactgatcgatcacaaaagtgaaagtcggtcgtcaattaattaattaattaatccttgttgatctcacatgcagtttgagatt

SEQ ID NO: 39007 - DNA, 1040 bp, Oryza sativa
ttcacaaatagatttcaataattgtttactcctatgtttggctttattatctaagttattttgttgcctgaatgtttgctctttttgagagaatataattggttgtagtttctttgaagcaatggccagatttaatcctattattttaaagaaaagtattcaagaatactagaaagatatgagttaattaaatcttttacctttaacggcaatataatactaaaagaaatagcagaaatgtataggaagaccggccattatctttagtcccagtgaaataactgggattaaaaattcatctttactcccggttggactgaagatggacaggggccacgtcttttttcttttatttattgtttttttgctgcatgtatctattcccccatccaaatcaacacaaatcatccacaacaaaattatccacaaatcatgcacaacaaaatcatccacaatacatacacatccacaatataccaatcaatcacaaatcatccccaaatcaaaaaaaaatctcctgcaaaatatacaaatcattccctacaaataattcacaaaaaaaaatccatagtcgccctttgcgcccgccgccgccggggcggccctccgcacgcgatggccaccgctgcacggctgcatcccctcccagatccggcggaggggaggccgctgcccttcacgcctgccgccatggggggtagcccaccacaccggccgccgcttggcgcggccccgcacgccacagccgccgtcaggcgcagccccatcggctcttcgtgacttagaggcagagaggggaggagcaggaggaggaggagggagaggggtagaggaggagtggaggagggaggaggaggagatgagataaggaggggagagaggggcgctgcgcgtgaggagataagggagagagagaacgcgcgtcgtgtgggccgagagagatatttagtcccggtttgtattatcaaccaggattaaagttctatatttagtcccggctggtagcaccaactaggattaaagttcattgggggccttcc

SEQ ID NO: 39008 - DNA, 1090 bp, Oryza sativa
ctatcatttgtacgaagtgagcgtagctcaactagtttgcatggttttccttgtggtgcaactagcaccaagactcaagttctatatttaacacgggtgctcgtatttaaggttaactatatttcagtggtagacaacatactcgtcaacagcgagacgcctatgatgatttcgtcaatctcaagatataccggcatagtcttctcgagatgctcacagagataggatgtgcgtgtgtgatgacttcgtcaattttaaaatatgccggcacagttttgtggaggtgctcataggggcaaggtgtgcgtgtgtatttatagggacgagcgtacgcatattatgaatgtctgcgtttgtattgtgtttttaaaataacctatcattgttactataatcagaataaataaatatttgcactaatatataggacagagctaatggtttggaactggtatgattaaatcctggatgcatcaattaacgttatctgcaatgatagaacagaatgaattggaacatttctggtggtattaaagacattttacagtttttaagaggtaagacatctgatacctgaggtactgatgatagatatcatttttttaaaaaaaaagtacctccttctaaagaagtatacaatcacgtgctggtggatacttcctccattccaaaatatccaaaatataaagcataaccacttctaacccaaagactaagaaaataattaatatcatcttgtagtttggatcatcctaacagatacaatgcatgcatccaatagaattagagaacatgagaatggaggatttaaaaagtaataatttaatggataagaggtaatagttaatggcctacatgcatgcataccttatattatgaaacatgtaaaaaagtggttgtgtcttatattacagaatggagagagtaatttcttactatggatgaagttctcgtcatcgtgtgtgtgtgtgtaaaatgaagcatcgcccaccgtttcaccgataatcatatatgtatatatatggtcactgagagcacaaatgaacataacttaatttaatttgctactttccttgtgatatcttttttt

SEQ ID NO: 39009 - DNA, 1942 bp, Oryza sativa
atctgatcatcaggaagctgctgggctagaacaaatgtacagatgtatggctgccggccatggacgcgtccaatcttgctaaagaggggagaagctgggacacatagcccatgctcaacgtactgctgcttactacagtagtagctttaattttgatctcgcctgatctcgatggatcatctgaacaagctgtcatgcatatccatcagctaaatagctttaattagttcattattacaccagttaattatttggttaagtcagaatgaaatgtttatggtaactcgatcttctattaataaatcatatatattactctctacaggggaacatattagatttgattctaagccctgttgtagaagtgtgaagagtacagatacaacacgcatgcaagtcgttgtcctttatggctgtgtattatagaagttggagacgatataatccattttcattattaagaaaataaaagtggtctttgaaacaatggtcacgaaacattttacgaatgaagatttggcaatattatttattttaataatgtcttgtcattcgaattattcgaattatgctggacttaatttgttttagtgatgtagacgaaagttttgctaactttgaaataatttggctataatttctgatgaagtaaatgctagaaaccctttcccattatcttaaaaaaaagttacaccaattatcttttatgtctcgatgatctttatcgatactagtactagctagctaaatgcacgcaaaaattaaaagatgcgcagctagcttttgtgttcgatgatctttatctagatctcgatcgatcgaaaatgcatgcactgatgatatgcacgcaacaacaaattcccaattagtagtacccaagttcatgcatgaatgagctacatagctacatgccgacagatcgatctagcttgatttagtgttcctccttttttttaatggtgccatgaaaatgcaaagattaaggagactgaatctgatcaccttccaacccaagcacagagaaagagagggacaaagttcagaaatgaaaaaggaagtgatgtacatgtactccatgcagggaagaaagcataacaatgtcactgcaactacgctgacaccttagctgaaacaatgaactggaacgaatcgacagaacacgatagatatccatgtcaaaatactttagcacgcaagaagtcaagacgaaaaacaactgctgctttgtgattaccttaagaagtcgcctctagaagtttattttaatttgcatacaagttttgttttccaccattgaaaatagaacattttcagtcatttcggttacaggcagttgcaaatacgcctgcgcgaatgcccttttagtcacgcgtacaaattttaattaccacactacgttagatcgatccgtacttaatgacaatgaacaagcattaatagaaatatattctctccgtccctcctataaaaattcaatctaaaacgagtaacgacgttttccagtacaacgaatatctcgtcttaggttgaatttttatgggacggagggagtgtgactgtacgaggcaacaacctatatgatgtaagtgcaagcgatttgcttgccgaccatatggagaatcgacatatacacatgaaagatgatgtggccagctcgtgtggggaaggatgaccaccggttcccagttcctccttcgctcctttgtctacatcgtgaagggacaatgtctaagagcccacaatatattgatatgagattctagctagggtattagtatcttcgacttttctcatcaaatatatagttcagattctcaaatgtagctacagaatctagaaaaaaattcgtagccaaaaactaaaaaatcaggcttatctagattcttgcccaaaacttcttagaattctcgtatctcccagtgacgaaggcagcgtgggggct

SEQ ID NO: 39010 - DNA, 5889 bp, Oryza sativa
ctacgtgaaatctattaactacagggacatgaggaaaacgaacttccgagagcggagtaaactaaggctgtgttcgaatggacatcttgcctaaaactttcaatgacacgtaaaaggagaccagtcattagcacattattaattgagtattaatcatttcaaatttaaaaaataagtttgtttgatttttaagaacacttttatataaaaatcatactgtttagtttgggaaacgtgattacgataaacgaaggggtagtttagcctattgtagaattttctgcgtgaaagattgtaattggacacttttacacatcagccaaagatccaaatgcccgataaaatggacaaaacatgacaatgcatgcgaattacaaagaaacacaaaaacgatgacttagcttatacagagaaagatcgttgctattaagcctaagtaagacaagcacacatccagacgctcgcgtatatattttgattgaattctattatcgacaaaaaagaaaacttgcatattcgagatatgaaccaatcggaacgatgatagaggctgataatggagcccacatgttaaggtacacgtgccaaattaagttggtcccagataagaatatttcaagcaactaaaatcttgttattcatttccttcaaacaggtagtactaccgtgtaagtagaccaacatgtcccaacattttctagaactaagatatgcatatggtctaacttttgttcataactaacttgcactcgaaggtttcctgctagatcttttagatgtttgtgtatttatttcttgggaaaattatatatttacattttttatgctccaaattcaggtttaccctcagaaagaattaaggagctctaagccagtgttccattattgcaggaattttgtgggattagtttaattattttaggaatcaagaagaattccctcagcaaaaatattatttagtatgagcgatgcttatccatgtttttctttccaaacattggggcggaatcaaaatgtcacggattatgcaatcagctaataagtaaatgtttagttttacaagatcgtcttaaggtgaaaaaggacacagtgaacaccatgaacatgatcttgatatttccttaattaattaattaatacagcacagctagcccttatcttacggtttacactatcccgagttccaaaggctaattggaacattattgcaatcagcaagatctagctagccagctctctgcagaactgtagtgtactctactgtagatgctagatatcctatgaaacaagttccaaagacacaagtcaaacataacagtatatgactgtgtttagagttaggggtgtaaagttttgatgtgtcacttcggatatacggacacatatttaaaatattaaacgtagactaataacaaaataaattacagaatccgtctgtaaaccgcgagacgaatttattaagcctaattaatccgtcattagtaaatatttactataacaccacattatcagatcatggagcaattaggcttaaaattaaagatctgttttgcaatttacacacaatctgtgtaattagttattttttcgtttatatttaatactccatacatgtatccaaatatttgaaagtcaccgggtaaaaatttttgtcagggtatctaaacagggcctatggattgcatagattgtacccattttgcagcatatataattgactttgaatacatccaaacatttcgcatagattgtaccaccattttgcagtatatataattgactttgaattttttttttttggtttttcgctaaagcagggagcagcagctagatagctagcacaagtcccatccatttctttttgcatcgctgtttctttctttaggtaaagctaaagacgtaccaaagctgtggcgacagctcaaaggatcgtatctctggccgaatctttaattttctgctggtatatatatatgaatatatgcctagtagaatatgaggtgaaacttggttggtataagctaaggattttactaatcagtgttaaataaaggtccatatatatatatatacataatatgaggtagtacaataaacagtacttcaccgagtagtcaaccagtttaaagaaaaccctagttaactccctaaaccatatcgtccttccctccctccctgatccctcccacttggtccccctcatcccttcaattcccagctgctttcacgcacttgacgtgggacggcgacaccggtcgccgacgacaccgattcgtggctcatcccacctccataaactccccgagccaccctatttcttactcggactctaaagagccactacgcgtcgtgtgggcagtgcccggcggttaatttggcacctcatcagtctcaactcaagtcaccggttcattgctctcctccttggctctagtcctcctcccggccactcttcggtgacacagattaaaactctaggcttccctccctatgccatctgcgtcgctaccgtccaagggtcgcgagctggctcgatcaagcatgtcaacaaaccgagccaaacctcaattttaattagcttgttccccatatcaatcctagtcaaccgaatgccccttatttctaccagaaactggctagagagatgagggtgagataaggctattttgcataagcacccttatacttatcatgtttacaacgtcatccctagaaacagaattttgtcttccttgcattatattttgtaaaaaaaaacgagggccattccagataaaacaccacaggctgtcaggtagtggaagggtctgtttaaaattctatatatgcatgaggagtttttttttttcaaaataaccaggctgcgcgtggcatgtgtgtaagttgaaaccgggtacacacggttggccaaaccggacactatgcaaagcacatgcaaatgtaaacatgttattgaccgtatcaaccgtttctaggtagtctgctggcccaaacaaggagcctgcaacttatcttttcacgttgcacgtagtgcgagtagcaaaaaatagttgaaaagaacggagaaaaataaaatgggagccgctgttatcagctgatgattactgcaaaagttgatactccctccgtctcaagatataaatatttttaatatagtgtcaagttaaatatttgtaactttgactattaataaaaaaataaaaaggattaatcttataaatttaatgttactggatttatcattaaacaaactatcacaatatgcaactcttttattgaaaacatcatacttttatagatatcattgttaaaatagcatctcgaggaccgtatgtatcgaagttcaaaagtgtttacattttggaacggatattaattaaatgcatgcaatgcaacacgacataaatttgatttagatacgcgtaaatcttagcgtggttaaatacaactagctatagctagcatacacattgctattggcgtttaatttctaagtggatctaagagacacttgtcagtgctcttatgtatttatttatttatatatgttttctacagcatgatatgagctagggaatggtacacatgtgtcaatctcagatgcaagccactaaaattaatgaaaggtacgcataacttaactatagctagctagctagtccagttagtgtcaaggaagatttatttaattgttgaatgaaaagaagcaccaacactactacgcatcgggaatttattaattagtcaacattattcaaatcgcagttttatattcagcagtacgtatatacttcctttggttaaaaatatttaatgtttagcacaagatatgtatagtcaaaattttaaagtcatgacaatcaatattctcaaatacttatcagttactttaaagaaaatggtatttagatttgcctttaaaaatattgtcaggatatcataaatttattagatttcataaacttatatattctactatacattgattgctatatttgaaaaggttaaataaatcttgttctagacaataattatttatgaaaaggagagaataattaattaatttggaaaaatgctagctaaggtcaatgcggtagctagctgtaaagttatgtgaattatctcagttacgtagaccatttgatagtgaagctgcattctaattaggtatcatcttgagattctagaacaaacatagtcctttacatgctagtaattaattaaatttaaccaagatcattcaataattgcggaacagggaccacaatatgattggtcacaatcgatggtcttcaccagatcattcaacacacttaagatactctacgacattcttaagctagctaaatgcatgcattatgcatctacttgtcaagacttgcacgagccaatcacttgatccacaatgagtagttgtgtcaaaagtgttgtagtcttcctcttcaattcaggctagatcatggaatcattagagtaaggttaggccaaaggcatttgcacatttggaccgtccaaaatagttgctagctaaattacaagtgccacaatttcaatggcacaagaaaaggcccggataattctgtactcagtatttcatagataatgtagaataaaggtcgatgtgttggtaggggatatttatcttttgcagtcgaagagggaaataaaattcccatccagctgcctggatttttcacattttggtccttttgaaaaacttattttgtaagtagacccctagaaaaacttatcccaaaaatggtcctttttggggcgccagagtgcctggcgccgtcgttcaacagtacggcgccagcctctttggcgccgtccccctgccgacgtggcggggcgatgctgaggtggctagggggagtgcgccagagtggttggcgccccccctcggaaattttttatttttgttttatttgtttgatatttttttcacgcttagggacacacaagaaccaaccatagaaaaattgaactcaaatggacgtaatatgtgacatgtagaatttttcgtttcctctcctctctccgaactagtgcagaggagagagatgtgcaacttttttatttttattttatttttttgatatttttttcacacttaggaactcacaggaaccaaccatgtaaaaaataaactcaaacggacgaaatatgtggcatgtggaattttccaaagctccaccgaaaaacttctctcctcgaaaacacaatcttgcaagcggaatttggaggttttaatatcgccaaacccggcaaagcggtggagaatcggatgtaactttttctgtagatgtccgtgcatatattatttgcctgattccgtgtccgtatgagaaaattatgcctattttaatagatgacatattttgtccgtttcggtagagttttggaaaattctacatgtcacatattttgtccgtttgagtttatttttatacggttggttcctatgttctcctaagtgtgaaaaaaatatcaaaaaaatgaaataaaaataaaaaattgcatctctatgtactgtttaacttatatatgtcatttcatgtggttatattttgaattagattaagtaatttcatatagtggtagagtgcattatgtttaacatgctgatcaaagagttttactaaaggagttatggtctaattttagtgaaggtgcaaagtagactaagtggtatgctagatattttcagacttagctaggtggtagttcgagtttaaattttttttgtggttggttgtatcgtgatcctgagtgtgaaaaaacatctaaaaaaataaaataaaaatgacaccgttgcaactccatacagagaaacaggaatggaggcggcggcgccagccatgctggcgccctcctccctggggcgga

SEQ ID NO: 39011 - DNA, 3288 bp, Oryza sativa
gctagagctagctgtctcggttatatcagagttaagattccatggtctcggttataattaaaagaaatatttaggaggcttttcaatggagggagctatatattcccacccatagacgaccataaggagcttggtcagagtatatattatatatgagcattatctgaattgaaatcaacattatatgaaatccaaatataaatctaacaatacctatttatatcactaaacctataaatatgttttgactaattattgttattcgagattaatgaagtttgaattttaaaatgtgtgcatgcctttataatttgagacattgggaataattaagaaggaaagtatgagagaaaacagcaacaaacctattgtcaatgctagtcacaatgaatatccgatcgacatctcatcttccaaatttcgatgcgtgccattgatggagttggacagttcgttttcaaaagttcacacagtatgatgacgcccatctagcctcaatgtcgatcggtcgccttcttctgccatgcattttatcattttgctgtgaactatatgatgcaaagcttattaattgcttcattttaaaataaaaggtcgtacaattattgaagttcttttatactttaatatattagttgtactatgcttttatactattataatataaatgcggtatgtattgtattcagttatattttatcttatcatacgagcagctccgtcccatctatattttaaagacacgtgccagctaatgctcctgccattctgccactgcacacccgcactattcttgatatggtacgcagttcctaaaattccgtataaatataatcgtcaacattcaacaataactatagtacattgtacaagctacatgtgattgtacaagctactcatacacatgagacaagtgaaagagaaatcaaattaatgggtgtacgtacctatcagtgcaagaacgtgcgcctctagcttgatcagtgcatgtctcacagtccaccataaaaaaaaatgcccacccaacagaaggctggaaggaacgaggatgagcactcaatgagagtggatatctgctcgttatttgcatgtcactcaaatagttataaataatttttttaaaaatttttttttaaacatgtcagttaaaatttagcttctacatgtcacaacgaaaaaaaaataaatttgactttgaataactaactgtagttaaatttgtttttttttcattgcgatatgtagaaattgaattttaacttgtatgttaatttgtagagtgatatagcacatattaatacatcttcttgatgatttttaaaaaaattataaccatttaagtgacatgcaaacaacgaggaaatatcccctcaagagtttagaatagtttcccgcactcaatttcatgtctgctgcagcggctgacatgcaccggcgccggcaggccggccggcctcctctccatcatcgagatggatagcgtgaaagaactcattgctgctgccattatagttcagatagtgctatctatatagtggatgagcctttcctcagtaaggctgaacaccattagccgtgtgttcatctgttcgtacaaaccatagatatagctgctagcttaagctaggacccagcctagcttggtatattaattatctgttcaaatacacgctcttttgccaaaataatgatcggtcatcattaattatttttttaagttaaagagagagctttattaaccaaggaaaatagagattacattcctgatttagcaaatctaggatatatacttgctggagcacacaacatccactcctcacaagatctcgaattcatagccactttaacaagagtatgagctactctattagcttgtctttttatcttatgcacttgcatactttggaacattgcatcactcttatagtgaaactttcttatactcgacaatatatattaataattccacattaaccaaaagaattgtactactacaaagttttaattcctggaacctcgttttcattaaaaataaattaataaaccatggaccccaagatttcgtgtgttcaaccttcaacatgctactatctcttaattattcggcatcagattcctcatagaaaggtctgatggattcatcgtttgctgttttttacatcacaagtgaacacacgggcaatcaattatactctctccttccctaaatgtttgatgccgttgacttttctaaatatgtttgaccgttcgtcttattcaaaaacttttgtgaaatatgtaaaactatatgtatacataaaagtatatatataataaatcaaatgataggaaaaaaaataataataacttttttttaataagacaaacggtcaaacatatttaaaaaaatcaacggcgtcaaacatttagagatagagggagtagaaacaaattgataatatatattgctcatcaatatgcttcatggcacattctgcaattttctacgttactgtaaccacattcccccctctatctctctatgcttagccttgattgtgacaaggctatcatttccaccattatttcactaacccatttgttatttgcatcatgtgtggaccagctaattaaagtacgatcatcatgcgagtagctgggaagtttctgattataatgcattattagttagttagtttctatgtctgactcagagatgcaccaattaagaaactacacatgaatgcacatgcgtgttggatcaaatcatttggtacttactaccaagattagccaaattaagtggtctatttttgttacacacgctgttgtatatatatcccacttacgaccagtcaaaaagggaggcaaattcgtttgttagcacacaacgcatctagaagttagatccacggtaaatttaaaatctgtatgttaaattacatagcgtttaaaaaaattaaattatttcatttaaaatgggtataaaattatttatcaaaatattatcgacgtaatcacacatcaaaattcacaaatgttatgtaactagggatggcccagctctaaaaaaaaacatcgggaaccatgtcaaccttattctccgttcgtaattggcttaactaaatttaattagcacccattatcctagcttgcatgtatgtgctatatacccttcgtctttccatcttaaaagaatcatatataaaagctaattaattttctttatttaaatgagtatgcaaactgtgaattagtgtacacattacaatcccgtatatgagtgtagcctccacgtttaatataatt

SEQ ID NO: 39012 - DNA, 953 bp, Oryza sativa
ttatacgacggacctaacaagtatcaggcattggcaggaccgagctacgaatgctgcatcgtcaaaacaccagaatccatcaaccgaaaaaggcagatcgatttcagagattaggttgatgatgacttaaacaacatcaaaattatggtcacatcagaacaacagcttgtgatccatggcatcccaaatgtcccggtcaaacgtggcaaaagttgggtcctgctgttccttcttggacttaaccaaatgcaagtatatatgcttgctgcaatgaccactactacacagtcccagaaaaggcgattgaaacaatcttgattttgcacgcatggaaaggtgaccaactttgtcagtagaagaatctgatggaaagcacatagggcgaagaagatagggttaagcatgtctattatactagtccccattatgatcagccactaactaaacaggattttgtttaaggctacaagggcaagatgacaagtagctaggctaaggcacttcagctttttctcaaggggcaattctccttgtcattctgttacagaagactgcaagagactggctctgtggcaacaggtcttttatatttggcagagaaggattactgcaattgttttagctcaactagaggataaaagggcaaggggacaagcaactaggctaaggcatttgaacttttctagggaaattctctttagctactgaatccccatggatttttgcaaaaggacatggcaagaaacaagatgtgctagtgctgtgaaagcaatgcaagaagagtgtgcatgtgctcgagggcttggagagacactttcctatctgtggatatgccccagacatgaggagtccaaaagagtgaggacaaatgcttgggattctgagctgatgcaaaaggagttgcagatgcatagtttagttgtcagtgtgtttgtgtgtctgtgtgtttttct

SEQ ID NO: 39013 - DNA, 540 bp, Oryza sativa
ccaaattaacgtccaaacatttgatgtgacatggactaaaaagtagttttagccccatctaaacacccactaagccacctcttgtcatgctttctccttcttggaagcataacacaggtacttggggtaaggctggatctctgctcgtggacctgtggtaacaattttattggaaaaagtatacccaaggtccctcaacttgtcattggtttatcgtatacgaggtcatccgaggtccctaggtggttttgaccccggttttgatctacgtggcggctgagtcagcgtgggacccacatgggccccacctgtcagctggccacgtcatcactctctcccctcctctcctcctctctcactcttctcctgtttgggtaggcagctggggaggacgtcggtgggttgctgccttctgtggggagaggagggagaggactagggcgtcggcggccggcgacgggcgacacgacgactgcggctggcgactggcgaccccccgccgccattgctctcgtccgccattgcagaagccacaggcac

SEQ ID NO: 39014 - DNA, 1309 bp, Oryza sativa
  unsure (1)..(1309): unsure at all n locations
tttaatgcattagtccttattttcaaatagacattaaaaaggaaataatcataatcatgataaaccggccaggtaatataaacataaatcttcaattctactcaagcttctgcaccaagcgaaatgaaccaagaatcaaggaatcaatgagcaaattactcaaataagttctaaccacttgctggaacaatttcattttaaagattccaatcatcaggcattcaagtaaactaataaaaaagaatgtcaagaacaaaatggctgtagtcagaacaaagatttgcttgacgagggacttttctaaaagggaaatcaaaatgacttttaaaacaatcaattggacatggcatcagatgacatgtttgaaacacagcctatgcaggggtgcatggcccacacaagattaagctacatgcctggaatgctgcaagtgcaacctgaccacaccaactcattactgtgtcctcccagatccacagtagcgggccaaatctggatgcacaaccagtggttgtacggccatttctctagtcctgtttcactaccnatacatcntcattggncccattggacaaatggcccatctacagaacaatgctataatcctctcagtaaatacagctcccctcgtcagcgatatggtgtcttcaggggcatctaaaagcctacaagaagttctcaaaaaccaagcttgcaacagtttagatcagacagatcaattggggtcagatagtatcttcaatttttgttttctctctctgtaatatagctggacaaatcctggttgggactcttggactagttaaaactagtgctaccaagtagaggataagtgtaacggaagatttaccaggaaaatgacgggtaataagttcgattagagtagcagcagagtttccagcagacttcactagatttgcagcttcacctccaaagcttctttcaagttccataccaacctaaatgcatccaccagaataagagataatttacaaataagagattcttggatgtagccatgtagcctatgcaattgcttggcaacaaacctatggcaaaaataataactattataggagcataattagatcctatcaacaatctcaagatgattccagaaacaactagatgactaaattcatcataatagagatggtgagtgtctttatgcttttaggtgatgacactgacaaatttcaaaatgcatgaagcagaatacagggttctagagatcaacttttcaatgaaccaattaagtgcgacagaacagtacctcatgaagaagccgtactctttcctcctcaattgg

SEQ ID NO: 39015 - DNA, 1648 bp, Oryza sativa
gccgccgccgccggccgccggacctcctctcccgtctcgccccgtcggtctcctccccacccgtcggccggcggcgcgggcttacccacagcaccagagagaagagtgagaaagagaagaggaagggagaggaggggaaagagagaggaactgatgtggacaggctgacatgtggggcttacgtgggtcccacgctgactcagcgccacgtagaccaaaaccgggtcaaaaccacgaaggacctcgggtgactggttttgtatagttaagggactccgcatatctggttttgcggttcgaggacgtttttatcccgataacaagttgagggaccttcagtgtagggtttagggttgtgcgcaccggatcgtcgagagactgcacaggcccaccaaacatgggctgtgtttagaccaaagtttggatccaaacttcagtcattttctatcacatcaacctgtcatacacatacaacttttcagtcacatcatctccaatttcaaccaaaatccaaactttgcgccctgaactaaacacaaccatgaaaactatcgctaatattgatggtaaacgagggtggttttaaagttctagcaccgtgcgataaagtttggttcacgctaaaattaaaattttggttaaaattggaacgatgtgatggaaaagttagaagaggcaagcacccactcaactagatgctaaacatttcattaggtcgttctgaggtggaatcgaaccactctgttgcgattattaaggcagggtgctactgtaccagtagtagagtggtcaagtttgtatgtgtagaaaaattttgatgtgatgaaaaagttaaaagtttgaagaaaaaatttataactaaacttggccttactttattattactaatccaactaggattgtactgatatggatcggcttataacctgctaactacgagtaagttttattatacctgttcttaccaaagtcttgtgcactgtagcatgataatacttgcacgtagtaatatttggggcttttaactatagatttggcaaataactatttgccacccctatcttaatgacatatgggtccatatgtgtctatgacatatgagtctagtggtaaaaagttaattgccacatcaaaatttgataaatggttaaatatctcagtaatatttggtcgacgtgcaagtggaattgtttcggaacaggatcgatcatgcaggcaggatcagcgagaatctgtagaatctggcagccgtggcatggtgctccgtgcacgcaggcttagcctcgctagccgccctgcagccgtcggcgagtttctctgctccctgctgtgctgtctgcgagcgctgcgcccgaggccgccccgacaccgctgagtcgctgacacctcgcgacaagcctggaccaaagcaccggctgcacgagccgaacgtatccagggctttggctcgtactcgtactacgcccagtgcatcatttaactcgtcacagctttgacaggaatgttaaaaaaaaaaagctttgacagggagcaggcaacaggagtatgtgaatgttcatcgatctgcagaattcatctaacctggacaaagctcacctgttacagctagtacctcttcttgctacagtagcaatttcctgatgaactt

SEQ ID NO: 39016 - DNA, 1379 bp, Oryza sativa
acggtgtttgacgtgcaccgtggatcttattattatcaatgcctgaattcaccctagttaattatgtgttccagaattctgatacctacctccatctctcttaactcttgcagagtgtgtctgactgaaagtgatggcctcttgcatgcacgtggtataattcacatatatatcgatataagatgcatatttttttcccaagcgaaaatggggggaaaaagttggaaaaaaagatgtttaattttcagtcacctgaaaatatataaccacaaattccgttcacttttaaatggcttagattgtgcaaagattcgtacaatgcaacaaccttatcttctcccccttgcggcacgcttctccaacccatcgcgagctcatgcaagcgtacgtgtaaggccacctagatatgtctcctcggttctgccactcttctgtaagacgaacgacgatgagctatccttggcatgccttctttatcttctgtggctctcccgttcctagtcactccagatattccacgacccaaccaccaatcaagtgacttaaccctatttgattcatcttagaattattataatctgtattataaggagtaagttcaaacaaacaaatagattattatgatagattatcgtaatctataagccagattagtgtaatctaataatctcctttggaggagcctttttttgattatgggttggctaaagacccactatccttagatgcctccaataatccagagaaacaaacagctcacagcttattctatgtcatcttattataatccatcttagagtaatctaaatttaataatttatattacaataatcttaagctgaaacaaacaaggccttaggtggtgccaccgtgccttgccactcgctcgtttcgctgtcaccccttccatccctctaatgtcgagtaaacctccttccccctccatcaacccctaccataaaatcctaacctacaacaccatttgctctcgtgccgtcattgaagcacggatcttgatatatgtgcatcttatgttgagcaaatttgaccagaattttgaagattttaggcgagaagaaatcttgtgatccccccttccaaaaaaaaggaaataatataaaacccaatcgaggtgagcactatcgtttgcccttcagcttagctgtacctaaaatttaaattttaaatcttaattttagagttgattttgatgttttttcatcatagtttattttttaatgttagtttttaagtcgctaaaatacatataaaatttattttctgtccaataagaattatggtttacaatcaattttaggtaaaacaatgtaagcggtaacgatgcgatagagtattatggtttataattagttttaggt

SEQ ID NO: 39017 - DNA, 612 bp, Oryza sativa
aacaatattttttgaatagatcctcggtgccagttttgttgacattgaccactctatacatcttgactgtttgggacgtgatgatgttggctgccagtgtcattagcgctgagtgctgagatgttaagatctcgacctcgacgctacagtcatcgagtcattccaagatcaagttagtttaagaatctatttgtaaaataaatttatagaacaatcaaaatataggggaaaaaaccagcatgactgcacggacgatctgcggtccgcgacgcgagcgattaaatgcacggagtttacgtgacaccggccgtggcgggccggaggagtacgtacgcgctgcaacgcgcgtacgatctcccgtgaaccgcggggctcgtacgtacgtactcaccggccgttggagagaggcccccgcggccgcgcgcggcgcccccaccgaccggatcgtctccactcacgtttgtccaccgtaccacgcccgatcacgaacaaacggatggatggatcgatgcatctgcgcgcgcgacgagagcgagagtgaatgagctcatgtgcgcacgcatggctagctgcctgcctgccctgcatctgcgtgacactgttgagagtagt

SEQ ID NO: 39018 - DNA, 583 bp, Oryza sativa
ccggacttccaagcaggccctaacctggggaaatctctgagctatgatacaagcatatagatgtaattcttcatttgtttaagatatgccgcaaagaggagcttaaatatatccatctacgaacaactgtaatcttgaaattgataacctatgatgcaaaacataggaataggccttgctagtataacctacctgttttttgaacagaagtataacctaccttacacttcactaatagcaacaagaaaacgtagctgatggcctttgaaaatctttacctcattctgctgtacctccaaaccacgcaattctaagacaccatcgcatttgaactttgtgatcttaacactgaattttccataatccctttcttctccttcgttcgttggaagatacctgtcacactgccattttttcaaagttaataatttaataaaattttattaaagtaattagttgaaaatagtcggaaattcaagttgtatgtctacatcaatgaacttaatacattttttggtatcatccagtaatagacaaatactccctacattcctaaatgtttgacaccgttgacttttttaaa

SEQ ID NO: 39019 - DNA, 1310 bp, Oryza sativa
tgcaaatatggtgtgaagtgggtgtgcgtgtgccaactcgttgtttcttgcagctgtaaatttttgacggaatgatcattttttgctccagctgtgacaatttgggccattacgtttacacctatataaaagactggagccaaaactggatagtattgaattgtagatttgtagctaaaatgagcattttcagatggtagttacccagtttttacttatttttatagtgttgacaggagccatgatgtcaggacccgacatcttggtgggtcgtcatcccgttaagtaccagggatttttttttcttctgaccgctgatgtgtactcgctctgtcccataaaaatcaaccagtatcagatgtgacatattttagtactataaatttgtcgtattagaatatgtcatatcctattttttagacggagggagtaaatatataactagtgacattggtagcaggctgatcacacccctattggggcaaaaagaagggcaaaaagaaagttttgaaccgggagatattagcttaccatttactcaccctttactcattgcatcaggacaggcaagaattaatttcacacggttacttttctcaacgtttttaacttagcttcaatcattacttttttaatattatacatgaaaattataacaataaaaaaatattatgaaatcatgtttccagtgacaaatatagcgatatgagttctcgaatacaaattggtaccgttctgaacatactaatggttaaattttagaaatgtaccagtattatttttttttaaaaaaatgctaatagtgtgaattatatatggtcacaacttgcgcttcttcctctcctcctttcccatcctcactctaccgctgccgaaccaagccatcggcaagccgcggatggcagtggcggggcaacatcatagggcgtgagataaggggttgtggtgaaggtggagtttggcgcgacggtcggcaaagagcagcgcagtgcatcgaggcggcaatcgacgaggagtggcgcgacgcatagaggtggccatcggcaaggtggcacggccagatccggtgttcccttgactggatctggcgcctcctagccttgttcgcaacatggaggtttctcggtggcggtagtggctgccggacgagggattcccagcgccgtagtggggttggctatgacaatgaacttggtggcagcgatgagtgccggtggtattggtcggagacaggagctagtccttcgtccccctccctttatcaccgatagcgtgggctggtgacggacagcgggggggggggggggggg

SEQ ID NO: 39020 - DNA, 812 bp, Oryza sativa
tctgttgtctgttttggtggcgttagcagcgaagaatcaaaggaaaaaagaatgaggtgcttgtgaggcaatggatggatggatcgatagagattagcaagaaggagaaggataagaagttttggaaggggaggtagatgaactctagggcgggattttggatcctgttgtgaagaaggaggctttgaaagccaccgaggccggagcccccgccatgccgctccagctatccccgcagacaacccaagggggagagagagaaagagagactgatgtgtgggtcctataatatttcttttgtgaatggtaaatgggtcctacgtatttttttaattctaatgtaacataagcgccagtagaacgaaaaccaggtcaacaccactatgtagagcgtcacgttagcgaaaccatcctctaaaaccaccaaaggagttaaattgtattggttttaatagatggagggtcgaccccatattgaaaaatgcttgtaatcggccgtccgaacaagacaagaaaatcggacaccacgccgatgcttcccacgttggagtatctactgctaatttcaaccatgcatatgcatgtgtcaattttttaaattttttttctcctaaactacttatccaatctaaaatccgattgcaccgttatattcattagaattaaatctttataacaagatatcacatgattatattccgattaaagaaaaacatatgtttcaaaccattaatactttatgtttcatacgttatagcaatatgtttcagcatatgtttttattgtgtttcataaaattcacggaaatactt

SEQ ID NO: 39021 - DNA, 7250 bp, Oryza sativa
tacatgcatacatgtatgcatttttgcgagctttaaaatgatttttctcataaactaattatccaatctataatctgatcacaccggtgtattcgttgtaattaaatctttataacaagatatcatatgattatattttgataaaagaaaaacatatgtttcaatccgttaacactagttgtttcatatgtggtagcgacatgtttcaacgtgtatcttcatcatgtttcataaaatttttaaatgtctcagttgctgattttttgtttcaccatatataatttgatgtttcactcaatggtcaactaggaacatttgaccaaccaatttttgttgggacatgagacgtcagatggaaagattcctcatgattgtggagtgaaaaataaagtgcagcaacatgcacatgcacatacgctcagagctgggctgggcgtccgatatttggtaggatatcagacgtacgagccgtaccgctctcattgtagtcgtcgggccaacgaagactttcggaaaacgcttcgtcccggacgtccgatcctatgatttgcgtcggacgctcaggacacagagaatgccagccgccagggcccaccacgtctctcccacacgcgtcctcgtgctgccacgtgtccccactacatattccgttacaacaaatcacccacatattatggaaaccctctattaagggaatccgtttaatgttttgttccactaaaaatatttcacctaatgtactcacaatgtttcactgtgtatagatctaatgttgcagtgaattaaaatattcttttgcaataaatcacccacatattatggacaccctctattaagggaattcgttttattttttgtaccaccaaaaatgtttcgcctagtgtacttataatgtttcactttgtatggatcaaatgttgcaatgacttaaaacattctttcactattttctgaaacattgtttttatataaagtgaaacagcacccgatttaaacgattgaaatattttctatctacctagtgaaacaatttcgatatatttggtggaacagcgtgcaacatttaaaaataattcaataataagctaaaaaaatttcatcggaatatatccatgtgtggtcttattttaaatatttaattgtaacgaatttgatggtgtaattggatcatgatttggatacataatataatttaagagaaaaaatagtctaaaatttgttttacatgcatgtattcttgatgacatcaaatcggttgacggcgagcgcgcggatcggatggctcatggatgcgtccaatttttcgtctcgcgccgtacgtccgacacgtagtgctctcccgacatattcggtgtggttccgggatacgaattagattctgccaataattaagggactcacagtgaactattccaactacaaataggctggctggctgatacggcgtgtgccgtcagcgcgattttgggccgtgtcgctttcataggaacgctttgccttgggctgggctgcgcatgtccgctcctcgtccggttttctccttttcgtcgccgtcgccgtcgtcgtcttcctcgccgccggcgccgacgcgagttccctcggtcgggcagggcagatcgagggattgatctgaggtatttcccgtctcgatctggagacgaaccaccgtggtggtatcaattatgatcaacatcatcaatggggatgctatcgctgaagcggctcatggctaggcagcggcagcgggagtggcgccgacgtcgtcagaaggcgcaaaaaccccgcggtaagcctccttccctgttcgatcctctccgctatcgatcgatctatctatctctgccttgcacaccagactcttcactcgaaatatctccttaaactttgtgtttctgctgttcaagatccccccccccccccccccgctattttactacctcttcactcgaaattctgttaaaaccgtgtttcctgctgttaaagacctgctaatatctgtattgttcataacaatacttgatttgcagcagatggatcgattgcttctgaaagaaagggtaataattatcaatgtggtaaaagattaagatattcatggccaaactttccagaggtatgtgttgcaaactattgattacggaagatttatatcacaagtggaatatctgtatgactgctgtaactgcacaatttggtcgacctatagatagctaaaccgaaatttaagaacagaccttctactttgctattatgacattaaggagtaagtctatagctttcttgagtttaattacatggcctattaccaaccataatagaagagttcatttagaaggtccagtttttaaaaacctggagagctttgatcgccccagttaaaagcctggaaatacaaatggacaaatttcatcctgtcataatccatcttttaagggaatgtgcaaaagaattgcacacctttgtattaagtaggagaaaaaaaactacagaatcaacacgccagagcggcggaataaaccactcctttgcgccgcgccctccgtggacacggtctaccgtgggccgatccctcccggtgccactgacagtgggccccacgaggggtttattccaaaatattcctttttcccataaagaaactcttttttcctttgtccataaaatcatataatcttccaaaaatcatatctcctaaaccgtcactccgattgactccgttcaacttccatattttttcctaaaatgagatttattggatggcagtattaaatcttactgtttgagctattttattagcccttgtgttgattttctctttttcgcatatagttgccaatcccgcggtcgattcggaagctgttctcgacgaggaagaaccaccataggaccaaggcaagctacctttgaccatactatttcctatatgtgcaaaattatgttgtttgtaaatgtgcatgcttaagttacacgtgaaactgtttggcctcggtttgtgaatgcatccgatggacctaccgattagtcgcatttatactctgtaggatattgaataccatgtccttgatagctccacatattacgcgccgatgtcttaccctacaggtctggacgtcgaggtagttgggcttagccctgccactattgtattgtcgtgtgggaaacctggatttccaatcaactattcaaaacctgatgttcagtgtcggtgtgtttgcaaagtaaaactagtttgcgaaccctgatgttatgtaggctgagcctgtgtggctggttatgtattgtcgttaaggaccgattcctttgggaattccatccaagcatcttacagtgcgaccacacgggtattatgggatatccatggagaagtacttagttagtccatgattatcttgtatgccaatagtagtgggacactggggatgaggagacgaagttgtgtgtgtttgatgagatctttggccatgtgtggcccgcctctattgtggcgatacggtaccaataggtgtaggatccctagtgtaccctaagtagacgagggctgagactgcctgatgcttgtcgtgcgaccaactatgtggcatgggattttttatggactagctttggaaaggccttgcaatgaacttccggtgccgacgggtgaccggtgtcagtttcgtgtcgtgtgggtaaagcgtacgacctctgcagagtttaaactgttcgaacagccgtgcccacggttaagagcaaatatgaggttattctcttagcgtagtgttgtttgtaaatgctttgtgaaattggtttgtgggatgggaactgttctagagccagcctgtgtggcagacgacaaacctgagtggtttggaacaggtatgtgtgatctgggatgtcgattgttatcatagtgtgtgtaggagctggactgtttggttgagaggtgatttgagctaagatggctcgtggtgctttgagctgagatggctcgtggtgttttgagctgagacggctcggggagaagtacagtggagataagtgcaagagttggagaaaattttatgagaactaaggtgttggtagaagtatacatattcactaattacctgtgacacgttgttgcaaagcaacttgtggaatggattgaagcgtgagcctctttccgataactaaaacttgacacactagagttttgcaaaagaaacctttagagaaatggctggttttcgcaaatgaaaacttctgcctcctttggtagccgcacatgtcatcttccctatggcttgctgagtacgaaagtactcacccttgctctatatataattataataggctttgaagacgaagaaggaggatatgatccaaccgcagaggagtatctttaggagcacgccaactatgaagacttttagggtttcgggcctagttcccaaaccgtgcctgtggaataagttaatcacttaggtgtctagcctagcgcttagtcgttaagtcgccttccgttgttcgcttccgctctgtttttgtcacttttgttattgtctttggtgtcgtattgatgtccatctggggtctatccatgatggcaacttacgtaaggaccatcctagtaatgtaatattattagattgctttggatcaccgatgttccgtgtgtatcagcttgtgtatcctgggactggtacatgttacacaggtacagtatcgtggcctcgggacccgcgaggtttggggacgccacacattcgaaatggagatttcatggataatatatacgatgatagctataactatttggaggataatatatatgtagtttatgccttcacatcacacgcattaatttgttttctctgcagtccccagggtatcctatcctcagagtgagcattgtcggaaatttcagttcctgatggtgtcaacctatatggctaaaactttttagttcatgtcatatcggatgtttggacgttaatttggagtattaaatatatactaataaaaaaactaatttcataaatgagagctaatctgcgagacgaattttttaagcctaattaatctataattatgaaaagtttaccgtagcatcacattgtcaaatcatgacataattagacttaaaagattcgtctcgcaaattagtccaaggttatggaataggttttgtatttagtgtatgtttaaaactctaaattagtgtccaaacatccgatgtgacagggacttgaaataaatccctgtttcccaaacaggccatccaaaagaaaaaatggaactgacaaagcagctgaaggtgccatttttgtaggttgtaataataaaaaaacataaattagctataacgcatgattccagtcagttcaaagcttcaaattcatattccattcaaagctctaactcattttttttccctacaaagcagcacagtacagttaaaatttttgacatatcctattgagctgatgtcgaggactttgcttaaactccctttacgtctagctattgtcatccaatttttgtatgtaaaaatatagaataccgtctgcctcctctctccccaaaaacaagatgtattatctatccacccatttaaaccggtacatgtaatttttacctaataaacaaaattcaagcatccaatatttggctatagattggcatgaatatataaatgattatatttctatatccattcaatcatcgcctccacacattaaagaaagcccggtgcaagaaattcaagaaacttgtagactgaaacgaatggaataacagtacgcatgcatgcccattcaaaagaaatgcagagaggttgaaacaatatggaattaaacctgcagtttacatgacaaaagtacaaagacagctttgacctcacggtactgaatgtctgaatctcttcttcatctgcaccacatctttcatagtactgagatacttgtgaggaaaaatagcatatactccctccgtcccaaaataagtgcagttttagcgctattcatgttcaacgtttgactgttcgtcttatttaaaaaaagaggtatttttattgttattagataataaaacatgaatagtactttatgtgtgactaatttttttaatatttttcataaattttttaaataagacggatggtcaaagcgctaaacacggatatttatggctgcatttattttaggacggatttagtattcaggatagtacaaaagcaaactgatacagaacctaacagtcgccattattcctgggagttttagaggttacaatttatttaataatcgctggttttccaaagtcagaagaatctattagctctgtctctatttggcttgccttggtgacgtttggcagcctggctttacattcttttggcataactcacgtacatactcctaagtggaatcctggagaagaaagtaagaagattggtgaatagatgccgtggcatagaactgcatattcaaatagctgaagttaagatgccaatcaacaaatgttacttcacagaaagaaacatgaaattaggattatatcaacctgtcactctattaggaccagcattctacaatggctgcagcgacaccgatatgaattcaaatagttatcaaaagaagaactgcagagcaaacaagttccttggctgcatacatccctttttggatgtagaggtcgggtttttatctattttctaagaaaatagcaaacaagttccatgtgtgttcttttttaaggcttcccactgtaatcctatccaaaccagaacaagagttagcagtgtacaatgtaagaatttttttatgaaaacagttccactacggaattgagtaacaactaacaactacattgttagctgcatatatggagtaacaacctatggtcaaatacaaacttcattccttcaaaacagctaccatctgagaattgctccagaatccagatatttctgagtgctggccactgccaccatataaccaatgcaagcacaacaagaatttgatgaccagttggtcctaatgaatgcacactacctaaacatgctcaactctatattttcctcaaaagcatcaaacaacaaataaaaagtgttgcaaacttgcaataccaaatacattctggaaaccttcaccttcagagagaacaaaagctgatgccgactcacattgtatacctccagcggcatgcctgaacatatgatcagtagtatggtcacatctcagatgacacagtctaattaatatactccctccgttttgaaatgtttgaca

SEQ ID NO: 39022 - DNA, 2135 bp, Oryza sativa
gatgctgtccaagaaacagagacaaagatgatagagatgtcagcacttaatcatctcatatcaacacatgttctacaacaagctcagcagatccagtatttatatgaccaggtagaaaatctatttaagccagtacaccatatctgttatttgtttcttgtagattgtcttcttatgtgaacatagatgtagatattagtggaaaaaatataaatggcactcttttgctgatgtactgttaaacatgatgtgtctgtcgtttgttatcatccactgatctttttattgggatctttggaacacgcatctccctcattaaattaaactttccttttctgaataactggcatggtctctaccttgcatttccctcataataccatctaacgaaataggttataagatctttaactgatgactcaggaggtccatggtgctatatatgaaaattggcaagtgatcatgtgcctttatctgtgtgttttcattcctgatttcttattatagcacaacgtatgccttcttctcaggcagttgaagctacaaacaatgtggaccgtgggaaagctgcgacggcggggagaggtgtcagggtggcggcagctgcgacgcctcggaaggaggagtacggcggcggcggcggctgcacggctcgctgctcctgccctcgcccgtcctgtcgtcgccgctcgttctcaccgcccgccgccagccgaaggggaagaagggggagagaaagagagagaagggagagagggaggaggaagaaggaagaggactgccatgtgggcccatatttctttttttaatgactaatgggtcccacacatattttttaattctaatgccacctaagtaccgcgtcaacaccacgtggaacgaagactcggtcaatatcgccacgtagacgccacgtggcgccacatcagcaaaaccgccctccaaaaccaccgagagtcaaattgcaccggttttaggagtttaggggtcgagatatccggttttgtggtttagggttatagattagatttcgatcacagttaaaggtcacgaagtgaacttattccttttcagattcttcctaaatttcttcggcccattgacgaacgtcaccttgcattgcaagcgatttttttattttttttatttactttttaaaagatttaaaaaaaatcatatttcaaagtagtttaacagaaatatactcctctcgctctatggtagggcgagacatataaataaccttatcatagagcgagacatataaataaccctacggtacgacaatcaatgtgacgtgacaacctataagagaaaaacgatccatcgctgggaaggggcagcctacaaaatcaccatcacgcgtcccatacatcaccaaactattgctaatgtcactaaaataaatcgtccaaaaagggtgagaaggggttgtctacaaaattaccatgacatgctcctcccaccttatgtcacctcacatagcccgctctaccatagggtaatttatgccccgccctacaacaaagcggccctacaacaaagcggttgtagtatatttttacaaaactttcaaatggtatatttttataaatattttttttaaaaaaagtaaatattaaaaaatatccattgcaaggtagctagccgccgtgtagtcggtagctggcagtgaaataatggcggatataacgagcgcacgtaattacgttggaggtgatttacctcaacgctgaagatgtattccagttatataatctagcatggagatgttacacatgttaactactactccctccgtcccataactactagagaagtggatttagttcatgtttgtaacctctttatttttaagttgcaaccggtcgggattaccaactatgaataaaaataataacgtcatgtggctgtcgtcttttcttttctttttttatttttttttgctacttgcatattgatttcgcaccaaactcaacgacaaaatcatctacacaaaacatcacaaaatcatccatgaattgacatcacaaattcatctacaacttcacataaacatctaaaaatcatccacaaatttacatcacaaaatcattaacaaattcacaaaaacatcaaaaaatcatccataaatt

SEQ ID NO: 39023 - DNA, 3039 bp, Oryza sativa
ggtatcatcaaccggaattaaagatctatctttactctagattggtgttagcaaccggaattaaagctcgttaggggcctagcaactagtgaaccgggactaaagatatttttactctcggtttctactcgaaccgggactaatgtgattttacctgacccagtaaagatcacttctccaatagtaaatacagcaacccagtaccgtatgagacattttataatgcaacgaattaatccggacataactataaagtgtctcattcggtactagattgctttgatatgcatgggacggagggagtagttgataccccgtgttatataccgaagcgcgctcagcccagcttgacaacgaccccacgcgcgcgatcttgcgatcgatcggattggctcggcgacggtggatcccggacgtacgtcacgatcgacgcacgggagcgcttgcgcttgcgcgcgcgcgcgcgttcgccgtcgtccgtccctcctacttgttggacccgttcgtcgatcggtcgccgcgcgcgcgcgtctcgtgttccacctccacacgcgcgtacgcacggcgctgaatcggccttctctctctcacacatacacacagttttttaagggaagaagataacgttcaatgcatgtgttcggccggggcaccgatagtggcctgcatacacgccaacgccaaatgcgctggttgaatggctactccctccgctccacagaaaaataaaactaagaccagacatacaaaagtgagtggatattcccttaaggaatgggttgagttctcctatattctaatctaatgtttgttttttttatggagagagtacgtttttgtgctggagggcacacttcacagctgcaacccacgtatggtccttcgtttaatttgtctctagattatttatttttcctattctcctatacgaagctatatacgagcacttctctgagactactcgtgccaagtttaatagttttgtagtttactttgaaccggtgcactggtttaaccacagagaaagaaatcgaccaattaaacggagcttacttcactgcttgcttctgtgattggagaaccatatatagtacccctccgtcctaaaatgtaaggatttttcaatctcgacacagtctttaagatgctactctgatcaacaatatctataaaaataaaatttagtaacatcaattttacatgattgatctttttttttgctattaatagttaaaattgaaaatgattgacttggcactatactaaaaatgcatatattttagtacagagagagtactattctatatactaatcttaataagttcatgacaagttgacaaccggtttcgtcgtaattttattaattttggatatccctgccatgcaaatccatcattcttccacgatgtccatcaagggggatacagccgtgagatgtcaacatagtagtattcttttgaaccacgcgatcaggttaaaccaatgatgtcgtcatcatctattcgtctccacgtacgtcgaccagacgcgcgccccaatcatcagacattttcttctccacgagtcgggcattcgggttagtttaacactcttaactgccaattgcctataccttggaaaagtctactcgtgcactgtttttccatatcactccaaaaaaatcacaaaaggatataaaatctataatattattataagataattttgaaagaatgtatcacgttcaagctagaaaatcccacaataatcagaaaaaaaagagaaatattttgatcgttagactctagccgtttagattttgagtgatttaatggtgcaaattaacacatcagaatatcggggttcaactagaaaacgactatatgaaattgagaccgtacggtaagttaattagacctttatgattaggagtcagatacatccacatggagagcctgtaattaaatacatagtacaaatctgatcgtgtaggacacgttaactaactgtacaaacaaacaaaaaaaatgtcaatcaaccaatacagaaggaacaaaacaacgtaggaataccatgtatgcatgagccaagtggccaggaacattaggccgggcgtgcaaacgcagaaacaaatgtagttactgtaaagcttgtccatccatcggaaaataggcaacctcttatttagattgattttttttattatattgtatagtgattgatcaagtcgtctccgccgtattgctgcgtgcgtgcacttcgccgctaccgtagtcgtcggccgccgaccgccgctaggtcgatctccaccttgctgtggctacatcgatctccatcgtgttgctgagctgcgtgcgcgcacatcgccgtcggccgtcgtttcctgccgcgtgccatcgtgccgcagctgccacaaccggccatccgtttagtgcgcgcgcgcggccgggtcgccggcgccgcccttctgcgctcgcgcgagtttagcgattactggctaaattagttttcttccctagtactacggttttgaaggtaaaattgctttaagatgtgtgcatatgtttggtggcaagatctgaagaggggtgccagggtcggccctgacttttttttttttgcccggtgtagaaaaaaaaataaagacccccattcaccataaaaatacaagataatatttaaaaactcaatttcattaacgaattacacacaaataagtttaaaataccaaaaagaaatactctagagtatttaaaacaatttattctaacagttctagatgcaaaatcagtgatgatagcgtcaataacaatctcatccagcagcctcttctcaatccacaaagtaacctatcaggcttggtaccatagtatacatattttgtaggcccctaatttttggaggcccagtgcggtcgcactgtccgtactggcccagggccggccatgaggggtgccagtgccacacatgcttttgtggcatgaggtgccatataattttttcgattttgctatatctcactcgaaagattttttcttatctctcacttgattttctcac

SEQ ID NO: 39024 - DNA, 1212 bp, Oryza sativa
tatatatatatatatatatatatatatatatatatatatatatatatatatatatatatatatatatatagttcctccgcccggaagttgaagatgaagaaaattgaagattagggtttcgtcctggttcccagccgtcgcctgtggtattgggtgttagaccgttggttccgctgctgctgctgttgctggtgtttcctcgtctgtgtcttcggttgtattctcaggctgtcctgagctgcaacctaagttaaggtaaataagtcctctatttattttaaggatttgcaatgattcatatttgtcaccgtgggtaccagcactatgtcctgggactggtactgtgatcgcggtttcgtaggaagcggttcgcgccgtttttcctacgacacgctcttgtcaggtgccgttgtacggcggtgccggattagggtgtgacaggatgctaagaaggaacttagcagtggcgtagctaggatttagactcagtgggaacttagcagtggcgtagctaggatttagagtaaaagtggcccatctatatgtaataggtcaattaaaaacttagcagtggcgtagctgggatttagagtaaaagtggtctatctatatgtaataggtcaattattaaaaacttagcaatggcgtagctaggatttagactcagtgggaacttagcagtggcatagctaggatttagagtaaaaatggtccatctatatgtaataggtcaattaggtcaattaaaaacttagcagtggcgtagctagtatttagagtaaaagtgatccatctatatgtaataggtcaattaaagtttagtattcacagttctgattttacataaaataaataaatattatacttgcgttgatttgattttgtacaataaaaaaaatgccttcgcgtatacaacggaatgagaggtaccgataaccgagatttttcatcacaggaatcgccgcgtgatctgttcgatcggttttttaaaaaaatattgatctattccatcaatctacaaccgatcgatacgatgattttcatcccggtccctaaacttgcagatcactcgtttaggtcttcgaacttgttcagttgtgtcaccccgatccctaaacaggatggtctaaagactttatatttaaaaataattcataactttttcatgtgaactctaatgaagacaaactttatatcaaaattgtagccctc

SEQ ID NO: 39025 - DNA, 529 bp, Oryza sativa
gaattcgagctcggtacccaaaaatgaataggggccaatttggccaagaatcaaaaaacaaagtgaaggcatgcaaaaaagttgaccggcatatatcggccgtccgatctgcgatgaacggttgttaagccgacctcgagccgtcagacccacattagggcgctctctgcagtttgaatcgcatggacgctcctattattccggggtgggcctggatgcagcctcaaaagcctgcgttggtcgtgcaggccgagcaaactgccacttacaagcgggcccatctcccccttcccggccaggcctgcacgtatctcttcctcctgccattcacgtaccggcttaaccctgacacgtgggcccgacaacatcgtgccacaaagtacacatcctgattcccttttaatggggcataatgttgcgtttaaactcgatcgatcgatcgatcgaccatgtatataactatatgtgtacggactcgagtatacattcatgcatgtacatgtgcgtttttgtacggggatcctctaga

SEQ ID NO: 39026 - DNA, 601 bp, Oryza sativa
cttcgtgttggtgtcctcggatagcccggccgagctcactatcaccggtggcagcgtcgtccagtgctaggccggcgatgacgtcatcgtgacgtcataaatcctttatttaattcgtaataattttctgtattagatgaaaatcgattaaacttcggaaattcataactaaatcatcgtaactcggattcgagtggttcaagttgctaaattcatctaaaatcgagatctacatgttaaaaatatccacatatactgtttatgcttatttttgtactgttttgttgattttgtttatttgctttagtttccgacgttccggaggagagcgtttacgttgaggaaggttcagaagcgtttgcggaagcttaaggcaagtcacacagatctcaaacaaccctttgagcatgttgaacctatctaaagctaatgttttatttcaacttatgcattattttcgaatgtcatcgggtggtgagccattcccaattaattatggccgaagatgactttattttcctatgggtaataaattgattagcttggactttatatattggattggttcagctaaatgctatatatataattgcttagccat

SEQ ID NO: 39027 - DNA, 665 bp, Oryza sativa
ttattaaaatagaattttctgttgtataccacctcacatgctattaagatacatggtgatttacatagcaattatgtttctatgtgaaagaaactaaatatatatttggtcattttggtaactgttagtatctcaagcagtaccacccccattcacttccacagataatcactctccactgtgtactccatttccttctttttgatctgctctgctcgcttaacttgcatggcatgttggctaacccagaattggcaactggaggggggcagttgctgttcagtggctgacttggctgaccgtaggtacacgtatctatagtcaactaataaacggtatacatctcttcatgctaaatgtatatccttttcatgacagaatttattcaagaacgaaatgaaatctgcctatagtcagtagcaactaaatttacatttttagcatgtaattaataatgtattgtttacaggattcgctcgaatgctactctcaagttgtgggcattcgctacaatgccattttcgctgtctgttgcatttgcaaaatactatttttcatctaaataattatttcttggccctttttgcccctcactgccatctctctctctaaaccacgcactcacaactgagaccgagccgagtgagaggataaaagggcaaagg

SEQ ID NO: 39028 - DNA, 631 bp, Oryza sativa
attttcttgaacctgacactaatttcagggtacgtacattcttaatccaagccacaacaatgtctgagtggttttatatgtcgaccatctgtagtgtcttcttaactgttgattctgtctcaccaagactgaagaatgcatttctcttttacctatgtgtattcagtactatgaggtcagatatgcagatatacttcttctacttcataaatttgtggaatacagataagctagggcgaagataaatatggcaggttaaactatccgtggatataaaatatgtcatcaagccttagatttttcaagattatcaggaagtgtatatttcagactatgtatttactttattttgtttcaagtgatgcaaagccagatgatttttggtcttgtttacattgtatcggtccagaggttttgttccttagaatcatcttcaattgtatgagcaacatattccaagctgctcctttaaaggaatcactcgctttccatatatgcagtatatttttattacacgataacatcactattaattggtatctatatggaaattaaatcatgccaatatatccagtgaaaccaagtgctattggttgatagcagtaaacatgtgttttctctggcattttaa

SEQ ID NO: 39029 - DNA, 543 bp, Oryza sativa
gagctcggtaccacttagctctaacttcctttaaataattattgcaggtcctagccgatctttgctgctttgacattagagactatcttgatgagacagaagaggataccacaagcaaagctttagcccccttatccgatgatgtgaagaaaattcttgaagatatctcatcggctagaggcatcatcgttagacagcttagtggttgattgtggctcaattaggactcggctacatgaggttcaagctctgatcccagatgagctagccgatatccttactccggccgtatatctcgagcaacatcaattcaagctagagaaagccaagctgagactagctgaacgtcgggagcgcaaagatatcgaggctacaattcaagccaatcgacagcttgttcatgaagagaaggccaaacttgatcagctatctgagggcccgatcaaatctaatattgatcggctcgaaactcgtaagactgagctcttggcacaacttgaagaatgcaacgccgagctggacatggaacataaaaagctagcc

SEQ ID NO: 39030 - DNA, 621 bp, Oryza sativa
tagtcccggttggtaacaccaaccgggagtaaagatcccgggggcctgacaaggtctgacaggtctagaactgggactaaagatcatctttagtcccggtttttagtggaatcgggactattgtggatttcggccgaccgaccaaagatggtttctccaccagtgctttattcaaattattgttcctggtgactaaggctatacacaacatggagacgtgcagagtgcccttgactctccatgttggtgatgatttcacgctatgtcggtcaagtgagtgccctagccaagatccaagtgccctacagagggcacaggtgtctcggcgggactgaggctactcatcgtcgaaggcatggtcgcgaccgtgttgtgggagaggccatgatcctcctccctttgcatgatttgttggtgacattctcttcgcacgatttgtaggtggtattcccctgaaacgatttattagttatatttccctcatgtgatttgtttggtgatttggtcaaagaggacagaggcggcaacagagtaggggtaggcgactgggaggggcataccatgaggcccttgtcacaacccaagatggaccggcaagctcctcttcacccgatctacact

SEQ ID NO: 39031 - DNA, 745 bp, Oryza sativa
cccgcacgatctctactccgtgtaaccgaaccggataagtcgcgcgtaacttatccggactccacgctgttttcacgcaccggatttttcggaatgtttctaaaacaaaaacaaatccaaatttcccgcagcaaaacaaaactgcaaaaggaggctacatctgcgcaagagtgaggagcacgacgcgcctgcccttccctgccaggcgaggcgaggcgagcgcgtgtgttccccctcttctctccaccacacatgcttcaagtggctaggagggcatcctcccttttaaggaggtcctcctctcctagaataagcaaggtggtcctaaactccacatgcatgccatcccatgaggtgggcttttgtgattttccaaataattaatcttcgaatgggtcttagcccatctattaattccaacaatcccccaccaaatctcaaaatcccactgagatttgccttttcaaatgtactgtttatataccagcggttcgatggagaccgattaaggttgaacatccacctagaactccaaactacacttactcacaacttgaacaatggactacgccttgaattgcaagtctcgtgcaagcaagtttcactcaagtcttatctagtactataccgtctgtagactacccctcgggtggagcgtataagtcatactcctaggtctttagtaagcttcctagaagattcacccaaaatctccatagactgcgatcaatagtcaagcttacaa

SEQ ID NO: 39032 - DNA, 584 bp, Oryza sativa
tgagttgatatcagattctagtaataatgttggttaatgccaccgctccggtgttggttaattaaaatatattaaatggtgggttgtgggtgcatggttttgatggtcgcgcccatggcaattaaggaccggttcatgggatgccctagaagaacttatcgtacttaccacaagccattgtgggcaacggctgggcttgtagtgtagctttcctctagttgacgcatacaggcaagggtgggcatgatggagcgggacgggccctgcgacggcctctgtcgcttccggattcacctaggcacgagaggggactgcccgttgcccgctggggatgggggtgaaacctgaggtgtggtgtgcttggctagagggggttatgtgaagggtcctgtcacggcctctttccggtatgtcgtggtggcatgtcagtgcacggtaacatgtcgtggggctgtgtcttgtgggtacagttgtacacctctgatcagagtaaaactattcgaatagccgtgcccgcggttacgggcggtcaaccagattcaccgtgattagtctcacccctagttagctaatgaactggtgta

SEQ ID NO: 39033 - DNA, 554 bp, Oryza sativa
atatgttatatctgccctttatgttaagatcttgttgcatttaggtatattaggcttttgtttgatatattctatttgctttgatatcttagtatagagttgtatcggagtattagtcgatacatgctagatctatctgatcggctatgctatgaatatatataatctcattattaatatatatttcgatctaagtgatttatactgtctcggcatggcgaccgatctatcccaatcacttggttttaagtatatatcgatataaggatcatatatcgttaatatctacagccgatcgagtagatttagttctgttttatttattgatacttgccgatcgatgcatatatgacatcggctcaaagataaataatatgtcatcggcacctagccgatcggctatcgtttatggatttaaccacggtttctttgtccttgtttcttgttgattgcaggatcaaatcaactggtacgctagcatacccgaaggcgagttttggacctgcactagagttaagcagatctcccaggcctcgtgttttacgtcaacacgc

SEQ ID NO: 39034 - DNA, 581 bp, Oryza sativa
tgctgcgtatgatggtgtgtgtgcccaattaaggcatcattcgtttaatcccaatgagagagggaatggaggagatttattcacaactattatggtgtagaattattccccttcaatctccttcaatcatcttcaatgccctccaaaccgaacaaggcctaaacgcagcattcccacactaaaaagggcgcacatgtacaagcttatttttacttttatgagtaaattttataaaatcccagttttaattagggtatccgtattgtaatccctgtgaattgccattttttttcatgtaaccctatgtttgggggtaaaacgtttaaagaaactccatatttatgtaaaatgcatgtatttcatcattatatatgggaaaaagtacgaattaacccccgaactatcgcggtcatctgaattacccccctaaaccacaaaaccggacatttttcaccccgaactatacaaactggacgaattacccccctcgacccaatccacggtggttttggtctacgtgggcgtacgcgtggcagtccaatcagcattctatataaaaaatgtggggcctacatgacata

SEQ ID NO: 39035 - DNA, 595 bp, Oryza sativa
cttttaatgcatgattaattctacgtgctatcaattctagtcacattcttatatgacgtacactgataggcaacttttgggagaggaaatctccaacttcacagttagagatctgcagcttctccagaaccaagttgagatgagcctacattccataagaaataaaaaggtataatattgataatacccttttctcgactaataaataaataatcttttcctaattaaatggcgatatatctattgtctctttactaggatcaacttttggcagaggagattctaaaactcaatgaaaaggttgtacttgcatcttcttcttcttgatgaaatagctcatgatttaattggtatcagttcttacatctatacactgttcatgattgaggtaaaattacacgaatatatatcgctctatacttttaattgtaggggtctcttgttcaaaaggagaacagtgaacttcgcaagaagttcaacattgctcatcaacgcaacatagaattacacaagaaggtaaagtttctattcgatctactcgaaacatacaaaaatgtcgtagaatattattgatatataaatatacaatttacat

SEQ ID NO: 39036 - DNA, 616 bp, Oryza sativa
  unsure (1)..(616): unsure at all n locations
atgcgtgttagtgttcttgtggctagtgcacccgtgcatgcacatttcagtactatagtatttcacacaacaatggaccggcgatgcaggtgacggtggtggcggcacttaccgacgggcagagaagccagcaactagctgaaatggctcaaccagctcgatgcacaacggttttcaacatccaaccgaaggggcaatatcatctcatcaaggcacattttagcgaaaatgaaatcgaaaatggagaaaatggcaaagtagatgtggtcacgtggtccatattggcattttaacgaatcgtgtttttggatggcattttagcgaaaccgcgtttcgagaatgaccaaatgtccattttctcnnnnnnnnnnnnnnnnnnnnnnntttggtaatctaagtatcggagatgaagaaggaatcgaaacggagttcgagatagagatcgtcccggaaacagagtaaagtcagctgaaatccgaatcggctacgatcaggatcggcagagtccgagttggatagggttagccaattgagttgaatctgacaatgtagcacgatatacgttgtcgggttaggttaacgagcttcatgaggattgtcgtgcatggatagagtc

SEQ ID NO: 39037 - DNA, 558 bp, Oryza sativa
ctgcagagcgacatttctgagaatgatgctgagaaacaagtatgctcttctcttttagtacatctgaatctctgaaggtgcccttatagttaagcagaattttgtccgatagaaagaggcgcctactggccaatgtattgtatcgaactcctttaccagtgttcaatggcgttatccaccacatatcgcggttcaagatgagtagatgactaggtggaactttgttgtgttgctagacagcaactacaatcatgagttttgcaaatgaggatactgtatacgtgcagtgtacatgtgactacagtgtacaatcatcttgatatactagcctagcctgtgcgttgcaatggaaaacaaattgaatttctagcttattaaatcaattaataagcacttatttagtatagtaataccatgatttttcttattgaacaagtaggtgattttgaaatttggggggagccaatagtagacttgttgaaaagtggtataacagtataaattgtggggcccagatgttagtgatagcgggggtgtggaaatggcaccaacactact

SEQ ID NO: 39038 - DNA, 531 bp, Oryza sativa
cggcggatcgccgtcggggctaggcttacgcaggccgcggacgacggctacgaccgcggcgggggtgggcaaagccgctccgccgttgcgattgggctgggcttgggcttgggcttgggccttgggatatgagcctagtctgacccaagatcagatgtcacgagtaccgtgtttagtaggtcacaagtccaatttctgtcacatgttgcctgcctttgtagtgtgatttttagttgcactgtctaacttcagtcactatactactataaatattttttaaaccctttttgttttttatttaggcgataagtttagaaatgctatagaattttcttaaatttcacaaaagagaaaaataacatttttcacgaaaggtaatatgcttttttttaatcagcacaatctctagggtggaactttctagagtattttttatctagagaattatgctatcgtatttatcagggttatggataccacatacctaatagtagttgattaaatctcggcaggacccaccacataccatgt

SEQ ID NO: 39039 - DNA, 743 bp, Oryza sativa
tcgcaagctgggccttgtgcaaatgatcctgcgtgaaatatgcacataatttgcttccccagacgagtttctgctaactattctatagatcatttgcataacccagcagccagctgtttctctcttcttccttttttcccctctgaacatgtttacttaggtcaatttccagacattgaaatgtcttgcaagattaaaattcaaggttactccgctcattctgttttgagagagttcaaggctagaagagtaaagttagtaagcaaataaaaatgatgcaaagaatatacttgatcagagctaagaatgctctcataagtcataagtctgaactcccagaaataaaacgtcaagctcttcgaaacatgatatatgccatttaaaccttaagtgcccctttcagttttaagagtagaagccatgtcttcttggatttcttttgattttctgccaaatggatcgtctcctttctagagatctaaaatagacttgcacaaaagcatgttgtgtatgctccccaattcttctccttcaactacacaaaaacacagaagataagcttattaatgaagagcggagtgtgcctgtttaaattttacctggaactaatatgaaatgaaataagcagcaataaaacgtgacagggatttatcattgcattgaaatgctacctcacagtgttacatgattatgatgtttctttcttctttcttttccttttggcatgataaaatgaaaacagg

SEQ ID NO: 39040 - DNA, 578 bp, Oryza sativa
caagtttatgattttgaagaaattgcaagacaggtttgatcagttgaatatttccatgagtgtatataagaattctcagaagtttcaaaatggtcttgggatgtcctaagcttaccattaattatcgacatcattgaagagataatgcgatgtagaaagatgtctgattcttgaaacagtaggttcttttgtctgaagaccatgacaaactgaattaacacctagaaatccaattactacatcatctagcattggatacgaaggtacgttactcagaagattgagtggatccaccacgatggtaattgatgaaacctacgtagacaatgcttatccaaatgagtgccttccatgaattctgatcctttgcaaaataggtcctccaacggtaaaactagatttggattcttagcaaaaattagttccacatcgttgtagttcgcggcttttgctgtatatatatcgacaaagaaaatcgctataaaattatttttttaacatgatataaatgcatgtgtttatataaaacgcgcgcgcactcaccctataaataattagccgtgaatgcgagcacccat

SEQ ID NO: 39041 - DNA, 1261 bp, Oryza sativa
gttgtgtatattataataaaaatataaggtcaaatatacattttgtagattgtgtcattgtccaaaagttaattaaaatgaaaccggagggagtaagactttctagtattgcctagattcattaacatctatatgaatgtgtgcaatgctagaaagtcttataacctgaaacggatgaagtaggattcagttgtcatgttcccttatagaaacccagttgaatactacccagcactccttccgtcccattttaagtgtagccatggttttccgggcccaattttgatcgtccgtcttatttaaaattttttttaaaaatttaaaaacataagtcacaagtaaagtattgttcatgtttttatcatctcataacaacaaaaatactaattataaaaaattttcaaataagacggatgttcaaagttgggcacagaaactcatggttgcacttaaaatgggacagagggagtaatagattaggaaagtgataccggctctgactagatttttctctttgtaaccttgccaccaacacacataaggtgggcagggagacctccatggacataagcacaatcagatcattagatcaatacaacacctggcacggatgacatctgtaagtgtcatggatatcacgtacccaataataatcgattcagctcggcggtgcctaccacataccatgtcttatatgaaaaaaaacttcgtatataaaagagttccggataaggaaggatgagtagagttctatacggaaacgacaaggactacttgaattgtatccatattggtctccctggttcaagcacgcttaacctcaaagttctttagagatcggcttcctgaaaagaatttccaagccaagcacgcttaacctcatatggttatcataggtcatagacgaagaagttgcaatatgagtattgtacccccagcttttataggttatagacaacaccggcttcagccaataggatgtagggctattacctatcatatcactcatgcgcactcgggaagaatttttaggccaagcacgcttaacctcaaagttctttagagatcggcttcctgaaaagaatttccaagccaagcacgcttagcctcatatggttatcataggtcatagacgaagaagttgcaatatgagtattgtacccccagcttttataggttatagactgccctcataaaccaacacaagtcttttctgcacattttgtcctcactcgtacgcactcgggaagaattttccgat

SEQ ID NO: 39042 - DNA, 1804 bp, Oryza sativa
gaaggaatgggaattaattccccccaattaattttggaatccatggtttgatttgcgcggattagagggagcaagaaactagggttcacgggagagagaggagctgtgcgggaggaggacgatgacccaggtggtggggcccacgcaggcgcgccgtcagcgcacgcacgtgcgcggcacaggcgggagggcgccactcggcttgggcccggaggcggcccaggaggagaggagggagaggcagcccgggagggagagggagaaggagggagctgggccgaggggaaggagggagggcggcccaagagagagagagagggaaggaaaaagagagggaggagggaaggactttggccgcgggccgagagagagagggaggcttggggattatttttagctttttttttctttttaataaactttgttaattgttgttgttgcttaataaatatttttggtgctctgaaaattcaagtaaaatttgagggctccttttagaccaaggagaatttaacaaaaattctccggaccacattcgaatttttcttgtacgtattttagtgtttgccaatttcttttcgaattttaattaattctattattccttttagggaatgatttttatttcgggatgaatttatcaggacgtgacacttcccaagcggatgggagtgtgcctcgccaccagaaaatatggttacatagccacctacgaaaatgggacaagttcgcctaggagaatattcgcgtcaaaatataaattttcccactacattttttaatattaatttttaatcaataatgttgcaattaattaattatctaatacataaatacatttagccactaacaaacattttattaggatataatacatatattgcatgtgttaaaagtgacgtgaatacatacaataatatttttttttgagggaaaacactgtaggggaagcccccacagttaatatattaaattaaaagaaggaatacaaaatatttacaaaaggtttatgcactgagataaagcttgtctctccgaatcttttaatctaaagactaaaagggaaagatcaatcttaaagagagctttccaggaaacaaccgaaggtggttcattctgaaaaattaaagcgtttcgttgcttccaaatgttccatgcagcatagagaatttttttcaacaatatgtgtggatctatatgagctctttgcctgcagcagcatatcatcaaaattgagagagaggttccagacaattcccagctgcgcccaacaatatgaactgaattggcattgaaagaaaagatggaaagaagtttcccttgcttgagctggacaaaggacacatgttagatctgaattttcaggagggtagtgccttctctgcagcatatcataggtgtttagtctatcaattaggagaagccaagcaaacaccttaactttcatagaacactagaaaaaacgcgtggcaaaagccacgcatggtataatgagcttaggccattgggcctagtggggtaacaaatgagtatatacttccacttaattatgggcttattttctctgatgttttgggttttaaataaatttctatttcacattataaaatgtttggattttgaataaatttatagatggatcaatgtatgtgtattaaatgtttgaggttttgaataaatttatgtttcatagtataagatgttttgggttttaaataaatttataaatggatcaatatatgtgtttcatatatatgtcgaaatttatatgaacattagtgaatctagatgggagattgaagag

SEQ ID NO: 39043 - DNA, 570 bp, Oryza sativa
atcgcgttgccgaacggggccgaggagggttccgccgaaacccttgttccgcccaaccacggagctcacccaccggctacaaatttgcaggggagcctgacactattgcgaggggctgcgcccacagtgcgtttaccccttccatcctgtttttttccaccgggatcaattgaatcccttggggtggctctccgtccagattatacgtggaattagaggaggagccaatgtatgggatcaaggacttgccagccattggtgagttgtgtgtggagaatcaaggaattgaattgggatgaagaaggagtttgcacaagaggaggagaggaggaagaataagtgctctgagctttgatccgatcgatctacctccgaaagcgcatcacaacagactacaaacgagcgagggaattggaactaatcgggcgccgtcctggtttgccccaaccagtatggtccgccgaaccctggtgggtccaactggcgggcaatttttcctaagcccactaaatctaaactaagcacaaaagtgacaactattcatgggtttaagcatgcattagatgagat

SEQ ID NO: 39044 - DNA, 739 bp, Oryza sativa
aacaaattgatacaattttgagcctaaaaaaattgagattgcatgattttacgagagaagaaattaagaagagataatttgagccatagatctatcatccaaaggttagaaataattagggtgatgtggcttaacgagagaagagataaataatattaactacacttagtggggatgaactatataagtatatagggtttgtttttaactctttttatttatctaaaataagttcagttttagagtgatcattgcatcggagtttctaaaagtaaagaataattgtattgaaagtagataaagtgagaaatagttgtattaggatttgacaaagtatggatattatatttttaaaattttgtattgatgtttgtgagatgggtaattaacttattttgggacggatgaagtatactaatactctctccatctattttggatagtcatatttccaaacctaaaaattttctttttgataggcatatttcaatccgacaacctatcctcttaatggctttctcggatttaatgcatgtctctccattcttccacacaagattagctacatggacatcgagaaatgtaaatattaatgaatcgattgtttacgaggaatgactagtagcatgtttaaatggataataaatagaattacttatccttggtctatgtatcaagatgaaatataactatcaaaagtagatggagggagtatatcccttaggctaaggaatcagca

SEQ ID NO: 39045 - DNA, 2400 bp, Oryza sativa
tatagacatatattgttcttgataccataaatgacgtaacaccccaataataatagtagaacgaggaagaacagcagacatgcctttctagcaggatatttcatgataataagttctaacgaaataaaaatatgtcagttggctccctcaactacattgtcatttgatagttagcatcacaatatcgtcagttctttctaaatgaactctactacaataagtttcatatacgttgttgagcacctgagcatctgcaagctgtggttggtgagggagtagcgtcgcagtgtggatatatcgcacccctgacctatgcagcggtcagatctggctgaggggatggccaatgtggaggcgctgtgcaatgatgagtagaggagacggcgaccatcggtgtccactaccacaaaacacccaatacaagtcagcacagacaccacaaaacaccaaatataagtcggcactataggtgctaggagcggacatagtatagggacatgggggtacagctgtacccccaaattgttttgcaaaaaaaagggtatattacacacatgtaccaaaagtgggttaaaatgaatatatctgcacttaaattagtatttttagtccaattaatacctcaccctccctactccatcctgcacttaatcactggcacaaaccaatggccgtgacgactacaaggcaacaagaaattaataggctaaatgtgaatttaggttatagagcctttaaaattgctgaatatttcgatttatggagccctcaaagaatcaaattttctgagaaagtttgatatgttgaagcacaaaaattttattgttatgatttgcagggtttcaaattttgttttgaaatttccgaaattttggtaatttcaccccctcccccccaccagcaagctcagatatcgcctgaaatttttggttttttgcaaatttttctgaatttggtcaaaatttattcaaattcattcaaaatcagtcaaaatttcaaataatttcagtaatttctgtcaccccggcaaaaaaaaccaatttcaaaattgaaaaccctgatgatttgtccatgggcttttatattttgtacccagaatattgcaactgattctatataaaataaatcagaaatatcacttacataataaaatacttcaataattgattagttaaatgtaacatacccgaattctataccataaaaatttcttgtcaaaatagttggaagataaattttccatttttgagaagcaaaaatttttcatttttaacctaggtgtggtcaatctaactttatcataactaaaatttcaggacaaattaaaactttttcatctctaacctagctaggatatggatacaaacacaagtgtaaacatgcatactcacgtatgacatggtttatcttgagtctttcttgtgcatttggatctttgtttgtatgtcatactaggttccatgaacatgattaaaaagataacttcactaagaaaaacctaaaagcactcatgagtaataacattaaagacatgaaaataaagtcaaataatagtacctcaggtcaagagaaatctaaataaatttcttacaactacttagatgcatttataaattggaaatacacatataaagagaggtcttgctaattatctaaaataaattttatatctatgtgtgtgtgtctatatatataatatttctttgtgggaacttgaaaacattctgattacatgatctctcaatttctcattgcctttatttctgaaaatatattaatgttagtatttttgcatattttagtggtttaagattttgtgaattgattgcaattattataatatatactccctccgtcccaaaatataagcatttttagacttctacacagtctttgaccaataatatctataaaaataagatgttttaaataaaaagagttacattttatgatagtttgtttaatgataaacctagtaacatcaattttatatgattgatattttttaatttttttccattaatagtaaaatttaaaaatgtttgacttgacactatgataaaatgcttatattttgggacggggggagtttctatttgtagacagaaagagaacttagcttgtcaacccctccatttgactttttttttgtagaggtaaggttcttgtttctatccggtagtgcttaaatggacataacttctacttttctttcttaatccattatgtagcatctttggttatcaatgttgttcctgcaaagcgtttggttgccttttcttttcagttggtttgatttgttcagaagggctagagagatggtatcaggctatcagcatcagatgctaccatgtgtccatgtctgtgcagaaggcttgccacactcatgacataatgaat

SEQ ID NO: 39046 - DNA, 1325 bp, Oryza sativa
tatattcagacatttagagagatgaggaataagtgctacaacttgagtttgactgatgcccagttagccgatttggcttttcagggtatgattgctccaattagggaaaagttctcatctgaagactttgatagcttgtcgcatcttacgcagaaggtaaccttgcatgaacagaggtttgcagaggccagaaaaaactctagaaaggttaatcatgtttctccttacatatatggatcggatgatgaggatgaggatgactccgaaatagcagcagccgaatgggttagaagcaagaaagttataccatgccaatgggtaaagaattctggaaaggaggaaaggtatgactttgatgttactaaggctgataagatttttgatgtgccacttcgggagaaacagattcaacttcctgctagtcatacaatcccatcggctaaagaattgggcaagaagaggtattgcaagtggcataattctgggtctcatgctaccaatgattgcaaagtctttaggtagcagatccaggcagctattgagggaggcaaaatcaagtttgatgattctaagaggccgatgaaggttgatggcaatccttttcctgtcaatatggtgcatacagctggccgaacagccgatggaggacgtgcaaggggttttcaggtgaattcggctaaaattattaacaagtatcaaaagaaatataacaggcagtaggagaagcattatgaagaagatgataacggctttgatcctcattggggttgtgagttctttagattttgttggaatgagggtatgaggctgccatctattgaagactgtcctgagtgcggtgatattgcagaaagttcaagccgatcatataatagaggcaatcggcaaaggcaaacaagagttcttgttcatcaaaggttgggcccagtgaatcaagattggaaccaagaggacaatgaaggaaggaaaactcaatggtgtctgtcacaccccgaagttctcctcccaagccaaaaatttaatttataagcgaccctaagaaaataccggtgcaaagtaagagtaaaccctttttaatcaatgcaaataataatcggaagtggcatgtggaattttttcttgagttctacatgtcgaaattcactaacaggatttttagtggaattttcagagccctagaaataattttaaccaattaaaattgagcaagcaatattttaattccaggaaaatcattttctctttttctttttctttttcccttccccttccgaatgggccaccggcccattctcccctttttctccccctcctccctgctgggc

SEQ ID NO: 39047 - DNA, 1032 bp, Oryza sativa
taagagcccacgcttcatggggacagagcggaccttaggggcatcaagggcccatatgggtgatgtccataaaacaaaggacatccataaggacacttcagggcccgtccattaaggttgccatgccggtgcttcaggcacctacatggcctctagcatttagatgataacggcggcagagccgccattgtgttatcaaatagtgctaaggggatgtaccatctcaagcctttggacggtaacggcggcagagccgccatcatgttaccgggcgttgctgagaggatgtatcaactctagcaattgaacgataatagcggcagagccgccatcatgttatcgtgtattgctgagaggatatcgggggatggtactttaggtaccatgttcttatgcttatttcaactatagcagaagaatgatttgcatataaagatcaagatgatcagtagaaactgatttctcacatgtttacctttttagctcgatagagtctcgtgctgataacgtgttgagaaaccagtctattctattgatcagcacacaagcaaaccaaacacagagttgtggaacacagaaagtatgaacgagtggaagctttatttcttctggatttaagtacatgctacaagaggagaagcaggagaccggagatccgttgttctcgccttggaccttctgggccctatttataggcggaggagggtggaggcttacgtcgtatgccttggaccttctggcttgcgtcgtaagctggcttctcttataagcttgcttcctctgtaagctggcttgcgccataagctgccttcctctgtaagctgacttctggtgtaagctttcttctacagtaagcttcccacttataatttaattcgtccataataagatatgtttcataacactgaatacccttgtgtgtattctttgccatgatttatcctttgtatcgcctttccatcaagctcaaagtgatgcaaagacacagcaatggaaaagcatgagccagaaaagtctaatccattagacgag

SEQ ID NO: 39048 - DNA, 787 bp, Oryza sativa
acctcaaagttctttagagatcggcttcctgaaaagaatttccaagccaagcacgcttaacctcatatggttatcataggtcatagacgaagaagttgcaatatgagtattgtacccccagcttttataggttatagacaacaccggcttcagccaataggatgtagggctattacctatcatatcactcatgcgcactcgggaagaatttttaggccaagcacgcttaacctcaaagttctttagagatcggcttcctgaaaagaatttccaagccaagcacgcttagcctcatatggttatcataggtcatagacgaagaagttgcaatatgagtattgtacccccagcttttataggttatagactgccctcataaaccaacacaagtcttttctgcacattttgtcctcactcgtacgcactcgggaagaattttccgatcggtcacgcatccctaaattgctctaggccaagcacgcttaaccttagagttatttagagattggcttccggaaaagaagttgcaacttgttgatatgagtattctattaattatattaagccctaggccgggatgttacaccctggtaccgatgatccccataccatccaaatactgtagtcacgatctcaaacgtcgacagtgacgcgccaggtagggggattttggtgcttcaaggtttcgatgagatgggtttaagagatggattctccaacaacaagctactcaatgacttcaactatagggagatctaacccgaccggagtatgtcttccgacgaga

SEQ ID NO: 39049 - DNA, 1410 bp, Oryza sativa
tactatagggcgaattcgagctcggtaccctattttatgggatgggggagggagccggccacgggaggagcgggaacggcggcgggaaccacggccggcggcaatggaaggcggccggagaaaacgcgggcgttcccgacgattgggggcgccattcaaggggggaaattggggggaattgaagaggattcaatggggattaaaaccccccaattaatttggaaagaacggttggaatcggggcggatttgggggagcaatggtgctaggttttcccggagagggagaggagactgagcgggaggaggaagaagacgacggccggcctggcgcgtgggccccgcgcggccaggcgcgcgctcagcgcgcgtgtgacgcgcgtgcacgcgggagggaggggcggctcgggcaggggcgcggcttgggccgagcggccggcccaggaggagaggagggaggaggaagctgggccgagggagaggggagcccaagaaaaggagggagagaaggagagggagagaaagagagggagagaaagagagggaggagagggagacttcggccgcgggccgagagagagagagagaggaatttgggccaaacttggcccaaagggaaagagagggttatttttaggtttttctttttaataaactttgataattgtttttgttgcttaataattattttcggtgctctgaaaattcaagtaaaatttgagggctctttttagaccaaggagaatttaacaaaaattctccgggccacatttgaatttttcttgtacgtattttagtgtttgccaatttcttttcgaattttaattaattctattattccttttagaaaatgaaattttatttcggaatgaatttatcaggacgtgacattatgttttgttattaatctagattatatcatgtatctaccatctcttgtaggttttcatcatcctgcctagatctcatacttgtctttatgcttaatgctgcatcggttgagttcgatctattaagtagtatttataattatgatatctggcttattttatgatcatcgagagagatagtatcggggttttagctgatcttacctgatttagctttatgttatatatacttaattgatatgctaaatctgtcatttatattaagatcttgttgcaataaagtgtattagacttctgtttgatatattctatcagttttaatatcttaatatagagtggtatcggagtacttgtcgcgaccgagaaaaatacattttcccgaacactagtgtattaatccccgtcccaggaaaagccggtgtacaccacagaaacatgatacaaaaggcacatctttattatatcgataatatttacattattacaaaggcacttaaggcctgacaatcaaaaataaatag

SEQ ID NO: 39050 - DNA, 629 bp, Oryza sativa
gtccaaaggtaggggagaagtaggtgcttgaagcacgggcatggcaacttggacggctccgcgcccgttgccaccaaatatcgaaggcaaacgaaccttttgcacgaccctgaagtgtcgttttggatgtcctttgttttatggacatcacccatatgggcccttgatgccactaaggtcggctctgccaccatgaagcatgggctcatagtggggaagtgctacatggtttatcttactttttacagtctgcacaatatacatgaagttgtgcccatgtatactcttcgttttgttttacatgcttactttgttgtttgcatgtctttcataacatttattttattgttatgaaattgatttcctagcatgattgataatagttaatcaagcaatatgtaatcctgaagattacttaagttaatttgctaggaaagattctatgggaaactgtgtgataatcctaaagattacacacactagtaatcctgaagattacgcatgaccaattcatgtcgaccctgcacatcgtatttaccagtcgtaaataccaaattatgttgcagaacatgtcggacataacaaagaaggaattcgccgagcttgccttggatggtagtaactacctc

SEQ ID NO: 39051 - DNA, 731 bp, Oryza sativa
aatgcaagtatatacagagacgatctacctaggactttactgtaaagaatttaattgtattacaaagaatatttacaaaaatcaaatgtttgtcgcatatgcattgcaaatgttctgccatttcgagacgagctaactaggacttcactctaaacatccctttcggtgacaagatatcatctagtatgaattgtgctatctcctctctaatgatttcgaagttgatttccggaatacttgaaataaattcctgcatgttcggtgccaagttagtctacatacttgtaaatttgttgtcctatgtgtgtataaacaattgaaatacacacctcagggtcgagcaatgtcaccttttctgcgaagctcctcatgttatggcagacatggaacccgcactggtcgccaacttgttgatgtattgggaagtctttcttgtgaccaagtttcggatgcccatccttatgcctcccgcctcttgccacgtattggtcccatgcctcgttcaaggcagattcgatggccgaccaatcgtatatttctggcttgatattggagttaaggtagtgtacccggctccacttcggcgttattaccagaagaatccaatgtcgcttgcgaaattattaaattgccagttacatactacagttgtacgcgtctagtatttgagtataagtacggtacacggggactgttgattgtaggcacacataatgaagtccttgtcttga

SEQ ID NO: 39052 - DNA, 1373 bp, Oryza sativa
tatggatgctacatatctgccgacgaggcggacgcagatagaacacataggcaaccaaaacccttcctatccaagatccctaacgttatcatcagcaaactcctagattgcatccaagatcatttcgttatggaacccctatttagatacaacaaccatctttggatactgaatttatgggaatgggcttccataaagaaatgaccttgaaagcaatctaggatattggtaccgataacagatttctagaaatgttgtatttgaacgaaatgttcagtttaccaatttgtcttggtcggtaccgtgcaggcagtaacccgaccaaaccagatttggcaaccgggacacttcatattctcctaaatgccataatttcagtaacttcatttaataacagatttctatgcatatctatcccaattcccttaaaatgacccaaaatagcccatactacataagtcacatatatattatttttgtacctaaaaaaacacaagtcatgacatataataagtttggcctcagttttgctcagaaattatgcattaattaccatcatttgcaactgcccccacccccaaaagaaattatttgagtacaagtgtagagggtctgtcctaattggacctaaaatatcccaaaaattttgcaaacaactatataagaacaagtgtagagggtctgtccttatgcagtaaaaaaacagccatagaaaaacagccataaaaaacataccaaaactcacatttcccccaaaataattcaaccatcacagcccacatcaattcatccatcccattggaccaaaaatatcccaaaaatttttcaaacaactatataagaacaagtgtagagggtctgtccttatgcagtaaaaaaacagccatagaaaaacataccaaaactcacatttcctcaaaataattcaaccatcacagtccacatcaattcatccatcccattggacccaaaatatcccaaaaatgatatgttcttgagcaatcatcactggccattcatccatcatagcccacaatatttcatcatcacagtccacatctaaacaattttcccaacaccccattctcccccaaattcacaaattcatccatcacagccatataaaaaatttatcagtagctaacacatatagaaatgcacaagtcatcacagccatataaaaattcaccactaggtaacacatataaaaatgcacaactcatcacagccatataaaaattcatcactagctaacacatataaaaatgcacatgtcatcacagccatataaaaattcatcactacctaacacatataaaaatgcaaaagtcatcacagacatacaaaaattcatcactagcacaagtcatcat

SEQ ID NO: 39053 - DNA, 607 bp, Oryza sativa
gttgtgagcacatggttttgatggtcgtgctcatgacaattaaggaccggttcacgagtttcggttgtgaaacattaaccgtgccaaccacaagccagcgtgggtaacgactttaccttttgtatagcatggttcattgcggagcaccaaactaagaagtggcggagataagcccacgggggtcgctggggagtccatgccttgtatataagggggtgattattgtcacgtcccaaaacgactctaaaatacatcctctaaattatgcctagaataattaaaatccgtgtgaaagcctccaacaattaaaatgtgcaaagttaaaagtcaaataaggcttggaggatttttgtatatttcctaaaagcctaaaacgcgtaaataaattttagtggaattttcagagcacaaataataattattaagaaataaacaaagttaaaataattttataaaaagaaaaactctaaaaagtcccctttccctccctctccctcttgggccggcttggcccatctccctccccctccctctcctctccccgcggcccatccggcctctccccacgcacacgccgctgacgggcgggcccgcccgccaccctcgc

SEQ ID NO: 39054 - DNA, 2048 bp, Oryza sativa
  unsure (1)..(2048): unsure at all n locations
aaaatatcccaaaaatgatatgttcttgagcaatcatcactggccattcatccatcatagcccacaatatttcatcatcacagtccacatctaaacaattttcccaacaccccattctcccccaaattcacaaattcatccatcacagccatataaaaaatttatcagtagctaacacatatagaaatgcacaagtcatcacagccatataaaaattcaccactaggtaacacatataaaaatgcacaactcatcacagccatataaaaattcatcactagctaacacatataaaaatgcacatgtcatcacagccatataaaaattcatcactacctaacacatataaaaatgcaaaagtcatcacagacatacaaaaattcatcactagcacaagtcatcatatgtagacattagcatctaaacattgaatcaacaaataatcgcactatcacattatcaaatttaaacattatcatcgaatcatcaaatcatcacatataacatgtacacagcaaatcatcacattatgcatcatcatcggtgaggagtacctaccttgcacggtggcgggctcggtgaggaggttgacatgggctcggggacggcggtcttgggtggcgccgggcttggggacggcggtcttgggcggcgctgggctcanggacggcgtggagggaggcggtggccgttggggaggccggatcttgagcggccccggcctcggggacggcgatcttgcgcaacggcggcggtcggcaatcggtagagggaggcagcggcgtggaggaggttgacgcggtggctaggacgaggttgacggacgccgggcttagatctggagaggaggatgtgaggcggccgtggtcggtgaggctggatcttcgagggaggaggaggcgacagcgttgaggacgaggaggcggcggctgtcggtgaaacggccgcggcgtcggtcttgaggactaggcggagaggaagctggcgatggcggtcttgggcgtggaggacacggacttggagaggaggccggcggcggcggcggtcttgggcgcggaggaggcgctggaggcggtggatctaagagagtgagagtgtgagagagtgagaggcggcgtcggcggtggataaggacccgtggatgaggattgactaagtaaaccctagtcaatcctcatctctatcgggcagactactatgcctgatgcggatgacactcatccatgacggcattagtactctgcccgatacggatgatacctatccgtgacgggcgttagtactctgcccgatacggatgatatggaataatctctatcgggcatagtactaaaggcccgtcacagatgacttattaaaatatttttaagttataaaaattatttataattaacttctacccgatttaaaattgctattacatttgatttatcacatataattaacaaatgtcttatttacatagtttaaaattcctattaattttttaaattcatataattgacaattgcctttctcacatatagtttaaaattcctactagtttttttaaaatcatctaattgacaaatgcctttttcacatatagtttaaaattcatattacttttttaaattcatataattaacaattggctatctcacatatagtttaaaataagtataattttttgaaaccacataattaacaaatctatttcttcaaagagttttaactggaatggcatgaaacatatgcaattcattcattaaggctccaatacaaattaaatacatcattcacagtgatatgccttccgaatggtctgaacgaacgtaagccacttcgtcttcgggatcatcatcaaggtcgatctgagatctgacatgaagattcttattgtattctcatcttgtgtgacggtgtaaaatgtgtatccattgatatcgtacccttgccatatgttaacatcccaagatggaccccctgccaacctttgtaatatatcacttggggccatcgatcgacccgtgctacacgatccttgaaccattcgttgaagcgagcac

SEQ ID NO: 39055 - DNA, 610 bp, Oryza sativa
aataatagaattaattaaaaattcgaaaagaaattggccaaccctaaaatacgtacaagaaaaattcaaatgtggcccagagaatttttgttaaattctccttggtctaaaaggagccctcaaattttagtggaattttcagagcacgaataataattattaagaaataaacaaagttgaaaaggttttataaaaagaaaaatccctaaaagtcttcttttcccccccttcctctcttgggccggctcggcccaactctccctccctctctctcctctcccccgcggcccatcggcctcctcccccgcgcgcgcgccgctgacaggcgggcccgcccgccgccctcgctgacgggtggggcccacctgtcatcgccttcctcccgccgctcccgccgctcgcccgtgccctagcgccgccgccgccgcggattccgccgcatcccgccgtccccgcgcgccataatgaggggggaatcattccccgcgattccctctctctttccccccgtttttccctctctttctcctcggattcgtccggaatcgctcccgcaaacctcgccggcgccatcaatggcgggcgagatctccgcgcccgtttcctccct

SEQ ID NO: 39056 - DNA, 570 bp, Oryza sativa
ctattgtcctattcacaagacgaagaatcacgacttctcaagctgcaaagtccttctccgtgccatgaagacgccgcttcctaaggtccagcaatcaaaaatctctcttagggatgcagacaaggaacaaggagcgacgctgatctcggatcgattcgttggagtgattgacatcgatccccacgagccatcagtcctatacttgctcgaagactatggctcatcatcctccagtacaccacgcgtcgtatttgccattggtgggaccagcacgtccacgcacgctaatgcataggcggagaatcaagcggtcacgccggcccaacacctcggcaccatcaacgcaatactgagagaaaacacctatgatcccatacttaacgatgatctcgcatgatggacagaatgactatgggaatcggttgccaatctcagtaacgcgttcgaggaggccgctaccagagcgcaaccagaacatccgacagctggcggtgctgatggcgaaccaccggaggaacggacgtcgcctatacgagctacccctccacctcgcggcaccggcgatctccg

SEQ ID NO: 39057 - DNA, 714 bp, Oryza sativa
ttcctgcagccccaaatagtaagcagtgtgcttcaacagacacaacctcctacattttttctactagtatcctcgatcaaatttacatattctcttcgtgttttttgctgtgtcatgtgcctttggtccaaccaaggagtagtactagaatccatagctggctttataacggtgttacgccatgctgatgccaaggtacaacttgtgctgttttatttgattcttgccctttgcgttgcatggaggaccaaaaacgattccatgggaaggagaactggagaaggggaagatacagtaaacaaaagcaggtgtcggcagaccagcacactgctatatagtactccagtgcaaatagttttttttaaatcccgtgtttcattctggatcatgggggtggatccggcaccgcgtgacggcaactgccgcaatagctggacagccggcgcaaccggtgcctgcgaccggcacgtcaccgcgcgcacattgccctgtctccccactttgaccgcctaccgacgatttcgccggcgagagagtgatcacgatttggctgcaggggcgtccccgtctgcccccctattcatttttctgatttctgtggttgctgccaattgaactccggtaggttacaaacgaagccacctaacaaagcgtcatcttctagtaactgaatttttctgtgaccgagtcgaagtcgaaatcgatgtgcaatga

SEQ ID NO: 39058 - DNA, 658 bp, Oryza sativa
agtatctgctagtatgaaggcttctcacatgggaacagattttgataagttaaaattcgaccccgctgaatttagtagcaagaaggaagtatctatagtgcataatataattctttggacactcaagtttgcaaattcttgtcataatatgctttctaaaacacctagtgctagctgcaatctttatgatagcatcaaggagctgattgagtgtgtgcagcagaatacttctctgtattgtagcacatacgaatctttccatctggtaatgtgtgcttgtatttcatggtatgcttgtaaaactcgagatgtcaatcaagaatcaggggattcaaaagaacaacctgacatattctttagtccttctgtttggttaactcaggagttgtgtgcaattcggataacaaaaatgcttttcagaaaccagaggtattgggatgcctatagatctgctatgtactgttgtcgtgaaggcctctggtttgcggcgtcgtctgtcttcagaaaacttgcagatgattttgggtcaggctctttcagtttttggttcaaatcattgctgcttatttcagctggagagattgagatgaagctactgcttttcccttcagctatcattaagttggtcaatgagcttaaaacagattgcgatcttcat

SEQ ID NO: 39059 - DNA, 604 bp, Oryza sativa
catatgaacattttataccaacaatgcacttttgtagatttctatggattattgactcctgtttcttgtattttattgtatgtgtaagtaactaagtatataatattgtgagtgtgaaaaagtttgtgcaaagcatgaatgcccttatagtgatcagtgagtccacaactacagcctgtttctactgtttttccctttttgtaagaaagccatgtcatggtgtcaatgtccaaaaatctcacgccagcttttaactacatgccatggttttttgggacataaggagttgtttgttcgaaagctgcaaacaaacaattccaggtttcaccgattttggcatttttaggttccttgctgaattatcttgtatgaaatgaaatgactttctcccttctgttgtgcagttgggttggttgccagtagagcatgttgcatcatgtgattgcagggaaggagttgaaatgctatttccattcacatccccaaattccaaatgtcccaaactggagtgttgatggaataatttctcatgcaaaggtcaaccatacaaagccaacggtaagttatatatagttgcttttttcatactcccctcattccataa

SEQ ID NO: 39060 - DNA, 673 bp, Oryza sativa
tagaacatcttgattcactctttgctgcaaactccctggtctactgtcgtgtttatgcaaaagcatttgcattagctccgcggcagcttgtgaagtcatgcacagtccctattcatgtagcatccaaacacctcattcccaagtcccttagccgctcgtacggtcgccggcggcgaccaaatgccaccgcctcactcgagctccgccaccgcacgtcgccggctgccatagctcatttcttggccaatccgagccgtccaccacatccccatactacactcgttcattcccagttgcccattcctcctacctcgccgccgttcgccggaacccgttgaatttcgtccgccgtccaattgcccggcgatctcctgtcttggtcaaagctacatggcaggactagtcgtccgccgtgggcaaggaccttcagcggcttggcgaagaggagaagggccacccttggtcgctggagggggaggagatgtcgatcgcgctggaaatgatggaggcggagagggagatggacaagcgacgaagtcaacgatggatggggtcaggcgcttgacaatggcgaaggtttagagttactgaataataatttacgataatacccttatatgaattattatctatggacaaatatacccctccacgtttctactaccactatgag

SEQ ID NO: 39061 - DNA, 901 bp, Oryza sativa
  unsure (1)..(901): unsure at all n locations
ctctaataaaatataatacatacacccaaaaatattagattagagatttntaaggtgtatgatttaaaaatgaattaaaaggaagaggaatgtgctagttaactacatatatgcatgcgtgttttgtattaatattaaaaacaaatggttacgtgtcttactcttgtaccctctccgtcaaaaaatccaatcatacgtgtacccaggttcgtagctagagtttgctcttttttttttttgacagagtagtataaattaagatcgagtacctaggaagcttctatcttctgatcattaatgcagggggcatattgatcgatataggagggtttcacgtacgctaggtataaaatgtgcgtgtgcagtagtacatgccacatgtgatagtcccaaaatataagggattttgggtgaatgtcaaatcccttatatttttggatgaagagagtgtatacttagctatagctagtagaatatgtgtatatacaccaagctagattaccgttttatctagctaattgggatgagattcgtgtgcgctaatatatcctaatataacattgatgtttgatgaaacacagtacaataccttttttttgacatgaaatatattcaaatgacttatgatatgaaacggagggagtactacctatacattatatattagacatttatatgttagcacctcagaatcggagataaccctatactacaattagataatggaggtattccgatccctaaaaaaaattaaatgattggaggatcgatagagattattccggacctcagattgtacgtcaactcgatcctaggacctaccatgcatcgatatcagggtacgcgcttggaatatgatctcttcttttttactagctactatgcatacctttctttctgt

SEQ ID NO: 39062 - DNA, 1073 bp, Oryza sativa
cgtttgggtactgatgctacttactttgtaacgagagttgaattcatctgccatgcatgttggtttcaaggaataaactggcgttgacatgcatgatttttgtggtctatatatatcacatatatatcagattactcgatgatctaactagttagtttactgctgtacctgtacatatggatttaagaatcagagtggtgttggctatatattaagagttatgcttgcatactgatactgatgtacatatacgtaagcacagaaaattcctttgttcatgtaaaaaaatatcagctctcaatatagacatgtgttgtatttatacaattaatgtgcagtagtgcacctgtacctattggcatttcaagtttcatttacatattacggtgtatatatatagctactaaattaaatacaaattaattaacagctatttaattattgcatatcaatttaatgttatgcatatagtgtgctattttttgacaagtttgattacagttttaggctagactattttcaggaggtacatacgttttttttttaccaggggaacaattaatgagcattattagtattgttggatatatactattacattttagaaatacaaatattagtatattctaatttatcactattgcatatatagggagatctctgtgcatcgtcatactattccacagaatatattttttttgtgtgttggggggcactaacaaatatcacagtataattaacacaccctgctatttatactttaataccgtgcatgcatgttattgtcaatttatttacattaagttgcatgccctacatagaacataaggctttgtttaatttaacaaaaatgactcctttcaaaaaaaatttaacaaaaatgatgatttttggagtacttgaggattaaactgaacgaatccgaccccagcatgtacgttgcacacacatatatatggaatgaaaccaaaattgcattgttttttactgctccttccgtttcataatgtaagttattctagcatttcctatatttatattgatgttaatgaatctaaacatcaatatgtatg

SEQ ID NO: 39063 - DNA, 585 bp, Oryza sativa
gaatagatcggtttaaaaaggccggaaaaaaaaacaaaagacttagcgtgtgagcatacaaaactctttcgcgtgcaacacaaatcgggaaaaaaatacccggtgccaaaaaaaccaaacggacttttttttactgggagactttttttcctttttctacgggagtcggacaatatttttttacgatgagatgttttttttacttacaacagaagctttttatttttatcttgttgagtcggactttttatttctttttttacctttttgagttggacttttttatgatgagatgttttttttttacttacatcagaagctttttttatcgcttgttgagtcggactttttatttttttttacctttttgagtcggacttttctttctttcttttcaacagacgacagaaatttcttatttttagtagagatatagattaaaatagaaatataaaattaaaaccgatttaaacacagatgacgtaccaaaataccgacaaaaacatctttaatttttataatagtagagaagattagagacatagagatcagatttttttttccttttcttttggcttttttgga

SEQ ID NO: 39064 - DNA, 1271 bp, Oryza sativa
tacaaaagtcttcatcatgactgccacacgggcccacctgtcagccaccgcagctagtgtaagggggctcatgaggtaaacatcgagggcatgccatgttgcgcaccttttttctctagggcgacatggcgcatgaaggacaacatgcaccgtcacgtctctcacatcgctggtgagttgtgcacagggatttgtaccgccctgcaactaatatggagtgacggtataaagaaacccataggacgtgtcaaatccccttaatgggagtaggatggatctttctggggaaagcctaggtcctgcaagtgtcctcggggccctgattagacctcgcggtctcgaggcgttgaaggcttgtcccagggctaccgctgtgctcgggtcaccccgtgtgcttggagccacaaatgtcatcgtgtgtggacttcttttcatatcgggggaattaacttagtggactcttcagcaagcttcccgaatatatcgttgttgaagtagttcgaggtgtatctgcttcagttgcccaaagatgtatatcttgtacatctccatgctcttcttcagcaccttaaagatacagatcttgtacgtctcgataaggctcgcattgccctaggcatttgagggaacgggaaccctcgttcccacttccccgatagatcatattgaaataagtccacattagttacaacttacaaactctaaatgtaaaaaaaaaagtattttgtgaaacacggtacggacacgtacactcatatacacatgcgtacactcacccttctaaatatacacacggtccatataagcacctcctctgtggattggtcaacacatcttaaaattaacaaagtcatcgctagtgccttgttattgacgggtgcttaatttgtataccgttgaaagaataaatattcgagtcatgccaagtataaaatttaaacctaaatttaactaaatctattatatctataaagtaatagaaaaagaagcctccacgttcgctctcacagtctagaaatccatgttaatcggaagaaaataagaaaaaaaataaaaatagaagggtattaggattaggttttgtgtaaacggaaaaaaaacaaagagtaaacggacaaaaaaaaaattccaatcggacaagaaagataaaaagtgaaaacggacaagagaaatagaaattccaatatttgtctctatctctactatttaaaaagctatttaaaaagcaaaagaagtttccgttgtccgtgtaaagaaaagggcgaaaaaaa

SEQ ID NO: 39065 - DNA, 681 bp, Oryza sativa
cgccagagttctacaagaacaagaaggcaacacttttttccaccacaaaggatctgaaattagggtcaaatatgttgcttttgaatgcaactattgtgtttctgcagtgaagggatgtcaatcattgacagcaaaatttccctaaccaagttattacagaaaattatcctagtcatgatttgttatatgagattcaggcattcagcaagcttaattccaagtctgcagggtagaactttttttgttcctacgacactaaagcacttaatacagctgagctaccctgaagttatggttaaagaaatgtgattaagtattgtctttctgctttagggagtgtttaaatccaggggtgtaaagttttggcatgtcacatcggatatggatattatataggatgtcgcatgaggtgttcgggcactaataaaaaaactaattacagaatccgttagtaaaccgcgagacgaatttattaagcctaattaatccatcattagcaaatgtttactgtagcaccacactgtcaaatcatggagcaattaggcttgaaagattcgtctcgcaaattagtcgcaatctgtgtaattagttatttttttagcctatatctaatacttcatgcaggtgttcaaacattcgatgtgacagggtgtaaaattttggggtgggatctaaacaggg

SEQ ID NO: 39066 - DNA, 707 bp, Oryza sativa
aatagaatttcccattctcatattttactacatggactatgcagtagcaaaacaaataaaaacaacgtatacagttgtactacttttcttcaaaaaaagcaccttgagttccatttcttgtgctacagtattctgttagtggtactctggtacattcagtttcatagctttatccattcatattacaaagtgatcactccactcttgaatatcatattgcaactagaaaaccaccagtccagacttgttaaaaaaaagtcacatctgttcgtttcagcaacaattatactgcgattctccacatcccaatcctttatttattcaatggtggatcattgcttcttttcttttcgaacaagccgtacagttttattcttattttatttttattttttagatgcagttcccttcagttcctgcgaaacaaagacgaaggccaagaaacttacagcaagtgaaggacaaggcgacggcaagcgcgctggagaccgcggccttccatggcaccgctcttccgaggtcaccggcccaagaagcagcagcaaccctgcaagcggcggcggcggcgggcggcggagtccgacaagcggagcagcggccgccgagggaagaagcaaatattggtcttggacgagcagataatggcgacgacgcaaatgcggatgctccggaaggtgttatccgaagggcgtggcaaggaaggagaa

SEQ ID NO: 39067 - DNA, 957 bp, Oryza sativa
gcactaaagaaaagaataaaaaaataaaaagaatgatgaaaacaggaagtacatatgtggtgtgctccaacattcaaaacattagtcacactgtcacagtaccctaaacagattgtgctgatacagtcaaaagacctttcagtgttagcatattacatcaaagcttcactataatagggtaaacaccagtagaataaaacaagacaaccttcagagtaacaggacaaaccttccaaaagacaatctacatagtactagtactaccatctgacttcttaattcaagtacaataaaacagaccttgctaaatccttgtactagagaatggctttctgcccactctaagcttggttctcctagtgcaaaaggatgttttcgcagtagtaaaagtggagccgacgctctgcatgttagcgcccatctgcaaatgactcataaaagagtggaacatacggtagatatggatccgaggagtcatgtccaagattgcgtataacacgcacttccttgcgatccatttcatatgccatcaacgttttgtcccatccataaacaaagaatatcaaattacattctggatgaaccacaattatttggtagtcaaatccaaactgatatttcttccctccaaacagcctcaaggagctaacggtgtgctttaatatccaattatctgtatcataatcttcaagaatccaaattgacagtttgaagatgtcatctggatcaacattaaaagcacataggcgaccctgagtttgatgaattatgccagtatcaccttcaggctccggcatagcaatggtcctccatttcttcccctccatgtcaaccaccgcaatctcagcagcacacgtagcagaatgcagaaaaccattaaggaaaacacttctcggattggcccaatgccttagaaacacatcatcgccccatccactcacatgaagagtccacaac

SEQ ID NO: 39068 - DNA, 539 bp, Oryza sativa
catcgtcgaggtcctcgccgcctccccgtccgctccgtgtgccagttcaagtgcgtgagcaagtcctggctgaaagaccaagaacagctatagagggggtgtgaatatagcaattcaaatcttacccccgaaaatactcatcaagccggatttctcaaaaatccttactagaaccgcggctattagagaagccggatctagaaaagaagagagaaagaaattcccgaaactagaagagaaagagaaaaggaatttcccaaactagaagagaggtgaggaggagataacaaaactcatcatcgcaaagtttaaattgcaagtagaatttaaattgcggaatttaaatgaacaaggcaaaaacgaaatccttcaaatcatttcattcaaaggtgatgcaaaataaccgctcaactaagagcaaacatattccttcagaggaacattaacacaaacttaaaatctctcggacaaacacactccaaactaatcctaatacaaaagcctctcgggcaaacacactccaaactcacaccgaaact

SEQ ID NO: 39069 - DNA, 652 bp, Oryza sativa
gttcccgctgctgtagaagatgaaatggaatgggatcaaaaccaaagttgttcgtcatggtgagatgagaatggaacgagtatgagttagagatgaagagggctcgacgacggttggcgatgtccctcttcttggcggccggcgacgaaagagaggtggagagggagagctggagcttcctccctcggttggatcggcactggaatggtgggtgaagaatggcgacgcagctgggtggaggtgaagcctcggttcagcgctgccacgtcgaggccacgcgtcgtacacagccggcgccaatctctctctctcggctgtctttggtccggctggaagatttgcacagggtgaggacgagccagagtggctgccaagtgggtccaggtcgtggcaaactaagctagggtgagagggttgggcagaaacgtgggtgaacaaaaggtttgaatgattttaaggattatttctctctcccactttagtatatcaagtatttaatttgtgggtagaataatttagtgtggatttttctgaaggtagatgaagatacctagattccattttctttggttgcactcaaaaatatggattgattactcacagacattacaggaatatgggttctttggaaaatagctcgaatttttaggag

SEQ ID NO: 39070 - DNA, 593 bp, Oryza sativa
  unsure (1)..(593): unsure at all n locations
gtgccaccagatgactgtccagtaccaccagtgcgtataaattccaagcgcctagcggcgtccttgattcgaacaaagcatttgcaggtgaatgggtcacggaatagcgcacaagcagcataccacacacttcctccaatttcatggccatcattttccaccaactccatgcacgcatcaaggcccatagacttctctgcttccatctgagcaacacgactctggtagctctgctctcggatgtccgcaatcctcnnnnnnnnnnnnnnnnnnnnnnnnnnncgtgacttcttggaagaactccctgaggcagtagtgtttgctgctggcctctttcccttgccccggtctgctgccgttgggggtggagttggaggtggtggtctataagcagcagcgagctgcgccatgtcgatggtctgccactgaactgctccttgcggtgcctatggggctgcccctgcgacggcggagtggtttctgacaactgtgtgcccactgaataccgcgtggtgaaggtcaatgtgcttcagaggatcattcctgaagcttaagacacctttattttgctgcaacataagtagacagtaaaa

SEQ ID NO: 39071 - DNA, 680 bp, Oryza sativa
aaaaaaacaataccaataataaatatgtaaatcatctttgccaagtatgaaccatgccattataattttgcaaagtttatgatatgacatcggtatctcaatgacatgtagacctacatgagtcaatgacatgtgggtcaggatgacatatctcaaattttgcaaaattataatggcatggttccaatttttccttttatctatatatattattatatatattattaagatagctttagaaaatcatcacagacgtcctatagacgtagaaatctttattattaagacaactcggaaagaggtacgctatttattctaaaggatataaattatcagattgatcaaagaataaaatccaagccattagatatggtagaaccaaattataactgtcgcgaccgagaaaattgccttttcccgaacgctagtgtattaatccccgtcctaggaaaagccggggtacaccacacaaacatgatataaaagacacatctttattatatcgataatatttacattattacaaaggcacttcaggcctgacaatcaaaaataaacagcagcggactagcgggcttacggctccatcttcacaggcgctcaactggggtataagccaggactccacctaagacatcttctccaaagcttctcttactaaaggggggaaagattgagta

SEQ ID NO: 39072 - DNA, 649 bp, Oryza sativa
tgtctgtatacttcaaaatttttacacctaacaactacatggccataatagttatataactaatataaatctttttcttacgaaagcttaaagtaactatagaaatcggagtaaaaaaagcttgagatggaaacgaccaaacaaaccacatgcacaaagtttctttctaatttaaccaattggattaagaactaatgcattaacttatttaagtaataagggcatgtttagatctgctgtcaagttttttcaccatgtcacatcgaacgtttcaacacctatatgaagtattaaataaaataactaattgcacagattgcgactaatttgcgagatgaatcttttaagcctaattgctacatgatttgacaatgtggtgctagagtaaacatttactaatgatggattatttaggcttaataaattcatctcgcattttatcagtatatccgatgtgacagggcaaaaattttcacccctggatctaaacacagcctaaaaaaaattagactccgcgtttgctctcatggcctagaaattctcatattaatcgaagtccatatagaaaaataatttacatagataattaaaaataatgaatattggaagagaaggctagagttcatattggtgtacaatttataactaa

SEQ ID NO: 39073 - DNA, 733 bp, Oryza sativa
agtccgcacatcctcaaatacaaagcacttccctagttagatgtaggttagacttcccgttcgagaaactttaccttctacctgccctcaatttatgcacgattaatgaatgccacctgggtggaagcgagaggtggaaatggaaggtcttagttcggaggtgggatctctacctgatagttgcattgccattcatgatgatcccctggcattcgtccattcagccattcaccattcacccattcaactggaattttggttgaatgccggaattgtgtccacaaattgtggatggatagttggttggctggctggatggctggctggatggctggctggatggatggtgaatggctggcggcggttcggttgctttgaagcatttgttgctatctaaattccatttaaggtcgtaccttatcgcccagcatcatcttattctctatttgtattccctccatctttcagatacggatgtagccttggatgtgcccgtgcccaatgaagaggaagagcgcaacaatgaaacgtaaagtacaaaagtaccggacacccacccagatcccaatagaatccgccaaatcctgcgggaaattgtaatcccattcaccagctcctacatttaattaacaagagaactattgtatttatctaacacctggattatctccacctttcatttgatccctatttatagattacgctgcgttgctaacgggccgcacctcctatt

SEQ ID NO: 39074 - DNA, 747 bp, Oryza sativa
atgattccatttctccacctctagacagtacaccaccagtacaagaaaccggttctccatcgagtacagcgccttcaggagatgcaccaactacatcatcttcagcagctgaggagattgatggtggcacatcaggaccaacagctccccgacacatccagaaccgacatccgcctgactcgatgatcggaggcctgggtgaaagggtaactaaaaatcggtcttatgaacttgtcaattcagcatttgttgcctcttttgagcccaaaaatgtttgtcatgctttatctgatgagaattgggtagaacctccaaattccacttgcaatattatgttttcgagacgagaagcttttcggtagagctttggaaaattctacatgtcacatatttcatctatttgagtttaatttttctatgattggttctcatgtgctatatcaaaagaaaaataaaaaaaaattggggggaggacgccagctacattggcgctctccccctgctaccctagcgccgacccgctacggtggcaggaggctggcgccctcccgttggacgacagtgccaatgactctggcgcccaaaaaagactatttccggggataagttgtttcttagatctatttacgaaataagtttttcaaaagaatgaaatcgtaaaaaatccaatagcgttcatcatacgatcgatcgctgcatttaccgagtccggcaatggacaacgttccaattggagcctgtcacatc

SEQ ID NO: 39075 - DNA, 725 bp, Oryza sativa
cacatcgagttcttctactcgatcggaatatctttattttgcttcaccatcgctgaacctttttttgtatatatattgtttttccatcgctgaacctgcacttattatactgctgaagtccccatcttctagatagattatccgagtcaacattaatcatatagaagtcattcattctctctagattatcagagtctacattaataatatagaagcaattccctttctcatcattgcaagtgtagatctaactctgaaccccattaattggttggtttaacagtaatctctgaaccgcacctccgtctccactgattatgcttctaaatagttgactatattcaatcaaattgacacaatctaaagctccgttctattcaatagtataaaatgatattttcagcgcacgcaaaacgagaaaatttactagcacataattaattaagtattaactattataaattaaaaaatagatttatttgtctctttaaaacaactcatacataaaaacgtaggaagtacatgataaaccggaacaaaatattttaacgaaaaacaaccaacagagagcacacacaagtaggcacaggcatttcgcctgaaagttccatctaacagtctaaaagactatacactgcaactgggttcatgttacatgttctgtactctgcagtacattgatcagactaatgtctccacgtccagtattgcctggacactttgga

SEQ ID NO: 39076 - DNA, 510 bp, Oryza sativa
aaacaactatgacatatagctattgctgggaaagaaggggtcatggtaggctgagggtcaaggatggatgtttttcttatggtgaatcacaccttattttcatcactatacacgcacacatttgcagtactagttacggtcacttgacatagtgctacattatttctgtcctcaacaataaacaatgcacattttctcgttcggaagtgtcgggatcgaggtccaatctcacccacccaaaatgcttgaagtcagcagtccatactttgccgtttatatgacatatgctcaatctaaagacggataaatcattgaatacctgagcatcatgccagcccacctaaaatacttaaaatcgaccattttctccatgatgctagttgatgatttagcacttctaaatggagaatatgtcatcctaacccatacattacgaattcagagaagaatctcacatatcactatgaattcatgataaatgagaatctaaaaatgacaaatcatcatttt

SEQ ID NO: 39077 - DNA, 1934 bp, Oryza sativa
atttccttccttgcagaggcacggatctgacgtaaccacttcaaggcaacatctggacaaccaaagtgtgagaatgggattataactgaaggaactttgcaactgacctaactgtgatgaacaatcaagaagttttgagtgtatagtaatcaaattgtagagatcgataaacaatacaaatgaagtatgacttgtatgactggcagataacattataagcaaacaggagagttgtacatgtaaagaatatcaatggtacaaagtatatatgcagtgatagattcaagagtaaacttacggccaagcaaaatcttagatatagtaggaaatgctggaccatggtaaaaagcatgcctccaagatccccgttcatcattgctgaggcttacgccattaattatctgaaagtacagaaaataattctccctgttacatcatggcctaaaaggatggaactccaattggctatttggctgaatcatattgaaggaagcatgtgtctttgaatatccatactaatttatctctcaagcatgaaacatgatcttctgtattctgaatgcattatcaaatgacacaggttttacaaaatgtgtgctgctacagctcacctagcaaggtcctgcaattcgattacccattgtgtgaccaaagttataggtttatcaactggaaaattctgtggatgcttatcaatccagtttcagagtaattccttccagagatcaatttcctcaaatatatgcaccacaattatgacattacagcggctgaaacattgtccacataaccaatagttcactatgatatcttaatgctccatttctattttttgtggcagaattactgctccatttcggcatacagtcctttgtgattgcaggtcaaaacaaaaactcaagacttccccattttttttatcacagaccccttccatgattattagaaatcacacatcattgtttatgccagaaccaaaaatagcaaatgataaaactactagtaatttttctcagatggacgaaataaaaggcctaaaattagcacagagcttcacctggctcctgaagggttcgtccacggtacctacaagagaggccatcagacaccccaagtgacggcgaatgagataaatgggaatagggagcatgtcggattaggattcggagcctcaccggctacagcagcggagtcgacggggaagacgagggcggcgacggcgtggatcgcgcggacgacctcgccggcgctcgacgcggcggcgaccgcgtcggccgcctccgccaccttgtccagtgctaggtcttcgaggcgcgcgccaccatggccgccgccctgggagcccgcagccctcgccgcggagctgcttgggttgctcgccatgggagggtgaagggaaacacacgacgaacctaagagagagcgcttgagaaggggaggttttggagcaagagtaattagggggttttgtttggaggagaaataacagttttacccggcttgactgccgttggctaagataaaattttggggtatgtttgagaatatcaaaatttgcaaatgaacttttgttagagaagatgtgtttgagataccaaaaaaataattgaaggaattaagaatgtccaatgtcaattgtacttttattcatgataccagtagtatattactcctattatttctaagtttttttataaggatagaattggagctgctaagagcaagtttaatagtatagccaactactagctctaaatcatctatagtcaatctactccttccttcccaaattgattttatacaccaaaaccaaggataatttaaatcacatcaatcaatacaacatacacacattctcccaccatgcatcgattaaaacctcatgccacttacaccatagcatgcacacattcttccatgctgtattaactgta

SEQ ID NO: 39078 - DNA, 785 bp, Oryza sativa
  unsure (1)..(785): unsure at all n locations
cgatgtccggcgcctcttcctcctcgaactcctcaaccggtcggtatctaaaccctctccctttcatcgacaatgtcgttcatcaaacccaaatagaaccacccgactagatctaacctaggtgatcctagtgcaaagtctaacaatggtatcagagcaaccctagggcttagatcggttcgggaaaagaaatccaaagaaagaaaagcacaagatccgcacggatcaaaagagccgaaaaccctaaccctaatcttacctcgtcgccggccgtcgccgacgccggcaacggagggggggaggggcaaagaggcgccgcctaggagccactcgacggccgcgcgcgcacctgcacgcgcgtaccggcgagggggcccgcggcggcgccgccatctccgtcgtcgccatctctctctcacacggtgggggttagagacggtggggggagcggagaaaaagagaaaaggcgctggccatggcgcggcgggcgccaaggtcgccggcgatggcgacgccgtccacgcggtcgcgtgagagagagaagagaagagatctatggttttcggcggcccgcccggagagggggttttgatcctcgattttgcggccggccgttcgatcgtaccctatattgattgaccgtcacacccggccggcccgatattgtccaatatgcccgcccgggggcggtttcttgccacagccagttgcgttggggaaggggcccnncctgcaaaaggcgggccgccgaaattattaagcctggggcgaatgaaaaaaacaag

SEQ ID NO: 39079 - DNA, 528 bp, Oryza sativa
atacttcttcgcttctttatctcttgtagacttgtactactattaaatcgcttctttatctcggatgatttggaacagaaatcacgagacaacacttgtaggatttctaaaacactgcacaaattcgtataccgaaagatcgatcggccagtcgtccgtcgaaatcatggaggaggcagtcaacgcatctgccgctctggatcccaagcttgctcctctgctgctgttcggccacggcgacgccacgttcctgtacagcgtgccgaagagagcgctgctgccaatgccaacgccaacgagggtgggcgacggcggcgtcgacgacatgatgagaggccaccgctggtggaccacggcgcagggctggttgctcatggcgcgccgcggctcgccgtgcacattcttatgggaccctttcaccggccgccgtgccgggctgccccccgaccacgacggcaccgtcctcgccgccgaaggcagccatcgccggaggtgcctcctgtcatgctgcggtcccatggacccgac

SEQ ID NO: 39080 - DNA, 1352 bp, Oryza sativa
tctcacctcaaaaacagttttgtgcatgaagctctgattaaacaaagtccacagaatccagtatgcctcctcatcgcttgtatgttgtgatgcaagttggcgcaacatctcttccgccaacctttcaacagaatgctggtctctaatagcctcaaccacattaaaccaaaattgggaaacatgcttgatcttgtcaggacttatggttttatgatcagattccatacatctctttaagtgactacggatcctaggaatcagctcagcaactaaaatgcctgaaaagagcaagatatattatcagaaatacaacaaatagtagggaaaaggatggctacatagattacaaacaagaagttgttaatgactagaacagtgtgctaggatgatcagccatgacatgaggcactgctatcctgggtgacatctcaagcattgcagaccccaagtctactgtgattgccaaaagtgaacactggataaaaacccaaaaacaggctaccttaaatgtttaaaatttcagctgaagggactattagtggaccatcagagaaaaccaaatgtgtaccactgtgttgtattagtttgcataaggattaaagattatatgaggacaaaaaaggatctgctccatcaccctagtagcagaccatcgcaaacataaatgttgagttgaatacactataatcctaccagacacaaatgcattggtaaaccattactgcaccaactagagctgcccccattagtaaatagaaatgtctaaacagataaactaacagcacactgcacacgtcaagctacatcctgaaggatgaatactcaccagtagatccacgacggctaacacgagatatcacttcacccacgaagaggaacacagaattggaggcatctagtccattagcatcttcgccagcagccaactccatagccgcttgttcagttgcaacaagaagctgatcgacaacacacttgaagaatgaccttggtttccatcaaggacttacagtttggaggaacaaacatagtgcaaataaatacatattagctgagaaaaagctaacagaataaaaggaaaggaaaaaaataacaaagatgtttgtgtttgtgtgtgtcgtgtttggggcggtgggggtgaggatacgatgatgtcagtgcaggtgaagctcccattcttgttttatctggaacagatgcaagtagttgagcaacccttgaaatgaaagctgctctgcatgggtgtcgagttgtcatcatcgtgcttgctgcttacagtaaactctgcaataatctggctgacccccttattctcgaccaaacatagaattaacagcctgaaatggggggaa

SEQ ID NO: 39081 - DNA, 617 bp, Oryza sativa
catatagaaatacaattaggaaataactgaaattcggaattaaaaattaggaatattagaagaggagaatagagtcccgattgaaatacaattaggaaaagactaaaattcggaattaaaaaataaggaatattagaagaagaaaatagagtccatatagaaatgcaattaggaaataactgaaattctaaattaaaaataaagaatattagaagaggagactagagtccatatagaaatgcaattaggaaataactgaaattcgaaattaaaaataaggaatattagaattggagtatagagtccatatagaaatacaattaggaaataataaaaatttggaattaaaaataaggaatattagaagtatagtatagagtccatataggaatttaaaactaactaaaatttgaaataataaacataataaaattaaaagtagagtttagagtccgtataaaaatacaatttacaaataactaaaattataaattaagaaaaacatgggaagaagagtttaaggtcaatatatgaatacaaatataggaatacaatttagaagtaactgaaattcgaaattaaaaattaaagaatattgaaaaataagtttagagtcc

SEQ ID NO: 39082 - DNA, 581 bp, Oryza sativa
acaatgtgatgaacacagcagatcagcacttcataggtatcataagaaaaatagcaccacacataaattaaccaacatgttcatcagtggctatccttttaattatcatgactgttaatattaactcacaaccatgcagtgttttatccctcgtaaaataatatttctgtttaagcagttcatgttatcctagaaagcacaccgcacaaaggtgattagtactaattagcaaacttggttcattatccagaactgtagcctaatatttatttgagaattcacaggtaaaagtttcagcataaacagtaaagttttcaaaacatgcacgcagataaacacatgacatacaaagacaaacaaagcatgatgtaaacagttatgccgacgatttggaggatttgaaaccaaaaaaaaaaaaaaaagagagagaatgaagatcaaacctccatggccatcataaacgccaaagaatgacgtcatggtatcatcaagatttagaatagctgcatgctagagaatatagagggcatatgtcagtcacagtattttacacaattacttacagatcagtaagaaatttt

SEQ ID NO: 39083 - DNA, 600 bp, Oryza sativa
aaacgcctccagattcaagcaagagttcgacgcgcggtgccgctcgatcaatgccactcagcgaagacaagaacgagaggaccgcgacacgaaacaccaagcaaacaaacatcaccaccaccaatggagcaagatcgaagaagagtagggagaagaatctcacggcgctttcggagaagtagggtttagggatggaggcggcggacgaaaccacagaagaggaggggaggatgaagtgagagagagatctcacctcccacctttcgccgctgcgctcttgacacccccgagagagagagagagaggagagatgcggaaaagtggttgtgctgcgaagcgcaaatagttgtgcttaaatacctggatcgtcgacggctgatccaacgtcgaggagtgcccccatcctgtggctggtggtccccacagatcgctccccctgcacggacgtatctcctccgtcggttcgtccctcgcggctgatccaacgctcgaggagtgcccccatcctgtggctggtggtccccacggatccctccccctgcatgatccatccacatgtaaattttcaactacccttaaaaaaaaaaccaatcccaccta

SEQ ID NO: 39084 - DNA, 608 bp, Oryza sativa
gagggcaaggaggaggagggaggcgaggtggtggaggggagaggcgttcggcatgggggggagttggctgggctgggctagggtttgggcggcgcggcgccggcgtggagcggaagcagcgcaggtggtgcaggagaggagcaccagcgggggcgtgtgggcggtggtggcttccgtggggtttatttttgggggaaaggtggcgacggcgaagaatttgggggtggggttttacgagccgggggaagcgcgcacacgtgacagcggcacggctggttcgcactcgggcgtgggatgcactgtagtctgtacgtgtaggggggcgccttccggcgaatgtcagatggcacgaaaaactttttaatggtacggactacggagggcatttcactggtacaatcgtgaatccgtcgggccatctataatatgagccactcctcgtggggaaactcagcttacaatggaggataactgtggatgggctactcaaaatctgaagcaactcaatagagacactccaacccatagtgggtatgcagccacaaaaacccatatatatttttactaccctacccctaatctctctctccagacccttcttttctttt

SEQ ID NO: 39085 - DNA, 691 bp, Oryza sativa
aactcgaggacgcctacatagccggtgtgtagttcagtgttgaacttgccgtctatcgccgtgactagcagtaaaaacctgatgatggcttaacagtgggcagggttgcggtactggtacggatgctgatggaacttcacccagtggttgtcaccggggcgtaataccacagctccgggtaggcgaggtcgatgacgagcacggtgcaactggccgggtccatggaaccgcagcatgacaagaggcacctccggagattgctgccttccgcggcaaggacggtgccgtcgtggtcgggaggcagcccgacacggcggccagtgaaagggtcccataaaaaagtgcacggcgagccgcggcgcgccatgagcaaccagccctgcgccgtggtccaccagcggtggcatctcatcatgtcgtcgacgccgccgtcgcccaccctcgttggcgttggcattggcagcagcgccctcgtcggcacgctgtacaggaacgtggcgtcgccgtggccgccgaacatcagcagaggagcaaacttgggatccagtgctgcagatgcatcgcctgcctcctccatgatttcgacggacgactggccgatcaaattcataaatccttataaataactattggcataggaaagaggtatgcacatctacgacctacaattagtactcctaccaatcatctt

SEQ ID NO: 39086 - DNA, 525 bp, Oryza sativa
agcatcatattgtgcaaaacgatttcatattgagctttgcaatcatgaagactacgacagcaatctaagtaatgcgatgaggagtgcgttttacaggttattttcgcctagtctatatcattttgttgcactgaatgatgctgcacttgcaaatttggaatttcattgttcctgtgtaatttctgcagcatggatgaggacctgcaactgtccgatgcttggagggagttagttattcctcgtaataatggatggatgtattttctcaaggctgcagcttgtacaagcatttgcaaggtatcttttaaaccctgaacgtcttttaatatccatatattgaaggtactcaaaactgtatttgttggacagtgcatattgtatctatgaaaaaggaaatggaagaatgtgtgtgatatcgagactattgttctttcttgagatgtactttggagttggaagagatatgtttaaccctaaccttgactaattgcgcctattaaaaaaggtccagttagttacatatca

SEQ ID NO: 39087 - DNA, 514 bp, Oryza sativa
aatcatgtcgacataagacaaaattttgatgacaacacgttgggggtgcactgtgccattgttgttctttgtattgttccttgcttcccagatgtgccaaaaggtgacagccaaaagggtgtttgcatggctggatccccgtttcaggaaatcaaagatccattgcctcatggttgagaacccatttcttcctagtttgacagcgcacttacccttgatttcctcccagatttgagcagcaaaggggcagaacaggaagacatgttccactgtgtcatctctgttgcaaaaaacacagccatcagtagaggggatatgccgtcgtcgaagttgaaacccagtcgctaagcattcatgagcagcacgccagagagtaattttcatctttcccggcgcattgatttccacaagcccttccaatccttttggctttcaagcagtctcgacgccattcctcgcccactgttgctctgatcagcaaagaaagcttctgatcgcgccagaatgtaagccg

SEQ ID NO: 39088 - DNA, 501 bp, Oryza sativa
caatgggataaattgttcagcaatccatccagcatgatgctttgcttgcatccttggactgaatacttaagagatagctaaagtttagcccctctctcccaaacacccccttatgttttttgtgaaggactaaagtttaggtgatgtttggatccagggacttaactttattctctatatttagacactaatttagagtattaaatatagactacttacaaaactaattacataaataaaagctaatttgcgagataaattttttaagcctaattaatccataattagataatatttactgtagcatcacataggctaatcacggattaattaggctcaatagattcgtctcgtgaattagttcaagattatggatggattttattaatagtctacgtttaatatttataattagtgtccaaacatccgatgtgataatgacttatttagtccctcccacccaaacaccacctcagtcagctttggattctcttatcaaga

SEQ ID NO: 39089 - DNA, 725 bp, Oryza sativa
gtggcatataagagagaagccaattttaaatggcatataagggaactggttaaattctagtggcatataagagattctctctattatttgcacgctgctgcgattagctgattagctccagtttatgtgtccgaaactctgaataatattaatcgtagaagagatgtactattttctgttcttgttgcttgaacctactaactgggacaagcgtcttggtttggcatccaaatagagaagtacagaaacgaagctacgtgcaggcagctcagagtgtggtgcaaccctttgtctaatggctctgaaacttctgatggggactgtgcttggctggagtgcaacacatttacagattaaaccaatcctaattataatacatttttgtgctagctatacacagttctctagcacttacctgatcaaatatactagtagtatacaatatatagtagtagaaaactagaacgatttgtacgttgacccagacagagagagatgccgggcagtgtgtgcaggaatcaggaggcaggagggatgttccttgtaaggcagcaaccagcatagtttagctttggtcatctgtcctaaatgggatttgtcggctaaatcacaggcgtttatccccttccgtcgtatatgcacaacactacacggtcgtgcaaaagcaggatagcttgacttgaagctgtggcacttcctctggcattgcttcagatgttcttctc

SEQ ID NO: 39090 - DNA, 725 bp, Oryza sativa
ctctcagttttgtaccatctttatttatcatctgaatattaattaattggtgccttcaggatcttgcagttcttgggaattaatcatagctatctaggaataggacagctgtttgtttatgaaaaaaggcttgatcttgatgctgtttcatcgtctgatcatacatcgcagcgcctttcggatgtgtacttgtgtagtacactataaaatcgtatcgtcgcggcgatcacatcacgatatattggattgaagatttggagtccgtccatggagagagcagcacagggatacacatcctggggtccaatgtagaagacgacgtcctaacatagtgtgcacttagtttcagtccaattgacacgaagaacacacaattaacaccaacagtgcagtctcctgctgggccatgcgtggctgaactctgatggcttccaaattccatcacattcccaaaatcgcaccgccaccaccaatcaatcatgaacacgacagattaattagagtttaaatacttaaaactataggcatctttgagcgatgtgatgtgactcaaatttatttgctcaagacgagagcgtgaagcaagcaagaagcttcacgagtcattcagaagaagaaaaaaatcgaactttttaaggcagaaaaagatgtgtgcaacaggagctactagctagaggagtactagagaatcaatcagacaagaacaatcttcctaaaccgtgcgt

SEQ ID NO: 39091 - DNA, 513 bp, Oryza sativa
ttagtgcacaatcgatgattgattgcattgtgggggaggtatgaataagtgtaccggtagtaggccgtatagcacgacgcagagcaacatacggcaacaccaggagtacgtacgatgccgtgggttattacgtactcccccgtcccaaaaagaaaacaacctgtgacgaatctagacaactcttatccagattcgttgtattaagaggggataaatttagattggtttttttatggagagagtagaaaacgaaaagaaattagtatcactacagagccaacggcctagatatatgctctctacattccaaattgatctgcatataattttttttatgttattcctaaattatctacatatttgtgttcatttattaagtctattcgttatttgtgcattggagtaaatggacattgatgcatgcatccatgcacacaagtatttataacccacatgcaatatcttgatttgctattggctaagaaatagtagggatggtgtatacattgagtt

SEQ ID NO: 39092 - DNA, 623 bp, Oryza sativa
catctagcacactcgtatgcgagcttaattcgagcctgccagcttcacttcgccaacaacactcgagcattgcaatctgcaagcttccagcagcaagcagcctagttagctcacagactcatctcagtatcacaccccatgatttcttagatgcatatgcatgcattcaaggacaaatcaaagcattctgctaataagctcgctaacgcggccacaaaatccgtcgctgacagatcatcagaagcaaccaaaaacccacattaatcgcggcgactccgctcagatcgatcgatcgatcgctgcgcccaccgtgatggccaccacaccagccgtcgtcgtctcctagctccacacctcccccttgaccaccgccaccgccaccggccggccgggccatgcacggcgaccggccggatcgaccaagccgacgccaccaaccaaatccatcccggtcatatctctgtcgcctcctcggacccccaagctccatcacatggtggttgtcattactgtcactcgatgaaaccccatccattgctgcggacacttatataagaataaaaaaaattttggatgcacttaatagtttagtgagaagggacgtgtggtttcaacccagaggt

SEQ ID NO: 39093 - DNA, 623 bp, Oryza sativa
ttaaattgcgaggttcttaagtatgaattctttggttctatatgatcaaagtgtcatttggaagatcgatatacatatcaagtgcaacgttacatgaagaaatagggtctctatattttcaatatactgaatagtataactgaagaggaagaaagaatcaaagcacgtatatagatgcattattcttactgatcgatcaccacacattgaaattcaagtagaaaaggtttatcaggagttcgatctgttggatcatggtattctaaaaccctacctttagaagggagcctgcttttcatcagagaccatggaagttggaacgaaataagtacattcatgcataaaagaagaaagacagactgcgcaggaataataatctcgtagagtagaacataaacacagttaaatattgcctttgctcatcccaaagtatcatgcatgcatgtgtgtatgttctgtgttcagccaacaattaatcttgctagatacaaaatatacagtaaaacaaaacatgcataaccgcatccaggttacttcttatccccacttcatctcttatacatacattcttgaaagcgtatgcagaaggttaaaccaagctactcgaacagatctgagttatt

SEQ ID NO: 39094 - DNA, 742 bp, Oryza sativa
  unsure (1)..(742): unsure at all n locations
ctctgtgtatctgattgacctangnannncnnnncananattgngaagtaagcaccccaccaaacaagcccatactatctttcttaattgcacacggggaagagcctcccagtcaccacgtctcttcctctctcttctctagtcgtcctgtcgaggagcatagccgacaggggaggagggccgcgcccggtgggcgcgccggcgcccgggggggggggggagacaaacctacctgacgctcagaatgccttctaccaagcgaccattaaaccttgcgactttttgcttaacccgattccataaactgtctctagtctttgacttgcatattcaatcgcctatctctcgaatttcccttaccatcctttcctcgtcccctttcaccttctccctccccttccaaccgttccctttcctacctttcttctctgtaccttctaggctctttcagcatcatacatcttccctttcgcgttcgaaccttacttccccctcgtctacctaggttctcgcctctatcccagcccttgcccactttcctaacctccttctattgatctctatctttctctccccacccatttctattcttctttctaccaaggcttcctccctatttgtctcccgtctcttcctctctcttcttctcccctttcctcactgtacttgacctctttgcttctccctctctctttcatcccttctcctaccttctcgttccccctcgctcctctcccctccc

SEQ ID NO: 39095 - DNA, 693 bp, Oryza sativa
  unsure (1)..(693): unsure at all n locations
cacgcggnnacggatagacgcttnnnnnnnnnnnnnnnnnnnnnnnnnnnnnnnnnnnnnnnnnnnnnnnnnnnnnnnnncggccttcttatactttgagaggaggaggacgctatttaacacaaacgacatgataacaagttgatgaaggccttgtggccgtgggattttgctttccgaacgatgccaaaattccccagagtggaggccagatcttgatgaactgctagaataaaatttagtgatatcccaatccaagagctacagtaacatacatagactgctgaatgcaggattgggtttcactgagggtgtacttgcatgctagcccagtgattgaccctgacaagtactacatggtgacatacaccgtgcgtgcgtccatgattccatcgatgagcgacgagatgagtttgggcttgcggccagacattcgggcacagagtagccgaggagttcactgcgatagattgccaaaaagagagatcttgtcacatggggcgattggttttctctcgccctagccggaatgaattctagtaagcagtggggggaccgatccacatactaggcgtatattggctttcgtatgcgcactgcctgatagatagtgctgtctgacgatggtgcaccattagggtttcatgagtagcgtgcgggatcagaagttgtgcgccatacaacgacagcact

SEQ ID NO: 39096 - DNA, 738 bp, Oryza sativa
  unsure (1)..(738): unsure at all n locations
aagcaccccccgtcccggggacaacgggaattttttccgggggcgccggggcaaggtttttcgttgcttcttgctccaattgccgctgccgttcccagtaattgttaccccgggcaacccatcgcgcgttgaattaaaaacgcaccggccacggcggctgtggttgtctagctacttaattaattttgtggttaataaatttttgaaagcgagcgcgaggcaagctagctagctagcggagccgtatagaatttataccaccctgatcggcggttgctatcgatcgatcgaccgggatgatgatcgataattcgatattactgaccaggtgcggatgaatccgggacatcaagatggaagggaagaagcttcatcggaatttcgatcgatcgaggcgtatgtgggtcatggccgggtgaggtggccagggacgaattttctttgttttggtttacttatatctatctatcttctatctattatatatatatactaaataaaagtccattaaacttcctataaacgctctcaagccgccacgtggcactcctacaaacgctcctagaccgccacgtggcaatgtctaattacatcgtcgattttcacttaatcggtggacccaataatttagaccattagattagattagatgtattatatatttaaaaaagacagaaataccttactggtcaccacgaaaaaagaaacaaagcacatgtnctccatatatccatatat

SEQ ID NO: 39097 - DNA, 742 bp, Oryza sativa
  unsure (1)..(742): unsure at all n locations
gaggtgaggcggtggcacatggggtagcacatagccgttttgaaataaaagcaagaagggtattcatgacgcagtaggttagagggtgacgagtaaagcaagtagtgtgagaggaagggtaagaagtagcaattggagattggggtgggggaagaagttaacgtggagaagagagtaaggagaaagtaaggctgtggaaaggacgagaagggcgaagtagggaggagatttagagtagcagtatggttggcgcgttcgggacggatgagagtaagagagggtaagccgctccgattanaagcgggggtggggngagagangcgggaaccggggcggggggggngtgggggggggnnnnggnnaagnnnnngnntccccccccccccccccccccccgcgacgagcgtcggcgacggcggcggctggctggctggctgcctcactcctctcatcgaagatcgatttctctcctcctcaacccgctacctcgcctcgcttggatcgaagaaggtacccttctctcattctcctctcggcggctaccgaaccgggcagcccgccctgggtgggattggttcctttatttggcgatgaactactacacgcacctccttccacgtggcaccaagccttctcctccaagtcacctcgctcgnnnnnnnnnnnnnnnnnnnnnnnnnnnnnnnnnnnnnnnnnnnnnnnnnnnnnnnnnnnnncattgctatcaaannnnannccgcgg

SEQ ID NO: 39098 - DNA, 707 bp, Oryza sativa
  unsure (1)..(707): unsure at all n locations
ttgcttactcgaaccgccgaaggggatgggtcgagggttaagcccgacggcgatgctcggcggcggctggacgtgaagctcgacgagcgcgccgtcaggccgaagccggaggttgtcggccgaaggtcctcgccgctcgtgttgacgccggcttgcatctgcgtcagcggcgaaggcggagccgcccccgcaacgtggactggttcgttgaactccatgcggatccacggcatggtgaagctgaaggagccggttggaccaaggttgaggaacagcgcaccgacgacgaggatcaggacgacgacgaccgggccgaggcgacggcggcgcggtgccccagctgggcggcggcctgaccgcctgagggagaagaggggaatcgagggagaagactgagtgaaagggcaagagcgacattttttctacccgggcccatatgtcagagctgccaaatagttaaatctaaacggaatagcaacggaacggtgtggagggcgcgataaaattcgacaatggtataaagggagggctcaaatattttagtggcacagggacatatagggccattttggtttgatgccaattcttgcccaaccaattctttggtagttttgaatagtacatnnnnnnnnnnnnnnnnnnnnnnnnnnnnnnnnnnnnnnnnnnnnnnnnnnnnnnnnnaaagagagattctaatggggggcagc

SEQ ID NO: 39099 - DNA, 680 bp, Oryza sativa
  unsure (1)..(680): unsure at all n locations
gcgtggcattatatatcctatnnnnnnnnnnnnnnnnnnnnnnnnnnnnnnnnnnnnnnnnnnnnnnnnnnnnnnnnntttgtgacttaaaagcccatgttgaaaaagaaactacgttgaaaatatctcaaaatcaatctcaaaattaagcttgaaaattcaaattttggctttttctttggcttattaggccatctgatgggagccttacagaaactggaatatccagaaaatcatacaaatattaaaaaaataacaaaattacaaagccaacaggttatcttcagagtaatgtgagtatagtgcacaaaaaaacagtttaacatgaatattggatcaagactcttcagacagcaccctagattctgtttggtaaatcaagaataatataaaatcacctcctgtctcgttcttacaccacaggatggcaaagtggaaacacaaactaaaacaatgtttctgagatgtgtcgcccataaatatgatgccgatttcagtacataaaagctcctaattccaagaaaatatactacagatcgatccgcccttgaccctaggtcaaaatggcaaccttagtatggttatagtaccatctcaaatcctaaacaagatgttgtggtacatgcaagcaactgtattgattaaagacaagtatcgctataactcaagattggtacctt

SEQ ID NO: 39100 - DNA, 884 bp, Oryza sativa
  unsure (1)..(884): unsure at all n locations
aaccaacgggagaatttaattttaggaacattaattatgtgctatgatgttgtaattttctgaccaacgttgttaattgcaatattatagttatggttatatgtgttatgtctaattctgcccaacggtgatgtaggcttaatgcataatattttgatgttaattttgttctcaccgcacatgattatttcaggtggctactccttgatgggttgcattaaagatattccgaccctaaaaggagataactacgcagaatggaaaagaaaactcgaccttgcttttatcttgggagaggtggactgggtattgactaccccatgtcctatagaacctgctgaacttgtcagaggtgaaaatgagtcagatnnnnnnnnnnnnnnnnnnnnnnnnnnnnnnnnnnnnnnnnnnnnnnnnnnnnnnnnnnnnnnnnnnnnnnnnnnnnnnnnnnnnnaagacacagcccacgaagccagttgcacggcccaccatttgctacgtatgcaggttatacagagaccatataacagatggtctgcaattatacgtggaattcaaagtatttcttttaccagcatgtatctatttgtcgggtgatttctaataaaaaaaatcacccaattttttttaccctttatttatatccaacggactacaaaagaaaaataacaaatacatattaacttacacattatttttatcaaaattacagtacacttacatgtcaaatcaactaaatttacaaatgtaattttagttatataggactgtaattttaaaatataattttatattttaaagaaaataataagtacatatttacttacacattatttttatcaaaaattacagtgcacttatatgtcaaatcaattaaaattaca

SEQ ID NO: 39101 - DNA, 825 bp, Oryza sativa
  unsure (1)..(825): unsure at all n locations
gggctgtactgatatcgcctttttgagatcnnnnnnnnnnnnnnnnnnnnnnnnnnnnnnnnnacgtaatatatgctggaaagaaaattaaaaatttgaaagcaaatgcataccaacgttatcgtttgagtgagcaccaaatccggtgtcagctgtgcacatgcatacggtggtttcaaattaataatttcactttaatttggatgctaatggatcatccattaataagggggagtacatacatctaggtgtacagaagagtcgtcatgtatatatatatatatgtgtgtatatatatatatatgtgtatatatatgtgtgtatatatatatgtacatgtatatatgtacatgtgtatatatatatatatatatgtatatgtatatgtacatgtgtatatatatatacatgtgtgtgtatatatatatacatgtgtgtgtgtgtgtgtatatatatatatatatatatatatatatatatatatatatatatatatatatacacacacatatatatatatatatatatacacatacatatatatatatatatatatatatatatatatatatatatatatatatatatatatatatatatatatatatatatatatatacatatatatatacactcacatagatatacatatacatactattatatacatacatatatatttccgtccatactttcctatgtttgcacgccgcgcacatttttccgctacatatatacatccgtacctacgtattaattttcttattaaatattttcggtgttatttttaccctttatttttttcaccctcctcgggtaatgtct

SEQ ID NO: 39102 - DNA, 750 bp, Oryza sativa
  unsure (1)..(750): unsure at all n locations
gcgtgcattaggatcaccctnnnnnnnnnnnnnnnnnnnnnnnnnnnnnnnnnnnnnnnnnnnnattcatgaatcggggagtcaatccaaagaacgataagggagcagataagatttcggaagcacccaaatcctatacctatgtttatactccccagatctacccggggaagccgccgacaccagctgggtcacccataacagcccccggaggacatgcgagtccccattggacatgatgagagagggtgccgacatcgacgtggccaccagaatcgactatgggaagctgacgacgctgcctgtgccacctatgaaagccgggagaggacgtgccaccgacgtcgaacacagtgggagatggcgccgccaccgtcggcgctcatgttgagggagggcactgatgacactcatgttaagagatggcgcccgcgtcgccggcgtcgcttgcattggtgagggggccttcaccgcacatgatcacggtggagaagggccctgtcagtgtcacttgccaagggggtcaaaaaaattatttctagctcaatggagtcaccaagtaatgcaattattgattttttatgatatataatcctaatcaggtatagatggaattcattgtttatgcctaggagtatgccatataattgccatgaaactatgaaatatccatgattattatcataacatcacgtttggtcgttgcaacgcacggtcactttctatcgtacaaagataagggcattacgt

SEQ ID NO: 39103 - DNA, 511 bp, Oryza sativa
tcagcatctgactcattttcacctctgacaagttcagcaggttctataggacatggggtagtcaatacccagtccacctctcccaagataaaagcaaggtcgagttttcttttccattctgcgtagttatctccttttagggtcggaatatctttaatgcaacccatcaaggagtagccacctgaaataatcatgtgcggtgagaacaaaattaacatcaaaatattatgcattaagcctacatcaccgttgggcagaattagacataacacatataaccataactataatattgcaattaacaacgttggtcagaaaattacaacatcatagcacataattaatgttcctaaaattaaattctcccgttggttcgaaatttaattttagaaacactaattttcatcaattacatctatttgcagcggaaaactataaaaatcatatgaacagtagcaaaatctctgtaattctctctctgtgaaaattctcccgttggttcaaatttaaa

SEQ ID NO: 39104 - DNA, 735 bp, Oryza sativa
  unsure (1)..(735): unsure at all n locations
cgcgcgnctttgattgatcgaatcgnnnnnnnnnnnnnnnnnnnnnnnnnnnnnnnnnnnnnnnnnnnnnnnnnnnnnnnnnnnnntatagcccttctggaataaaaaatatgcattactgctttatgagaccattaatgaagacaaacgttatttcgggactgtaaccacagatggaagagacagctccgacggtcccatgtgcgtgatttagaagaaatggtagcaccaaactggtctcctgaggcgcggaaccttaatggtattaacatgccacaagattttgcgacgctaaagaaaagactgcaaaagatgcatccctcgcataggtgttggagacgcgagcgctcacgggttcgtatatagccgatctactgtggagccatgtccaggaacgacgcgtttgacaccatgtgcagaagtcaacgctcctgctgaggtgccggcttgttacagaggtccgtatgtaggacctcaaacagtgatgtgcctaattagtgaacagattgcctgttggaccacctatgactagcatcactgttgagctgcatagttaaggaccttgattggacaactctgcaagcttagcgaactgagacgggctataggggctcatntcagactatcgacactattgaccagtgaggcggttatcgagccagtgctcgccagctatcatggtgatgatagtgcgcgtgtgcgacagacgcgcatgcgacgcaattgccaccagga

SEQ ID NO: 39105 - DNA, 1001 bp, Oryza sativa
  unsure (1)..(1001): unsure at all n locations
agggaagacggggnnnattgatagacatcatgctatgccagtccacgtgacnnnnnnnnnnnnnnnnnnnnnnnnnnnnatgggcacccagcatgaggacgcctagctatttaggggacacttaaaaaaaaactttgggacaggcgcattttccggatttgcaagcacaacagggatattaaggcgtcggaggagactgggaaacgcctcaaggaagagttgatttatcacacttacaggtctgacaatcacttagacaacacgttttcaatggagcatatggctggtgatttaaaatgtcgactcaacaatcttttgaaaaatcgagatttaacttattcggaatccttctactacatagacgctgaagattcttggtttagacttgtgttgatgtattacaaggagtaagcttagctgagaacctagatcatcacctaataatgaggtggtgatgaaacttgaacatattcaccattgacctaattcctgtgtggcgaattataaagcgtagaaagaaacaaaaacatttacatttcaattaaaagaatctgatgttagataaaccatgctggcacgccaatgattctgatcaattgtgatctgtagatcaaagataagatatacaaggggttgcatgaaatttaaatgactttgttattggctgacatgcttgcaatacagaaatagagtacattgagcactggcgtcaattatatgtactcatatgacgtgtgaacaacaatagtctttatacatgcttaagattgatcagaaaggtgaatacagngtagtgtgcatctatctgtgtagctgtgacggaagtccttcactggccaactgatgatcgcatggaaatacggcctctttttattattatgggagttttgtttcttcctccacttgccaattgtggatcaggaaatgtgtcgngcaaaatttgctgnggaatgattatccacttcgtatgaaggtcggttttctttgtttatgtgaagaaa

SEQ ID NO: 39106 - DNA, 679 bp, Oryza sativa
  unsure (1)..(679): unsure at all n locations
actgccccccntttgaggtagaacaacatctagcnnnnnnnnnnnnnnnnnnnnnnnnnnnnnnnnnnnnnnnnnnnnnnnnnnnnnncatctacctctctaatgcccctcacagggtcttgagcctgccgctttgaaccattcctgtcccaaattactggagattgcttcctcttcttactcggggacatcttcgcctcctccttgctgactcgcgtgacaccattctccctcggctccccggtcttcattgggcgctcaccggacctctctgagccactcccacctgagacctcgccgggctccctgtcctccgtcctcccttccgatggacgcctcctcggtggtggacgcggcgaatcccggcggtggctgtacccattcgacagctcccggccaccgctgcgcccgccgtcacggcggcgttccgagtcgcggtggcggctcgggtggcggtggtggtagagctccttgctcctcctagagacccccacgtagtgctcccgctccctcgccacctcgtagcccctgtaccccccgtggctccccgaagccatgaatcgctcccctcacaaaccctagcaaccgacgttcgattccccaaaatcccataagtaatttctcaccaacttaaaaatcttgggcccgaaaccaaccccttttgagacaaaaatagccg

SEQ ID NO: 39107 - DNA, 598 bp, Oryza sativa
  unsure (1)..(598): unsure at all n locations
ggttattagctcggtgggcntgagccatcggttcggtctttgctggtgaatcgagagcatagcggtcgttgtgtgatactcgcttcagtggccaaagcaagcaaccttgaccgatgtatcactgcgccgtcacctcaaaattgcctagatatcggatcggtctgttgattttctgttcggtttagcactacgtgagaacgagatatttatgtgagcattcagtatgctcccgatatgtgcgggataaaaatattacgatgatttttttcctcgcaaaaatcaaaatgggtcgcggtatgtggatccgctagcagactcgatctctgctagttgcgaacggatggtggatgaaactaggagtatgtacacctgggtgtatagaagcattttcatatatatatatatatatatataaagaatcctcgtcagatttccattgtcgtaacggtttcgactcagccgccgttcgctcgctcggactgaatatgaaaattgaatcgagctatgtgaagacgaggattcttttcttgctttatgtggatttttttttatttttaattttttttattaaaagttttacaaaaataattttccattt

SEQ ID NO: 39108 - DNA, 740 bp, Oryza sativa
  unsure (1)..(740): unsure at all n locations
atgcgcctttgatgactgatgatccnattcgaannnnnnnnnnnnnnnnnnnnnnnnnnnnnnnnnnnnnnnnnnnnnnnnnnnntaattttttgcgccgatagattatttctgtaaatattaaaagaaaaaaattaaaaatgaaaaaaattccttgcccggagatggtctccacggagtcgccggcccagctagctgcagcccaaggccggagcaggccggcccacaggccgtatccctcggcccagtacgggatcaagtcggacttgcgggccaggtcaactccaattcggactcttgagctcgtcgcatcgcagtgatcatgtcggagtcaacgggttcatcatcatatccgtggcgctataaatttgcagcgagcacgtcgtctcccttttatcacatctttcaagaatccatcaccgagctcgcggcctagctccgcgcccagagcgcgccatggattatctctatctggatgatgccgacgccgacgtcgaggctatgcttcgggagatcgcggncgccgtcgccgccaatggtcccggcgagcagcttgctgcgacaagacggacggnagctactgccccgcaagagatccgccttgccgggttggacttacgacgccgacctgtacgccaagcctccggccattgaaatggcccccgccgagcggtctttcccgactactgaccccgggcaacgcggccggtctaccttggacccccgcgtcttcgtggctg

SEQ ID NO: 39109 - DNA, 742 bp, Oryza sativa
  unsure (1)..(742): unsure at all n locations
cgcgctcnattagatgactactgctnnnnnnnnnnnnnnnnnnnnnnnnnnnnnnnnnnnnnnnnnnnnnnnnnnnnnntatatatcaaaaacttagtatgtctactgaccaaacaaaaaaacagtatatactcattcagtacggacgtaatatatgctggaaagaaaattaaaaatttgaaagcaaatgcataccaacgttatcgtttgagtgagcaccaaatccggtgtcagctgtgcacatgcatacggtggtttcaaattaataatttcactttaatttggatgctaatggatcatccattaataagggggagtacatacatctaggtgtacagaagagtcggcatgtatatatatatatatgtgtgtatatatatatatatgtgtatatatatgtgtggatatatatatgtacatgtatatatgtacatgtgtatatatatatatatatatgtatatgtatatgtacatgtgtatatatatatacatgtgtgtgtatatatatatacatgtgtgtgtgtgtgtgtatatatatatatatatatatatatatatatatatatatatatatatatacatatacatatatatatatatatatatatacacatatatatatatatagatatatacatatacatatatatatatatatatatatatataggtgtgtatatacgggtactattactgtcaattaactctcagggatttccggctctttttggtcgagactttg

SEQ ID NO: 39110 - DNA, 667 bp, Oryza sativa
  unsure (1)..(667): unsure at all n locations
gtcaaatcacaggtactgctattagaccctacttaccaaacagtagctgtacttttcctaccactatggattgcctgaaagcaactcagttaatccaagctatacatcactgacttcttttagcaattaaatacatggtgacatgttaatacagccacttgaaatgtttcattaatccgtgttttacagattactgagtaatggtcattatggtttttaaccacatcagtgtgatcattcaactaagctagctaagtttgtcaatttagggagcatttcttttggaagatacaccatttgtctttaaaaaaatcaaatcattaccatgaatctgaattgggacggaggaaatatctaacaatggatttttttttttaaaaaaaggattatgaaacccggacagcatggtttatcaaacatcagattcttttgaattgaaatggaaatgattttgtttctttcctagctttataatttgcaagacaggaatgaggtgaatggtgaatatgtccaagtttcatcaccaccaaattattaggtgaagatctaggttctcagctaagcctactccttgaaatacatcaacacaagtctaaaacaagaatctgcaannnnnnnnnnnnnnnnnnnnnnnnnnnnnnnnnnnnnnnnnnnnnggagcaaatcg

SEQ ID NO: 39111 - DNA, 678 bp, Oryza sativa
cacgccgtgaacactctatgatcatcgcaggggagctgttctatccatagctaatctattattaacccatgctgacaacgatttcgttgtatgtctaaccatttacaaaatccgctatgatttgcacaaaattactacccaaactgaataacattactatttttacagggcaatccaaggatgggtggatttactcgatggatcgacaatgtcactccatcatatcatacggagcgtcgatccctcgcccacacggtacttaatttttattaatactattaaatacctgtatgaaactgatggtccttgtccagcaggatttgcagccgggatcttcggtactggggcctcttcgtctcacgccggtaggactggtcctactagccagttctacgacgacgacttgcacggtgcacaccaccacgacgtactaggctcctctcagcttggaggagcttcagaggcgcacactcaggagcagccagaggtcacacctgtacaggcaggacgggttggccgtgccgtacccccagaccgactcacgtactcccaggggcacattaaggcgcagggtaagagggacaagggtaagaggcctcgtcagtagtgttctacctcttcagttcttatgtgaccgtttcttttggcttacaaactttgtaagcagtactaattttg

SEQ ID NO: 39112 - DNA, 914 bp, Oryza sativa
  unsure (1)..(914): unsure at all n locations
actgacgccctaaaggaaatagcgacnatgnaantaggcaacantgngcaanaancccgccnnntttnnnnnatcgtgnnaaacaaanncccnccccncnnnnnnnccnnnnnnctctcacatataaatactctctaccaacacaccttatttctttttcctttttttcacccccaaccaaaagggggggtaagggaaaatatttgagagcgaaaccggaccacccaagaagtaaaccaaacacaaactatagaaaggctacaaaccaaacaagcccatactatctttcttaattgcacacggggaagagcctcccagtcaccacgtctcttcctctctcttctctagtcgtcctgtcgaggagcatagccgacaggggaggagggccgcgcccggtgggcgcgccggcgcccgggggggggggggggtggggtatncaatctttatttatagattgtcaacttctaactatatatgtaagtatattttttttacaaaacggctatttaaatctcattatataattttacctaaaatataaaatttgaaatttataaattttattttaggattttttatttgccgtagctttattttatattaacttatataaaacgagtaaatgttactgatgcactatttctatttcttaaacaagtgatacaaatattaaatgttaattattaaatatttctaccggtttatttattttttatttgtaacacaatatatatttatgaaattgtcacgtattcctttacaataattcattacaaatttataaattcattattgttaaatactaacattcattttaatttggataatatttattgtttttgacaatagcatatttttaaaaaaatattttttaccattattttttatttttatgtgtgtaaaaattttaaaaa

SEQ ID NO: 39113 - DNA, 1662 bp, Oryza sativa
  unsure (1)..(1662): unsure at all n locations
acgcgttgaangtcattctcctctctctgcaagnagntcatcaaaatttgaatgttgttactgcacgtaagacatagcgttactgcacgttggccgtcgcgttactgcaccattccgcgagatgaaagctgagaagagggggtacgcctaatgggcgatcgatcgtcatggggatggggtagcgatcagattcgctccccacctcccccctccctccctccacctggtttccttttttggcaccgcattactttcctattttagtaaatttatgcacctaaaatttatacacctcaagtttacacatctagagtttagagaacaaaagtttataagtcaaaagtttatatatccgattcaaatttgaatttgaattcaaatattttttatatatagtatttctatacatctaaagtttatatacctaaagtttgaatttgaattatattcgattcaaatttgaatttgaattcaaatattttctatatatagtatttctatacatttaaagtttatacacctaaagtttatagaccaaaagtttatatacccgtttcaaatttgaatttgaattatatccgattcaaatttgaatttgaattcaaatattttatatatatagtatttctatacatctaaagtttatacacctaaagtttatagacccaaagtttataagttaaaagtttacatacccgattcaaatttgaatttgaattcaaattttttataaatagtatttctatacctaaatttttctaactttttgttttttttttaaaaaaaattctggagatgtgtaaacttaaggtgtacaaactttaggtgcataaatttactaaaataggaaagtaatacggtgccaaaaaaggaaaccaggtggagggagggaatcagtatctgatcgcccctagcgatccctagcgagcgatcgcaaggtagcattctaggagaataggtaggtggtggggggagttggtaggcgggttgaccgggctttgaccgacgtggaggtgctttgactgatctttgactaaggtgggaggtgggttttgagcccttagaagggaggggaggtaggtttggcccttgggagggagggggtatagaatatatatatatggttagcatgtgaggctttaaccaatatatttttgtttccattcctggtctaccataattttactacgacattactgtcaaaagtgcagtaacgtcctatgtgttctgcagtaacgtcacgtgttactatacttttacaacaatgttactactggagtatagtaacatgttatgagtttcggtagtgaaagatattagaattgataatcatattagatgacttggttagagaatgtgctttgaatatgaggtcatgggttcaagtattgaatttgacaatttattttttatttttctataaaagagaaaaaatgtttcagggagaaaaaaaacagaaaaaagaaagagagagagattgggaggagggaggggaagcgacgggagggggaacaggaggagggagggagggatacggatgagaaatatatatatatatatatgtatatatatatatgtatatatatatatatatattagctttattaacacccccccttagaattatgatgctgtactgttcgtctgtcatccattgcccgc

SEQ ID NO: 39114 - DNA, 3246 bp, Oryza sativa
  unsure (1)..(3246): unsure at all n locations
cccggcattgatgacantcggatagnagancatcaaattgatgaattcaagattaaaacccatgatcttatggttcataacaaactctcctaaccaatttaccctatgacactttgtgatttgagatcattgtttgttttctatgtacatctattcaaattttgtgaacacaaatccattatgttactgtataaatcataccttgttactacgattcggtagtaacattatcgcagaagtgcagtaacatgatacgttactgtaaaatttataggtcgttactgtaaaatttataggtcattactgcacttttgcagtagcatcatgacgaaattgcagtaaaagagaacatacgttagtaactgtactattacagtaccactgcttgtgcatagctaaatttttaaatctcaatattgtgcaaaatacagtgccaaaaaggtgcatatgcatggtcacaagtgaaaacaagtgctaaaagtacttctctttctatatacaaagatacaaagtaacaagcttagtaaaagtaaacttttagatttctaatctttaaacaataatacaattgccctgttactatacgataatcaagacaagatgtttaacgaaactagatccatcatgactattttataacattgttactacgaaaagtactcgtgttactacatattgactatcgcgttactacgcatttccagcgagacgagaactaaaaaaagtaaatctcaacctttagagagcaatatctctcatgttatatattatttttgtaatccgtctgcaccataatgttcgtaaaaaagtgcataacaaaactagatccatcatgactattttttgatgtcgttactgcgagaaaattatcctgttactgcacgatgaccgttctgttactacggaattcctgcaagatgaggacagcaaagttgtggctaggggagggagtcaatgggcgggttttgactcgggtttgaccggcaggacggagctttgaccagcctttgactgaggtgggaggggggatttgggccctaggaagggtgggggaggtgggattggcccatggaaaggggggggtgtagaatagttattctaggggaggggtgtagaatagattcactatatatatgtatatatacatagagtgagactattctacacccagggtatagaataacttcccttctcatccgatccccccttcctccctcctgatctaccctctctcgctcccgatccccccctctctcgctccctccctccctccctcccgatcccctcccttctctctctctctaccgatctctctctttttttatttcatttttttctgttttttttctccctaaaacatttttttcctcttttctggaaaaataaaaaataaattgccaaattcaagatttgaacccatgacctcatagatcaaagcacattcttctaaccaattcatctaatgatactatttgttttaagaattttatgagaaattaatatgattatcaattctaatatctttcactatcgaaactcataacatgttactatgctctagtggtaacattgttgtaaaagtgtagtaacatgtgacgttactgtataacacataggacgttactgcacttctggcagtaacgtcatagtaaaattgtagtagatcaggaatcaaagcaacaatatatgggttaaagcctcacatgctaaccatatatttgttactgcacgaaagtagaagtgttactacataataggcgcatattaccacttccaagtagctatgttactgcacgataattatagttttattatgtcatttttacgagatgaagatcgaataggtgggctataggtaaagcctgtaggtggctttgagcgatatctgattgatgtagtagttgtttgaacaattttatacatttggtaaaatcatgttactacatgtatatgctcttgttactgcaagttacacattctgttactgcatgtggagggttaaagttcaaaatgccaatctttgaaaagcaatatctcacaagatatgtattattatttaaaatcgttcccaccaagatgatatagtgttactgcatgtggagggttaaacttcaaaatgcatctacgtactcccctcttcaagaaaccgttcttcctccctcttctcaagaaaatcggtctcctccctccaatatagtgttactgcatgtatatgacgttactgcacttttgacagtaatattgtggtgaattacagtaaatcaggaattgaaacaaaaatatataggttaaaagtctcaaattctaaccatatacttgttactatacaaaagtaaaagtgttattgcacggaaggtatacgttaccacttgtttatgctgtaacactacccaaaaaatacagtaaaacaaagtgtagtaacatcgtgatgtgattgtagtaacgtacaacagacaagtagtaacaagtactagtatggtattactacttgtggagagacaaattgcaaaaaagtcaagctttgaaaaactttatctcccaagtgatgtaaggttttttaaaaccgtttgcaccatgatgctagaaaaaaagagcttatcaaaagtagatccgtcacgactatatttcaactatattttaacgctgttactgcacgtaagacacagtgtttctgaacagaggtcattgtcacgcccagaaattcctgaataggattccaagcagaatgtgcattaaaacccccatccaggaccggccggggtacacaaacgacaaagttgacatacagattcacgtcttacaaacatcacaaaggtcttacatatcacagcctgattttccatttcaggatttataaattatttaataaattattaatagaatttatattagatgtactttaatttacaagtgaagttaaatgtgggaattaaaatttcctaaatataaagcatggctggatttaatttttattaaaatctccatgattaattgtactctctgaaattttctcggatttttcagagctcaattcctaaatgatacaaagaacagttcaataattagttaatcaataatcattaatgatctagttataattatgttaagtgcttttcttggttaaaaatccttaaattataaattgttggttaaaaggaaatattagaaatgatcttaaaagcctaaaagagaagaatctaatttaattgttaaatctcaatataaaagtgggctagataaaatttg

SEQ ID NO: 39115 - DNA, 542 bp, Oryza sativa
  unsure (1)..(542): unsure at all n locations
tattatgtattttttaaggacaaagagaagtatttttagtacttgtattttgcacaagattgagatttaaaaatttacgtgtacacaagcagtggtactgtagtagtacctttactccatatatgttctctgctactgaaattttcatcatgatgttactgcaaaaagtgcagtaatgacctataaatttcgcagtaacgtatcgtgttactgcacttctgcaataatgttactaccgaataatagtaacaaggtgtggttcctacagtaacataacgggtttgtgttcataaaatttgaacagatatatagataaagcaaacaatgatcttatatcacattgtgttatagggtgaattggttaggagagtttgttatgaagcatgagatcatgtgttcttgtcttggattcaccaatttatttttcttttttcaaaaaaaaagagaaaagaataggaggaaaaataacaaaagtgagggagaaatcgacagagagaagnnnnnnnnnnnnnnnnnnnnnnnnnnnnnnntaccaaatctcg

SEQ ID NO: 39116 - DNA, 1478 bp, Oryza sativa
  unsure (1)..(1478): unsure at all n locations
aacaccgaataaaagtttactctatttaaaaccaagtagttatataaaaattaaaaatgggccaattaatatagagtggatccattggttgggataatacacatattgagtatactttatttatgcaagatttagaaattatagattcacttttatatgggaaataaactaaaatcgggataaatagaaaaaacccctattcattatggcgtaggtgtccaatgcggtccatagctttcccttctcctctccaactttggcgccctagccggcctttagccatgcaacaccaccgcccgtcgcgtcgccaccccgcaccatcgtcgtcgccatcgccgctgccgcaccatgcgccgtcgcgtcgcctcgcgccccacgcccctgccccgccgcgcgcctgtcccatcgccgcgcgctgccgttccgtcgccgcgtgcccgtcccatgtcccctgccgcgcgcgcctcgcgccccgagccgccacgcgccgtcgcttcgccgctgccgcgccgcgccgccatcctgccgccccgctcgcccacgcgccccgtcaccgcccgtcccgtcgccgcgcgcattccatcgccgcctcgagcccgcgccgctgttgccgtcgccatcccatcgccgcgcgccgagccccgcgccgcgccgcgccatcccatcactacgcgccgagccccgcgcgccaccccgagccccgcgccgccatcacgtcgccgcccgtcgcgtcaccgcagttgcgttgccgccccgagcccgcgccgccgtcgcgtcgccgccccgagccccacgccgtcgttacgtcaggccggccacccctccccctctctttcttccccctctcccctataaatactccacaccccctctccatttctcccactccatctccctctttctcccctcttccctctccaccgtgccaccgccttcgtgccgtcgcgccgccgccctcgcgccgctgcaccaccgccttcgtgccaccgcgccgtgcgccgtcgtcgcgccgccctcgcgccgccgcaccgccgccttcatgccgccgcgccgtgcgccgtcatcgcgccgtcgtcaccgccgccgccgtcgtcggtaagccgccgcctcctccccttgctcggtcgccgtcgccagagagccaagagagagagaagggagaagaagccgggagggagagaaaaaaagaaaagaagaaagagagaaaaaggagagaaaaaaagaaaagaaaaagggagagaaaggaagacgggaaaagaaaagaaagaaagaggagaggaaaagaanagggaataaatnataaaatggaattagagggagattatggaagttatgaaatttaaaatattagattttactatagatcaatataggcggagaatgcaaaattaatatattatagatattttgtaatcttatagtgctaaatcacggagaactcggttttataatgggaatctagacgttttatttgtatc

SEQ ID NO: 39117 - DNA, 768 bp, Oryza sativa
cggccccgtttgaaggttgaatcggcttcgtctgcaagtagttcatcattacctttgtttattgtgtgctccatgggttgtagagatacgcaacacgtggtgatagctccgttcatactttgtaatgattcacattcaggtacatcatagagctataggcctgattcgtttggcaaaccatggaaaagccagtgccctaagcaagtgatagagttttaccttaacttaattcaagattattaacccatctggatcctctctatccccctcctaccattaaattgttgtccctggatgaacctgtttccttgattttacacacttgttccctgagattcgatatggttaagtgctacagcagtatccgtgcgcttgcgtatttatctgtgagtaataaatatcaatataagaatttctggcggtgttactatggaacagttgttatattatcttcaaacctagtttgccttcttatcttatctttttatatttcttttcttttctttccataatggacaacttttatatgaattgttccaagggcagtttgtgaggcagcaccttataaaaattaattttaaattttgatttaaacttggcttgctttatagccatccagaccaatcctttcggggtgcgatggctaatgatgactacggaccatttgataaggccagggaaaagtggttctgggggaaattgtttccgttccaattccaacaaaacaagccgaaggttaatggaaagccgggggctagagagggcaac

SEQ ID NO: 39118 - DNA, 603 bp, Oryza sativa
gcttgatcttccttaattcatcaccagcaaaatactttctgaaggcatttgtttctcatttctgaaatttctgcatccatgtgaggagcttcacgggttggaacctcagccaaccagctttcgcagtagtacctacattttataaaaacaattaataggctaacaacgactacaaattatggaaacaaacatttaaaagtagaagcagaacattacttggggttcagtgagtgtgccaagcaatgcaggggggtattactttttgcccatcgagagtacaagatctcttgcacatgaaagaaaaaggaggaatgctcatttagttctttcccttcatgacgataaactatttttttcaccttatctatcattgaatcccacatctcataaaccaaatggaggcaaggtttgtcggtgtcagctgcacgaatcatggaatagataggatcagtgaaatctaggatatactgcaccttatcccaccacacatcatttagaaccttctctttgacttgctgtgcttgaacttgattgtcttccctaataagaattccatttttcactcactaccatcaagattagagattctttgacagcacggaa

SEQ ID NO: 39119 - DNA, 2258 bp, Oryza sativa
ctggaggaggaagaagacatatatataggggtgggactttagtcccagttggtgttaccaaccggggataatgattcccgggatctttagtcccggttcataacaccaaccgggactaaagttacgatctttagtctcccctggtgttaccaatcgggactaaagatcccgggggggcctgacaggccatgacagcatttgaaccgggactaaagatgatatttacaaccgggactaaagatcaaatatggtccgttaccctttttaaccgggactaaagatcatctttagccccggtttttattgtaaccgggactattgtggaattcggccgaccgatgaaagatggtttctccaccagtgaatgtacttcatcggtttcataattcttaatgttttggacaagatttagacaagatttagggcaaacttttataactttgactagcaactttaaaaacatttagtttaagtacactagaagaacatatatatagatttgttctcataaaatattataacaaaagtaaaatatagttaaatatattttatgaaaccggaggaagtaccttgttcacattactccatctacatgaaataccaaaacctgcactccatttccagattgcgggccttgttcttgttctgcctccttttgatagaatctattcgatccataccactgagtttattcgggtttcaacgatttaccatttacatataccgacgactttattaattattctacaatatgccattgggttgggtcttcttttcaaaaatacccaaaatacccttagagacatacaagattaataattgatttatctcattaaaagtttcaaaaaaatatgaaaatttttatgtggcctccttatacagcatgaaattttgtatataagcttcaaattttttttggtatatttagtttttagaaaaaaatattgttatgtggcatatatagaatttgcttatacaagagataatagcgcaaaaatatcttatgtagtgtataaaagatgatttatattaaatacaacaataaaaaattattttatatagtatataacagataagtaatttttttaaaaaaatagaaatgtaaaatttgatacttctatacaaatttttatgtcgtgtaaggaggccacataaaagtttttatattttttagaacttctaatgagataaatcaattgttaatcttgtatgtccataagggtattttggttatttttgaaaagaagttccaacccaatgacatattgtataacaattgataaagtcgctagtatatattatagatagatataatgttaatggcaaattgttaaactcgaagaaactcaatgatatagaatagattctctctttctttttcggtaagcaacattttcatgcatatcattactaccgtaaaggctagtcctttcttctcctccaacgtgcacttttccaccatgcgaaaaaaaacatactggtgactatactgccaagggactaaatttgatacggtactgtgagttggggtgtgttatattattttagtttagggatgaattccagactcgctgacaaattgaggaaccacaagtgaacttagtccttaaggaaaaggcctggacatatcacggcccgaaaagagagctggccggcatatcgattcgtttttgcttgggccgggctacagaatgcccataccgccaacagcccagcgtaactgggctccgagtcggcgactcctcgctcctagtcgatccccccctctcggcctatcccctcgcctcgactcaccgcctcctcgcgacttcgccccgccccgccgccttgcaccgagctcacacaacccgcggcgacgcggcgtcgccgccgctgcttccggcgcatcctcgccgccggtgagcaacccgcacgccgcgcctcctcctactcatccctctgtacccttcgccttaatcctacctttctcttctagatcccggaagcttttctccccttgccctaaccctagtgctaattcccagttcgttcccccaaatctggggtttggctcgagccgccatgtcgcacgtgaggtccgcctccgataggcaccgggacaaggagaaggagaaggagaggagggagacgcaccggagggaggagaaggatcaccacggcagcgggaggagggacagggacagagacagggagagttatagagagaaggataaagatgacaggagggagaaggagaaggagaaggagaaggagaggga

SEQ ID NO: 39120 - DNA, 4486 bp, Oryza sativa
atcacctgtccgccgcctcccgcttcttcgccgccgttcgcctcgcccgcctcgtccacctgtccgttgccgcccgcctacctttccgcctcgtcgacgctgtcgacctcgccacgggacgcgcggagcggtacacggtgaggtacctcgtcgcccacccccgtgcgcgtggccgcgacgccgccgtccgccgtccgcccccgtgcgccgcctccgctcggcctttgccgcgacggcgccgtccaccgtccgccgtccgcccccgtgccccgccttccgccggccgccggcccgctcctccagtggtctcccgccgccgccgatagagtgaatcagtgaagagtgagatagagtgagagagaagagaggaagagtgagagaggggggaaagtgaagactgacatacgggtcccacaatttttttattagaaaacgctaactgggatacgacttagatcaaaactactgcggattagatcgagggggttaattcgtccggtttacatagtttgaggtgaagaatgtccggttttgtggttcaggaggtaattcggacgaccgtgatagttcgggggtaattcgtactttttctaataaaatattatattatgtttatattattaatagaaatgtagaagactctatcctgttcagacgagacaattaataaccatataaacatctattgtactttatgcgcattctccatcctctccccctttccctcccacccacatggctctctctccccgaaatgacttgtgtgcgcatgttcgcgggcgcggctgctagcgaacaggtcattgcttacatttttgccaagcatgtttccttttggaggcattttccttttttttcttttatgggcttggagctaattcaagtgacggctctctaagcagagacaagaaatcatggcccatgcggcccaaaatacgcattcatgctttttttccctatttttattatatctctatatgaagttgtataccaattattttgcatgtataaatttatataccaaatatttatgtgtaaaatcgctacaccaaatttttctacgatataaagcttatatgtataaagttgcgtgtataaatttttatactaaatgtttctgtataaaatgcctacaccgaaattttctatggtgcaaagtttatatgtataaaacttgtatggtataaagtttagatgtgcaagtttatatgtatatattatatgtatataaactttatacgtacaaattatttgggataaaatacaatgggccgcatttagtgggtcaaaagtgactaagccagctagcggctaaaaggggaaaggcacccacgctcgagggctggacttgtcagtatttgtcctgctaatgcgttcgtgctacgtgaatattcgtgtactagatccactcctctgtcccaccctcatgagctctctctcccaaactcaaggagtgctctctctcccaccctcatagctcaatggccgagaacactatgcagccgtcaatctatggtcaatagccaccaactccgtgttgttatggaaggccgccttcattcgaggtggagggataattcgtgaggctttttggattcgcagtagcttcgtttgctgactcattgtgatccacaacgagcttctttgattagaggtggtgaatcgaatgatgtgttttttttttgttttgaagcattttgagaaatgattttcaggataattttgctcgttaatttgagttatctagctttattgaaggattttgggcacttttttctaatcatttgttgcttgttttatggggcaatggaacatgcagtaacttttttttttgccatggggtaatttattgttgttcgggtgttgtttcgattaaattttttaaattgattattttttgtttttcttgagttttctcatgaaacacaaatttgtggatatcccagcaatactttcgtaatatctaatgtatcacgttagtggtaccatgatattgaggttttgtaactacaggcggacctatttatctctgtacatataatatcatacctgatatctatatgtattactccttctgtctaaaaaagccaaccttggcatggatgagatactttctaggacacgaatctggacactccgtccaaaaaaagccaaccttggtatggatggagctatgtccagattcttgtcctacaaagtgtcctattcatgttaaggttcgcttttactttttttgggatggagggagtagacctggtgctcggtactagggtatgatacctttggaaggtttctcgcatgctgatatcagcatgacgcaaatacataaagtatcccttccacttgtgtttctttcgagtctttgttcacttattatattgttaacaacaataaaaatatattgtatggtataatataacaaaacataattcttttggtactactaataatttgaccaattaatcttatagagtttatataagatatggctcgaacagggagcagacaacttggatatgatttcccacgcttatagcaagaacattttctttcttagagcactttagtatgaaattcatgatgtcgatatttattcaacgaaataggcgtaaccatgtttcttaaatgcaagactgtcaaaaacattaaagcaaactattaattaatataaacttccgatcgagagcgtttaagaacaatttaatattgttcatgcagtcgtaaaaagatttttctcgacaatactcccacttttatctaaaagtgtaaggcatagcatttcttttatcaacaagactaagaaaaaattatctaacaaatcaacaatcaggttccgatcaacaatttaagtttaacacgataaaacataaaagataattttttcatttaagtcttgaatatatgaagactacaaatatacctatctcattaaaaaaacagaaaatgaaataatgaaatagtttgtataggactttttgacagagggagtaagacggtaatggtccagcactacggtaaaacgagttactgcaggtgggcacagatccagatcggatcactttgtcgttagttaatcattgaccgggtcgcagccatgcatgcacgattttgtgagtgtagaagacgtcatcagcaattaattaatcgcatgtgttcaacccatactaccgatgagagaccagatgtctaattagaaggagatagcattacagtttacgagatacagtagctttacttgattctacaactaaaggcaattgggccggttcgcgcccatgtgccctgggaactacgcaagaatggaaccgaaatgacggtcaatacgtgtcataccaaaaactactgcttcatatgttttaaaatatatcaaactagtaaacgattaaacaacgacgaatatatatatataaagagtatatctacatttatactacttgtgaactcaattgttactctccctgttttatattaatcatcatatcattttctcattaagatcaataaaatcttaacttctctgtattttagggtctatatgatatagctccagctctaaactctacattcttgagagttaaagcccaaccaaacagttttaactccacctaaaatgggtgtggagttgtgtgaggcgtgtagctctaccaaacacccttatttattataagtttgtagtaggggaaaaatcaattttcatatagactttaactcttcttatgcctaagaaacaagagagctttactacccggccaaaagcttgcatgcatacatataagctcaatttgcatgtacaaatataataatactaccgtcaaatgaatgagccaaggttacacgatgattaatttagagtttttgatatttttatacgacgatcattacaagatggaggaagtatattttaaacgtatagtgtttactactacctccatcccaaattacttatcttttaaggtcgtttagtatatcataaggtttgaaacaaaagacttcaatacccttataaaataatttatgtttaaggatagaagggtggttgaggggtaaaataggaagaaatttaaatgtgatgtgattgatgggacaagtattactaggagtgataagtattggctgtgtttagttcagcgcaaagtttggattttggttgaaattggagatgatgtgactgaaaagttgtgtgtgtatgacaggttgatgtgatggaaaaggactgaagtttggatccaaactttggatctaaacacagccattgtgggacaaaatttgaatggtagaaggataactaatttgggacggaggaagtatcaaagtggcaagataagagcaggtacaatagcagactataagccaactataaccacatatcgagaagaaaagagaaagagagagagaaagcgggctatagatttggtagccaagctgccacacgggactccaaaatgtatttgtgtataagatgtgggaccgggtattaatggtgcag

SEQ ID NO: 39121 - DNA, 731 bp, Oryza sativa
ctgcagcccggatccgacttgtattatttaaagttatttctgctgactccttcatataccttatgataaaccaccggggaggatgatttgcaccttttttgacgttgagggaagcgttatacccgttttataattgaggatatgatttgatcaacggctagatatgagggtaggctaatatacttctctagcatagacctagcatgggctaaacttcacataaataatttaattcttagtagatatcacgataatggaaacaatactgtaaatgggcctaaattctgtacacactagtacacactaccttcccaacaggctaggacaataacacggacaaggccgacacatggcattagataggtgatccaagcatctattccactggctgataacggttcaatatatctgtacagagaattgtttgccaatccaaaccatgcctactgcatgagcatcttagtaaaaagaaattatcatgcacgctggatttatgtgacagccgcatatgaaccagcatgtttctcctttccgtgattatagcatctatctatgatattttatcatatactaaaagtgcattgtacatcgtataaacgctcatataccggtatgtggctcttttataaacactgctagacactcgcatgacactatcaaatctcaccatggatgttcatgcaaattggtggacccattattttacaccactaaattagatttatcattaa

SEQ ID NO: 39122 - DNA, 753 bp, Oryza sativa
ctgcagccccaattcgacctgtggaatttgtacataaagcatcactatcttgcgctgcctgatatgtagatgctggggggggtaattcatctacttcagaccattctgagatgaaaaaaaaatatggtattatatgggatatgaattgatcaaccgctaggacaagggctaggctacattccaactgtctatttggactctgcagatgtaaattctcactgacgcgtgaacatactggttagcttacatgttaactgacatgtttcggtcaacatgggcaggggctgagaagactagggtgaacagcaatgcaatactaatggaaccttatgcgcccaaggatgccaatgggaatgtaatatgagaacaaactttctccttcccagaactctcgaccgccaccatgaatttaatgccaaagtgcttcctgtacgaacgaggctttgggcgcgatcataagggccgactagatagcactggccacttaacttatttgacaaatgggtatatgcttcattcttgccttcacctgcggagagctgaacaaccggataattgcactgttgcaaaatcttcactgaacactattgattggctaagatacacgtacggaactgtttacatgactgacaaatgaccatgcttaacacctgtttatctcatcatggttgttcatgcataataatactatgcttataccactcgtcgaaatacattgtaatcttggcctggaccgccttctttctgtttaaa

SEQ ID NO: 39123 - DNA, 574 bp, Oryza sativa
ttctatatactaacttttgcacaatatttgatcgttcatattattcaaaaatttaatatagatacttaatagtataagttaagattatattttatttgatgataaaacaaatcacagtaaaataaataatatttatatttttaataagacgaattgtcaaacattatatgtgaaaatcaacgacgtcgtccatttaaaaatggaggtagtatatctaaatcatttttccacgtcgtctatgtaacattatatgtacataaaaaaaaactttgcactgccaaggccaaaatgcctattttctttaaaaaataatgttaagggtacggtattctaattttatcaattaaagaatttaaaaaaaaaatcctcgattggtagatcgatcgagttggacgcaggtgatagatgcctgttctgaactttttttccgagggcggtgatacgtatcttccgatcgctcctttgggagtttatttatttggtttttgtccaatcgctttgtactttcttgatcctttggatgcatgcttgtgctttgtgctaactatccggccgggcctcgacagaaatggct

SEQ ID NO: 39124 - DNA, 639 bp, Oryza sativa
  unsure (1)..(639): unsure at all n locations
ttaagttattaaaatgttgcaaggggtgttatttggatgtttcactaaatcatttataacgttgcacgtgttgttctcgatgtttcagcatgtattctgtaatgtttcaacaactacaacttaatgtttcatatataatataaaaatatttcaattagtaatataattatgttatttttgttcatcctaataatgtgagatctctttgttaagatttaattgcaacaaatccaacggtgcaattggatcacacatcaaataagtattttgtgaaaaaaatgatttaaaatttgctattaagggaatatgaggagagagaaaggggtgcgnnnnnnnnnnnnnnnnnnnnnacgtggaagagataaatagttccatgcctgtgaaggttcccggagagaaatagttacatacatgcttactgacggcgcctgtttttttttaataaaaaacaaatgcttgatatgtagtcttgtcaagggtgaaaggctaaatggtaagaaagaaaagaaggaaggaaacaatccaaaaagggagaaaagaaaaaaaaagacaaaagccataaaattcgcaaaaagccaccaccttccccttgtttgagcagatcaacacaccacatgccaatacgtgaccatgtcccct

SEQ ID NO: 39125 - DNA, 615 bp, Oryza sativa
ttttgcaccaatttgagaaaacaatatttcaaccatgagtcattcccactttctatgcaaaagcagaagcaaactgcccagtgacttgcttgggtttgctctattctatgctggtttagcctcttccagaagaatttttttttactattttaaatttttattatttcaccagccgcggttggtatggctgttttttcttgcctctagaaagtttttttttttgccactagtgtggccaacgtggcaaaacattactatcacgccaatcagactggtgtggcaaaataacattactatcacgccaatcagactggtgtggcaaaataacgttgacacgttagatagagcggcatggtaacattgtttcaccgtgctaacatggctaaaaggtatagatttagaaaggtttacttttaaaattaaaaattaaaaagatttaaataataataataattctacaaccagctcctccacagaccaggagacgacgatggcctaacctgtcctgcaatttgctgttcggtgaacttccactggaagagttggtgtcctgactaatctaacgacagttgatcttcccatgaacagcttcaatggcacaactccagaaagcat

SEQ ID NO: 39126 - DNA, 739 bp, Oryza sativa
aaaaaaagaactgaaaggcataacgcaagctactgaatagaatgaccagaatatgcttaggctggacttcaactaacagagcatcagagtggagtactttcaggtaatagtgcgagcatccatatggcattcttttattcaaatactgacaagaatgactgtgggttcatgcaagatgccatctcttgaaaaagtttgaagcacacaaaggaagtacttcaacttattttccttgtgaaaagctgcatatccatccaataataattagattaagataatccccttttcaatatgcaattgttgcagaatagcatgtaccccatgaagcatatgaatattccactaggaggaactgttcttaccaaatctatcattggcacaatttacggtctatcaggattcaggtataactacttaaattaaaaacgaagtttttgttccctttacatgtgtggagtgaacagcatcaccggtctattctccaggaccactcaccctttcatcacccaactctcaaattgcagcagatgtgttcaagaaaacgaacatcgtccagaatagtctaccaaattaatgagccagtgtacgtgcattttctttttctttcatttctttttttagtttttgatttggacaaagatcttatccatacaatcgaggactcactcatgacaagcagcaagtctattaccattagatattatcaacccccagttaaccactgatgagctacttgcag

SEQ ID NO: 39127 - DNA, 670 bp, Oryza sativa
gctctcaactagtggatcccccttcgtcgcagggcccatccaaactccatcacgcccacccttgcctggatgcgtcggctagaggaaagctacactacaagcccagccgttgcccacgctggcttgtggtaagtacgataagttcttccagggcatcccgcgaaccggtccttaattgccatgggtgcgactagcaaaaccatgcacccacagcccaccattcagttgcattttagttggataattacgaccatgaagcatggccagatgtctcgagcacgcagctcatcaagatagtagaatgtctaatactgcaattatcccatcaactgagctagtggtaattaagcatggctaagcatatagttctagctaggtcacataagtaacatgagctagtcgattcattacccaaagttgacaaagaacagatatcaagtaaacatggcacaagcgagcagataggtaataccctgaccccatgtaattagcaaaatatgcatatttatttgcaaacagtaaaacatttgtaaattgggatcaacatgctcaaggggaatgtgtgacttgccttgcttcttcacttggatcttctgaactcttatccttgcgaacgcaatcttccgaaacggcggaaattacacgctggcacgcaaaacgaggaaaaact

SEQ ID NO: 39128 - DNA, 817 bp, Oryza sativa
atcaaatgtggtagatactgttaaacatattttccccttccggtatggatctttttaaatcctaactgtgtgcacttgctaacttgtactttgatgagtgacctgtatcgatagtccacataagaagttaaataggccatgatatggtgattgacatggtctaactaactttgctagcatttcttgtcagctagtagtgatttgttattgctatctggttgagttgcagaatctctttgagctctattttgctcagccatcattgccatatatagaaaacacaaagaagtaatactaaatttatgctgctgcattgccaaaatttcatgaaggcactgctgagttacatgccctgaccaatgtgcccaaaagatttaatctgtcagggtaaggcaggctgtctactcatatttcaatcaccactcaagtctaagtcccattcaatcctatgatgtgggttatatgtggtgcggtgccactgggacacaatgcaaactggtctctggagtgcattaacacaataattgatggaggcacaacatagcacctgaattttatactcacaacacaacatacatctattttttttcaaacatcaaaatacatctattgagcctaggcagatcttgaatacttgaaataagggtctctactcatgcttttataccatattgagtttcatgcgcagaccaattcatgggaaggctcaagttgtttaggaaaggtcgttaatgggtccataccaagttgaacttttcttgggtgtttctagtattagttatatggctgttgatgagagtctatgctgatgagacaa

SEQ ID NO: 39129 - DNA, 604 bp, Oryza sativa
taagcacaaataaagtttgacattacctaaacaaacagaaaaggaaatttgatcgtgtcatgcatagaggaagtatggcttaacatagcaattgatgataatcgagaaaaataagtcacaactaacctaattagataaaaccatgtataagaaaatattactgcagaaatgttgtatgataatgatagaaacatagtacaaaatgaatttatttcgtagctaaacattgtaatcttatatgttactttgtatagtttgcatctttagttaatcatccaaaaaaagctataaacacaattaagatgatgtgatctgaaaatttagatcaaatatagatccaatatcataagcaaaaattaaggtggtaaggctttatgaaagaagaaacaaaagagagagagaactttccaccagattaatcatcgaggtgctagaaattgagagatgagaaaaataacattagttatacttagtgatggttaagtatataattatatatatgattgtagcagacataataaattgccacgaacataaaaaattctaattatgtaacacaaatttcgaagtggaaaatggtaggcactatttcatgcccattgca

SEQ ID NO: 39130 - DNA, 593 bp, Oryza sativa
caccccctccactttacaatcgcgccatggcacagcctcatggaggtcattgaagctataatcactacactagatcaggtcagcactgacgggctcaaaccctcaactttgacgggttcagctcccggtcagagattagtggtcactgatgacttgagtcacctgtgacggggtgaacacccatcagaagtaagagccacctcaaacggcccccaactaaaacccgtcacaggtgagagtcacctctgactggtcccaaccaaaacccgtcacaggtgagagtcacctcaaacggcccaactaattgggaccgtcactggtgtgataaaaggggggcaaaaaaaagagaaacaccgtcctcctaggttaccatcacattcatttcaaccgattgcatttggcattcacaaatcaaaaaaatcgtcacaattccatcgcagttgtcccaatcacaaaacaaaatcacaagaatctcaatcaccataggactcagaatcatcaatcacagtagcaacaattggaacaatatgaacaacacaagacaaaatacatgggtgaaagaggacttgctggcaatggatctgagctcgtac

SEQ ID NO: 39131 - DNA, 626 bp, Oryza sativa
cctggtttatattttagcttacttattttattttaaattatctattcaccctcatcaatgtctaagtgaccctttcaaaggtagatcgacgtctacccatagccattataccttgacacctttgatatcttggtatcatggtaccgatatcatttctggtatcgacagtatcatgtgcggtataaatagttatcaaccagaaatagctgctaagagcaggtataatagcagactataagccagctataaacatattttaagaagataaaaaaggagagaaaagacagcgggctacagatttgtagtcagctgcagtacagactctaagacgcatgtgtatataataggtgggaccagatattgattgtgtagtaataggtgggaccagatattgattgtgtagtatatgtttatatgtaactattgtagaattggctattaagttatagatgatttatggccagcagttagctctactattaaacttgctctaacatcggtatgacacgagcatcgtaaaagctcacatcaccctaacaacatcccgtcttcctagtctccctctttcagcaaatttatttattaattgtgaatttaataaatctttggataatactcccaacttt

SEQ ID NO: 39132 - DNA, 637 bp, Oryza sativa
tagtcgatcgacaaaggtttggaaacattgaacgacgtacgtaatgagctgatgaagtaaaagcccgggcggaatcgggagtatctcttctagatgatcatatttatcatttattatactactaagtggcgatattaataccatgtagaaataaattaaaaaaacaaaatttatatatagcccaaaacaacaacgagaacaatattcttataagaaaacggcgctcgatcaatcaagaatttccgtggtcatttttaccccaaaaaaattatatataacccaaaacaacgagatcagtatccttataagaaaacggcgctagatcaattaagaatttttgtgatcattttcaccccggctgatgggctgatggcagccagaggctttggtccacaataatcgaccatgcaatgcatgccttaaatgctgcaggtgatacgtacaccttagttatataacactacttcgatgatgctgacggctactaatcatccactatcacggctaggctttaattaatcattgtaacgaaatggccgaacatctccatacgtcacgtcacgtctggtgatgatcgatcgatctcatttatcagttcattcacacgtcattatccatgcattcgactactcgagag

SEQ ID NO: 39133 - DNA, 685 bp, Oryza sativa
ttagacttattcattaccataatttttataatgcttggtgggtaatctttagagttttaaattcggatgcctgtccagtgtgttcattcgtgaacctttttagagtgtaaactactcggactcttttcattatggctaaaaagcggtcggctagcatgcctatttaggcgctgtgtgtgcttttgtcatatgatgcacgatcgtgctattatttggtctctcaactatatgtttagttcgttaactaatcacatagttgggggctacacctaattaggtgcatctattcgatgcaccatatttttatcttttcgccctttacagtctttgtcttcgctactcggcaggccttggcacgaaaagtttgaagcactcggattattatttttgagaaggctacgacgattgactgcaaaggtctcgggggctactgtggagattatggatatcccatatctatacggcgatgatatttggattgaatataggataccgagtatagatagaatatcttatgtgtatcctgggtttgtttcctaacttgtatatcaaggaaacaccttgagacttagtcggtcacgactgtattcagttagggacatagattatcttttgtaatccggactccttcctatatataaggggggtccgggtgcctttaagggcagatgttgattttctctaa

SEQ ID NO: 39134 - DNA, 590 bp, Oryza sativa
ttaaaatactctagataataattgctagtgggtgatgatatggcacacttgcatgtaatttaaaatgctctagataataattgctagtaggtgatgatgtgatatacttacatattaagtctttaaaaattattggacatcaactttacagtaagataagatccggggttagaaaagagggagatatgatagatctattccttcattgtcccttgctcacaacatattcttgggccttaagtgggccaaactccattaatctttgcacagccggccggttcacggttcgttggttcacaaagtaggcaacaaatcatcattgattaacgatcttaaggctgagttctttgtgttggaaactcaccttccatgtacgtaaaacttaacgatttattagcattagcgtatgattaattaaatactccctccatctatttttggtagacatattttcaaatctaaaaaaattatttttgattggcatatttcaatccaacaacctatcctcttaaagattttttcggatttaatgtgtgactccattttaccacaaaagattggttacatgggcatcgagaaatataaatatt

SEQ ID NO: 39135 - DNA, 623 bp, Oryza sativa
tgggacctgcaagaaggcaaaagtagttttaaataccagaagacatgatactgcagctgaaatgcaagcaaccttgaaaacaagttatttgttccatacctagaatggatgtgatcattgggaacacacgagaagacattttggtatatcttggtgtttgcctgccatacaatatcaatttgttcagttagagaatgaggtaaatgtgttcacagcggtataaacagaaaatgcagtggaaaattatcagctgctgaaagatggcaaaagttgagtagaaaacagtgcaatgccagaacccagaacagtcatattcaaaagtttccaggttgagcagactagcatttcacgataaatctcaatttcactcaccttagcagtgcccatccagatgttgttataagtcaaatcgtccacaggatccataatttgactaacctgttaaggagaagtgtcagcagaaagaaaactcacaaaaatctatgttgtacatgcagcatcaataccgtaatgtattgtgaaaacaatataaatgcttctgtcaatattctttatatggaaccattcatcaagtggagtttacacaggacgttcttctactgtggttcactgaagcaatcaca

SEQ ID NO: 39136 - DNA, 617 bp, Oryza sativa
agcttttatttatataattattttttaagtagtctatatttaatagactaaattagtatctaaatgatccaaataccacctaaagttccaattcaagtcaggttcttaaacgaaacctaacaacattgtttatacttttgtttttgtcctgtactaggcattagatgatctcagccctttccctgctgaagctggacaaatggtaaatcccttgatcggtctatcccagcctcccaggctcgccgctaaacaactttaattaatttatctaaaataaagaggaagcatatcatcaactgctatcctcgtcacctctcccctcccgagttgacttcccctctcacgcgtattcagggtggttcgccatgccggcgcgaatgtccatcacatcggcgtcgcgtcgtctccgatgagtaaagctagtcagcggctgaaacaggaagggcgccttaacgtacgagaggacacaggtacaaattgttgtacttttcaaatttaaaccctagtttagcttctaactttttgttcaaacttttaacttttccatcacattaaaattttgtacacacgataacttctaactttttcatagatcggttcaatttaatcaaacttcc

SEQ ID NO: 39137 - DNA, 800 bp, Oryza sativa
ttgattaaaaatttagacaagtacttaaaatggttacagaatttgattttttagatgaatggtatacgtacgcaggatgcctgctggctctagtaactcgttcgtatacgtggatatgttcagatatgaactttcggccgcctacagcggcgcgcgatcgtacgttgccgaccatcacatcatcctctcatctcgattgagttagatgctgtgatattttacgtctggttgctagctaaagtagtggcaaacatatgcatgtcccgcacatgcgcaaatcgcaattgattcgcagacgattgcatcatgtaacacgcagaaagctttgggtttgaactgatgaaggtatgttcacaagctcagtgttgggcaggcattctgttttttctctctcgagaaatcattcctctaattgagtacgagagatttagtaaaatatgcttcgattatttaatatcctgacttagtattttttttaaaagatacataggaagacacacaaactcacttcatactcacgccacaccacatacacacgtgcacgcgttcaacacatgattagactagagacttgaaggacctaaagccttcggtgtgcgggaaacgcacattacaacagaacacacgtaagtgtgtatcctctctagccgttcgttcaaaattattgggttcatgcggactattcaaaattttgattctatcataaatttttaaaacaattacaaaatcataatcataagacaagtactattttcaaaaatgaattcaacatcatccataacactcatcttcttttctca

SEQ ID NO: 39138 - DNA, 560 bp, Oryza sativa
tcgtcgaggatttcttgatttcaatcggacttttggttatggggggcaagggaagaagaagaattggctaaggaggaggggctagatggcaatggcgtggccgtgtgcggagaaggagctccggatggggagaggcgagccgaggcgaggggtttgggaatggcggagaggcgcgattttgcggttttggatgacgcggctcgaggtggaagacgaggggtcgtttggtaaataagggataagtagggtggcaaatggaaattatttgcaatcttcacgttttcagcgtattgctggattgcggcgatggtgaaagttattactaaactgcccccgttagctccattttgaatcgtttgccatttattgcaaggagggatattttggtcattagtaaaaaaagcattcccttccatatccatcaagttcgttagtgcatcattattatattgcagtcgataataatgcaatatgtatttttcagggcttattttttcctaaatagaaagcatgttttctctgatatactccgtagttagaacatcaagttaatggatata

SEQ ID NO: 39139 - DNA, 678 bp, Oryza sativa
ccccagtcacgccttcgccccaagcaagtcaggcctcgccactgctatccgagccccttgattggggaacggatgccgaggaggatgaggatgacgtcattgctctggagctacaccaacattcagcggagacattcaatccgcagaccgccaaagcacgcaaagcagcttctccatctccggcgtccaaggctttccatcaggaaatcaatgcccgaagccaggaagaggagctcgacattactgcagagagaggagagggacggagcgccattacgccccctcccgaaaaggcacaagaggaagatgcagagaagaaggccaaaggaaaagcaacattaaagtcgataatcgtagccccggcaagagctacaagcaagtctcaaatcgaggcagaagagtgcggcggcctcgacattcagaatctggaattatagaacaaggagaaaacggttatttaggttatgtaaatagagtagtatggcaagattttcttatgaaaaagtactcacacttctgataagggttgatgggtgttaaggctgatatcttaaagtttgggacttttgatatatagaacaacactcagctgagattttgataacaacactcagttgagaggatcgtaggatagataactcctcttttgtaaagtgtctgtagaataccgctacagag

SEQ ID NO: 39140 - DNA, 592 bp, Oryza sativa
gtaaggcgcgcttctcgtcggtgccggtgtctaagtgcgcagaagtgcgcctcatgaagcagatgggacttctcaccccgggtgaaccggtcggggatgcggcggtggaggcttatgcaaagtccttcgacacaccgcttccgtcgcatgtcattgccggtctgcgggtgctcacacgcctggatgaagtgcacgacatcccggtgccaggagaggaaggaaccaccacaacgacggtggtctgaggcacgcgctgccgcgccatgagagaagtcgtcagctgtcatgattgtccgcatcagtgttagagctgcagaaatggtcttccatcatcatctgcatgtatcctttacatttctctgcggtcttaagctgctgctcgctgtatggtcgatgcgactagcgctcccatgcagcaacggccttaagccggagctccttagtcggttgatacgaatagcgctcccggtagacaccggccttcagctggttagtagcagagtagacaggctagaagatagtgaaattgcttctacatggtcatgtttggtttgtagttgtaggtcatggaagaaaatatatagccctctat

SEQ ID NO: 39141 - DNA, 1225 bp, Oryza sativa
ctagcttctacttacaaatttacttgatgcgaagttggaaggtgcgaagaaccacggagaaacaaggtgacatatcagccatacttagcgaacacctccatagaacctgcatactgtagtactaattgacatcctaaaattggcaatccaaccaatgccagacatccatgtgcttatctgtcagtatcaaaaaaaaaatgatgttaggtcccagagagaaacaatacctgaaaaaaatgagatcgtacccaataataagtagttttcagctacaatattccatcaaggaatataaaagattgttcattacagaataattcgttagtctataacaaggtgcagtagttccacatattagaacaattttgagctgcaccatgtttgcccactgagatgaactccgagttttgtactctgaaattgtttccaaacaacataaacgagggtactaaaactcacttctgctcaggaatgacgtcaacagacaaaagtaaccatctgcaggtatataactgattctccgacaaggtaatgaaatgaccgttctctgtaacaaaaaaagtaacgtcaaatcagtgttctgcgcttcagaaaattgaagtgggaattaactctcaacaaatattttgtgccaaatgtgtcaactaatgtggcagatcatgagctagtctaaatcatatcttggcaaatcccaggaatatgtaatcttgtgtaggatacgaacctatttagatactaatggtaataaggtatctgatgttggcaatgaaatgctggactgctagaatgctatttgcattgatggacgttttaatagattctttcagctaatagaactgatctggagtgagaaagaaacagtgttattttgccaccatataatatgggttttgctggattagcctgcgtagactatacagtgtataaatttgctttgtcaagatccgtagtcaatgaataacagtggacctcttagtatgagaaaggtacttgagcatagtgaaaatatgaatataccaaatgtaaatcaaatagacagatgagtgtttgtgggaaaaaaatagagacatgagagtttccacttgtccagactaatgactaaaattcaaaatttcacccaaggaacagaagaagcaaacagagagtggcagagtgagacaccctttaataatatagaattatatataataaattagcaattttaacacaaactagtgattcgcag

SEQ ID NO: 39142 - DNA, 673 bp, Oryza sativa
tgaggagattgggtcgacgcctgttgttgttcgggtcagccatgtgcaactagcctagagtaggagaaaggagtaaattgctagctgaagaggaaaaaaaatcaacagtaaagaaagagtgcacttaaaacaaatcatattagctaatggagaggtggctagtccagaaaagtattcgacgatcgattgtcatattagcaaaacacacacacatatcgaacatattagttcaacagaaagattagcaactatcagacacacacatcgaacctattgttctcaacaacagaggcagaggcacatcgaacctattgttctcgcagtagcaactagtaagggtcgatgcgggagcctctgtgctacttaatacatacaggtgagtcgacccatctgaaccccttggcaggtcccaaagtgtcttcttcttcttcttttttaagaaacctatttttatttttaatttcatatcccatattttgtgtctctattacatttacaagttttttacaagaaaaaaggactgaatggaatcaattgatcttaattcgggtatttgtgaatcgagaacgagaaatgaaaatgactagtgaatcactaaatgagtgttctaaaaataaaaaaaaaaacactgaatgagatactagtatagaaattttgacaccctgggggttat

SEQ ID NO: 39143 - DNA, 677 bp, Oryza sativa
taaggagagagtagtagtcaattaaagagtaaagagaatagtctagctctctgctaaataaggcttacaaaaatccaaaggtaggtcattgactggtactttacttgccactgtggtctaagatatcgcaaaacttaatttaaagggtaattcttggctagtaagtattcttccaagacctgaaaagtgaaaccgcttgttagagcgcaatatgcttgaataagtatatatgcagataataatttagtaagaactttacttaaacagacaaaatgaggcatctactcaactgtggcatcctacccatcgtcatgcatgcccaccatctccatcctcattgtcctcaagaagctgcagctaataattaaaatgaaaaaactttaacagtatgagatagaaagcatgtgcatattgttagtcatagataatacttacgttttccaatgcattggtaagaaactctctgacatcctccaaacaaattgcatacccacatttagcatccaccatcactgcgtgaaataccgccatacattgaccatcaccatttataaccggccctccagaaaacccgttggcacagtcaaattcatgaaactccgtaagtttcatagtgtaacctttggtattgcaacttgtgagaacatcgtaaggtctctctagatagcttacggaac

SEQ ID NO: 39144 - DNA, 684 bp, Oryza sativa
cgagctcggtaccccaaagataatactactaatattaagcaaaggctagtggtaactaaagtattaacaatgtcataagcactggagaaagcattattcaccatttggcgttcatgctgcatagagaagaaaaacaaattgctaaaaaacaccaaggcaagaagggcaggaatctcaatccaagcacaccttagcgtaagcatcatattgacggtcatctcgaccagaatactggtgatgagttagttagccatggccatagctaggttgatgcggctgtcgtttcaaactgcacagcgccacagatctcaaagcttatagcgatgtaagtatgctgtactccctccgtttcaaaatatttgacaccgttgattttttagcacatgtttgaccgttcgtcttattaaaaaaattgtgaaatatgtaaaactatatgtgtacatgaaagtatatttaacaatgaatcaaataatataaaaagaataaataattacttaaattttttgaataagacgaatggtcaaacacgtataaaaagtcaatggtgtcaaatattttaaaacggagcgagtaaaagccaacgaggacgggtggcaccactggcacggtagctacgaggaagaggaacagaaggaggatgcaatggcgctcctgggcaaaacgggtcgcctgcatgtatcaatc

SEQ ID NO: 39145 - DNA, 587 bp, Oryza sativa
actatagggcgaattcgagctcggtaccccactagagtcttcttaaacataggtcgttgaatgactgtttatagttgcgaatgtgctgatactttggttcaatttagcttctgggtacatggttgtcgtgattttacaatgggaagttggcgtgtgaactgatgatggtgtcttttgattatgttcgtgtttgcaatgtggtattccagtcctggtaaaatgagccatggtcttcaggccccatttttaattacaacaattttgtagtaggaactatattgcttaccgggcaaagctacagagcgattcttgtggtacgaatttttgtttgcagagaagtttcataaagatcgcctagtcgtgttacattgaacatgtggggatcgtcaaagccgccccgtgctagtccactcaacatattgtacgcactggtttactgactggttatgtgcatacgctacgttatctggttgaatttagggagtttatcagttgcctcatgcttagtagcttgcatctcacatcagtttcgtgtgcaaatccttttgtttgttgaccaaaccagaatacggccgggcctgagaact

SEQ ID NO: 39146 - DNA, 1267 bp, Oryza sativa
ctatagggcgaattcgagctcggtacccgttcattacgtatgacttattttttttatatttgcataaaaattttaaataaaacgaatggtcaaacatttgtaaaaaacgaacggtgtcgtatattaaaaaaaagaggtagtaacactaaagatgattatttggttgttacagttacaagcacaatgcttacgaaagacatcgactgatatgcttctttcttctgcagaacattctaacaatcatcacttaaataatatactatactgacgattttgcttatagagaagaatcagtcacaagatgattgggtttcaattttgtttcactggatcatcaatcagctgggattagcagaaaagaaacttgcagcgagtttacacgtttgtttcttgctaagaattgaagatcacgtacgtatcatctactccagctagcttgtgtagacgtcaactccaaagagagaggattagagattagagaagctatctagtagctaattaacatggcttacttgtcatcattagcattttttttcttccatgcaaattaaggcttgccattgccaacttcagatggacagacgacagccatatcttcagattaattacacgtcgttttgctgcatatgcacgtattgcatgccgtggatctaattttcagcgaacatttctacatttgtttctttcttgcaaaaaatggacatgacgataggatattatatgcagtaaactgaaggattagagggccacatgttgctgctgatattatgttcatcagtcatcgtctctcattgatatctttcagcagtttctgaagactgaagttgctgctcaaggcaagtcttggtcttgcttaattggaacgtgaaatatcttgaattgttgtgggtctatgcatctttctatcattaaattttgtgtcaaaaatctagcgagaatgttctacatcacgctagttaagaagctagctacccctctatcgtttgcttgttttgtcagacaatagccaaaatttaaattatgaaacttaattttagatttgatttttaggttttttttcatagtttatttttcagtattggctttagttttatgcacaaattattttttgttgtatcatttattttttttcaatataagccgtagagcgaacataatgttgtgagtaatatattgacgaccaaagggagtaaatatttatatagtggcaaatataccttttgtctccttcgactctatagggtgtcgatctcactgtcgtgcatct

SEQ ID NO: 39147 - DNA, 640 bp, Oryza sativa
tgcaagaaccaaagaggaatctgaggttccgatttgaaaatttctggattagagtgtaaggtttcctaggcgtcgtaacccaggcttggaacgagcctatccaggaaggtcaccccacttggcggataagtcaaaagctcagaaacaccgaagcaaccttgaggaaatggagcaagcaacatgtaccaaaacaaaataaagttaaatacctgaggcaaggaaaatagaatatgcatttaagtgtatggcaggatgatatgaaaaatagcttttaagcaatactacactacaacaggaagcaagtggatttgacaaactttggtagagataggacagtactcttcatcaactttacattgaaatcatccatgcatttcttgggcatagaacaatggccatgtaaattatcaattgtagagtaaaggatggtgaaataaattaattggacaacataatgataaaaggggatcagggagctgacgaaccactgtcctggattaaaatgaagatatgcaaggaaaataaataaaatattcattagatattgatgccagacattaatattgttttggcagtgagaagtggccaaacggcaacaatcggaggacttctttttattgaaaaatcgtatgacttctgg

SEQ ID NO: 39148 - DNA, 531 bp, Oryza sativa
tttgatcatcttttttagccaaagttttataatagactagaaataagcatatattttcacttcacaccatatatgcttaccatctgtgatatatgacattggttagtttaaaatagagtaaattttactttaataaatattatagttagattagtatatgacattggttaattcaaaacataagtattttaaagttatttaagtaaatactaaaggttagagtaaaaagatttttttagtcaccacagtaggctttttttgtaaaaaaaaactcactatggtggttaaattttaaattgtttatattccctatcataatatgtattcagtgccttagaaccagtattccagaaacacttatattgtagtataaattttgaataatataaaaatacttatatttcaaaatggagaaaatagatttgcattttctgtcactgttgatcatcagttggtcaccattgacgccatgatcgacacgcccggtcttcacgtagctgagacatgactgcaacaaccttaattaagtat

SEQ ID NO: 39149 - DNA, 535 bp, Oryza sativa
  unsure (1)..(535): unsure at all n locations
acaaaaggcgcaggnctgtggcgccggtaccggttgcccccccggcgctcaggttgacgagctccataggctctcgctctctcatcatttctctccatgccaaatacctaacagaagttggtttaagagccgttctacaaatcctgtaaaaaagttatgatggtgattaatggtaaataacactcccaccacaactctatactttttttttaaaaaaaaagagagaataatatataacacataaattagagggtccacatgtcaaccacctcatcaccaactcctacattttataaaaaagaaaaaagaactgtgaggccaatatataaatatatatatatatatatatatatattagtaacaactatattatatataaattaagcgtagaaaatgagggtaataataggttaatttttatttttgtaaattgaaataccgttgtaccgcatggacaataataagttttctagttaattagatggagtaattaatataatgttgttggcattcgggcagcaagccgattgcgccg

SEQ ID NO: 39150 - DNA, 765 bp, Oryza sativa
cgtattgggtttttatatggattcttctttcaatattgcttatttttaatttcgaatttcagctaattttaaattgtatttctacttgaactcttcttttattttcttttgctaatttcggatttatttatttttattccaaatttttattaatctcatattgagctcttatatgcactcttcttttaatattccttattaatctcatattttttattaatctcatactgtgtctatatgaattattcttctaatatttcttatttttttattcctaatttcagttgttcgtaaaatgtatttttacttgaactcttatatttgatttttctagtttctaaatctattttattttttattacggatttcaattaatctttaattgtgttctacatgaactcttctttcattttttattgtgttattatttcaaaatcaaataaaaatccgtgcacatgccatcatgcttttctggttgctgacgtgtgcatcacccaaatacggctcactgtgcagccgcacggcttgacccgctgcttcggatttccgtcgctcgccgctagcatctatcttcatatcaacaaaaacgcatccaaattacggttctacagtggttcgttgcccgctgctttatttatatatgtgtattatagcctaattcatctctaactctagttaattggtttaggaaatcggacaaaactcttttgagtctgtttgcatgtaaaggccctagctagagattgattctaattctacacgcgt

SEQ ID NO: 39151 - DNA, 1102 bp, Oryza sativa
tgcaacaagttatttgtttgtttaactttatatactccaatcttccagctctttggtaggattcatccttttgtttttgctcatggtaccatcaacataccaaagtacaggaagttgctgctaataaacaacatcaaaccattgctagtactcctacttcactaagcaaatatattatttgggagatgtggctcactcttgttaagatcacccgttacactttctgttaattaaaatagaaggttggacttttcaattgctgtgctaatatttttctctctgtttgaattagccctggatcatatagtagtattatccagtggagccggtagaaaaatatataattttttgaatgttactcctgctaatctaacgtgagctttgcatcatcactggaattgtagcggcagtgcaggcagagttttgattcgccttcggctccttgttttcaacgtatttcgccttttctatcggactctactccctccatcaaaaaaaaataaaaaaataaaaagataagtcacgtataaagtattaatcaaaacctgggttttcgtatacaacgtttaaccgtatgtcttatttaaaaaaaattataaaaaaaattaaaaagataagtcacgcataaagtattaattatgttttatcatctaacaacaatgaaaatactaattataaaaaaatttcatataagactgacagttaaacgttggacacggaaaccaaagatttatcttttttagaacggaaggagtatgttctatgaatactactagtactaataatcatgatgtcaaaagagcaaaagagccatgccactgggcagttgccaagtcaaccctcttcgtgcaagcaatatgtaaaaagtcaacctgcatatgttctctccacaaccgtacttgcaaagtactccccccatcaaaagggttagacatattatttttatactgaggattaaggaaaaaaataatctatctttcatataacaaaaattaaatagcatatatacgcatgcaaccaatgaatattaagatgatttctcatggtttgattaaacatttaatttatcttttcatttaaatcttaagtacatggaaactac

SEQ ID NO: 39152 - DNA, 608 bp, Oryza sativa
ttcctgcagccctatttctcgtgtgttgctcattggcccgttcaatccagcctttttggctaccagttgcctgtttggcactgaatttttttcagatgtttaccttcgtggtggttgtccccacttggtcatcaaaatcaggagtttagaaatgacattcgcggttaaatccctcgtgaaattcgatattctaatttcactggaggaaaaattattttgtttgtgtaatcctgaagtcttgactccatggtatccaagagaggtaagaccacatataggtacatctgtacatgcatgctacgcgctgtataaaatgttttggtgagtcgtgttatggattttgtgcatcggtgttcttttgtattgtgggcaactgggtggggtgaactggagtgtatcagtaagagcgagtacaataacgggctacaagttagctgtaagcacgcacatgtggagtaagaacgagtacaataacaggctacaagtcacctgtaagcacatgtggagaaaagagagagaagaagtaaagcgagctacagatttctagaagagagaagaaaagagagaagaaaagcgaagaagagcgggctacagagctatagatttat

SEQ ID NO: 39153 - DNA, 1103 bp, Oryza sativa
tcatttagccttctcacaatcttctattagtacttgcttgtaacataccgaaaactaactattttctaatcctgcatcatgccgctttttatgttcttaataacttcctaaacctaggaaaatacaattagagggaccttctaaaactaacttgcataaaatctctttctggtatttaacttcttttgtgtttttcatttaaaaatatagttggttaaattaaggtgtttcttgatttggttttaatttaaaaaccttctttagactaagattcttttattcaaatttagtttgaaaactctttctatttttttatgaattatggtcaaagaaacattcccatactgtcctagaacctaaaacaaagtaattccaattttattataattaattgttagcccattctttgttcttaaacccatcctttgattctcgatccaaatgtccaaattcctccttttgatctagccaccaatttaattcctgtggcttgatttcctcttcggcacaagaatagtattattgtaaatattgtgaataattgctcttgtgctaagaaaatagcaatttatattcttcactcaactttccctattagccacaaataattcttcaaatacttctactatcaaatttaggattcaaatcctatttattttacctccaaccattctcctccaaacatatatatacattgaggaattatattgttaattcccctctcatttgagtgcattaaattccaccatattccacttccaaaaatattgcactcaaattagaaaatatctgttttggaaattagatccaaatataatttcctttcaaccttccctattcaaattatctccaaatatattttcctttcaaaatcttctattcaaatccctttcaaaattgagaaaccaattctacttaaattggccgaaattctttttctccttcggcccaagccggcccaatacccagccgagccgccaacttgcaccgtgccgtgttcgtcctccgccgctgctgtgccttaccctcctcctccgccgttttctccttctctaagaaaccgtcgccgctgccctaccgtcgccgccaagtcggggctgcag

SEQ ID NO: 39154 - DNA, 1192 bp, Oryza sativa
gacatggacttgcccctgtgggctgtggcctgctgctggtcaagtgcctcgtcgccaacgcgcaacaaacttcaggtcccgagcgagcgtgattacgcaattgattgaatgacggatcaagcgtttgttgggagccagggaaaaatcgtaggacgtcacgcaactctcttttaatttgggacattgtctacaccgtggctcgatcgatcgttgctctcctggagaatgaaaaacacgttttgctcttctgtttttgtttttgtacttccaggacaacatgaaaccgcctactcagaatgatttttttcttgcgacctggtaattgagatcctaagcatggcagcatcgtgggctaattttgcgtgctcaattgctcatggaaccgtgaaagctagcctggttgcatgcacggcaaggctactgatccagcactgtgtgaggccgattgaagcttccgtggagtagaagaatcttctggcgtttgatgtacggagtacttcatctccagggacaggtacggtgatggtcgccattccaccaacctcgaggataaatgcgtctggtacagttgttaagttgatgatgtacgtatgaacgcaatagatgagcaaagtatttcaagcacatgcgtcgctaattgatgcgttcacaacaaaacaagcccttaaatggagaactgtattaggaccatccatgataagtaccacaaatggagttgcacttaaccttcttgctgacgcgccagcgcatggcgatgacccaagcacgatctacgaaactggctgttgagagtatttatgtcatagattctccattttcggtggcagcggtccagttggtttctccgtttctgcaaactatgtagtcttgtactgcaaaatggacggacagttcggtgagacagaatccttacgctgtgcttggtgatttctgcagtactgcaacatttcttcttcttcttcttcttcttcttcttcttcttcttattcttaacggaaagactgcaatatttcttggacgggccggaaaagcttgtgagttgtgatcgatatctgttcttgacgggtcgtgcaaactcatcagggaataccaacttcatggttaactgctctacacgcacatatattcgtcagaaattcagaattttctctagttttgtacaagggcctaactattgcgtagaacacacgag

SEQ ID NO: 39155 - DNA, 676 bp, Oryza sativa
agaaattgttcgagaggcttgggctcgcgataagatgggccgagacaccagtgctgcaagccggccacagccaggggccaatagcccactactgcggggaccgctaatgcgcgggtccacacccctctcccctatacgtctctctcctcccccttcctcctccccttatccaaattcatttgcacttaataaataccagcttctgccatagtggaacggaggcgcgtcgccatatatatacctcttgtaagccgccgtgcggcgttgtaacctcaccccagatatagtgaagatattttgctggctagcgtccgtggtttttctctcctactttgggagggttttccacgttaaaatctcgtgtcttctgtgattaatctattattctttatcttttgtttgcctatcatttcctaacaccttcttctcttccctactatagtacaccacaaaattattttgaaaaaacaaaagttagaaaaatttatgtaaagaaatattatatataaatatttgaatttaaatttaaatttgaatcaggtatgtaaacttttgacttataaactttggatctataaactttaggtgtataaactttagatgtatagaaatactatatattagaaaacatttgaattcaaattcaaaattaaatcagatataattcaaatttaaa

SEQ ID NO: 39156 - DNA, 615 bp, Oryza sativa
aattttggctagtgaaaaaacatgacaataatctgatcttagttcggttcagtttttttttggggcctcggtcttttttgccatttctacctgacgaagtgacgatgcactagccagctactagtagagacgaggctcgtgttccgtacagcctcgtaaataatcatcgtgcggttgtgttcacacaggcaagtggcaacatattcaggggcaaacaatccagagttccagtctcggccttcatttactcaagcagatgtgattatatgaaggaatggttggttgaccacgactaagcgtagcagtctaatgtagaatgccactccatttctggatttccaagagaaagcgtgaggggcatctttggcgtgcacccatttccagggtcgactagcagcttgcaattaccctgcataaatagactggcgagtgaaaaagatgcggcgggctatatatgctgtcatgtagtattcctgtgcagataaaccctgattaaaaccagacaaattgctggactcggcactaagtttttcgtcgtttgccaattatctaaccaggtaaagtcacataagttactgaaacagaacacgagcagccacaccaaccgaccacaaa

SEQ ID NO: 39157 - DNA, 1771 bp, Oryza sativa
  unsure (1)..(1771): unsure at all n locations
tttttctcccattggatacaccataaagtgtagtggatcaaggggccgacatggttgatgcgtgtctgatgaagttcataaattctcggagatgagatattgaaggcgcgtacagcatgcgtacaggaagcccattacgctggccacggtacctttgctctctctgacaacgatccacgccgttttatctagttggtaagaatacccaatgcatggattaaaatgaaagcaactttcaatgatctgtataaatttccatggacactatggccttggcatgcatgcgtgtagaaacagaggtacatacacgtacatgtatatatgtaccaatgatttttaatgtgtgtccatgtattcatgtctagctgaattgaatgggctctcaacgaattctctgtcggtgcggttactgtacagttcgatcattcgatatgttttcagaaagctctgcagtaaattaaatcaacctcgtgatttttttttttgttgatgtgacgctcatgttagcttgagcttcatccggaagaactatgaggctggctctcttttagagttgaaagctactacttgagcaagccccacagattgttcgaccaacaaacattctagatatatacaggcaacaaagcgtcaaagcaaacggcttttgatctatgtactcgggcctcgtttcagaaatgcangaagccatagctagctgaaaccatttctttctctcttctgttttttatccttgttctcgttgtgacagatggtaacctgacggctacattgcacggtgacacccgccagcgccaatatttagttttgtcgttcgtgcagcacgtaggctgataaacctgtaaccgggattactctgggctaaaatatatagtgatatgatcaaaggacatgaagtagagcattagctgatcttttggagtaccactttaatctgaagtaaatttgtgcccatttcacggtagtacatcatctttctcaaagttacttgtactacaatgatgtgctttgtctacgaggcaaaaataagataaactaccaacgattaaaatgtaatgaagggaacaatatggtgccgtttgagtttgatgaagataaagattaagtaaaaatatgctaaacaaaaaaatcatcagcacctaattaataaagttttatttattataaacaataaaaatatatttaaattaatattttagaacggccattatataaaatatttttgaaaagagtatcgtttagcagttaaaaaaagtgttaataaaaattgagatgtactccaatttgtatgttattaatcagagaagaacgagacggatacaactcatgtcctacacctccaaaaaccacatctcgacacagagaaatgacactgagaacaatcaaggtcagaaaaagcaaccaaagtcagagacacaaatcacagatgaacaaggaaagtagagagaaaaaactggacatgttcactcaccggaaagtaatctccgacctggtctctagtgatgtgtgtgcttgtgtgtgctctacttctactcgtctcacggctaatcacctggtatttgcgctccgatttcgctcgctctccgtgccaacgccgcgcaccccaaaacccataaataaaggcgcgagaccacacgcagggccgagccttaaacacaccgtctccttcccccccatggcctccctgccgccgcccgcgccgccggccatcggcggcgacccgctcgccgccaccattccgccctcattgccgtcgccggcgccgtcgtcg

SEQ ID NO: 39158 - DNA, 2401 bp, Oryza sativa
cggttccgtgacgccggcccccggcgaggcgctggcggaggcggcggggtcgcggggatggctgcgcgagtacgtggaccgcctcgcctcctccgcctcgtccctctccggccggtggagcgggcggtggagcgcgcggtggagccagagccaccacagcaaccggcaggaggactcgtggcggtgggacccggaggcggcggtgatgtcggcgccgcgcggggtggacgacgacgagccgggcttcgtcacgctgtaccgttggatcgtaggcgtatagaactagccccctgtaattacaggacctcacgaggttttttttgtcaatttccttccacattttttttactaggactattttgtaaagagaaaaaaaattccagccccagatgagcttaacgtctctgaactctgaaccttccatcgatttggacaacatcgtcgccattctctcttcccattctcctcctgtcctcgcatcaatcctcgcaaattttggcggtattcaagctcagattgtaaccactggagactggtcattcgttcgttttctggagaggcaattttctggagggggaaaccgggcgaatcgcacacggcaggatgccacgccgtgctgtttgctcctttttccttgtggtttatagctgatctggtcgcggctactctgaagcctggtggtgcgcctgcagcctgtgcagatgtgtggattctgaatcacttgtgttgggtggaatggatccatggccgtggcttagtgccctagtgcgtcgtaggcttgcagtcaaaaacgtgtccaatcccctgcgaactgaggacacaccacttcaggtttgttcgttgtggtgatcctttcttgtgcccagttgaagagtgtaacaaaaaaaaagtttaggacattactgagagaatggattagtgatcctagttggatctagtatgtagacagttttagtttttttttccctttgtttgttgctaccgtagcatgctcctggcttgtctctgtcatggagtcgaggatcttgctaagttgggtagcctgcccggtggtccttgttatcattggatatggttggtgggctggaggcttggtgcaatggtgccaaattgccaatccctcctagtagcatatactgaattcagatttttttctttcccggggaatatgaattcaggttttatcatgtatactccctcacttcctaaatacaactattttttggtacgcggatttcagtgcacgggaatcaaaacattttcaaccaaacaagtgacgagaatcaagcgatttaaaattcgaaattcgatcaacaaaatgactgaaaagaaatcttccctcctatctttaatctctgctatacagtgtaaaaagtgcttatacttaggaattaagggagtatgtgagtctctgagatctccgatctcgttagcgttggtggctcctcggatgtggacctggtgaccaatcatcggattaagtacttgcatcgcgatacctgaacaaatgccaaaaccaattcgatcgtctcgccatgctctcggcttcttctcgcacagccagactgatcgtgttagctcgtcgccaccagcccactaccatcattttctagcctgctactactaacgctaaatctgctactaccactgctaatctgctgctactgctgctgctaccaccaaacacaaccgactggtggtgactgccacccaaggaagaggcaccgtcgcgtagcattgaattggattgacgggtttgagcagtgatcgcagcgttgctgtgccgtcgtcggttttaaccacgcaggcaggggcggcgaccagctgcacccaaccgcgcacttcaccttgaatgctctcatttactccgccttcctaccgaaatcgtccgctcgccgctcgtctcgtgcccttcggttcgtagggaagagtcgcctcccctcgcgtggtgccgtgccgtgcagtgaaaaaaaaaactctctcatcttttcgcttatacttatatctattatattattaaaggaatagaaaaaggagcctccacgttcgctctcatggcctagaaattctcacattaatcggagaaaaagaaaaggcagagtccatatagaaatacaatttagaaatagctaaaattcgaaattaaaaaataaggaatattagaagaggagagtagagtccatatagaaatacaatttagaaatagttgaaattcggaattaaaaaataaggtatattagaagaggagattagagtccatatagaaatacaattaggaaataattaaaattaggaattaaatgtaaggaatattagaagtagagtataaagtctatatagaaatacaattaagaaataactgaaattcggaattaaaaataaggaatattagaagtagagt

SEQ ID NO: 39159 - DNA, 749 bp, Oryza sativa
cgtttcaattttacaccttataagttgctagaatcacagtcatctttaaaaaaaaatcattccgaaatgatgtattaatctgaaaataagttgtttcatagcaattccgtgcatctctattatgaaagactagattggctctacaataaagaatgacaattcaatgagtcaatgaaatatttgaagctttgataatataattctgcaagaagctctgtatgctactccattggtaaaaacaagtagataactagtgtcaacaaactaagaacaactaggtcagtatccaataaagcatattctgcaaggagggacacaaaactgtaggtcctcaactatagtgctcacctgaattactcactgcctctgtgagctcaagtgacttcaagtttctgttgcgtgctatttggagtctacgaccagttgctcggataagcatggcagctataaaatctacggccacaaaaatcaaactgtcttgcattcatgagtgtaatataaattacaagatctccaacatagttcaaaaagataatggagtacattggaggcttcattttttttatttggtctgaatcattacatggtaacataaaaataataagaacataatttaaaaaatcatcatagaaaatccttttcatccatggaaatcaagtggctaatactgttagagaatagagacacagatcctaggtgtaatggaaaaaattacataacaacttatttacctgcaatatatatgatca

SEQ ID NO: 39160 - DNA, 712 bp, Oryza sativa
gaaacccaacaagccaataaactctaaaaactacaaggtccaatttttaaagtttcggaacttctaaaaagtaaaaataaaacaatgataatcatgatacattttaaaatctcaatgacaataaagaagggaggcagcgggcgaaccataaaggagtacaatggcaaagccactgacggtttggcgggacttatagaaagtaaaaaaatgaacccgaacgattattatgttcgatttgtaaaatcccaatgacaataaagagaaaagacaatggacgggtcgtagatgagtataatggcagcgtttgacgggacttctagaaattataaaaacgaaacccaacgagataataaactcaaaaaactataagatccaatttttagaggtttcaaggagaatgaatagaaatagtggtagaccgaggaaacaaaagaaggatatgacagaagtaaagggtagcagctggtgtgacttttaaaaactatataattagaaatacaagtatagctatttaataaatcttaagtaaaatcatactgaaaaatatatgattttgtttgggtgctagccgcgcaattgcgcaggccacccagctagttacttttgaaataaatgaaacgcacatgtttcagcaatatgtatttttaaaggtatgatacaaactgaaatgtgtacagtataatgcactcattagtactttaggggctgcagg

SEQ ID NO: 39161 - DNA, 630 bp, Oryza sativa
ttacaatttattgcaaattggaactaattgatacattagccacttgatgagctcctctccatgtcctcaaacgtactgaaactcacttcttccagatccacgcttacgcttccacactcatcaccactaatgagctcgtgagcaagctatgtccctcctaatgctattaacctataatgaacgaaggatggacctaggcctgctcatcgtcgaccataaaccgtagagatggccgcctccaatcgacgcaagcgcagagctgctctagcttggggactatgtggtgtaggagcaaattgacgagatgcgagcagtgcgacggagggcggtactccataggctctatgttactgtctgtttgagctttcacaccaacccaacaagctcaagaagacagagagcaaggaagagagggaaagatagggaagaagcaaattgcccaaagtaaaacttatatgtaatctttttgggttcaaatttaaagtgttgggctgctcggctgttcctacttcctagtcttttactcttaccacattggtaaaaagaagtggccctatatgccatttactcttaaaagaattggtgtaagtacaggataaggcgacctcgtctaaacccccacgctcccat

SEQ ID NO: 39162 - DNA, 2157 bp, Oryza sativa
gctgtcgacgtacgtgggccgcgcgcgggccagtgctcgcgagccgcgcgttgctgtgcatgtatgcgcgcgtgtcgtttcgcgcacggtttcggagagggaggatcgattggatcaggggttgtctcttttggcctaaccacatgtcacgaagggttagttgatgtattatcatcggcacggcagtgaatatagtgattctggcatgcatgcagcatgcatgtggttagtagcagtaagctagcgtgcgtgcacttacgttgcattggttgatcgttcatagtatagctataagaacaggcacgttttggtttttatatttttttaagcgtgataaaggcagtgacgggtaggattgttcagctagtaacctttggttatcttgagccgtcgaccatgcatgccctttaggattccaaacggtcgctgggtttaatcgatctgccgtactgccaatgcgctgcaaagcttggaccatagctatctcagctcagatgttagtagtatcgatctatcaggacgtacgtggaattcgtcagaggcgtctgcctgattcagcctgaagacatatatatgtagctttctggggggaaataattagcggaggtttatttttctcgaaatatcattacaaaggacggtttgtgtaattgtattcattccagaaccagtgaaccaggacactagaaaatacagagtccaaacgtatggcgcccatctgattgacagcatgtccaatgtgatatctctccatgttttttgcatttagtttaacggtcaaagacgggcaatctgaattaagcagcatgcaatgatattttgagagcaggactgtcaggaaaatgttattatcagcatgaaggtacacgagttcattgcctcaccccgcacagcggcgtgccgtcaggttaatcaccacgcgaacggcgcccatcagctgcctgagagtcattatcagcagcgataattagtcccatctacaatgatcgatcgattggtcatctcaccgaaccctgcaaccgtggatgtgatcaattcttacttctcaggcacagacctaagttaggactggccttggacaatgatcgcatgacattagttaccagtagtccgaatcgagcaccagctagcacatcttgcatctactgttacgagtgtacagtagaaccgattaggtcatgtgcaatgcgagggcggaagacctcttttctttctcacactacagtctacccattgcatgcgtcaaatttactctgtaccaggtccaggtttggaccttgaaacaaatgaaaatcattactattgttttccaagcgttggctcaagactagtgaggatgacatgattttttaagtatatatattgttccacattcagtgttaaccactgtgttagggataaaccccactcttagggttagagcaagtttaataggatagccaacttctagctacgaatcatctataaccaatgtaataggcaattcatacaatagttgcttactatactattaatacctagtcctacacctagctatagctggctacaaatctgtagcccgctgctcttctctctcttcctttatctcattaaaatatgtttatacctggcttatagtctactattgtacctgctcttatcgtgttaactaataacataactacactattgatggcccatgcaaattgcgcgaaaagtatcttttttttcttatataatagtgtgtgtgtgtgtgtgtgtgtgtgtgtgtgtgtgtgtgtgtgtatatatatatatatatatatatatatatatatatatatatatatttcacattttattattaaaatagcaacatagttttaaattatttactaaattgatcatacgtgatagttattaattactttcaattttgatcttagttatttctaaattgtattactacatgtactctaacctctacttccacttgtcgacgtttgatgtcacgactacggtatttggacagtatggggatcgttggtgctaggatatatgtgagactgaggtaaagagatggagacatggatttttatacaggttcgggcccctgagtagttaggtaataaccttacatcctgttggccgaagccggtattgctcttattcacataatcacaccagtagggctgcagg

SEQ ID NO: 39163 - DNA, 578 bp, Oryza sativa
tgcaacgtccccccactctgcattttccttttctcttgaagctacaggagagactagagaagttaaaatattccatttaatacgggtagcaaggtccaatcctatttattaacttatttgcaaacattagttggagtatgcaacaaaactaagggatcggcagtaagttgccaataaaatcctttcttccccaccccaataccattcagaaaacttggtccaacaacaattgtctgttcgtactttccaatatttgaaagatttcattatcttgttactaggcagtggacagctggtagcggtgggcataaaaaccgaggacggaagaccggacccaaaaaaacgaacccaaaaagaccgaaagctcggtcattggtcactaattcgggtgtacaaccagaaagaccgaacttaattcggtgagttcggtcgttactttggattaaccgaaagaaccgatggaccgaagcagccaactacctccctgtatccctcctgtacaaggcccacaagtccacaagctcattcgcatgaacacatcagccacaaccttatccctttcgtccatcacgcaaagg

SEQ ID NO: 39164 - DNA, 1225 bp, Oryza sativa
caccaacatcagtcggacttgatgcatttatgttctcttgtgctagttcctgctgggatctttgattagtctgtaaagagtcattttcttgattttgaaggcgcacatcaacaagattttctgccagcattgttgaatatctagaaaaagtttgcacaaaacaacagagagtgagcatgcagcgatgaacttactaaaaagtaagatagttccaaaacaaaaccaactgataatagatggtagtacctttcagtctgtcctaagaggaaatcaagttgcttgtctagggccttttttttcctttcctcaagctccagttggttcttataaaaaacctgcatcaaacccaaatataaatagcataaggtttagtatattggaaaatgtggtgttctaaatatacactgagccacaatgaacttgccagcttctctattttggtccagaacttcttcacgtccttagaaatatttagggcaacttttctcaggcgaacttcttcctcctatgaaaatcgcagccaacattaagataaaacccatgaatactgatttgctatccacataatctacggtcattgagtatgtcgctcaatgtgctggttatatatttacttgcagttgaaagaacaaattaggggaaggaacactgcttggttctcaacttatcttcatcaaagttcaattcaatgtgctgttataaataatgtcttatgtactaatgaaatatatttcctagactgaccatagtttatgccaaaacatgcagtacttgtgaatttaacctattctaggctttatttgtcaacctgatcttattgatcaaagtctccaccaaatttaggtttagcaagcagttaagcaatcagttagctatggttcttcattctttattctcggcaggttaaagtcagatcatggtaataaataaagggtactcagttaaggtccctgtgtactgcagtgaggataaactaagatgcacatcactcagttcagcaaacggcaagcatgcagatgtggccatgtgggtcattgccagcaataaattacagtccagcttccttgtcgccttcccagcctccaacctttcccattactacagtttattattctatgtatataaatgataaagctgctgatagccttcaatatgggacagaattgtaataagacaactctcatggagtcatgttaatctgcctaattaataaaaaaaagacaag

SEQ ID NO: 39165 - DNA, 2078 bp, Oryza sativa
tcaattctacatgaccccaaatcaaagttgaattggtggcaaggtacagtgaattcgagacaagtggtggggggaaaaaacgagctgctacagttgtttctccacgacgcatgaacgcatttttaaccgtcaaaatccttcagatgttcactgctcatgctcagtatacataacaacaaacgaccatgtcattttccgggcacaggaggaagccattaattagatcagggggagaaaaataaagtagcaagcagacctaccacagcacatatacatgagtcactctcaactccctacttatctcgagaaggcttatctcactctctctgcatcgcatggaagccactaaagccaggcttcatccaaagatcatggccataggccggggaggcagtgttagttggctgtagccatcagaatttcagaggtttatgcatgccagtgtggcactttagccccggctgcaaccttcaagacgtgcatttctcagccagcaagcaagctgcccgccggacagcagcggtggtcagttcacggccgtgctggctgaaaattcggtggcttcgtagcatcgcatctcttcttcgtcggactcgctgcagcgacagctcggggagctgccacacagtcccctgcagtcgtttcgccgtcgtcgactcttcgtcgtcatccccgcgcgaacgcgtggtggacaaaggcgacggggatcgagagggtagctagctgcgctagtgggggcgcaatcggagcgcgacgtcctgctaaaggaggccctctgcaaatgcaatgataggaacgtcacgttggtttttcagagcatatatgagaatgagaccgagaggtaaactctgtaatatagccaaccacgtaaagtggcgggagtatgagaagaattaggtatgtcggtgtcataccgtttacatcaagaatcaggtatgcctagctgagctagccgtgtagctgatgataattagaagatcgaaggcgaattctatggttagtttcagtgacagactggagtaggtctagaagatttttttagcgttgtttatttcattaatcacgaaagtatggtaaagcgaaagtcgatttgaaataaatcagtcgtcgtttcgaattataaagtaggctgcagccgctgtcaggcgatccatctagaatgcacttaaccagcgtgagcttggttacctgaaaaacgtagctgcgtgtcacgcatgcctttatgctaaaatatggaggcgtgcagtgattgcagttcatcaacgaaagggaaatcggaaggaaagcaatgattggaaagtcctaatccccattagttaaaccgatctgtaatcactgtcgagcaattttattcacccactgcttgctactcatctggtcgcaacgcacaggaaagattgattggattagcttacctgaaaaatttgcacgcctagagtcctggacgtatgcctggtaaggcttctacgtccagccctcctagtgcacgcatctatgtctttttaaaaagacaaaaaaaaagagagagataacatttctgcatttttcttaaaaggaaaaaagtgcgcaaatgcattggaaagcacaatgcaattgctttctttagcaaatatcatagtcactcgtactactacgttttaatctggatacacagtatatggacctgtcgacacactttcatggtagtcatgcaaaatgcagctcatgtagcgctgcagacacgtaggagtaaatcactagtacagtgcagacaaaagtgataacgactcacaatatacacacacctgacaatatgtcgtcgtatggatggcctatattcccccgatcatcatatctggcttaccgacaagaacatttgggtacattcaactgtaaacccccccccccccccccacacacacacacaagaaaagctcggccatatgacagggaacacactgtcacacactaaactctgctaaaaggtagctagcctaaagggacgacctgtgcagaggaaacggtaggtcaggatcgcttgaactatgcgagcgtctacccgtgcaggaccagaaaggggatgcgccgatagatcgatc

SEQ ID NO: 39166 - DNA, 2021 bp, Oryza sativa
agaaatgcttccaagagagaacccattatagacacatgcgatttgctattgactttatactttggacaaaaattccaagatatcatattataaacataagattataaacatccaaaatttggtcaaaaacttaaaatttgatatttcagaatttgtatccaaattttgtaactttttgtcttaggggtgttttggtaatttggataaaattgtacattagtaatggaggctcatcagacgatgatgttgaattgtcgaagttaaacaaaagccgatagcgtattgtagaatatgactaaatgataaatcataaacatgtgacaaacttagtggcatatccactctttaatttatgtgttggctttaacttaggccctgattgattcagcttagcattattataatctggattattataagtagattgaaacaaacaagtaaattattttgatagattattataatctataagccagattattataatctaataatctcctttggaggagctttttccagattattaagtgactaaagactcattacccttacatgcatgtaataatctatagaaacaaacaactcacagcttattttatgtcagcttattataatccagtttagagtaatctgatttaataatttagattacaataatcttaagctaaaacaaacatggccttaaacgaaactcttcacatgggccacttccattgggccaagatattctgtagacactggtgcaggcttccgggctcaaactttgaaatgtcatagaagttccttctgcagatttcagtgtacagggtgaatttctccgtaattggctaactagtcactagggaagactttttctgtaaggatcactagggatgacttaagaaataagtccaatttaactacctcaattgtagggccaatctgatttatatccctcaaacgcaatattgcatatgttgacccccccacgaaaaaaaataataaaaccagtacaatttgattcccttgatattttttagggtggtttcgctaacgtggcatgttgacttgatctacctatgttgatgtgacaacctagttataaattgaagtgggaccacatgtaaatgactaaggttttaaaaaaaactgtgggacccacttatcagctcctcctcttcttcctcctctcttatcccccacttatctttcccaagctcgtcagaccatcctactcggcgtgccgtgccgttgtgtggaggcatggcttagtgtagctagctcacctggacaaaacagtcgtggaagtggaagcgggtgaggctggcgaagctagatgcagggggcgtcttggcagcgccctcttcaatcattacgcgtcgcatggcccggagccccggatgtgcgtgtacttgttgcacacctgcgccaacgcgctggccacgaccacaaccaggacggcgccacgagtcaatctcacttttcgctacgtacacggctcactctgacgcacaaatgacttgagtgtgttgcactgtaatacaacatattacaatcaactatgtttttttaggaaagtcatttagcgtgctttattaatctacaaacatagttacatcgttcactggaatgttccacaagaaaattggggcctcatcaacccaattacaagaattcttaaacttaaaagcatgattacctagaacatgtgctacacaattggcttccctattacaacactcgacagagactttaacaaaatcatacatcaaaaatctggcattcatagaaaattaccacaaccgttgttgccgaaaaacccccatcttgcatcatctccaccacctacaaacaatctgattgggtaacaataaatcgttgttacttcaactatgttagcctcgtaaggactttttttccttcttccttattaatttacaaaaaaagttcattttactccctgaactatttcattggagcacttagcccctttaaacttttttttctcattttacaccccgcactattgaaaatggttcact

SEQ ID NO: 39167 - DNA, 1434 bp, Oryza sativa
  unsure (1)..(1434): unsure at all n locations
tcatcctaactctcaagacttgaaacatcaacagtaaggaaatagataatatgtactgaacatagtaatgaatgagataaccaagaaacacgagcaagttttgactagtgattctcccagagctctagtgccaagctaacacatcaattgctgatttggcagatcaaagaatgaagatgcacagtgcacctttatcaaacattttaagtctttgatgaaattatcagtacgcatttacttaatacagcaccaacaaccaagagatcagtcccaaggcatcatattcatacattgtgtctttttttagataatggaattcatacatagtgactgatcgcgtaaatagaacttaagaagacccacaggtagttgtcagattctcagtgagatcatgcatatgacttgatagaatttgaccttctgattttatttcatacatatatgacccagttgctccaacttttgttgccatctatggtcaattgaggtaaatataggtttcgggaataacaaagattcctttagaaatcaagttttgagagaactgagcctgccacaatagcccaaactgtagtcatgcatgcatcngcccagcatggttcgttcttgcgccgctttttgaaaacacataaaagctttgcacattactgtaccaaggagaaaatgctttgtttttgtactgtgttaaggagaacatacagaaactctgcattatgatgcaagaatacgtaggcaacacaacaaagctttttaaactgctgttgaagaatgaacacatgaaactttctagctctatatttcatttcacctctaccactgaaaaggactgtagaagcgagaatggtgaaaacatctaaatatgcattagttgtgctgattattttagcagtaagcacaaaattaaattaatacgccttgacaactgatattagctttactgagcaaatctctgtctaagctatatattcagaatcaaatgttcctttattgaggatttgaggtccgtcaaacaaaccaccttcttaacactggacattagtaaaagaacttacctggaaagcggtccaaactgtagaaacgactgtgatggaaggacaagaatgaacaaaggattctatattttactagtaccaacctatcaccttacaagaaacaacctctagcctcattagagttagctccttgaaggaactctaacgaaggtaggggctggctcttccaccaacctccaatgtaaggaagtcagtttagctttatagatgccagcaaatgatcaaaacttggtttgataacctattcgcaaaaaaagattgtacaattctgcgtttcaacgctaaccattcgcagaaacagcggtaggaaagcctaagaatagtacccgtgaccaaacttagaccaacagtaaagctatgactatgaatagccttctacagc

SEQ ID NO: 39168 - DNA, 1223 bp, Oryza sativa
cgacacgcaggtcgtcgatggcgctggccacgagatcgtccatgtcctggtagtacttgatgcagagcttgagctcctctaccagctcggtgaggacgcgtaccgtggacgtcacgttgcgcatcgtgatgttggccgcggcgatggcgaggccacgcttgtccgtggcggaggcgcctgccggatcagccgagagcacgcccaagcagtagccatagttggaagttgcggtgcatgtctcgttgatgagagatggggaacccaccgtgagaccgggggctattgcggcggcgaggaggagtgtagcgatgatgggatgcatcgggaattctcaggccggggagaagctaatgatgcttttttgtggtttggctcctccaggtacactgagatttatagaagagaaaggaccttcaaaaggaaactgatcaatgtaataaattctaaattcaatgcgattgatcatgaaaatcgactctttaatgtacttccggctatattccaattctttcctcaataaattgccacctcctttaaatgggtgtacattgtgaataatcacaaatgtgtttgtgccgcgtgcaaacgtccgcacgtgaaacagaacatcccctcgtgcgacccttcgctctagtacgtgcctacgtgctctcctgcctgctccccacgcatcgtgcaagagtgacatttataagttcagggggagaaaacccatatagcattattgaaaaatcagacttagtactcatttacagcaaacatgaaattatagatttgaatcatatttaacgcaggagtatagtattttactaatttccttgtgaagcagatttcataaaaaaaaactcatgaaggccacttgaaccgggggaggctaatgggcgatcgatcgccagggcgattgcccagtgatcggtttcccccctccccctatactcctccctcttgttcccttcctcctccccttcttctctttccactgcagtgcaccacacaatttttttaaaaaaacaaaagttagaaaaatttatatatagaaatactatataaaaaaatttgaattcaaattcaaatttgaatcgggtatgtaaacttttaacttataaactttgggtctataaactttaggtgtataaactttagatgtatagaaatactatatatagaaaatatttgaattcaaattcaaatttgaatcggatataattcaaattcaaatttga

SEQ ID NO: 39169 - DNA, 514 bp, Oryza sativa
taaaatgagccaaaaaatagttgagaggataaatggtctattgaattagtttgggcgagtaaaatggatttttttttctaatttacatgctcattttattcacctgttacttgtaatgtactaccgttgcttttatgtttgtgtactccgctgccatggagacatggagtgtctacaggacaataccatttacagaatcaccatatgatatttctgtatcattttcacatctatttccttacgatagctattcagcctattctaatactagtatatgctctgcatagaaaatgtgaaatgaaaaacattcgggatatggtccactaaacagcataggaccatgaacaacattttttttctttatgggcacgagaacaagtgatcaacagttgacactgcacaatcatgactaatctgaaggggcgagttggcaagttgcttcagaccacgttttgttgaggagtgaaccagataatttttaggtcatacactgtacgacctatccaaaaggttt

SEQ ID NO: 39170 - DNA, 695 bp, Oryza sativa
agaaatggttagtacgtgctcatgatttgatcgttcttggcatatatgttagcaaagctacacggtttcagcttgtttctgtagcttgttggtctgtagccaagattcagttttgtctccatgttcagtgatgaaacaccatgcgtatacatggcagcacatgaaactggaaactaactgacagcatgtaacttgatggttgcagtctggcaacgacggagacatgaagatgagggtgatcgtcgtggaaggcgatgagacgagtaacgccccgaaggatgtatgctgcgagtacaccctcgatggctccgtggatatcaagggctcaccggcggtgaagggcaagtccggcggatggctcgccggcggccttattcttcgtaagtactttgtgctgaactctgctgatttcaccatctccttcccggctgagacgggccagcaaaaaatggagacaaagtcgatgactgggctttccagtgaagtgttttcgcaacagtgcaagtcggtctgaggtgactcgacgttgaggcttaaagtggcggtaggcgccgggtctttacgcggaatgctgcatgacgaggtgacatcggccatgcaacgcccacaactggagggttcctcgccacgggggattcgggcgcacgcattactagcgccacattaggatctccgtaggagacatcggacatggt

SEQ ID NO: 39171 - DNA, 781 bp, Oryza sativa
gcaattcctctctgtctcaaaatgcaacggaggaagagcacgtgaagatgacaacgattgtgccattgccgcggattggtgaaaggaggcgaagagggatcatcagcgcacggtgcgggatgaggaatctcgcgaatcgtgactgccgctgccacaggagagaggggagcgatcgggaaagtagccactggatcaaccactgttgttgaccatgaaccctaggccgcctaatcgccggcgtccaccgatccggaaatgaagaggatggagaggagagggagagaggggcggtaccgggcgtagagggcggctgtcggcttcccctcgccttagagtggccagatctgccagcgaagaggccgaagtcaccggatccggcggtcccggcctcctcgttggcggatgcggcggcggaagcgagaggatggtgacggcaatggcccgcgtgctgggcggcggcaggcacggcagcagagagtgcgcgggggaggtcatcacttgcgggaagaagagaatgagggaggcggcacgcggtggcggccattgcttgggcaggagatagagcggagcgagagaaggagaggaggcaaatgaatggtggcggctagggttcgaggaagggggttagggttgtttttgttttgcaaaaacactcttaatcttctagttttcagagcacggttcgattttccaatttttcgcttcttcgtatataatattgttttctacagaggacctgtaagtaagcacgcaaaagttagaactaaggacctataacaaa

SEQ ID NO: 39172 - DNA, 1016 bp, Oryza sativa
ttttaaattccgaattttcgttattactaaattgtattttttatatggactctaaattcatctttcaatattccttatttttttaattcctaattttagttatttctaaattatggccgagtttagttccaaacttttttcttcaaacttccaacttttctatcacatcaaaacttcctacacacacacacttccaacttttccgtcacattgttccaatttgaatcaaacttccaattttgacgtgaactaaatacactctatatttctatatgaaatctagacttgttttccaatattttttaaaaattttgaaattttgttatttctaaattgtatttctatatggactctaacctttacttttactttttttatttttaattctaaatttcacttggttctaaattgaataccaatgtggactctagtttcctcttccaatattacttatttttaatttcaaatttcagctatttttaaattgtactttattatggactccctttttttcttattcttgattaatatgagaatttctttatcgtgagagaaagtgtggagccttttttctattatttaataagttagtagatagaggattgaacacccctagagcaatgtcactctcatgtaacgagtcaagggcaataatgtaattttccgttgtcaatgaatagatagggccctccagagacaagggggatcccaatccatcccatgaatatatggttactctaactctcatccctcctctcctcctatttgactatctcctatatccaaccttaggctctctccaatgaggggtgggagcccttgccatgattgttcggccaatttgttccaacaattgcatgttttatcaggaaactcttttaacccatagagggatgttccatcgtatcgtgcttatcaaataaatagttttgaagaattaagataattatatttggcaagatatattaatatatcactccataaatatacaagtttaaatttgacttctataagtt

SEQ ID NO: 39173 - DNA, 537 bp, Oryza sativa
atcccaaaagcgcccgaatccactaaagcccacgcgaaatccccagactgcctccacgcgcgccgcccgcacctcgcaacccccaggggcgtttccgtccattcgcagccgcgcgagttttagctcccgaggcgtcgaggcggaggggaaggagtcccccaacccccgcaacccccgtgccctagactcccccgatctcgccgccgccccgcctccggcgccgctcgccggtgacgacctgctccgccggcgcccgaggccctcgcccgagatcccctccgacggctggccctgacggggccattcgccgccgcgaggccgcaccgccggtcgccgccggtggggcgcttggggtgggtgggcccctctctgatttgaaccccggggccacgcttgggtgcctctctggttcagagggtttgtgccgaggtgaggaaactatcgagtcgattcgactctatgtcgctgtagtttagggctcctacttgtgctttgggtctgggctgcacttttgtggggtttagcatttctgcaggg

SEQ ID NO: 39174 - DNA, 1757 bp, Oryza sativa
tttgatgatatgcctgttgaagtctagccacacaggatcacattgttgccagagtaaggggagacaaattctgaaacttgggctggagcagcgttgcaggatagaggcgactttcggctgaggcgtgtatacgtctgcatggaagctgtcgtttaaaaatgacggttttgattagatagaattaatcacggatttacctagagttttctatatatgcagtacagtgtattcctttactatatactatggattttgcacttggtagggctctggaacaattatcatcctatattattttcttctactgttttcatcgtacttttactcttgtttctttggccaaatcctagttatctagggtgcagatgatctttactggtttgcgctgaaaatcagtcgggttcttccacgaaagtgaagatctttgctagtttgcttgaaaactagtcgttcgtcgtcacgaaagcacaacggttttcattgttgttgcgtgaatcaattttacgtgtcaacagagaacagatggtgttgttggtgttatgcgtgggaggtttttataagtgaaatattggatgaaaaaaaaaacaacgttaacttgcaggcatgctaaacagccattgcttcatttttgttcgatcccgtagcccgatatgagaaatcaagccgtgaaagtaagatagtattgcatatacttaagaagtaagatcacattaggttgttcaccggccaattccctcgaaaataaaaattgttcaccgcccatgaccatatatatatatagcatgttcaggtctgcatcttcttcccaattacttgatgatgcatatcttcagcctgtggcgtcaaatcttactaaattaactgaagaagtaggagaagccggtggcgtatactaaaatataacctatacgtggaacttgcttgatcatgtccatcagccgtcctgcatctcgtcttactaaatcagcacgaagaagcataacaggagaaggcgagtgggcgagtggcaatcccacataatccataatcgcatcacaagggctcgtgcgcgcccatggcacgtgttgtcttggttcactacaacgtacactctttgtcatcacgttggtgtgatccataccacccataacctcatctctcctgccgtgttttcagaacaaagtgtttgttagtagtagacggcaatgggagtccgattccaatctgaaagaccacggatcaatccatggtgcacttcttcctcccgagcgcgcgccctttgctagcacttcttcaaaaattgacggtgcaggttgggccttccgggccttgaggagagaattggttttccgttcggtcccttcctcatttacacgtgggccagaatttcaaggggcagcccagctttggatttccttgtctcgtccacagctgctgaacagtcgtgcatctttctttctttctctttgaaaaacaatgtatttatttatttaaagaagttcagaagaacaatatactccttccgtcccatccagttttgcaaaggagccccttaacaatgggcagattacactttagctcaacattttgtagtaaaggacttaagaagaaaagaaaaaaaaaacaattgagtcctgctcgaactgcctctgtcttcaacgtcgacgacgaaactttgaatcctaacatcggcggaggttggatccaagtgagctccaagtgagctccacaagatgacgccaccgcacaatccttaacggggcctctcatagatgata

SEQ ID NO: 39175 - DNA, 590 bp, Oryza sativa
ccggtcacccaaccacctcgtgtcgtggccgttgaccgatcattgcaccgccatagcagcctcgctcactttgccttgctctacgccatccattgctcgcggcttgctgctatgccgaccgcatctcctatgcgagaaaacgacgctaccatcatggctcgccgtgcggttggtcggtggctcactctgacggcggtgaggtgaaggtggggggctgggggaggtactttggtggctagggtttccaccccgagccgcccgcctggcgggacgacgtgggggttagactcactctatatcatattatcatattataagctgttttaattttttttctcagtcaactttgtttttttaggtttgatcaaatttattaaaacttaataataattataacattaaatcagcttcattaaatctaacattaaatatctttatatattatgtttgttttgtattgaaaataatgtcattttttaaaatttaatcaaatttaaaagtttaaccaagaaaaaaaaaatcaaagtcacttataatatgagaaacggagagagtattccgtttatcctcgaataattgttatcatctca

SEQ ID NO: 39176 - DNA, 764 bp, Oryza sativa
tatagtaatatgactcaataatatagattataataatcttaagctgaaagaaacagggcctgagtccctgactgagcttacgatgatgatgggatacaaaacaacgctgggcagcacgggctgcaaggggatgctagcccgcttgagtcagcatagcggatgaatccaatagcttgcaccggcgctgcagcaggggtaactaagggcctgtttgtcatagctccagctccaccccttctggagctagagctcagccaaacagtttcagctccatcaaaactaggagtggagctgggtggagctctctcacaaaatgaaagttgtagagctgggtttagacagctccacaactccactccagacctaactcctagagttaaatttaggagttggagttgtaccaaacaggccctaaagaacacaaccttaagaggggatcgcagcaaagacgtaatgtgggcatcccaagtaatatatcgtccagtgtgtccaacatgaccaacacacgtagatccaaatacatgtgttagtcacgataagcactggacaatatattacgtgtggtgcccacagcagttggtatcatagcaatgctaattgtaagctaaagcttggcttgacgatttgaaaatagtttgaaaaaaaaatcaacttaagctatttgtgaaaacccttagaatgtatgatcctttttacttctcacatctttctaataattttctcaccttactcccaatttaatttgctcccattgacacgtgcta

SEQ ID NO: 39177 - DNA, 632 bp, Oryza sativa
tcattcataattcgatagatggacttttcagctacttgtaaacggcgaaattgtgtctaagttgtgaatgagcttttcattttcatttgcgtaccgaagtggtaaaactgacgacctaaagtacgatatacggaataaagcaagttccaatactctctgctgtttgaccagtgctacttggcgctgttcattccaattagccgtaaatttgtgaaatagatcccaagataatctccgttttatttgcttccaaagaggttatctttttaatagttggcattttctagcttcttggttgctataaggcatagttgaagtgcagtgagaggaagaggggaactcacggaaagagactccttatacttttgtcaacgggtgtgttccaaaattcgctagttaaacgttttattagcagcggtcccattgagccaaaaccccgctgagcgttgcgacacaatctgatcataccacataatcattgcagcgcctactttttaacttctagcagccaaattgttattcagatttaattggcggtacgactccttacagcagtaaattattcgaattagtaacaaacgagtgattggtatgtggagataggaaacgaagactgcggccgccaccgcggt

SEQ ID NO: 39178 - DNA, 639 bp, Oryza sativa
ttagctccaacacctgcgttccgggacagacaaggattaattatggtttgttgcaaggcgagacagccagccatccatccatccatccctacggagaagaggaccatcggatcgagtactcatcttcatctagtgcgtgacatatatcacgagtcgtcgtttaaccactcgtttggtggttagttagctgtgcgtattagcagcgatcgaacaaacacatgtagtattgctggttccagtaccgtttacattgatcggtcccaaaataagcttatgtgtgggtttctatgtatcacgtttgatcatatgtattatttgaacatttatagaatgttaaaagatcaagtcatgtatatcgaattattgatattttatctaataataataaaaatagtcaattatattattttttttaaaaaataagtataatggttgaacgttggacataaaaatttacaaatcatctcgtttcgtatgcagggtgtactatttctcatgggcaccctgtcttcttctgccattgagaactcacagagaatcagacatgtatttgtaactgctactagtagttggacaggtagattggcattagcaggaccagcaacaacatgatgctgcttgttgcttgttgcaagtaga

SEQ ID NO: 39179 - DNA, 1456 bp, Oryza sativa
tctgtttggtccatcatccaagcagcatctggacttcctccaccacattatgtagcgcatatgtttgggagctggcttgatggaattcataataatttgaaatcacatgttctgttaggagcaactgctacttgttggtcgctttggctatgcaggaataatgtggtttttgataaaaaaaaagtcatatcttcacctttgcaggttatatattctcttatccattggcttcgtacatgggctatcctacataagcctggttcgcgggatatggtagttgcggcatgtcaacatttggagaagatggttaaggagttatttacccagggatatgggtggcgatctagtcttagaattggtggtccttaaaactctgtgcttttggaggagatggccaaggagttgttcatgagtggcaatttagttgttagattgattgtacttaatactccatgtcattcttttttcctttcgagtgtggttttgtttgttcagctgtgtgcatattagttatgcagaggccgaaagtgttctcaggataattgtatcaccttgatgtaattgactgagttcaataaaagcttccattatctaaaaagaaaatattgccatgtcttttaccacatcatgcatgcaaacccacatattagttttttttagacgtttagacgttttgatagttgactaatgagttctggcaaatattggagctgagggacgaaaatttaaactatgaggactggagggaccaaatatagacatttcagatcttacatggtagtcagtcattgagatactgtcatgactttgatctaaatttgcactgatactggtgcaacgataagcagctacttctacagaatacttcctccattcctaattgatcttccattcctaattgatcttcatatatggtttatgcatcaataccaagataaacttgcggagcacttaatcagcatcggaaacatgcattagcgtttcgtatccatgaatgtagcgccatcagttttgcatgccgcataacctgaccaatcagatgcatgcagtgttcagtaggaagtatgattaacgtccttcccgggattttcaccgcctcctcaccgtaatgcgacgatcaaaatggaattatcattttttttttttgcatacgacgatcaaaaggtaacggaggtctgctttaagcgttcacaagtcttcagcagtaaactctcgcatgctgcacttgagagatgagagcatatcattgccttgcccactgcttttcactgtcaacataatagacaggggttagcgactggatgacaaaagaaattaactgagaaacatagttagcacttagcacattccagtgcatatacctgtggtggatgttctacttgtgcagttgttactgcaccggtcaaagcagcagcctgctttcttcttcatcatcctgaagctcctgccctattct

SEQ ID NO: 39180 - DNA, 622 bp, Oryza sativa
cttgacgcgacgagcttcgccagatccgccttgttgaacagcgaagtgccgatgaagccggtgcagtcttcgccaatcttgcaggggtccggtccggtcgctgcggctggagcaggcttgcgcggagccatgatggaatggcgaaaaatgaaagtcagagctagcgaagactacaaggccgaaaaagaaaaggtgaaagcgagagcaagaacgcagccgggggaagtaaaaatagatggggtaaaagtgaaagcgacccacggggggactatatagccctagtcatgcgacggttcgccttccggccaatagcagcccaccacgtggcacccagggatggacacaatggtaactcctgttaggatgggccgaacagtaaaaggccacatgaacaggaaaaacgcgacccaaaacccgagtttaaagaaaagaagaagtgacctaactcacgtccgaaaaggatagaaggtcgaaaaacaacatggaaacgtttgagagaactcatgaaataacaagggttagcttctgcaggtgtacataggttttggcaggaacatcggccgaaagggggcacctcatgccataccacatatttgcacggtctcgcccaaagctccctact

SEQ ID NO: 39181 - DNA, 542 bp, Oryza sativa
cgccgccgcgagcgacctccaacctcacgctctccttcgtcggcttcgcagcaatgatagggagcccgacatcccctcatccaagctctccgtcaccggaaatcctttccccgctgtgagaggtgagctccttccctcgtcgccggcttccggccgagttttcccgccgccttgcgcctcctccctattccctaactttccctccatgttccccagatccttccgatcgccgtccgccggttcccgctcgcggaacaccgctggaccgctattgccgtgccaccccgaggagcgccgccgccatctcgcctcccttcggtgccgttccgcttggtgagcatcccctctccgctttttccgccgctctccgcgtgccgacccgcgccgccggtgtcgtcgccggtggtcgccgtccggccgcgcgccgccgtcgtcgttcgccgccgctcggccgcgcctgtactttggccgcccgtggaccactcccgtggtctgggtccacggtccgccaggctgcggtggaccgagtccaccgtgcgccc

SEQ ID NO: 39182 - DNA, 731 bp, Oryza sativa
caaggaagtcatctcaatcgggccgaaaagtgcccgactgatatatggtcgcacagacatgttagatgggtataaaacttaagcccgtcacggatgatacccatcagtgacgggccacaactttaggcccgtttgagatatggaatgttatctcaatcgggcctaaagttgtggcccgtcactgataggtatcatccgtgacgggcttaagttttatacccatctaacatgtctgtgcgaccatatctcaatcgggcacttttcggcccgattgagatgacttccttgtgacggcccgctatttctaagcatattagagcccgtcacagatagaaggatctgtactagtgtggcaaggacgagcagtcgagtagaatggccttgttccagcctgccctgcgctggcgaggttgcaaacctttaatgttattactacggtcgtcgccttcatctgaattacgcagaaccgccgatgcatcgtcccttctaaccgccgcctcgtcaagtgcctcctaatcgactgatttagtctcgtttgtccaacaaattttacctattaaatgacatgcaatttgtttcctaatttacttctccaccgcggtggtttcccctctcaggcatgggggaggtggagttttcgccggcggtggggagtggcggcggcgagggatcccagctagacgccgtcgccggatctagacggtgcgtcggtggcggtgtcgtggggcggc

SEQ ID NO: 39183 - DNA, 656 bp, Oryza sativa
ttcacatatttcgttatgcatagttgggctacacttgcaccgccaaagcttcttatttccagcaggaacacattcacatatttcgttatgcatagttgggctacagaaactagaaagaccgtatcttagctgatatatgagagctaactagagcgagccatagtgtgatatagctgactgcagacttacaagtattagtagccaattgtttgttagcagaaaagctttgtgtggagtgtagacatgcctaatcaataaaagtcaacaatgactttatattttaaaacatgttagatcagtataggtgacacataaccatggtaccatcaataccctggctaccagcttactaccaagaaccaagtaagcagtatcaaaactattgattgttgggaactaaaactcaacaagggagtattactccatttgaagctaaatgtcaaccagctgatgtgttttccttgtttggaactaaatgcttgtgagcttgtctttggacatctgaactagtactacaaatatacaagtttatgtaaagttgtaaactaagacaacagactaacagaggaccaacataatataattgagttcacatgctcacaatcatcactctatatacaatatagcgatgtattaaataaacattacctgcactt

SEQ ID NO: 39184 - DNA, 1100 bp, Oryza sativa
cataaatactatgatgataaagagctactccctccgtcccaaaatataagcatttttaactataaatttggacaaaagtggcggaggtaatagctaaaaaattgttatattttggacggagataatagctaactagtgcagcgcttaatatcaaaattggataaacctaattatagactctgaatatgaatagatccatcctactataatgatttggacataaaagttcatatttgttatatctagattcattgaagtaggaagggtctaatcctatcctagttaattagtttataatattttagaacagatagagtatatggtaataatgtatatgcgcacgtgcatatgagttgcatgaactccctccctttttataagacatataacgctggtgactcttgtatatatatgttttgaattatgtatcttattttaaaaactatataagtatataatatcatttttagtttgttgtgatatgtttttatattttgatacttaaaacatgattttatattgtgcacatttacactaaatttttaataatataaaagtaaaattaaatgtgtgcttgaagattaacaacgtaacaacgtagtatgtttagaaactgagggagtatatatatcgtgtaagcaagcatgcatgcaattaagctagcttattaataagtagctttaggtagctaactttgtggatctgttatgtgttcctctccgtttataggaaaagagaaaaggtgagcggcgcctaattttgccatctcccgccaaacatatcatgagactaaccccgcccaagatgcgcccaaccatgcacatatatatctattactactatccgtctcaaatatgagtaacttctacttataatttcgaatgcgtagccaaaaattatcacattttagaacaaaggaactacggacatttgcctagatgcgttcaggtttgcaactgtaagcttatagctaaaagcacgtaaagatggatgcgtatttcatataatgccttttcaggttggaaaaagcaaccatctgacatgaatttttcctgacgtgatcactaatacgtactcctaggtttatgggtggcgagagc

SEQ ID NO: 39185 - DNA, 1151 bp, Oryza sativa
ccccaaccccaacaccaccagaaaccaaccttccttctttccttcccattcctcctctatctccacgccccctgctttgcttctccatcaccatcagtacataaaaatcaatgtaaacgccgcatcggccacttgcattttttctcttcgatctcttccactccacaacacacactccacttgccccccgctcggctcctgctccgcctacgcgacctcactgctcttatcggccatttctactgatcacgtcgtccagtcagtagagccgtcatgctttttgtgctctcggcttttttataatagggtgtgttcgccactctcgtttctagactgaacagtatacacggaaaacagatcagttcattatcacgtaattaattaagtattagtttttttcaaaaacagattaatttgatttttttaagcaactttcgtatataaactttttaaaaaatagcgtaccgttcaacaatttaaaaaacgtacgcgcgcggaaaataagggagaggggttgagaaaaaggagtgctgaacacacccatagtgttctaatcatacatttttaagttgatgccagaatgcgactataaacaagaactgctctatgtggcaccaatttttacttgtactagtacatgggagtattttgtttactacagtggtggtgtttggtttgctaacctactaaaataattaatttttagtatcacacatttgttctactagatacagtagaaacaatatacacatttgcgcgtcaggagtttcgaaaagactcccccacacttgttttgtaccttgtctttattcaacaaaaagataaaaagcaaaataggcttccaccggggtaaaataccggtgagccaaattttattcaagtaattctaggcacatgaagtgcctaaaattacttttattttatttcacttttattttgtttttatttatatttatattttatatttttatattttttatcattttttatgacagcaatagaggtgatgggtaacctagcagggtggacatatgtgacgcaatgatacacatggtgtttcgaattcttaccagataggacctaccaagctttgattcggttgcaagaatgcaacacaactttgcatttgttctgcctggttccctgagcat

SEQ ID NO: 39186 - DNA, 587 bp, Oryza sativa
aatttttgctaccagtacgtctactggtctcttgacaagcgaattgaattaaattaaaatgggacaggaagccatgttgttcttggcaaatcaaattgttcttgacaagcgaattgaattaaattgaattgatgtagttttgacccaatgggccttctatcttaggccctgcatcatctatccaacccctatataatagcaaggaaaaggtccactttgactcccttaattgtacgccgaatctaattcgtacccctcaaccagaaaaccggatagaacgactccccgaactattgaaaccggtgcaatttgactccctcagcggtattggagggcggttttgctgacgtggcgctgacgtggcggtgttgacccggtcttagtcccacgtggcgcttaagtggcattagaattaaaaaaaatgtgggacccatatgtcattcacacacacaatatattgtgggatccattgacatgtggggggccacatgtcatcctttctctccaacccttcttcctcctccctctctctctcccttctttatcttttctctccctttttctcttccccatcggacggtagtacc

SEQ ID NO: 39187 - DNA, 1996 bp, Oryza sativa
ttatccgcaaatgtgacaaattcagttaccccctctctatactcggtagacgaatgatgcgcatagtacatccatctacgatccatctgaaatcaacaacatacgaagaaaaatatatgatgatcgatatactgagaaggaatggagaataatgtgttttttaccttgaattttagaaaaaaaaatcaccccccttgccctcccaaccgatttgtgaacagtgaaccgatcgggatggaaagcagttggcggtttggggggtatttatagacccaacacacctcaaacgggttagattaaaaaagcccgtcaaaggtgttggtcatacctttgatgggcttcaattgagttgcccgtcaaaggtattgacctacctgtgacggttatctgtgaccaattcataggcccgtcactggtatgccgtcacagatgtagggttctggcatagtgggcggtgaggaggactggattgtggcgttcgacctcgagccccgacctcgtcggtggcccgccggtgacgacgacgaccagagacgcgcgcctctacgtcaccctggccgcacttaggggctccttggtggtggcacaggacgacggggagagcgcggaagcggtggtggtgctcgacgacgggagggtcgtcttctgggtgtgggacaccacgttttcacacgccgatgccggcggcgtcatgctggtgtacgacccggccaccggcggccaaacggaggtggcggctatggcgggtgccgtccatgtcggcgtgtacacgggaagcctgatgcgtctgcgcaactagtgacttccccgtcttaagggtgtttttatttatggcagtagctacatttaaatcatgccattaatcttagtttgtatgcgtagtattttatagacctttagttaaagttaatcactgagagcaggtacaatagcagactattagccagctacaaacatattttaatgagataaaagatgagagagaagagcagcggactacagatctgtagccagctgcagcacgaactccaagacgtaatgtgtgtatgacagatgagaccatatactaatagtataataagcaattattgtatgaattggctattagattggctatagataaattggagctaacagtgggctatactattaaacttgctctctattttcctactgtggccccttttacttttcagttatatatatatgtcgttaatttcattgctcaccgtgtccaatggaaagcgtcgcctagaacaaacatgctgaacctggataggtttctagtagtagacatgcatgcagccgatttgtttcaagattacagccttgctattggcctaatttcgatttcatattagaaaagatccttaattcaattgtaagacacaaccttttttttttggttttacacaaggaaaaaaaagacatacgtgaacaaagaaagaacatacaccgtcccatccacagggcaaaaaagttgatctgataaacagacacgcctacgaatgtcagcatgtgcatacaatcgactgcagttatcatatatcatatactccctccgtttcccttcgtttcaaaatatttgacaccgttcactttttagtacgtgtttgaccattcgtcttattcaaaaaatttaagtaattatttatttttttcatatcatttgattcattgttaaatatactttcatgtacacatatagttttacatatttcataaatttttttaataacgcaaacggtcaaatatgtgctaaaaaatgaacagtgtcaaacattttgaaacggagggagtatcatagtaccgttctatttgtcatgctcactatctggtgcaggcatgcatcaatttgcgagtttccagaatttcatggtcactataggagattaagtaatgaaaaaaaaaaccatggttttatgaaccgaaaacatttttttggaaccgatatcattatgatccgtctttgaaagaaagccaacacggggacagg

SEQ ID NO: 39188 - DNA, 588 bp, Oryza sativa
aaatttttaaaataaacttttctatataaaatttttgaaaaaaaaagtttcgtttaaggattgggaaagcgtgtttacgagaaacgagagagtagaagatggaaataggtattttccgaacacaaacctaaaagagtttcgcaaatatatgagagtgggtgtacaatctcaaccggattttgtttctctctattttggttgtagctcaagagttgtgcatttagggccggtgtctgtagaaactctcattttttttttcatcttaatgcaacgaggttttgcgtttccaaggtaaaaagtactatgtaagaaatagtcttttcgttccaaaatattattagtatttctaacttattatatatctggacagggaagtaattaagtgagttcgatggagctttaggtatacaagggagctcaggaagtactcttaacaaacattggctaataagttgcagatatccctgactaataattactcctacttaattactatttcccagtattagaacaaatttcgtaccttgacagtacgtcgagccctccatgcttggttcgacgaccaaaggggatcggaaaagggaacag

SEQ ID NO: 39189 - DNA, 581 bp, Oryza sativa
taagtcatatttaaagaatatttgataataaattaagtcacaataaaaataaatggtaattacatgtttttttgaacaaaacaaatagttaaaacatatttttaaaaaatcaacgtcgtcatatattaaaaaaaacagagtgagcattttattttcggttaacctaagttttatttggagggagagacgttttactcctagtttgttgttcgatagtagagatgataatcatgagtcaagtgagaattgaattgtacgcaatgatatacggctttagatttatctagtcgtacctagaagagaattatgtcccaattatatacccctgctcaggcattaaaaaggtgggagttcgctcttaaacttttaacgcccaccaaccgtcctcatttttaaactcatattctctactaacaatttccccccaacttaataagccattagtctctagcgtttcattttgttcgaatcggtccttgagcttttgagctttgctcttttgttccatacgatccataacgcccacctaatgaatcgggtgatcaaggcaactcaatgaagatcaatcttgttgatgaatg

SEQ ID NO: 39190 - DNA, 517 bp, Oryza sativa
  unsure (1)..(517): unsure at all n locations
catgaagggggaggaaagcctctgcggacggagccgatggaggtagctcgatgcttgcgtgtgccangaactctttgtttatttagaataacgatatagncccatccttatatcgaccgaagactttcatatcaaggctgggagagaagcgctcccatgatatgctccttaagcgcatggtatcacccaacctactgctacagtaccgcgggtactgttcactcgccaggggttgggcccatgggcctcgacccctaggtccctacctatgacatattgtcactgttagtgacggcagttaaagatatagactactacgaagcattcccgagtgacaaagtatggcttatgtagcactgacatactccctataaaagggcccatgccatcccatatgaaataagcaatgaatctacaaagtttaattcagtattcctcatagcctctatcatgatggggagaagctcttctgggcctcgtagagagcggggtgccctaatccccagtcttccctatc

SEQ ID NO: 39191 - DNA, 604 bp, Oryza sativa
aatctctctcgctcgctgtattggagcgccgatcgatcaatcgattctatgtgtacgggataaactaacccaaaatatatattcaggcgatcgatcgattaaactactggttgtgcaatccgaatcagattctgagaccggctcgatgatctcgggtgcttagctgctgcccagcagcccagcttgtggcagcgaatcagacggcggcgccggcggatagttgcacggctgcagtcggcattggatctcgccactcgccatcgatcaaccctgccgtccgctacctttgcttcctctcttggaactaaagatcatcgagttccagacacgagattccacgtgcaacaacgaactacaataccttaattatatacttactttgttttatattatacaatgtttgaattttttttccatcaaactgtgttgaattcaaacaaatttataaaaataaaggcatgtagtaacatttctatagatggcggacttagaaaattaatttggcgttatattagatgttgctacgctttcctataaaatcaattaaattttaaaagtttaaaaaaatcaaaacatcttatactataaaatgcaagaaaaccat

SEQ ID NO: 39192 - DNA, 693 bp, Oryza sativa
ctgcagccctattagaaaagtagagattctacccatggaaatgtagcatggatccctccctaaaaaagaacaccatgtgtaccccgctatcaatcgacaattgaatctctaaagttagtccaataagccttagactcccttggttttgacagggagtagccttactggcgttaatatagagcgagtgtcgtattccccagtctttggatctttaccatatgcatgaatcggcattcataatatttacggcttattgtatgcataaactaaaagacattaatgcagaaggccctttattgccctgcatgccatgagccagccttttccttacatgcttctagaagactaggacaaaccactagcgctagaatatagaaaaggtgagacagttctcaacaagcatggtttgagaaactcgaaatacaatggcacaaaggatggaatgattggatttgtgaagaaatatattgtccacagccatttatcaattgagctttctttagcaatctcaattaagttcatgtgccattgtccctattcagatggacccacaaacacagtggcataaacactgagaacactacattaattttttacatacatctcaccagtaatgatttaaggtttctctaaaactgttgagtgcataactactaaagttaattacactacactacatatgttctaaataga

SEQ ID NO: 39193 - DNA, 774 bp, Oryza sativa
tgcctgcagcccaaattaagaggatgcttgtgataagaggcgaagccaagatttatagataggcggtgtcgagattttcagagactcggtaagacggccaaaactttcgggtttttggattggccatcaaaggagcacaacacgtcgacatgtcatgactatagatggccaaaaggcccgaggcccgacggcctggcccacggcatgacattttggcccagcccaagcacggcacggcccgaccaccgggccgtgcctaggccccccactggcacgttgggctggcccaaaatgaccgggacggcacggcacgatgggccgacaggccaagcccgacacacaaagaatagggactaaaaatagacttattttagctatatatatatatatatatatatatatatatatatatatatatatatatatatataggacactcatatggggcaccatggtgcccgggcaccatggtatctaatgcacaaaatcactcaaaatttttcaaaattttaaaatgtgagtatatacctaggtataataaatccgatcatacctatacttaataacaaaaacacctcacatttaactttattcacaatcagggattacgtacctaaagaagtatatgtatggatgctatatacctagaaacaaaatctaacaaaaacaggtcaaattccgtacacacatgctttgaactagtagtagaagaagtaatggttatacctaagtaattgaaaaggttatactcatttgaaatggtatatatatata

SEQ ID NO: 39194 - DNA, 514 bp, Oryza sativa
agctatagtaaatagccactgtttatgtccttagatcgctgttcccctcacatggacagtgcttccctgcagtactgtaggcgatccggatccgcaggtcggccgtgtgctccgcctccgccctcgcgccgctgcctcctcccattgggagagaaagagaaagaagggagagagagaggaggaaaaatgaaggacacagggaggactgccatgtgggcaccacatgtcggtgggcccacatttctctttttgagtgactaatgaatcctatgcatattttttaattctaatgccacttaagcatcacgtcaacgccacgtgtaaagaagacccggtcaataccgccacgtaagtgccacatcagcaaaaccgccctccaaaaccgcctagagagttaaattgcaccggtttcaatagttcggggtcgagttatccggttttgcggtttagggttatggattagattcgggtcacttttaaagggtcaaagtgaacttattccgttttccaccat

SEQ ID NO: 39195 - DNA, 734 bp, Oryza sativa
tcgatgattggcttactaacgagaattcactttgaacagaatgagttgtggtagtgactagagagaatagtcaattttgtccctctaagtttcacttaagggctattttgacagttggttataagactttctagcattatccatatttatataaatgttaatgaatctaggcacatatatatctagattcattaacatttatatgaatatggacaatgatagaaagtcttataatatgaaatggagtaagtaacgctttattttgtacagttcagtgcttaaagcttgcattttgggtcaacgtggtaattggatgaacctaatatgctacaatacgaacataactcaagaaaagtttagccttgtgtatcgtgtgtcttgccggcgagcatctttccacatacagagagagcttgagatcgcaccctaagcccccggccgaaccggcaaaggggggcctgcgcggtctcccggtgaggagccacgagctccgtcaatatgtaataaacactagcccaagatgcaattcactctttaaatagtttcataaaaaaaatcaaaacatcgttatataatataatatgaaaagagaaatatatgtattaacaaggtaaatctttcgtctacttcctttcataaaaagagtcgatctacgtagtgatggcaactcacctagaacaacgagtcttaacaatgaagtagatctttagactccaagagaggaagcaaactta

SEQ ID NO: 39196 - DNA, 569 bp, Oryza sativa
cagactgttggccttcagagcagtgtccactaatctggccataactctttagtgggaaattcaaatgacgaacggtttgttgggtgtgaaactagactcaataagctttctataatatgctcattcaccttcataacttttgagaataaaaagttatgagtgtttatttcactggcccgttttgcactggactggtccgttctgagctgatcttgcttttgcactggtccgatcttgctgctccattttatcctccttggtgaacttatccatggtgtagtggtggcaatccgagtcaagtctctatctttaagcacaacgatatgctttaacctacaatcatacaagccaagtagcagccttgctcgatgaaaacaataagatttgtagttaagcatagcgttaaccttgcattgatgtgcaacaatcacattacatgtgaatggccttggccaggccgtatcacttcttagacatataaaagtaaatttaataaagcctaaaagtaatttatatatattatagaagtaacttataacaaaaagaaagtaactttaatgcatgctttt

SEQ ID NO: 39197 - DNA, 561 bp, Oryza sativa
cagtagttcatcaaaagttatggcgttttataattattaaatggagggagtagcaatcccgattaaatattcatgctaagcttttgttgattacgctttcaacttgtcacatgaatcactttttgcttaaccaaacagagtgaaatgacaaataagttgtgataggtccaggttagtaaaatcccgagttaatgaaatcacacaaatacattaaacagctcaaaggcagagaactatagagcatccgaagaatattactactaggataaggttcatcaaccctgtgttgaccggcttgaatcatagtacaagatcatattaaaacacatggacgatgataacgaaacgtaagacctccatcctttgaaggtctgattattgctcgagagttaccctccactttcaagcgcccggttcttttggttaaccccttttcgtccattttttggggttaaaaattttttttcacaaagggccccccccttttgggcccttttttttttcccggggggttccctcggtagagtgctttggataccaacagaatcttttaagagtatg

SEQ ID NO: 39198 - DNA, 547 bp, Oryza sativa
gcttcgtccacctcttctgccattgcttcatcttccaggaattcagctacatctggatcaatggctggtagaaatcgtcggcagcagtcttttgtttcctggccttcttctttgcaaccgatggtgcagcagccgattttgctcttttctttccagcagcaggagcaatcggcacacgaggcaggccatgcagcaatgtggaggtcttagggggcattgtagccgataactagaggtgttagtccaccaccgttggcaggagtcctggagcatattggatgtctacaccgctgttgctgtgatgaggaggagaagattctgttgtctgcaaaagaagaatttacataaggttaaaactgatacatcggtttgcagttaacaaaattgacaaaagaaatgattcttacttgagggacagctttagggaaaagatttgtcaagtacatggaagccggttgatggaataaatgtttcttccactctatccatcatcggtcaaaagctgcacctctcagcatcctaaaattgatattgttgatgctgccca

SEQ ID NO: 39199 - DNA, 795 bp, Oryza sativa
tatgtccgctcacccctccaaggtacatctccccgctacgtaaaaaaaccggtgtacactctaaaagatccatcaaccatgaaatgacctgctatcaatttttgaaaggaacttaatgtcgcctagaggggggtaaaataggtgttcctaaaaattatcacaacttcatatcatattagagatatgagaactttcggtttaaataggaacttccggtatgagattggaagttccggtctcaaccgaaaagttcggcggataacggaataaaacactaactatgaatttgtagcttgaataaacaaaatgtatatgaatcaaaaggtgacaaataaggtatctaagtaagatataaggtcaccagctatattaattaagcatacaagtagatcaggtaaaaacaagctcaagcacaatatgagatatggcaagaacggacaaaccaagagagtagacaagttgatttgtttcccgaagttcggatccacggatcctatgtctccgttgaggggccacaagaccgggtctatttcaaccatttcctcacgagattgcacaaatgcactcctcggtttcactcttgatttcttcccttacggaggcgaaatcgaagtcttcacaaactttctatggcacaccacaaccttgggtgatcaccgacgatgcctagccatctggaaaaccttagtccccaagagtaacaaacacaatcgaagatttacttgctatgaactcgagtgctcaaagtatggagtgaaactcactagctctcaacttctcaatctctcaatccaa

SEQ ID NO: 39200 - DNA, 683 bp, Oryza sativa
tttgttgtgtgaagtaagaatatgcataaaagaatgaaacattaggagcttatcctatacaagaatagaaggcatttatcaaatataggcattaaaataaaaacatacattcatcatctccatgttctgaatgtaaatagactaaataagatatggctcaaacaaaatattagtctcacatgcttatgtaatcacataaaaatattatatatgaatatattaatatgtgcacggagagaaagagtgtcatatatagcttgatctccatgcatttcatccttgttatttaggtacaccatcaatgaacgtttctctctcatattccattttcatatccatatgagactagtagacaaagaaatatttataacaatgttagtctcatgtaattggatttgtcatttatcaccaaaaccaaattaaatggatttgtcatttatcaccaaaaccaaattaatggcactcgaactttcaatttacaagtagattttcttgactcgaaactagccgagccgtctaatgtagtagcgagttgatatacttttctcctctctttttttttttaagtgaaagcggcaaagcattatcgaatatattagaaggccagaaataaagtttttacaatagggtgattacatatagcatttgtgagcatctaggagatgaattaacatattaagaaa

SEQ ID NO: 39201 - DNA, 993 bp, Oryza sativa
ccttaatacctttaaaactttgctatgtggagttaccatcatttatattagaaaatatgagaccttcttaaattttaataccttctaaaaatgataaaattgcccaattaattaaatgtaggtcatttcgtccagattttattatattatgatgataccttataaaccataccaaaaccaccttccctgagcctatttcgctcgtcgaagttatttgttgctgtctgcaaagttcggagatcaagactgaagtcatcttgattaaatgaccctgttgaataaaaataagtacatgacagcagtcagcagcccaggatatatatgcctgatcagatcggctgattttacagcctccagtttatcagccctaaaataataataaatgtggtggggagtgcaatattacgtacttagcttgttgcgatccatgtgtgttaatagtctcttcatcacaaattataataactatattttttatatatttttatcggtattcaatgacatactatgatcattaatgtattccatattatgttcccaacaaatatgaaattagtatcatatgaaagtactttaaaatataaatatagtgatataacatatatatatatatatatatatatatatatatatataatacttagcatatactacctccatctcaaaatgtaacaatgtccagattcatagctaaaaatacttatattttgggacgaaagggagtatgattagtctaattattagacaaaagttaccgagtttgatttttcttaaaaagatgtcgccctatgatttgggatggaggacgtacatcttactttgatcgaatcaattaattaattaattgactgatccattctaaagtaaatacaatcactcacaacctggaaaaagaaatgcagaggcaagaggagttacatggcattagtggcccttttgctggtctcctccagatgtgaatgacaaaaactgcaattgctaatatagcaacag

SEQ ID NO: 39202 - DNA, 568 bp, Oryza sativa
ctcgcccgtttgcggcgcacgaggtggatgtgcggccgtggcagtcgagatgggacatatcgtgcgcgcgttaactacgctcgccgaccgacgcgccatcatcatgtctccaggcgaaacgaaccggctcgtcccgattcgcgtgctactcgagtaatgtagcggtcttgaagaaggccgctcattattgtcggtcggttttcccttgctgatgcgcgcgatttgcgaccgctgggttcctgcccgcctgtagagaccggccccacctgtcaccaggcctaaggagtggcgtcacgcccgagcgcttccctcgaggggggcgatcgccctggcatgacgccgggggctactgtcggtgacatgggaccgagagtatcgtgactagaggcttgggcagccgcggtcacccatgtggcctgaccccctcggggggggggggggcgggccccagggtgacgtggcctcccctccctctgtattcccgaggggtcgggctgctcccctttaggccccgagggctggggctcccccaccccctgtggtattggcgccacgtgtgtgggttaag

SEQ ID NO: 39203 - DNA, 570 bp, Oryza sativa
agtctgtttttagattttcatttagtgcaaatgtatatgtatattttttaaaaagttgttttataacactacaattataacaacttttatgttggtggagttgtaatttatgttgtgattgtcttaaaacgccattgcaatattggccataaactttatattatgtatagtaggatgttttcttcatgcgtgcttgtaatatactccatccgtttcacaatgtaaggctttctagcattgcccatatacatataggtgttaatgaatctagacacatacatgtgtctaaatgaatgtgagcaatgctagaaagtcttacattgtgaaatggaggaagtagtaaggctcttctattatttttgctccttttatcgttagattggcttatggcttcttccctgctttgtaattttccataacctcaagtagactgggttatttatttatatctaccactaaaaggaggaggcaaggcgaggaaaaagatgtttgcccgtaaggagaagggagtaaaggtgaagtagtctatcgttctttgaagcagtgccgtggacagcgtgatgacaataa

SEQ ID NO: 39204 - DNA, 545 bp, Oryza sativa
tttttttatgtacgtacatattcatgttttttttttgcaaataatagtctcctgtacatgcatataaacatacgtatattttctccgggggaatagtatatatttatttttctctcttgcaaatacgcatgagattaggagagagaaattaattactttagtatgatctaatctaatgattgaaaataatagttcacctgtatatgcgtaaatcaatggttcaatgtttaacttttatttttttcagaatattttggatttttattgatcttaagttatcagttactcccaatctaaattaaattgtgaccatttaactcaccatgtttatgttgaattgctagctataaaataggccaatagggtgttgagagaaaaggagatatatgtgggctgcacgtacgtatctgaagattttagatttttttttgacatggtacgtgacagagtatgtacaaaaggggagagagggttacgtgtgggaggagggaggtggatgtggaaagattttttttaaactaatctgacggcttgaaataatgggt

SEQ ID NO: 39205 - DNA, 637 bp, Oryza sativa
ttaatagaatttatattaaatgatcttttttttacaagtgaagttaaatgtgggaaacaaaatttccttaatataaagcatggatggatttaatttttattaaattctccatgattaagtcaactctctgaaattttctcggatttttcagagctcaattcctaaatgatacaaagaacagttcagtaattatttgatcaataatgatctaattataattgttaagtgcttttcttgtttaaaatccttaaattataaattgttgtttaaaaggaattattagaaatgattttaaaagcttaaaagagaagatctaattttaatttgttaaatctcaatataaaattgggctagataaaattttgttaaatactttgcttaattctataattcctagatttttctgggatttatttgagctaagggagtatttttaataaatggaattgcatttcatgaataatttaaattgaaaaaggtttttaaaagtcttcttttggctttgggccgaaagtcggcccaaaacctctcttctctctctccctcggcccagttcggcccagtccgccgagccgacgctctctctctctctcccgctgacaggtgggtcccacctggtctggcctgtcttcctcct

SEQ ID NO: 39206 - DNA, 682 bp, Oryza sativa
attctaaactctgtttgggaagaattggaagcagggagatggcaatgtgtacttccattttatcatttgtttgttgatttccttgttatgcagttaattaatgaactgcaataaaactacagtactgtatgtactcggcagttaaaaaaaaaacagataacccctgatttctttacaaattgtggcaagcccactctcgcctgtggtagtctgttgaattttgtgatccttcgactattgcaatgcaggtatcagatattttgcactaaagcaactttgtttatgaaattgtttgctctaattgggtttgtctggttaaagctctacattgccttgttgatattgtggctgtttttccccctcttctttgttgttatgatagtcaatctgccgttatcatgagggttgcctggtattcttctgttctgtggtacattttcttggttaagtgaaccactagaaacactgaacaatgtatagagaacctttttttttttttcataaacatctgttttgtctgggatcattgttgcgctttgttggcccattttgatgggttgatctgaatatgatcaaatcagtactccctccgtttcgttttatttgacaccgttgactttttagcacatatttgaccgctcgttttattcaaaaaatttaaataattattaattcttttcct

SEQ ID NO: 39207 - DNA, 503 bp, Oryza sativa
ctatagggcgaattcgagctcggtacccaacagaaaataaaaacttagctagtgtactatgttttgcatgcaggtaaatcatgcctaaattttggcattttaaatcatatttcatattgatgagggcaagtcatgcatacgttttgatttacaggaaacaaaaggaagcaccttgtaaaatgattgcatgttcatagtataaacttgcaacatatatataatttgatgggaattaataataaatgcgtgatttttatttctgtaaaatgcaatttgaaatgtcaatttttcttctattctgccaacgtatataattttgtgaaaattcctgtaattgcatacctcactgtgtcgagaagttgctggtaaacaatctgttgcactgtcccatttgggaagttgaaaaatccatttgggatgcctattctcttgccttttaatcatcaggcttcaaaaactgcctatatccacccgtgggatgtactttgatgctgcccgtgtgg

SEQ ID NO: 39208 - DNA, 835 bp, Oryza sativa
gccaaaaaattctggcatgattattatacatttttttttacaaatccagacaaatacatcgcaaatatattgcaaatatgttaaacgatgaaaatgcaatcaaaggaatgagaaaggcaaaggaaaaggaaagaacaaagaaagcaaagaaggaaagaacaaagaaaatagctgtcaatggaataaattgaattattgtggtaaaatttttattttttggttctcgcaagattgactcccggctagggttccagcggttaccgctaaggatccaagattaacgttgcataaatgcaaaggtaagttattttggggtaacttatccttatctattgagagctacaaacataaataaatcatcatattctacaaaattctcacgttccataacttccggaaagtttacaagataacccacaaagccgcctccagaaaaacccttttactccaagattcttgccactaattatcatggcattttgtaaagagtccaggtatcgctgacaaaatgaaccgggaaaaacaggaaagggaaaaaaagaaccaagcaacgttttctaagcactactctacaattgaattagcaagggtcactattacttacacaatgtacaacagatctgacctgttccacctgtacactcaaaacaagacttaaacctaagcctaagaactccagaaatctagtttactcaaaataccaaggctattctaaccacgatcaaaatgtatgctaatgcatatctaactttaatatatctgcactagtctggaatactcctagaaattggaggaaaagttgcaggtttagatcactaggctgcctctcaaattc

SEQ ID NO: 39209 - DNA, 895 bp, Oryza sativa
ttctaaaaagaagagatatggaggaggaagagataaggccagggaggagatagaatatattaactgctcctcctcctcctcgatttggcctcgtactctccgccgcccatgttgcgcatgctgatcttttattccggttggtgttaccaatcgggactataatctttagtcccgattggtaacaccaaccgggactaaagataatagagatcttttgttccggttggtgttaccaaccgggactagaaatagatattttgttccggttggtaatactaaccgggactaaagataaaaaaactactctaaccttttgaactgggattaaagatatctttattgcaaccgggactattgtgtattttggccgaccatctttaccaaccgacagaagatggtttctccaccagtgcaagtaaagtcaaggtagagacaatgcaatttacttgagaagaaaaaacagtgaaatatgcagtgaaacagaaaatataataattaaccttaccaagaacatgctgaggttgttcttacctaagcttctttattggccagatcaatgttctcgatgcctccaaatcctatacatattttgtgtgctttatttttcattctgaatgtgtacatttcaagcttggatcaggggaaggccggagaaatcaaatatgccctaaagcttaaaaagacatatgtcagatttacaagctagtagtgttggttgatatttatctctttccaacagaaacaaagtattaagtcttttttacggttctttataaacaatttaaagtgtcgtctgataaataaaagagatgaatgtgctgatatataattcaagatggaaaactccaattcagtcgcacacttcatgccccgtttggcacagctccagctctca

SEQ ID NO: 39210 - DNA, 576 bp, Oryza sativa
actatagggcgaattcgagctcggtaccctcttactttcacgtttaaaatatctttaataataaaatatgtcacaacaaaataaaggcataaatatttatgactataattgaacgagcatactgatggagagatcaagaatccaggtagaagagcatcatgtgcgctttcttttcataaaaagacattgtgcgacaattaataatggcatcactcatctgtcgtcactcgtcacgcatgtgctcaatccgaattaacaaagacataaaacaaagttattaggtgaaaccacctgcgctgcgctatggctcagctccggctgccactggccgcggccaccatggctctcgccgccgccgccgccgccgccttctgctgctgctgctccgccgccactggcttcgagttcaacgaggccaccgtcgacgccatgcagctcggcttcagcaacggaagcctcaccttcacgacgctcgtccgcttgtacctcgaccggcatcgcccggctaaacccgttgttgcacgccgtaatcgaggtcaaccccgacgcgcttggccaggcggggcgcgccgacgc

SEQ ID NO: 39211 - DNA, 546 bp, Oryza sativa
atttttagttgaattttcagagccttggaaataattttaaccaattaaaataagcaaagtgcaatattaaatccctgggaaaatcctttttcctttttatcttttcttttccctcctttttcctttttcttgggcccggcccatttcctcccgcgccggctcgctcctccctcctactcccgaagttcacccggcctccttctccctctcgggcgctgacaggtggggcccacctgtcagccctttccctaacctccggcagcccacgcctgcgccaaccgccgccgaaaccaccacccatcgccgcccgcctcccccgccttccgcgccccactccgcgccctgcgcccacgtcgccgcccaccatccccactcctcccactcgcgcgtgcaccccgcaacggagggattcaaattcgaatctctctctctctctctctctccattccccacgtcggcgagaaatccggccgcctcccggcctcgtccgtctctctcgagccccaataaagcttccccgcactcccctcaaccttttttctcttt

SEQ ID NO: 39212 - DNA, 564 bp, Oryza sativa
caaatttgttgtgatgttgatattctctatcaccagggctccgtgtttcctttattggagaataggagttattaaatgatgacataatttactatatactagatggagtctttcattgcgagttctaatatattattattccacaacatatacgtgaaatattttgttgatctatacttaaaagaatagattttagctatcattttaatggttcaatgcttgattagtttcttttacaaatattttgaacacaataaatcagtctacagtttttgtaactaaaattatttgttcaccactgaatttctatggggagatgaatggattatcttaagacaaggagtttcttttcaatcatggatggataaaataaaccggactggctacttataagataaattttattcatatgaaacaaattaagaattttactgaggaaatgagaaaaaaaaagaaaaggaaactggcctttgtgcatccaaaaggtggttgaggcatgggccaacgtgctcatgcctagtagtcagtgatctattttcattctatatgtaaaacagtatatat

SEQ ID NO: 39213 - DNA, 519 bp, Oryza sativa
agagaggttttggccgacttcgggccaaagccaaaagaagacttttaaaaacctttttcaatttaaattattcatgaaatgcaattccatttattaaaaatactcccttagctcaaataaatcccagaaaaatctaggaattatagaattaagcaaagtatttaacaaaattttatctagcccaattttatattgagatttaacaaattaaaattagatcttctcttttaagcttttaaaatcatttctaataattccttttaaacaacaatttataatttaaggattttaaacaagaaaagcacttaacaattataattagatcattattgatcaaataattactgaactgttctttgtatcatttaggaattgagctctgaaaaatccgagaaaatttcagagagttgacttaatcatggagaatttaataaaaattaaatccatccatgctttatattaaggaaattttgtttcccacatttaacttcacttgtaaattaaagatcatttaatata

SEQ ID NO: 39214 - DNA, 623 bp, Oryza sativa
catacaaagagcagttcagcaattatttaaatattaaattaatcattaaatggtctaattataattttgttaagtacttttagtgtccaagtattttcaggatttttcttggaattatttgagcattggaagtatttttaacaattgaaagatcatttaagtgattattttaattgaaaaagttttgaaaatccttccctaagtcgttgggccgatttcggcccaacatcctctctctcccgcgcggccgagccggcccaatcggcccagccgacgccgcccgctcttctctcctgtggagaccgacaggtgggccccacctgtcgggagctccttcatcctccgggagttttttttgtttttagatttttttttttaatatttacagaaatattatagcgccgaaaaaatttgcaaaactagaccctgccgcccttcgcaagggcggcaagccgacgtggcacacggcgccgtgtgcgtcttgacggcgcgcacgggccgcggggagccgagggcttgccgccctctgcaagggcggcagcttcctctctgcacaacggctggaaaggactcctgtttttggaaaacgtaacagcgaagtgtaggaatgcgagtcccgaata

SEQ ID NO: 39215 - DNA, 590 bp, Oryza sativa
gtagggattattactaattatttccactagtgttggtgaaatatgagtatgcaggtattttaaggagaaaacacaccagtcatataagaaaacatacatccggccaattagacacaagtacacggattgaaggacccacaagtcaagtgaaaccatcatggaatgggtcataactgtcgtaactgccatcaggacccaccactcaatctcctagctaaaggagaggctaggaggtggggcccagggttcggccgaaccaccactggcgcctttgatcctggtcttccacgtgtatgctactgataactttacaaagatggttggacggcattttggaaatttcgcatacctataaccatcatatggagcaaataaaaggagtagctcatctcatttttagaacacacaactttaagctgaattacaagaggatctattgtatcttttgtatattagagataggtagagagtcagggaaagctctggagaagtgctcggaagtttggtgctctttccgatttctacctcgacgagtgtagtttcctaggagtaattctgtaagagtccaggtcttctattaagtaagtatt

SEQ ID NO: 39216 - DNA, 549 bp, Oryza sativa
tgtacatgtgtactttaaatagactttgtatagtttttatgcgccgttgtacaatgttgaaagaagacgtgcaaagaaagcatattttaacttttttatcacgaggatattacatcttgtactggtagctaatctatacttactttctataaagttacaacccactaactctaaatcttaacatgcaactatgccacatcattacccactagcaataattacatattcaacctcatgcaagtatgtaacatcatctacaatctatttaattaaacaaatcaacatgtaaacatatccaatcattacccctcacatcatttccacaatatttttacaaatctatgtatacatagtaattacctgcatgcatgccactggttttttaattttgcatgtatgccactcggatgataattatagtggaatttttgtaatcttctaatggcaatcttgcaataatgatttacatcattaaaaagagctagataatgtgatgctggaagatggtgcgtgctacaatttgcatcaaagcataaatctctgcatcta

SEQ ID NO: 39217 - DNA, 682 bp, Oryza sativa
ccgtctgttaatgttataaataagtcatacccaataatcttgggttagtctctgcgggacccaccatatacccagttctatacggaatcatacattatatacggaagatattttggataaggaaggggaagtaaagttctactcgggcactataaggactactcggatcatattcatactttgtctctctagttctatttggacaagggggcacctgagggtataaatacatgaccccctagaaggagatgagagatggcaagccagaagatagatctagaacaaatctacacaagccaatacagatttagagaatccaagacaagccaacatatatacaccagaacaagcctagacaaatccaatctgaagctacaaaggcaaacatgagggatctagagctacctccaatctcaccgagttcacattcgaagaaaaagactacactagctgttggctgcatgtaagggtgcaatgccgctatgctaacaaggattggattaagtcatccaattattgtactaatgagatattgatatataaaggtaactctggatttggctaatatgagtagggctattacttgtcagttaagggggccgaaactatatataaattcttgcctattgtctcttttaccctaatatcgcgtacaccctgataccgacgaacaccataccct

SEQ ID NO: 39218 - DNA, 670 bp, Oryza sativa
ttgtttttaaaatatcatgtggaatgggtcctattactcagctatatgtggttgcccttacgccattgataacttgggtattaaaatcactagacgttgttttaggagattgtcacatcctgatttttgttttagggtttataaattatttaataaattattaatagaatttatattaaatgatctttaatttacaagtgaagttaaatgtgggaaacaaaatttccttaatataaagcatggatggatttaatttttattaaattctccatgattaagtcaactctctgaaattttctcggatttttcagagctcaattcctaaatgatacaaagaacagttcagtaattatttgatcaataatgatctaattataattgttaagtgcttttcttgtttaaaatccttaaattataaatggttgtttaaaaggaattattagaaatgattttaaaagcttaaaagagaagatctaattttaatttgttaaatctcaatataaaattgggctagataaaattttgttaaatactttgcttaattctataattcctagatttttctgggatttatttgagctaagggagtatttttaataaatggaattgcatttcatgaataatttaaattgaaaaaggtttttaaaagtcttcttttggctttgggccg

SEQ ID NO: 39219 - DNA, 608 bp, Oryza sativa
cagccgctgctccgggcgcggcggcggggggccatggcggcgggggtgggggggggggcaggaatggctcgcggcctagggtttcgatccgggggtggggataaaaagtgggggaggaagcgggagctcgaattcggggacggtttcacactactcgcctttgttcgttcttcttcacctcctcgcggtgtgtgtgtgtgtttttctttcctctttggggaagaaggagcgtttccactggggcgggtgacacgtggagggcccggattaagcgagggggttccccttgtcggctgctcgtggccgttggatctgggccttcacgggcccaacagggggatcccccccaacggccgaatggcttgtccagttgttgtcctcctgcccctacagctgtacactgggattgatatcctctaccttcgaactcaccgtgtgatcacgatttgttaggctcatatatcagtgataaagtctctgtgcacttgtagtataaaacttctgaataaaaaatctatgaatatttggatggtttggataaaatctgggtcgactttgaacctctttctggttcccacgaatgtagctagtctcaccaatctcgctcg

SEQ ID NO: 39220 - DNA, 531 bp, Oryza sativa
ggtttatataatcatctcatcctcctctggtctcctgcgatagattgaccctcatctctcctcctctctagcctctcgagaagctaggcgatcgtcaaatatatctccaggtgcatcaggttaatgaggtgctagttatcattttaaaaaacggtaagatgctaattgctttccatgaaccaacatatccaaactcctcataagtaccaacatcagttaggcatcacaaaagcggcactaataacatattgttagtgccagtacgttctacaactggcatatttagtccctcgtatatgttggttcttgtttagacccggcatgaggctcaccagggacgagttagcatgttcccatccggccaggctgtgttcgctagagcaagttcccatccgaaataatcgcacagaaaatggaacggtctattaatggattagcgcgtgattaattaagtattagctgaatatttttcaaaaatggatcgatatgattttttaagcaactttcgtatagacacatttttgaaaaaaa

SEQ ID NO: 39221 - DNA, 675 bp, Oryza sativa
aaattgcatgatactgtatgttatttttaccggaacaaattaaactgaatttatttaacataaactcacatttatgttattatatactaaaagtccattaaacttccttctgccacgtggcgctctaataaaataaagaaaatcctagaaattctaaaaaaaaacaaaacatctaccccttcattttcacttaaattggtgggtccaatattatacaccattagataaaattgatcttaaaacaaacaaaatactatgggtcccacctctcctctttatacgtgcatacgtaggtcacgtacgggtatgtagtacgtacgcctccctcccttttgtttcctttttttactacttttttccatttatacaattgataattttataaacaaagaatataccattatataactctttataaacacaggtaactaaattagctctataatatttgaaaataaaatttacaccatattatatgtttacccattaaatcaataatgtaagatagtttccacttaaaccggtgtactaattactttgtactattatttttaaataatgcactattttaaaataaaatttacacaattatattgggttcctatcaaataaaccaatttcagatctatattaactaatatatacatgcccttaaacagatagacccattattta

SEQ ID NO: 39222 - DNA, 507 bp, Oryza sativa
cataaatacatatctgagatttttttatatattttgaacctttctttaatataattttaaaataaatcctgctaaacttatctccagatttgcatctttggccacaacaatgccatcctcattggtgtggcaggacaacactgttgcacctgttaaagcctgtggcatcacaaaacatatgatgtcacaccatgagcaatggcactatagtaactcgctaaaccattgctcaagaagtggcaacatttggttgctaggtgtccaaaaccttttcttttttaatgaaatttagctattggtagttttcaaatttaaataagtaaatgttctaaaaataaaaagaatttggcaagatacaaaagttacatccatttgcagttacagcaagggaatttgtgcagatggtcctttttagagttggccctactataagctgtggaaaagcacgtaaactaaatttaattgctgtggaccttcagcttcaatattatttatttctttagtgaa

SEQ ID NO: 39223 - DNA, 516 bp, Oryza sativa
ttgtctttgagatttgcagacacttctttgccgactaatctcaaagacaatataagtatttattgatcaccgcttttcatcgaatcaatcactagctagtaacacaccgacacaggtggggcctggcccacgtggggagagccggagagagaccagcaccgcgtctagcttccacgtgcttatttttaaaagacaaaaatacaaatccatgtactcgcacactcgttagtataaatgcacgcgcgtactttatttttataagcaccttcaaaatacttaccggtactccctgttttaggttataacttcaaatttaactaaatttatagaaaaacagaaatattttcaactaaaaataaatttattataaaaatatatttaattattaatttaataaaactaatttggtaatgtaaatattacaatattaaatcttgagttgaaaatatttctattttttctataaacttggttaaactttaaatagtttgactttaaccaaagtcaaaatatctt

SEQ ID NO: 39224 - DNA, 508 bp, Oryza sativa
caagataactgtactgtatacgcgtgccctagatgtccttaatttcaacttgctcgatcgtggtccatgaactgatcatcagaaggtacaatcaatcagtcaagcaatccggcgttacagctggctcgtcgtctacggcgccggcgtaaactgcagtttataatcatctcctcatctcatctcctgcgatagattgagttgagcctgatcccgtctctactttctcctctccagcctctcgaaagctaggtcgatcttcagttatctctctccaggttagtgctaattaattaattaattactgcttccaattcctgtgcaggcagtactgtttgttcaattgctccttaattagcttgggcttttacatttgattcatgattcacattggtctgatggaatgttggttactgatggtgtgtctctgttgatggataagcaagcttggcctgctggtctttctttttctttccttttttttcccttttaatacaaggctaggattttc

SEQ ID NO: 39225 - DNA, 640 bp, Oryza sativa
ataaccactgtactactctcccggtattttagcgggatggaacatattttaatacactatgaatccagatttatactccctccgcccataataggtgatgtttttgactttttatttacaacgtttgaccattcattttatttgaaaaattagtgcaaatataaaaaaagataagtcatatgtaaagtacttttgataataaagcaaatgacaaacaaaataaataataattctaaaattttttgaataagaagaatgatcaaacattgataaacaaaaactcaaaaagacaagtaatatgggacgaagatagtactactaaaatatgtcatagccacccaaaatttcctgtatattggaacggagggacgactactactatggatactttctgttagattattaataattctattcatttttatgtataactggattgtatttagatattaacaaataggattaaatatacattatattttatcttcaaaagaacaaaattatgactttctccgttcttgaattgatattagcactattcaagttcaaactttcactcctagtctttttttcttagaaaatttacaaatacttgaaaatattttatattatgaaagtgtgcaacatcataaatacaacc

SEQ ID NO: 39226 - DNA, 744 bp, Oryza sativa
tccactagctagtaaatgtgctgttatttagaacagttaagcaatggttctgtactattgttaacgatttgagttgcaatttgcaactcctgtatgatcactccaacaagcacaacacccatgctgatgatgctggcacagcaatatacttcctttatcttaaaatataaaagattttgaacagatgagacactttctagaaatacaatatatactctatgtctagattcatagtctgaaaagtatctcatcggttcaaaattacttatattttattttagtacggatgaagtagtaattgtgatgcagcagaggcagccggaatttctggctatctatgacaaagctgacctttgcaaattgcaaattgcaattcaaacacattaatgcatggttcacgataactgcaaagttgactactgaactcacggtgaaaattggcaattttttaattcatggctgaattagtgccagattgccacttagagtgataaatagttaaatatctcacaacccctctcacaacaacctggacggtgtcgctgatggcgtattgagctagctagctagtagcttagttgtcgaataccttaagggcaactaggaatggtatatatagagaagtttaattactataataatatacatagaaaagttattttagtatgataatgcatctaagaattaaagtcaggttttgatgtctgctaattgcttccggtcctcttatttggaaagattggg

SEQ ID NO: 39227 - DNA, 501 bp, Oryza sativa
tggtggcaaggagcagcacgaccagcggcatggcgccgccggccatggctgcctcaatcattgtttggctttgaggggggaaagtgtttgggggtttggtaattggtagcgtgtcgtaatctttcgcgccatgtgaatatgtgatgatgtgaactgcgattttgactaatgacggtaatcaaggagaccatttgactactgctcacatgaaattggctgtgtttagttgctgggccaaatctttttaagtattcgtacacacatttaaaatattaaatatagtttaataacaaaacaaaatacagatttcgcttgtaaactgcaggacgaatttattaagtttaattaatctgttattattaaatgtttactgtatcatcacattgtcaaatcatggtatatttaggctcaaaagattcgtctcacaatttacatgcaaactatgcaattgatttttttcttctatgtttaatgctccatacatgtgtccaacattcgatg

SEQ ID NO: 39228 - DNA, 519 bp, Oryza sativa
ttagaaaaaatgcttgtgcgttgcaacgggtgaatgctattttaatcttattattgttatatggtttagctaggatgaaattcactatgggaattcgcttggatatttttttttagaaaatcatgagctgcaattaggagtctgactttcatctcaaattagcatgtaagtttttttaaagaaatctcttatacaacttgttttgtatttccaaaagtaaataaacttaaattcaaatttatacacgaatctgtatttccaaaagcgaatttataaacccactcaaatacagatgacgtaagaaaataccggcaaaaaaatctttattttttataacagtagagatatggcgttggaaggacaatccatgtcacaatggattcatggaacaaatggcatcttagtatcgttactctacatatattaagtggacagttaatattaagatgcatgggactgatttaggtttacttaccatagtttgtgcgggaacctgccagaaccaatctggataattcc

SEQ ID NO: 39229 - DNA, 673 bp, Oryza sativa
tagctttagtgggctgtaactatatagcaggtatagatgtgacgatggccatttgagtgaaatcttgagttaattaaactatccataattacactagttaaaagtttgcgatagagaatgtttgagatatgagatctattaaatctaattgatggataaaatatacattttgacttagaacagactgtatatgctccctcagtaaaaaaaagtcctagttatgaatctaaacataaaattgggttagtcaatcgattcataaccatctttcgagcactatattaaaacctctttacttgcccgatcatatcttagatctgtaaattatgttatggtctacgttccactcatagcgatgtgcttgagtccaagggacagggggtcgtcttggggccagagagaatgaatagatagggccccacgagttgttaattggccgctggggaattcacatgaaagggaaggacttattctgaaccaaaaaagtgctcactaaaccgaacatgaaagttgttttccatcgttttccatcataaagctgtgtcacataacttcacttttgacttggattatatatcccatatatccaggtaccatattaagatgtgattggcattcctcggcaagcactggtatgtacttaccgtataataattgctccacaagtactagt

SEQ ID NO: 39230 - DNA, 645 bp, Oryza sativa
gttttggattttttttaatctcttaaactatgcctttctattataatatatagaataaataaaaaatatttacttatattataatatttttaaagactattatatatatatatatatatatatatatatcttgttgtattgtttttgaactaaatattttgttcttgttcaagcggaaaaaagcgggaattttttttagtccgtttgggaaaataaagtctatgttaggaaagatttttcattttttagtgaaatatctaggaagtggaagaagcactttagtggcttctgtggatgctttacttctgggatcgaagcgcgcttagctggcatgccaaaccatttagggtgtgtttagttcatgttaaaattaaaagtttaattaaaattgaaaaggtgtgacgaaaaagttgaaagtttgtgtgtgtagaaaatttttaatgtgataaaaaaagttagaagtttgaagaaaaagttgataactaaaccaggccttaggttggaactttatgcatatgacattacattagtctcttaatatcggttatgtcagggttatgggtgcttccaaaagaaaaaaaaaatgcatgattaattacttggtgaactactactccatcgcaggaagacaacatgatttggtcg

SEQ ID NO: 39231 - DNA, 1024 bp, Oryza sativa
gactactatagggcgaattcgagctcggtaccccacgtattgctgcggaatatttacgtgttaaatactccctctgttttaggttataagacgttttaacttggttaaagtcaaattactctaagtttgactaattctgtagaaaatagtaataatatttttaacccaagacatatatatgatgaaaatttattcaattatagatttaatgaaactatgctggtattgtaaatattactatttttttctataaatttagttaaacttagagtagtttgattttaattaaagtcaaaatatcttgtaacctgaaacggagggagtagttactatcctggtaaggatgtgcattctaagaacatgttagaaatgaaggcaaccaccatttgaaatttaggttgtaatgtatatattaattgagaaatctcaatacatgtgtatcaaataattaatgcggttatacatttaggtttaatatatgagtgtgctgcaaaggaagagattagtcactcaaattttctaaaagaagaatcttcaatacagagtgaaaagggtgaagcagtgaaccatgcttccttttttctgccgttatgttggactatactaaggtagtacttccatgttagcgattgtccgtcaataaatgttaagataaaagatttacttagcactagtacaaatattatttaataactaagctgataagcaagcttaaaaaacagaggatgatataatgtaaatattttaatgcaccattagataccaaaacaaagctatggcgatgaaaaacaaaatacctgtctcatgatagaaagattagataacacccatgattagatcagctccaggagattaggagaagagatgaccgattgtcatatagaaccaaactgattgaggataaaaccggggaactgccatgagcctgacaatcgatgtgagataaaattggagaactgccatgagccttgacaatcgatgtgagataaattgcttgggtgtttgaaatcttgaatgttacaaa

SEQ ID NO: 39232 - DNA, 590 bp, Oryza sativa
ccactagctactagtagcagcaccgatgcaaccatatgtgaatgtgatatgcattttcctatttcttagtagtatcagagcgggcacataatttttgatagtggtattcaaacattacactaatatcttatcgatgaaaaattaaataagatatattttttcaatttaaggcttaaaccatgaggtatttctaaaatcatgatctcccgtccctgatagtagtaccgtcctttttcagcagagtaaattaggcttgccatattttcaggggtgaagctaggtagaagagggggtgcctagaaatctgatcaagaaaatatttttagctataattcgtctattttcatcatatatgcaccacctcaatccaaactcaagtgttcatatcagtctaaaattagtctaaagtagagtaaagtaagtgccatccttcaccatttcgttctagctctgtccctgtccctgggccctgtatatatcacaactcacgagccatgcaatgttgggctgtgggtaattattttgatcaaaagtcatcggtttttactgcttccatcagacgtcggtctgttttcggcaaacttgtcagg

SEQ ID NO: 39233 - DNA, 908 bp, Oryza sativa
tggtcttctgttgtgaagatataacaatgccatagcctggacaagtgttttcatgtatcagaacatggtagtaattattttattggtggcctggatggttagaaatatgataattgataaggattgcagtaaaaatgtcccagctatattctgcttctcatcccatataagtggtgccacctagccatcctcccagtagtatttaactatgatctagtgaatagtgataattacaaaaaggaatagctacataaagccaacattatgtttgaatgttggaatctttagtaccatgatgtgaaccaggctactggaattttggagtgtatcttcatatcttgaggtctagtcctatttttcattttatgtttgttatacagagtgcaagaacaagcgtcctcgaagaaccatcaagccagcagcgaggaatgtttcgaaaagtgcattgccttccggtcttgatgccctaaacccaaatagaagaacgcttcgcactgcatcaagcaacagggacaaaaagaataaagacaaattggatactgagatttttgaattatatctggagtatgtcctctctctctctctctctctctctctctctctctctctctctctctctctctctcttctgtgcgtgcattagtttctcttcttatttacttcataactttgtgaatagggatctttggaaggacattgatgaagaaaagaggagtgcttatgcatactttgactcattgtggtttcacatgtacactagcggacataataaatcaaatgtccttaaatggattaaggctaagaaagtattttcaagacaatatgttttcgttcctattgttatatggtaagttgcttcactaccagtaaccctatggtttattaatttcattatcaaatatattcaa

SEQ ID NO: 39234 - DNA, 743 bp, Oryza sativa
atgcaactttggtgagacagactacctgggtactgacaaaggaccacgcatgctgctgctggattcacttaaaacgacaaatccgacaaggttgcgatcgaatatcaaaaggtctgatcctttcccccttcaatatgggtctcttgataatacatatagatctatattgctaccagcaatttgaaatattaaaaacaactgttcttttgttctgtatgggaatgcaacaatatatttttggaacttggaacagcccagcaggtggacttactagatacctgtttctctttaaccataatggatgttttttcaacttcgatatatccaacgttagacccaatataggttttggacacttggacaatgtttcggtaattagggtgcttgttgtcacaggcccacaatcagtttatgctgctcaacatagccacctcaaacttctgcctcttgcttgtgcctactgaggccttagtagtttgttttcacagggactatttaattatacaactcaacttctgatagaatataagcgacaaacttgtgtacttagagtctcttagttaaatttgattcttccttttttttgctggagtaccagatttattgctgatatttttaaaactgaagagcgggaagagaatgagcaattcattaacaaaatctgtcttgagtttcctgaggtatggtgtttaacatctcaaagtgcaccgtttcagtttctgcatcatgttcatcttatctga

SEQ ID NO: 39235 - DNA, 665 bp, Oryza sativa
tactacagtgttttatggtttcagtcatatgtcgacgagtattacgtataccattatagagctattaatcttaatcatatgggggattttatctttttcaccataagatactttatattcgttataaataaattttggtccatactaatacgtgagatactaagactactaaggctgtgttcggatgtgaagttggaaactcacctcccacgcacgcaaaacggagtaccatattttcttataattaattaaatatttacttttaaaaagatagattaatatgattttttaaagcaactttcgtatataaaccttttgcagcacaccgtttagcattttaaaaagcgtgcacgtgaaacacgaggaaggtgagttgcgaaagttggggaagaacacagcctaaatggctgtcgatgacagcaaaattactctaaccgtatgtaatagtgtgtaaaacagattttgctgctcagatttaatgtatttatcgtggaaaattgtatgcatttctcgaacagcataatccagctagcttccagtttcaaaacacaatctctatggtagtatggttccatcgaggtcatcacagagctagaatgtcttaagaatgaaacttgtcgatgcaccaacttttttctgactcatttaatactgaagtttctagt

SEQ ID NO: 39236 - DNA, 538 bp, Oryza sativa
tgagtgcgctgcgcgcgcaccatggcatcgccggacttcccggtgaggccggaaggtggcgaacccgcggcagaaggcgaggggaagaggatggcggtggcccacttggcggcgcggacggttcgttggttggtgcgggattcgctgctcccgatgcggcgacgccgctacgcggggcggcggcgcagccccgtcgcccgatgtggaggcgcgtcttgaggagacatagccggggaaggtgagaagaaagaaagagaaaaagatgagcgaagaagatgatgaggagaggagcttatgggtggtgagtggtgaccccattgccatgatggaccaacccttcgatttcaattattctgagagtttttacttgttgagcgacggtgggggtaaaattgaattgataatgatttgtttagatggtgaatcagaatttttttctctacaaaaatcaggtgaaatttctgctctctcatcacttgtccatcttcgcaacttcaaaatgcaagattgaatctggatgatatcaggaacccaaaag

SEQ ID NO: 39237 - DNA, 654 bp, Oryza sativa
agcggccttcatctggacatgttccgtggctcgctctgccaccgcatactctcgtttactaacgctttatttagtcctttaaattcttttataaggttttttaaaaaataattaaatttataaaaatatagtaatatgtacaaaattaaattaatcttattaaatataccattgaatatatttttgataaaatatttgttttgtattaaaatattgatatattttttctataaacttaatcacactgtaaaataattaaaataacttataatataaaatggaaggagtagtattttttttctgatttactagtgataaatccctggccataataactttctattaaaaatgcatcattgttacgtaatattaatagaaatcaggattaatttaaagcttggtgagtcatataccacgactccattaccgtttatgtttgtactttctatctaagttttaattttcatttgtgataaaaaaataattttcatttgacaaaatgtaactcatctgctttgaacagaagacagcagcataagcctctaaacgtggaaacaaatgaaaatattaaattccattgacgggagaccagaaatatagctttccgcctctccctccgtccttgaagttctacagctcaagttttgttttaaa

SEQ ID NO: 39238 - DNA, 687 bp, Oryza sativa
  unsure (1)..(687): unsure at all n locations
tttggttgtatgtgacttcccctacctgaacaagctgccactcagtgtattattttttggtacttattcttttttttgctgacaaaccttgcgctgctaatttcaaaactatgttctgaaggggatacggtcctggggagtgccttatgnaacactatcttacttgttgagtgaagatgaccctgacatgtgcctgaagtatgatatgtgtgagtatatcggggcatatgcagcagaagttttaccaaagtttgagaaagaattttcttgcaatacagctggtcatgctgctgaaaatggcattactgctagtgacaaatcagagaagcctatagggtatggtctgaataatgaaatgatattttgtttttcttgttccgaatattaataatgttgcatcagatgagtgacatttggtttttctatactatcggtagggtcagtactgttggagatctgaattgtgaataacccgattcgatgggcaagaatgaacgcgatcttaaggacagtaacgtgaagtggaattcgaacatgaagaagctgaagaaggcgcggaaaagaggtttaagagggcggagaagaggaggttaaagagggagaagaagaggctgacgagggaggagaagaggaagtcggaggatcagaccgaaggttgaagtgtgaaagaagaccaaaacatttagt

SEQ ID NO: 39239 - DNA, 535 bp, Oryza sativa
ggaccgccgccagccgttgttgccgcctccaccgggccaccgccgaggtcggccgcctcccctccggctggattcggcggaggggagggcgcggccgccacaagccgctgccgcctccaccgggccaccaccgaggtccgccgcctcccctccagccggatctggcggaggggagggcatgtccgtcgccagccgctgccgccacaaccgggtgaccgccactgctgcctccgccgagccgccgtcgccaccgccaccgccgctcccacttccgccgggccaccgtcgagctgccgtcgagacgagagagagcgatagagggaggcgaaagagagagaacgatagaggtagagcaagagagagacagagagagcgagaacgatagataaggacgggcggaccgagagatgggtggaccgagatatggataaggccggctcggtggctcggctcggctaaggataggtgccggttttttaagaaaaccgtctcggctcattataggtgccagttttttaataaaaccgacacctat

SEQ ID NO: 39240 - DNA, 549 bp, Oryza sativa
aagggtcctatatattttaccccgccggctccatccccttaaaataagttcatttttcacccatatcccacgcttagcaatacaaaagcaaaaagaataaattataccaactttattaaattccattgtaattgtctcctactttatttagttcgaatgcaattattctctatttttataaacttcgataccatgattgttaaaagttaattttttaaggaaaaaagaggacaaaatgttcttattttaaaacggagcaagtaataccaaatcggtcgtggtataaacaccaacatataatcatcgagtgtgtgatagtgataccaaatcggtcgtggtcatcaagttgtggcgcactaaaaattcacgtactaaatgagacaaaccaagacaacaggagtactaacagtagaacgcctgaaatattcaaagtactcaaatgaattggtcaaaaactacggccctgtttagatcccaccctaaaaattttcactccgtcacatcgaacgtttgaatacctatataaagtattaaatataagctaaaaat

SEQ ID NO: 39241 - DNA, 654 bp, Oryza sativa
gaagtttcagaaatgatattgtttttcataattttctaggcttgagggtgtactggactttgaacttggaaaagtcggcgctatagtttgtttgaagggttcaaaacggtgagtgataaaaaggaccctgctattcatcttgaggttgagcatgttactgcttcgctgcatcttctgcaagtctaaattaaaagaagttttccctgcaaaaaaaaagaaagaaagataagcttgactgcaaacatgaattttagtaatatgttgacatctcagaatgtggtcttcattctttgttgatattccagacgttctttctctccattgcgaaacctgcgtaatgcaaacaatctactgatgcagggttgtgataggtcatcaggctggactagtaattactgaaattcgtaatgaacaacctggtcccagcaacaggtaaggatgttcaaactgttggtgccaaggcaagctggattggatgcagataatatggcacattgacactaaacttaactttagggaatatatctttcagaagaccaattgaacagtgtggagaggagacataaatagccaagtcctgtaattgggatggcaatggggaaaaaaatgtaatatgatgtagagtagttgatatctatgtagtctcaacctgca

SEQ ID NO: 39242 - DNA, 521 bp, Oryza sativa
ccttgtgcatacgttggataccggagctttcacctagtctagtcagcttttggttggaattgctttcaactggttaatcctgtccggtttgtggagtgctttggggggggggggggggggggatggtggctgtcgtaatcttagattaatttaattttcttggagatagtgtgctgtactcttgttatcagtattgaaagcacgactagatttttatgtgaggatggtgaagcacttctggaccatgtcaaatgactgaacatagctacggccagtttatttctgtactatatatttttgaaaattgctagagggcttgaatttccatccctccaatttgttgcagggattggtactccggttctttctccggcacactaatctctcacaacaatgtatattagtgtgggttggtgtggagaggtggcgccctacgctggtggtaggcgggggttggcaagggggtgtatacggtggtgttggtgttgggagtgggttgtggggggagggggagtagggat

SEQ ID NO: 39243 - DNA, 711 bp, Oryza sativa
aagataaattctgataaaattatatttattcatgataaatgaccttagatttgaataaattatttccccttacactttcatgcagttaaatgcacattttagttaggtatggtttaaaccgattaagaactataattagtctattattgactggttggactgatttattcgaggtatgaaatttagttattaaattataccaaaattacagtgagttttatatgttaagtaaagcctacatgaattttcccacgattttatcttacacgaattattttaaataattcgcaagacttatgtcttatatgtgtttccctttcctaaatgcatgtaaatgtttataaaagttatatttggactctcattaacctgaggtgatattgatatgttagaattacagtttaccttacacatgtcataagctccttacctatttatgcataagtttactttagtattaaatgaagagaatgcttatagagatgattaagatagaatataccctatatgatataatttatttgttcactttcatgttcatgacatgtctttagatggatgttgaaattagttttgtgaggcttgacattagccatgttgatatattttaaggtgtatggtttctattttaacttcctctagctagcactaggccctaatggtttacttgtttatctagatcttagttaagattcatgagacctattatga

SEQ ID NO: 39244 - DNA, 530 bp, Oryza sativa
tatttttcccttttattcaaaaaacttattggatttgtgccttatggcaaaagctggagatgcaaatcatatccattatcttaaaaaataaacttaaaaatttacaaaggaacgtttggtactttgatttagtataggatatggtccaagtgagtggttagcaaaaatatcatagaggggcaaccaatggatcggatgtccacctaatatttcatgtatcttagcgaagaactactattgcctattgaaactagcatgtgtgttgttcgtggttccttctccagtagtttggttgatgtacatattattgctaatatttataaaagatatccatgtattaattgtctaccttctttcagggttataattcaagttatcagaaggtgcttgcaaatgctgacatggacagagatagcaatagctcgacaatgcaaacacaagtccctactaatactagggagggaccaactttcacacaactactactcggagaccaagattttgacctaccaccatatgttcccgaagcc

SEQ ID NO: 39245 - DNA, 629 bp, Oryza sativa
tcaatattattaagattattatttctttaagccatttaatttaattctagttgaatggaaatttaactagaaagtatttatgatttcatgtcaacatcattatgatggtcatttccttaataacttaattatttatactcgaatggaaccaacgagaaatttgactagaaagtattaagatttgaagttatatttaacccacattattataattgcatgacaattataattttttattccttagttattttctaccaaatggtgatataattaaggaattaattttaagattattcataattatttatgaccaatggtgctttgactatgaaattctaagtttattttgcatatgattgattaagccatggtaaactaattatatgcaatcaccaattcttattatttaagatcacttgcaatactgagtaaattatttcaagataaatggaaccaacgggaagtttatctagaaagaaagatgatttcattaagattgttatttccttaattattttctgcccaatggtgatgtaattaaaggaagaaatctaagtattgtcaatccctattttaaatattctctgtaattttcgccctaatggtgatatgacttaagattttattta

SEQ ID NO: 39246 - DNA, 1950 bp, Oryza sativa
gctcaaccttatgtcgagcttgagcctaggccagcaagatcgcttgagctcggctcatcgacagccctacacacgatgtttaatgcaaatctaggttatgttgatatacgatatctgtctaatcgataatcagatctgttctgttaatgtgaatgctcatagcaagtgcccatataacatatttatatatagatttattgatatgaaaaaggagagggaaatataggtgtggagttttagctcttagtatatataaaagaaaaggtattaaaaggggaataaaaacaaaacaagggtatacaaaagtaaattatattggtggtatgtaatcttataaggtggatgcaactgagtacattaacttgcgaaacattcatttgaagcatgtggacatttgtagttattcgttcgccccagccaaaacacggtataccgacacggttaattttgtggaattggacgctgattagctaagatgctatgcacacacatatgtgagaaagatgacacgttggcacaaaacactataataatgctcaatgattgtccaattaaatatgatatagagcaagaggaataaagagtgcagtgatagtaattgaataagaataagagaaaaacaaatacatgatgcatgtgctaatagacgcattcatgaagatgtgagtgtgatgttacgtgtgtagtggtgcgtgtacatgtgtgtctggcgtgtaattaaaaagatagataatgctattgctaagtgatatagttcatctagctctaagagtaagaagttggagtatttgaaatttttctcaaatgtaaggggttgaaaagtactacttcatactaaattagttcattttataacaaaggaaacactactttatcttatcaatcagttttctttaactttctcctcaaaccacacccacctattaattaataagatgtattattgtcaattttctctattcttgatttttcgaaaaagaccaaaagtctcttatatttggaggatggagtaacatgaaacacacgctccttaggtgtgcacatgatgtcctaatcatggtttactttatcaagattgattataagttttgtgtttggtttgtacgcgctacacacgttcatatacaaatatgagtgccttacacatttatgcactagtctaaatttttgtgtatcgctaatacaattcactttaaaaaaaagttgagtattacaatagaagtaatctctaaatgacgtatatcagtctcaactcttacaccctcagcaccttcaacccataaaaaaaggaaaccggacgtcatggttgtgccctcctcctgctgcgtagggacccagcttcgaatagaggtggaaaaaagcttgaagtttgtggctcatatcgacttgaactcgtaaacttaatgagtcgagccgagctagccttagagcccgtgagcttaatgaactagcttgcaagctgcttgtttaactcgttagtagaagatatcaccatatcattagtagaagatatcaccatattttcatatacttagtattttttaactagtgtttagtcttttacttacatcagaaccattaatatttagtgagttatttattggttagtgtctatcatcatatttgatagatgaaaaataatgggaaaatttggaagatacgtgagttgcaaaataccatcgtaagtagggttggacccatatgtcgacacatatgatggtattttttaactccttgattttttgatggtactaggcaaattggccctaaaataataaatttgaaaatattaatacgatgtgaatgagatatatttaatgagtccaacaaatttaacgagctagatcatcataaatcaagtcgatcaaactaaacattttaagtcgttaacattaacaagctaaaaagctaagctcgttaaaatgacaagcttaaacgagttgaggtggt

SEQ ID NO: 39247 - DNA, 1041 bp, Oryza sativa
cagtttctaaccgaacccaacctaccagaaagaactcttctaaagcactgagatccaaactcacaaaatagcctaagtttaactggttaagctaatataaaccctgcgatccaaacgcaaagcagggggcatgcgggcagcaggcaagtccaccaaccgaagtaccaacccccgtggaatggatagaccgatcgatcggcgtgcgccaccaccatacactgatgcacaccgctgcaagcggcagtgaaagctgcagcggaggcgtgcacggccaaccacgtgagcgctgaatgattacgggctcatttttgggatgccgcaaccaccaacagctcctgtgccgccggtattattgcgcaggcacagcacatcatccgctccgcaacaaggctgctccgcagcagcagcctctgcacctgcactacgtctgcgtctctcaaagtcgccaaaagccgagactgccagatcaaagtaccggcagtaccacgactcggtcttgcatttcacatcctatatatggcgataggctcatgaactggaaacaggcacatgcacgcgtggaagtgagggggtcaaactgtgcctcgcctgcacgacggcacgagcaacgttcggtggaaagaggtgaaaggatcaaaggacgtctactgatactctgatagcatggtagatttggcatctgctccattcaagtcggccttgattcttcgttccatatctgacatcccgggtttagtacggatagcaagaaaaagttcagaaaagaatttacgagggaaaaaaaatcccacgcgagacacaccgttcggtgaaagggaatggaagacaaaagcctgatcaaattctctcttttcgtgctttgtagtcgtagtaactttggactgtacggccaatgagcgtctactttggtgaagtttgtaagagtaaactgtgcacggctagagcagaactactgtaaaaaaattgcacgcatatacttcacccctgtgcagaagacaccgagcatctcactgtataccccactggatttacagctaaact

SEQ ID NO: 39248 - DNA, 911 bp, Oryza sativa
cccaccaaagaatttcccaccacctgtgggaaggtatattgaaagaagcccaccttcgcgcgtcgatgttaggactgcttatcctccacttggaaccactggaccgtatggaccgccaaagtatgttcaatggtatggtcgagtcttcaagctgaggatgagagattaatcaatagtcctatctaacctctactgccacggtagtatgacttaaggacaagcttaaggaatagtctaggtatgtggtggcccattttggaagaaaatcgtggtatgtaatatatgtaatatggctgccatgtactccatttatgtaagaacttgttggatggatgtaatagtaactaagaactcgtttgtccttaatttagaaacctctgtgcttgctgtccagaactttggaaaatctgtaaacataagttcatctaagttagaaatctggttataagctcctgttaatatgaaccaacatttatcttgttggaactaacttctctagtgtcaatttaactaactatctaagcttccataaacccacaactgagtagaacttgccactcacccgcgaaataaaagtttccaaatgttttatggtagcaagtctgtcatacaacttaaaagaaattattatctgctgtcaatgtcaatcctctggagatagtcataacttaagccaaccctacccaaatctcggggacgagatttattttaagggggatagactgtaacatacccgaaattttaggacttaaaatttcttgtcaaaatagttaaaggttaacttctccaaatttcaagagccaaaaattccggttttaattaggggaaggaccaccttaacccatggaaggataaattgaagaccaaaataaatttttttcattcccaccataagactagaaaggtcacca

SEQ ID NO: 39249 - DNA, 704 bp, Oryza sativa
tttttacatctatgtaccatgtatgctacttattaggagttttgagaaattctaaaaaccactttcaaaatataaatatgaaataaatcaaaattaagtcatatctagttaaaaaaacacaactaaattttatggttcttctttatagatatatatttaaattagcgtggtatatttttaaggggattttttacaccctaaaatatgatgtgaaatttttcggaaattatcttaacattaattattatttgtcaacccatgtgtcgtgatgtatttatgaacactatataatttttataatacatcaatacttcatttaattaaaggaatacaacaaatatcataaattggatatatattataaaaatattttaaaatgggaatggttatagaccggtgatttgatattttatatttatattatagatatatcttaactacatatgtctgggggaataaaatattttatctttggatggggaaaaaaaattctattttacatcaatttttttcaatgggattacgtacgtatgttttttgctctatcgtttatgctagaaaattttatttgactttttagatgatactacgtatgtattttttgcttttatatttttttacatgtggctttatcttttcaaccgtatgtatgtgggtatgtttttttctttcggcgagccatacctttttgttccaaatcatac

SEQ ID NO: 39250 - DNA, 603 bp, Oryza sativa
caatagaagtagttgatgttgtaggaggtttaacttcacagtggggaacacaactgcatgggggtcatcttgcacgtgtaatttcatatatccgtgcatttcatgacccagagcagcagatcctttccaacctcgtcacgcatcatctattgagacaatgttgaaccactatgcccaaactgcagagatgtcatattccatgaaatatccaaaaaatgcagttactcgtggacctcaaaatgtttctgggtttcctcaaaccaatggacagatcaacacactgaacaacatgaattctgagttccatttcttgcttgaacaagcaaagaatccagagaacaattccatgcgactcatcaacatcaggggccatctatgtgctttcaggtgcacacataactcatgcaacttttagtgttttatttatagtgtggttgtttaaattagcttctcggtaagaatatgaattttgtggtgccatgtgttgtttgaatcatatcttgcttagatgagattcgttggcgttactacgaagaaactattatgatattgaacctcatgccatatcgagcatcttatcccatcttaaagttggtttatttg

SEQ ID NO: 39251 - DNA, 747 bp, Oryza sativa
aaacttatgcgagcactgaagatgtatttttgatatttcattcctttgttttcatctgtgtcgattctctagattggcaagtaaatttatagggtgcacaagatcgaggagagatggtgatatatttttatactgattaagaccttggaagagataacaccctacttcagttggttgtaaattagatctgtatcaaagtgtgcccaacacggtgtgtgaatagcacgtaacacgtgtatgatcaccctaattgtttccggcctaccgttatatagacataaggaggccggctacggtaggtagcgtaccccatattatccgggtacctaccacctatttatatcggataaaaattaaattcttatctttgatcccttttactccctctgttttggattgtaagacttttacatctatatgaatatgaacaatgcttgaaagtcttacattatgaaacggaggaagtattggattacaatgtgccttatgggcttaaacttcttagcccaccttatgtaatatagcccaaaggcctaacctcggttactcgggtaccgggtcccctacaatctgcaatccacattacgtttgtttgttgacaaaactatgttgcaagactgccacgtctttggtttttaatcatcaaacgatcgtactactatttttttctctaatacgtacatagcctgatacagtgaacgagtgattccaaagtcatatatatgacaaatttgcaacacattacgt

SEQ ID NO: 39252 - DNA, 1123 bp, Oryza sativa
  unsure (1)..(1123): unsure at all n locations
gcacatcctgggaactagattcacatgagtgggagttaggaatatttgggaggttgcaaatctttacccatttttgtcaagtctcctgaatgtgtaacacatctggtcgccgccttcaagtggtttgacgggcacatctaaggctgaagttgactggcaggctaaggcccaccatgtcttccatattcctctctcgaggcgtccgatggttcattatgcttggttgatgacttgaattattcacttcatctctcaaatataatggaaggtctggagagcctatgacagcatggtatcagaacaaataccgactacaggagccccttaagttgtcacttaaaattgcttcttaaaaattattttgagtgctatgctctcagttacaaattatttgcaaaaatcatgttcaatcttatatctcatccttctttagagattattttactttatgtctcatgttttgattttaaaactcttatcttgctctataggaccgaaacattttggaaatactatttttgttgaattttatttgaaatcacttaataatcacagcaaaacagtaacatagtgttttgaaaagttttgaaatccatttgcaaactactcctatgtattagcacggatttctaaaatatcgggttaaacatagcccctagtaaatgggttttgaaaatgagtcgataaaacttaaaacttgctagacaatattggaattccatctccctatgttatctctgaaccaaaaatgaatttggtgggattttgtactttcctctcccgatatttcaaaatttcaccggtatggcctaaaatgtgtagttgggtatagaatagaatttgctgtgcttaaccctctagattgtttgcttagatggaccacccaaaattcatctagccttggaccaccctaacataatacgactaaaaggtgatanaatttatacactaaaacttgattaaagtttcattttgtgccggttgttcttttttttttctggaatcttgagtcagtctgcttgttatttttgtctagactaaaccgtaggtgataaacctgagaattttttacatgcatcatgtaaactaacccagtaagcatcatgaattttggcataatttt

SEQ ID NO: 39253 - DNA, 510 bp, Oryza sativa
ttggggggaactggggttggggggggggaattggggggccttggggggggggatggagccaaaaggtagtactgaccaagattgggtcttggcgggcaccggcgatgtcagctgcgatgacgagacggtcatggatgctaccaaatgtcaggcatttctctatcacattcgatccgtacttttgacagctcatcataaccattaaccccttcaacctcatcaccatcatcgctcgcactgactcccctccatgctccacaacatactgcatatatatatacaggcatgcatctatgtgttactatacgacacacacacacacacacacatatcaatatttcatccatgtagtaattaaaacacaatcaaatatgcttcttaattgatttctttctctagtatttcacattaagttataggacatattacttaatattattttaattagcagagactttgtctactgtggttcactggaggagaaaccatctttcgtcggtcgggctaatt

SEQ ID NO: 39254 - DNA, 578 bp, Oryza sativa
cacggcgcgcactccggcggcacgacgccgtcccagcgccggtggtggacgccgccgcggccggccatgttgctctggccggagagcacgaaaatgcgcatggcggcggggcgtgaggcgtttgggtgtgacctgcaccctgcagtggggcaggtggatcgggggggagttggaacgtcgttttgttttattgaccaaccattggttggcctggtcaaaaacttaaccggcaagtacttaagccattcttttttaccagttacattattcaatcaggcttaaattaactaccaccattattcgagattaattgaaaaaccccttagggtaaccaaattgaattggcaaccttctgtcgacaaaaaatacattctaaataggctagattttaaggtgaacaaaatagaattgttaaccttctgtcgacaaaaaatatatcctaaataggctagattttaagccatcagatatgcttcataattcccacggtgattcttctccaaattcgacgacctctcttcttctttggcattgacaatatcatctcaaactccaatcgagaacctatggattagggt

SEQ ID NO: 39255 - DNA, 1318 bp, Oryza sativa
gttcctccctcgtcgcgatattttggccgccgtacggagccgctgccaccgcggggccgacggcaacgtggtccctgagaggcgggggcccacgggctcaggaggggaaggagccaatcgcggactgacgcgtggtggggccccggaggcgtggaggcggtcatcggggcgcgggtggagggaggtggggcggcacgtgatggcggtcggtcgtggcggaaaaaggaaatcccggtcaaatcgtcgggcggagcaccggcgtcagaggccctctcttctgacccccgtagcactaaactactcgcactcgttagttaatcagctcgctcactcattcggtccttcctgccgcgtgcttagcgggtcggaacccgctaaatcatacgtccaggttttccaaggagcagtaaacttgaagcattaattccttggttgtgtcaagcagcaagtgacattccggttagtatcttgctattgccatgatgatctcaggtgctctaattttgctatctcccggttatgacagatgttcgtagatgggattgtatctgattttgtttgcatgctcgatcaatttcgacagtctggagatacccttttagtactcattctagtagagtattgtcgaggtttttttttggaacaaaggaaaaatatagtaatttcagggtcttttggattgcagtttttaaaggaaaaaaaaattcctacatccattattccagaggaaaatcatgggaagaaaaaaaaaatacactcaaacctcattctttttttcctactcaggtgatcaacattctttggtaatgtattacttcctgtagggccattagtgataatcctataattcctatattctttgtattcctatgttccaaacaacctatccaacggaattcatttgttttctatttcctctattttacccatgctataatcctatatattctaatgatttttctattcctatgtttttctacgtctctaaaagaaatcctatgagactctttggaacgaatgattgggtcgctagaattcctttgaaattcttatataatggtatatttcatacggatttttggaggattcttagtataagttataagctattaaagtttacccttgtgtttatctcccttatctaaatcctgtgtattttatgtgctccatttaaacagttcccaatttcaacatagagtataatcctcatccaaattcctccataggaagtgtaattaggtggtgaggtaaaattatataatttgcatatttgtcattgtcaaatatcaatctgctcgggaaacatctaactgcttgt

SEQ ID NO: 39256 - DNA, 1747 bp, Oryza sativa
atgtgctccatttaaacagttcccaatttcaacatagagtataatcctcatccaaattcctccataggaagtgtaattaggtggtgacgtaaaattatataatttgcatatttgtcattgtcaaatatcaatctgctcgggaaacatctaactgcttgtgccattggatccgacactgtggaaccaaaatgccactactgtcatacatcaagacgtactctctgtttacacccgaatttgacacctagattcaaaataggaaaacattatcaaaatttggaaggcatcgggttttcttcacagggccaggctgaccgtggcctatgggctagacagaccagcagagtccgacgcttagtccgatattgttgggtctcggatttccttactggaagatatgtttcgggtttcctttggtttctatcctgagttggacatggagaaaaacctataggaggcaaaaccaacccctttataaggatcaagaccgattcgattcaagaaccccccaccccccaatctctcaatcctacacaatcgactcgttcttttacctttgtttttcagccatgtcttttaatgtactctagtttagtccatttttatcgatttatgctataaatcgtccgttgtcgccacaagagtgcgattgcccctttgtaggtttgtcccgtaagccttctgttcgcctatgagatgggtggttatcttcaaatcgttctaaatcggcctcgtggctggttttgatctctaaatggctccgctagtcggtttaatcttcaaaacccatcttggtttagagttgtctatatcgaggtggttgacgagtctcgtgttgggatcgaaaaagacgccttgttgtttagtatgagatttactaaaatgataaataaattaaaacggacagagtataaattctaaatattaggaatgctaagatatattccatccgttaaaaaaatatatttcctccgtttcacaatgtaagtcattctagtatttcctacattcataatgatgttaatgaatctagacatatatatctatctagattcattaatatcaatataaatatgggaaatgttaaaatgacttacatggtgaaacggagggagtaactatctttaaactgaaatttaataatacgtcaaatgcgagctcatagtaaagggagctatattttgaaatggagataatataatcggattgcccttaattaccgcttcgaagctccttattggcacggtatttgaccttaatttacgaagtaccttgcggtagccctgcttcataattttgcctgtactaaagtagttcagcggatttatatcctcaacagtctatgcgtggagtattaagggtgtgtttggttgcaagccacagtttgccacagtttgccacgcctaaggttaggcaaatttgacaggtgtttggttgtagtcacagttgtgacaagattcccctccaacaaattgggtcccacgtgtcaatggctcaaaaaagtgtggcaagattcccttaggcttagtaagttgtggctaacaatttgatcacctcaccttaggcaaggtgtggcaacttttgttggcaagtaatggtaaagtgtggctgggaaccaaacagccccagtcatgggcccgttaagttttgtcccccccctttcggagcttttacttaaaaaacctagtagtaagcacaagtttaatatatgaacacactcacgcacacacaatctctttaaaacagt

SEQ ID NO: 39257 - DNA, 613 bp, Oryza sativa
aagctattagcatatgaataaataaattttaattattaccaaactgaaaaaagggatcctttaaatattttgaaccacttttaatataaaaagttttcactcaaaacaagtcgtttaatattaaaaaagcgtgataataaaaactaaggtaaaatctttatctttacaagaaatgaactaggtcatagtgtctatctatttgtagctcgcattcaccatgcaaaatggatgagtcgtgtacctattttctcggttgtcttattgttgcaattgcttattaggcaaagcaaaataaacactccccttttttttccccttgacttgactagagtacataaaaaccgacaatcatttcttactagaattaaccattttgactctagtatacatctttagtgctgtgtgtgggaatggatgataagtattttttaaagaaataccggctttactatatgttaaaacaagaaatgatactacagatgttagcttcgtactataccaaaatgcaagaacctctccgtcaattaaatataattttttttgtgaaatcggtgataattgggcatcctcttctttttacttttaggcaaagcatgagttcttttttaaaaaa

SEQ ID NO: 39258 - DNA, 1027 bp, Oryza sativa
ggatttgttttggagggtcgagattcaccctatgtcacccaatctgaatccctactccccctccccccacaacccactcccaacaccaacaccaccgtatacacccccttgccaacccccgcctaccaccagcgtagggcgccacctctccacaccaacccacactaatatacattgttgtgagagattagtgtgccggagaaagaaccggagtaccaatccctgcaacaaattggagggatggaaattcaagccctctagcaattttcaaaaatatatagtacagaaataaactggccgtagctatgttcagtcatttgacatggtccagaagtgcttcaccatcctcacataaaaatctagtcgtgctttcaatactgataacaagagtacagcacactatctccaagaaaattaaattaatctaagattacgacagccaccatcccccccccccccccccccaagcactccacaaaccggacaggattaaccagttgaaagcaattccaaccaaaagctgactagactaggtgaaagctccggtatccaacgtatgcacaaggccaagtgacacctgactacctgagactgagatgacaagggcagccagggcgggcaccaattttacagtcttccaaaccgcacaaaccaggggtcctatggagcgcaataattttacacgtaacagtccacttgttacctaacaaatagtgaaaccgggaaaatcggcgttccaattactcaactctcaccttttcccataaataatttcatttctgtttgaaataacgaaaaatatactagtagtaaacttaagaaacgtgtacacgcttcctacgtgtggccataggattcgcttttaaacccaacaggaagcaaaagaaagccgaaccaatgcatttgaatcactgctactacgacagttttgtttttttttttggaggtgaattgctactaccacgacagtagaagtatgataatatactcgctacaagatcgaacagaggatcttccggagtccgga

SEQ ID NO: 39259 - DNA, 610 bp, Oryza sativa
ttgcaggcggcccccttgccgccctgggggagggcgatttttgcctcccccctataaaccccagcccctcccctgtgaaatttcattatattcactaaaaatccaaaaaaacgaaagagagagagaggggagggcagcagaaggggagcggcgaagccctgctggttcgctcacttcatcacaggtatgctcccatacatcttttgcatttgtactaatatattacgtttgagtacatatgttgcgttttagttttagttccatatattttagcagatctgtagcacacagcacatatgtgtagatccagagcatagaatataatagtatgaattgagacatagacagtagtgttaattgtaagatgtagtttagtttgatctggagaatgtaacctacttttagaaatttagagaacagtattgtagagaatgtaacttagggcgtagtacagaaatgcgaggttaacgcagttattgttttcatcaggcacaatgtcaagtaaggtcacatttcagatagttcacggtgaaggaaatattagatttggtccagatggtgttgatctgtcagattttgtaatgacatctaagggcatcgataggcctgc

SEQ ID NO: 39260 - DNA, 583 bp, Oryza sativa
ggaaggaaagggtaccacgtcaggagacacgtgtcggctcgtgatacacggggtaggcccgagcgcgggctgtttcgctacgaggcacccggttcgtgtacccacagagttgggtgcagtttcgttaacaaaatctgttattatacaggtaaacagattcacagatatgcgtcgatttagcaaatacttttttagtcgctatctctaaattgtaactgtgagaccttaataaaaaaatcacgcattctctcatatgtctatatttctttattcacttttaataattgtaatagttattatcatcgtcatcatcattattctccgagaaaaataaaatatcattgttagagtacatgaggatgacatgtgggccatcctatgaataatggcgttcgttgggtcccttgcggaagcgccggtgtagagtgggtgggtgagccgggcaacgtggcggatagtttaatttcttgagtcacgctgtcacccgttgcttccggcacacgtgtctctaccggagcggctctacgcgtccacccgcgcctcccacgagggccagctgggtagcctagtcatgtgggtgacg

SEQ ID NO: 39261 - DNA, 704 bp, Oryza sativa
tttcatacccttgaaaattgcccgatcccttctatacccctgaaatttcaacttgatcccttctatgctcctgccgttacattttcctttattccatggttaagtttggttgcaaatgtcttttatgcccttgatgatttatgtttgaataacgttgaaaaacaattgaaaatttgtttgagtgcatgcattttatgaaactaaagagactaaataattagttcagaaaattttgacataaatttggaaaataaaacaaatgtaataaattaaaatttttatttgaacttttaatagggcagtgttttttttatcgggagcattcatagaaaaatatcgtgagcatcggtagttctaatactcctcattttttatgactttataaaaaataaaaataaatacatattttttatttcattatctaaaaataaattgtcacgcagaacaaactcataattataacagtctcatgcaacaaacttttatattttcaataatataattcataattttctatgttcatccaaagggtaaaatgattatttttatagaaatttgatggtcaactaatggtcaactgacgaaaggggtatgaaagggatcaaaatcaaattttgaagacatacaagaaagtaagcaaaattcagaggcatagaaggattagctaagattgcaggggtatacaagggattttcagatttttt

SEQ ID NO: 39262 - DNA, 588 bp, Oryza sativa
ttgacttggccgcatattgcccctggccaccgtctaggtcatggttggtgccattgacaaaacacgctttggtgagcattgcatcctcaccacaaattgctatccttgccgtctctggtgatctggtcaaatctagcacttttatagcccatgttgacactcgcactggtttatgaaaaataaatgaaaataaaattatatcgtgcatattatgaaaagtataaaattggtactctttttaaataaactgattgatgcgacatgagtaaaatgatccaatgttccttgaagatgtatcttgtatgcagatgatatagagggctatgaactagtaaaatacacccccttcccgatgttcagtgtcgtattatccgagtctttttgttctttgggcttatatggccctcctctcgttaccataagtcggtgtggcttaatgtattgtgtaacaattattcttttcttctaatatattgacgtgtcatttttttacgtgttctaacaacaaatagtaaaatacagatatatacttttagccttattaaagtagtgtaaactacgggtaccgagctcgaattcgccctatag

SEQ ID NO: 39263 - DNA, 1296 bp, Oryza sativa
ctattccgtgtcgtccgtcgtttggtgatcgatgtgatgataatccaatggacggttttcaattaatggcaaataaaaccgtccagacaagcttattcaatatacatggagtatataggtatcaaatcgatccatatgccagcgacagcgagcgatatactggcagttttaattactactcatagccagtactgttattactgtacatgtataaatacggccgggatacagctaacctggccataaatatatatattgctgcccgtattcctgtgagatcgatatatattgctgaaaagaaaagaaataaagaatgagtcgtcatcaccagcaaatatgtatgcgtgcgtttaacttttgaattcatgtcgtttgcgcaacagaaagaaaatagtccagcaagacgatgagttgtaaaattttgtttgtatccatctacaggtgatggttggcgtcgttccgaaatcaacacgaaagagaagaaaaaggaaagaaaaaggttggcgtcattttgtagtatatacgtgtaggtgtatttgcttaactacgacgccagcatcggcctttatttcttttgagcatgtagttcgatgggaagtgttagctagctaggcatgtagacacctggcatggcatgcacagcctccgaggccagaatagttgtgctgatgatatacacacaatagatggcacgcatccacgctcgatcggttgatcgatctgccttttgagttttgtacacatccatcttttcctagcatgtatagcgaaaaagggcaagtagtaaacatgtgtacacgcgttctgaacttgaagctattagctatatatctatcttcctcacaactctccttttaattagttcttccatttccacaactactccatatttccttttttctcatttcttcgatttgtgcgtcgaactgcagctgctggtatccagccgccgcttctccgtagctactttcaggccggccgaccgagcggacaggtaaaccggtgtggttgtggcggacagccgtctatcatctccgtaggttgttctatttgatccatctatgcatctgtattgtattgtattttcacgcatgtatgtcttataatatcctcttatccggtcattggtcaaacagactcgcaccagctgctttcgctctcccttattaaattttcaccggcgggtcggatcgcttttccccttttttttggtttcagatctacacccttgtaaaaaaaattgattccttggttaaaaaaaaattaaatcatagggacatatttagataagcactg

SEQ ID NO: 39264 - DNA, 1483 bp, Oryza sativa
tatgtgcatttatgccatgatttaaattttactcctattttagtttttctagacagatccattgacttggtgctccaaactagagctcagcactttggtcttcggttccatatgaccaacaacacaaaaatagcaactcgtattgataacaatcgatcgttgactcaacgcaatctcttctgaccccgacggtcgaaaactatggccggaatacagaagaagcaaatcaatgctaatttggcacaattactatacgtggaagaactaaataatactccctccttccctaaattttgacgttgttgatttttttaaatatgtttgaccgttcatcttattcaaaaacttttgtgaaatatgtaaaactatatgtatacataaaaatatatttaacaataaatcaaatcataggaaaagaattaataattacttaaattttttgaataagacgaacgatcaaacatactacctatatattttaatgtatgacaccgttgactttttaaccaacgtttgaccattcgtcttattcaaaaaatttatgtaatcatcatttattttactgtgacttgatttatcatcacatattctttaagcatgacctaaatattttatatttgcataaaaattttgaataagacgaatggtcaaatgttattcgaaaagtcaatggcgtcatacattaaaatacggagggagtatttaaaaaagtaaacggcgtcaaacattttgagatggatggagtataaccaataaatgaatggcaagcgtgtgctacaattctttgttagacgagccggccgtcttctcgagtctctgtgtgctagtggtggcatcagctgctcgagtgagttatcgtggacatcagctaaataggggtgatctgtccacctgtgtattaataattaaaaccattggattgttacccattttaagttcttgaccatttatctcaaaacgaagtacttgacgaaagagagattaattatgtggcatcacttgtagcgttgttgtcagtctcattgtttagtgagtggcaattcttatgaccatttgttcaaactatttttgatgtcacaaggttggagacctatttctggacatcaccttaccgggggaatgagaatgctattgccaatttatttacgtttttaactatcgtgcttgataggcaccactaccacaataacgtttctagcttgaatgtgatcgaaatagttaagaaaaacaaaagctgacaacgtagattcactagaacgggattggatatctctaacgggcttaaagcatcatctctttcgggcagggagcaaaggtcagtaataagaaaatatctcaatcgggcatccggccgtcacggatgacacatctcaatcaagccaacataaaagcccgtcatggatgactctcatctctaacgggcctagattatagcccgtcacggatgactatcatctctaacgggtctagattatagcccgta

SEQ ID NO: 39265 - DNA, 662 bp, Oryza sativa
atgtgtacttgtctttttttttttgatttttgatttttttttttggctttaaagaattggctcgactcaaatcgagccgatcgggcttttttttttttttttgcaaatcgtatacctcaaaggtgtcggttcctaaaccggcacctttgagtcatctcatcagtgccgccttggtggtgctggttgggaaaattggcacctaaggggatttcccaaccggcaccgaaggctctttctgtggtagtgaccctggttttgttagcacgtttttcaatctgctaggtgtatttcgtgcgaaaactttttatacataatttaagttgctttaaaatatcagataaatctattttttaagtgtataataattaaaagccaattaatcatatactaattaatggatttcttgttttcgtgtcctagctacttcatctttagtaaaaacgagcatcaccaaactatgttccccggactggttggagagtggatatattttaaactttcgagaagacgttcccttgttgtttacatatcactcaaaatagttattaaaaaatttaaaagatatattaatatataatatatcagtatttaaaattcaacttttacaagttgtaaaaaaaaagtacagctagttaatgtatattgatagtcatttttttttt

SEQ ID NO: 39266 - DNA, 1078 bp, Oryza sativa
aagcggttttatcctacgtgacgtacacgtggcaatccagtcagcatttcctttttttttaaaaaaatggtggggcccacctgtcatctcacctcctccttctcctcttcccctctctctctctctctctccccccttctctcggcgagcacggcagctcgcggctctacgccggcctcagctacgcctgctacgcgtcatcggccacctccccgtccaccaacggccacgttcgtcttctcccgcgcggcgccgccgccgacgacctgtacgccacgggctgcttcacctactgcgccgagctcacgccgacggcgcgccgtgcaccgggacgggttgttgccaggtccccatctcgccggacatcccctacctcggcgcggtgttccacaccggcaactggacgaacaccgcgggcggttcacactactacagatccgggcttcagtgacgggtcatctgtgacgggccaacgcaactcgtcaaagatgagtcatctctgacgggccgaaaaaatatcctcttcaatatatggctaccagggaggacccgtcacagatgtgaagtcatctgtgacggcttgcacttgtaacccgtcacagatcgtctgtgacgggtcacaaccatggctcgtcacacatgacatgtcatctgtgacgggtgtagtattatgaaccatcacaaaagagaccactcatctctgacgggtcttttaactaacacacgtcacagataacgttatctctgacgggtggtagttatgacccgtcagtgatgagtgaaaattcaaatttttaaattttgcaaaaaaacctcggattgaaacatgtcctatataaaagttgtagctcttaatgatatccacaactttataactaacaacatttctattagagatcatttacatccccgaacatgcattacaagtgatcagatctacttttaaaaacaaaattttgagttttttttcaaatgacatggatggatacatgccccgtatcaaagtcatagaactcaatcagatctacaacattataattgaaaatattttcatttcacaaaatttacatgttataaa

SEQ ID NO: 39267 - DNA, 538 bp, Oryza sativa
aaggtaaccatactgttcaccaggttctaactcattggtctgacactattccagcacaagctacctgggaggatctgcatgacttgaaggccagatttcctaatgctttggcttggggacaagccaaaactcaaggggaagggattgtcagatcgtcatctgacagtgctgaggaagatactgaagaagaactgagcttggaagcagagcaggacgatgatgagaagatgcaagctgaagctgaagatgcagagcagggaggagttatggaccatcaacccgtgttgcggcgcacttcaaggactgtcaagcccaacccactgtaccatgggccacagtgggccgtgtaactgaattcgttgtaacagctgtctaacagctagcgtgtcgcgtatgctgtacgttgagagcgagagagagaactatatatatgaattggggatgaactagagaggaggacttttggcaatctggtggcgaaggcggcggaaggctcaatcctgttggattggtgcataatacatcagtaatcgattgc

SEQ ID NO: 39268 - DNA, 863 bp, Oryza sativa
acgcccggtcggctcggctcggcctcaaaccggccgaccggttatggcgagggcggcgtgcgcgcgagcacggtcgccggcgacggcaaccggcggcgggaggcggcggcggacggcgcaaaggcggcggcggcggcgcgcgcacggaggcagcggcgatagggagctcgggagcggacggcgaaagagggaaaaaggtggagagaggcgcggtggtcggttatatagaggtggggaggctggacgtggccgggagcggcggttccgcggcgacgacgtggagaggtggaggaggagagagagggggagaggattcaaatcgaatcccgtccgtgcgggcgcgcgcatggacgggagagggcagggcgtggggcggcgacgtggggacgtgtgggcgcggagtggggcgcggatgcggaggaagcggcggcgtgggcggcggtttcagcagcggatggtggcggctgccggaggttagggacgaccgacaggtgggccccacctgtcggcgcccgggaggagaggggaggtgggctggacttcggggaggggaggtgaagcgggccggcgcgggagggaatgggccgggctcaagaaaaaggaaaaaggagggaaaagaaaagataaaaaggaaaaaggattttcccagggatttatatattgcacatgctcatttttaattggttaaaattatttccaatgctctgaaaattccgctaaaaatcctgttagcgtattttgacatgtagaatccaagaaaaattccacatgccgaatccgattattatttgcatttattaatttagggtttctctcttgcctttaaacaaataatttcttccaaccatttattaattgaattt

SEQ ID NO: 39269 - DNA, 612 bp, Oryza sativa
tccgtgttcccggaggtggagctggccgaggacgacgccgtggtgtgctcccgggtcaccccggatggcggcggggaggtggtcgcgtggtgcaagattaggcgcggcggcgacgtgtcggcggcgacgatttggaatctgaggtatctgttgtgattggtggttggtttatccccttttcgctgctttgctcttctggactgtacatcgtaggcaagatgcgctttttttttttttgcaatcctgttttattggattgggggtacaaatgccattcattgatgatgcatgtttgggcgaaggctataaaatgcagaaaagttcttactgattgcgatggaatgcgagttgttgtcgtttggattatgtgaattgttgcggtgtcgcactatccaaaattaaagaaaggtttcctgtggataaaaaagattcaaatttcctaatgattccaaagtgcctcattttcttatccataagaccataataactcagtttccaaacttttgaacctgattgattttgagtcgtgctgatctgaaatcgatagatgtgagcccctgaagacagggaataggcagagtggccatgggtgagttttttcttttttagggg

SEQ ID NO: 39270 - DNA, 837 bp, Oryza sativa
tgtgccgccggtcagaccggccttatgcgccggtcagaccgccttcttgcggctggtcagaccggccagggcacgccggtcagaccgccactatgtggctggtcagaccgcccctggtcaggccgagccgagtgaaatattgtgtgtgcgcgctatgaagatgtgagcacaagtgaaaatgcaatgacctaatgtggcaattaaaatcatctctttgctaggtcattacccctcttaatagtacggcgaaactaaaaaataaactagcaaatttgatcgccctacacctcgatcaattctaaattaaagcactagttttaccgtcttcttttcttcgcttcgcgccatcaaattttaatccatcgatagtcatccatgcgcacacatgacgtcgacctaacttaaatatatagctcaaagacaacggttagtccacaattagcgcttgtcattaattactaaaattaacaccgggggcctagatgcttcaccgcgtgctgcccctcctcgagccgccgccgcgtcccatgcttcaccaccactgaaaccgcccctggtccggggtccattttatgccggcaggttcccttggcgccattaccggcaatgagggttctttttcacagtgcgaaagccaagattgaaaatgaagggcgccttttcaagccaggccaattcattaaggttagtgaaccaggaatttggaagcgttaaggtatgatcggtaactcgatatcatacatattccagcgattagctccaagagagaccaagaccccatatatcatgatttgccaatttaaaattcagtaatatttttaatatatggatgattga

SEQ ID NO: 39271 - DNA, 759 bp, Oryza sativa
atatcgctacaaaccctctgtaccatactcatatccacccggtaccagatgtcactccagcacatcacacataccatgcgcttgagagcaaggttgtgatggatacggtctgtgattatattgctaatagcatgtattagcatttcatatttgccagtatttgcttgtgtaatagtagtggactcatctgctgtaccgtgtactgctattgatataatctaatgatgtatgtgtgtgcatgtcattcatctgcaagttggcaagcaaattaatgtaccctgtagcaaattaatgtacccctgtactagttcatccttctatcctcatcttcatccgatttttttcgaggggataggcagggagctcctgcaatttcactatagaagaagagagttgatccagtttataaagaaaatcggacccaaaaaccttacagcagcacagttaatttcaggaaaaccgacgaaaacccgacattaacaaactgaacgcaaagaacaatagcccaacaagggaagaaacttctagaacgaagccttcaagaaggtaacgccgacagaacggtgacaacgtccgatcctaacgaatataaggttttcacccagagaattcccttaaagtggagttgaaatgagggctccaaaagcaacgccttcaagaaggtgaatggtgcccgagggcatcgctgttactagcaccggagcggagcaaggttttcaccccagagaccctgtcaaccaaagcatccacaacggaagc

SEQ ID NO: 39272 - DNA, 1388 bp, Oryza sativa
gcgcgcgcgccaacgagaggataatgagatagagcgccgacgcacagaaaacggagcggtatattagcgcttgattaattaagtattagctatttttaaaaaaaaaattggatcaatatgattttttaagcaacttttgtatagaaactttttgcaaaaccgtttagaggtttgaaaagcatgcacgcggaatacgagagagaggggttggtaacatagagcaacaaacgtagactgagttcgtttcccagctttccaactacaaaattatgcgtttgttctcaaaaagtttctgcgggcggccgtcatcaccgctgctagctcgtccagcatcccaagcccagcatggctgtggtggtcgttggtgtgatgttgggacttgtatgtgttgtcacatagtgatggacatgcttttggacagaaattttatgttggatatgaatatcacttggatttgggatggacaaataggagaaaagttgtccaaattttgtatatctgccataattatgtcatttttttaaattaaagtcaaatttatcaaattgagccaaatctgtcaaattgaatccaaatttatcaaagttatctctaatatatcaaagttatgctcgttaaattatgttaaaaagtcaaaacaaacaaaaaaaactttgatacatttgggtcatatgagcaagggcaaccaggacaattcgccccttagttaacaccgttatcatgtcttcacgaaatagggtcgtcaaccttttatttttgattggaaaaaacgaggtcatataagcaaactaaaaaagtagggttaaattggaagttagactttaaaataggatcaaataaacaattgccccaagattacttcatacaaagaaagcattaatgaaatttttttgattggtcttatttacctaatttggattacaacacatgaaaaaaaggtgtttttatattcaacaacgtatccagcttatttgaatgaaaaaaattaaactctacgatcaaaatcccataaaattcaagttgtatattccaatgtaagaatccagatataattcaagttgtatattccaatgtaagaatccaaatataaaccaactaaagattcaactattttagatggtatcctctatctaggtgaggcggtacacccaatgagaaaggatcgccttttccatgatgaggaagcgataggcagaggacatgcgtgcaatgagaagcgtcgtagatgaggaaccgcgctatcgctaatcttctgctagcttcccattccttgcttctctgcagtggagctccaataggtttacctcaccaatatctgccagtagtttctcgcggcactactaccttctgatcacgtgcgagtattgccgcagagatgtgtatttcgt

SEQ ID NO: 39273 - DNA, 1283 bp, Oryza sativa
  unsure (1)..(1283): unsure at all n locations
gacctatagctcactataatactcaaataaactcaagcttaacttagtgagtgttgattgaaaaattaagtccccctcatccaggatcttagtaaggctctaatttacatatgtactggccaaaacataatcttaattaatcttaatttatgagcctttagaatatggatccattagcaaatgcttagcttaataattcgatcatgggacatgtctttcacaaccatatcaatgtgttaggcagaaaacacacaacatgttgctactagaatagaaaactgtgtttaattagtgcacaacttataacagtatattttgggtggttaacatcttttgagtggtttatgagcgctattcactactcttagttttgggaaatatgattaatcataacacgctttaaaatctaacttcatcgtcgactatgcagtaagagattatttttggagcttttacatggttattgctcccctatgtgtgaacatagcttaatctgaataatcttcataaatatccacacatctcataaaataagtgtccaaatatctctaaacttctgagatcaatggactttaggaaaaaagagcatgttacttaagattgtcttgcaaataatggaaaacattattaataccagtggtttagtctggatttaattaaatactgccaagattcccagtaaaaaaaagtatgccaaatctgtatgcatccagatttgagctattcccaagcttcggtcagttgattcataaatgataatcttggtaacttaatgtcagcttgactaactttaattgaattctctcaaattatttctttatgtcagtgtatgacttactgatataaacccagtactccttcggaccaaaataattcatggaaaaaaattccttagtttctaagagcaatatgcattgcttgacaatanaatgtcattagaatggagtaccggtgaatgaaattcccacctttaattttcatgcacctgtccacctcacttgaattgtttgaaatttccatcagagtcaggcttaattttattaacccacttaaatggcccaatattttgactcattcagaaacttctactaaattctttattttgttcatcaatctcaattattcttatatggttcgaaaaccatttatatgaacactttaatgtcttattttgttcatccatctcaatttattcttacatgattcgaaaactattgggatgaacgcttatttttaatgtcttataaggtgaacaagctttatttagtgtttaccaccataat

SEQ ID NO: 39274 - DNA, 1457 bp, Oryza sativa
aatggcccaccctctggttaaaattggaaattttaacctttcaaaatgggaaagttaccttccacctattttgataggaaatttttaaggtctagaatttgggtacgttacaatattatattgaattcagagtaataaatagaataaaagaaataggagaagattaccgacaactccgaaattcttccgactacttcttctctactctcttcctattctagtatacaatatagtacaatagagcctcttataattcagctcaatcttggaagtctgtgtgagagtgaatgaagcgaggtccttttatagggcagttatgacggttgtgagaagggaaaatgtccgaactgccccgcaaccatcattgggagaacttctggagcgtccacgccaaacccaggatcaacggtgatcagggggggttcggccgaaccagagggttcgaccgaacctgggctgggccctcctggcttggccttcggtcggtggagtccatggaccttcctctatccatttctcggaattttgggttgatttactgatgtttcgatgaagttcacaacccctccttgtatggatacataattctcctcactttagtctgattttcctcccaacttcagggttttcatctgcataaaaatatacaccaacacttgtggaatattgtggaatatgtgagattaagcacctattactatgttggatgttttattatctagactttatgtagatgttggcagtatgggattggcattgaacaaccgccaacaaaacccccccacacttagccctttgctcgtcactgagtaaaggttagtgtaaaatgaatttcttcaagatatgtatcaagcatataaattattttacaaccatacctgcacctgtgaactttatcagtggctaacttaccatcttgagtaattgagaaatagaacgatcttgattccagtccttgcttccctgttacactcatgggatttttataaattttcgcaaatcagctcttctcctcctattgacttcctctcttgtccctcaaggatgtatattttctttttggatccttaccaaggcaaaatgtgccataattcatccctattagaaggctgatatgtggagcttggtagggattaactgtgacatacctgcatcatatatagtgcaaagcccaaaaatattgactcaaaaagataatcaatcatactcctagaacaagggtctttatttatggcggaaaatgaaaaagtaaaatattttgtggaatgatggaataaagaaatgattctccctttttcctatactttcgctctaattggttctcttggcatgattatggaagggcatggctatattttctttgctcaatattttgagagcaagctttatttcatcttctttcttttctttctttttttttctagccatgcctttccttccttttctcattttctttt

SEQ ID NO: 39275 - DNA, 1190 bp, Oryza sativa
tttggcaggaattttggaggtcgggtggttttcttttataatagggggtttcttctataatcccatataaactgaattagggctattaccttacgaggggcctaaaccagtataatccttatctttttgtgtgcttgatatcgtatcgtgtagatccttataccaacgtaccccaataccatcaaaatacggtccgcgggtatccccgtcaacaatatgtatacgaatgttttcagttttacatattgaaatactattttatttgtcagtgcaagatattaggtattatgtactaagaacgacaaatcagttaggccctatgcatagcatttcagatttcgattagaaatagcgggaaatattatatcacatgggggcacaatcttcccaaatggccagtgggttataggccacgtgagaaacacattattgcaggctggcacatgtgataattgatcttccttgggatcacgttaagagactggcctgcaataatgccgtgagtcttcgcatgcggttgggccacctgcatgcaaaaatgttgattttcgcagacacatgtatgcaggtgagccatcaaaccgcatgtcaagatcgttttttgtcgcatagaaaaactaattttgtcatcaagaatttgcatgcatgtgccaaaaagtctttcagcttacaacattatatggtcatagattagtttcagttttgttgggcagcgagaggccgatccataacttctgcctttgtgaacgacagcaatgccaccaatcgagaaatgaacggctgaatggcttggacccaccgtagtgactaatcatgtcagccataaattaataacaccaggtgtttactctatagaaaagatcaacgaaaataatcaccggtggcaaagaaagataaaccaaaactgagcacatccttccccttttgctcccaagtcccaacgtcgaaaaatgtatggattgacatcctatatctattcatcctgctatcttcgaacgagaaagtataacatgaaaatcactcgttgatgcagcctaagaatgatgcaacaaacttctttttgttcgatctcttaacataccgtgccttactgcctagagcccactacggtgctctctattgttagtaaaaagtaatctaaaccgtggatctaaggttcaaatctatttatattaccactcatttagtgg

SEQ ID NO: 39276 - DNA, 976 bp, Oryza sativa
tcaaggaaagttttctcctcccatcctttgaacacattgaatcccatgatttgaggaatgaaaatatttgtttacaaagttgcatgtgaacttagactatatcggtatttgaaattgggttaaggtagttatgacctatttgctacatattccaccttgaataattgatcctcttgctgtttgaacccctagaaatggttagagtacactctttgtgctcaaatgggtttatatatgctctatgtgcaactacttgcttagccatgcttagaaatatgcaaatgctcattccatctataattaaaatgtggtttgatacttgaacctttgctggaataaaatgaatatgatgagtatttgcgaactaaaatgtgtaaaatgtgattttacacttgggcagcaagtggtgtgcatatagtgttagttgcataccgatagggggagtgtttgcccaagtccataaggaccgaacttgtgtcacccatttaaagttattcgtacatccacatgtgctagtatgggatggcctaagctgattaatctatttaggactagccttgcattctggtaggccggtgtgtatgagttagtcgataattctgaggaattagtcgatgattcagaggaacttcctatttgccccgacgtggtagtttaggtgactaagtctgtccaatacaacggtattgtgccacgtgggtgggttcccgttgtgtccgccaccacggcgttaagtttaaggcgtgggcccgccacttaacggttctagacatatttccaagtatgcctaggatggaggaacacgtatcgtgctggtgcaaggctagattctaagtagtgtaaaggcttcgttatgacctctagatcacattcaacatgaagagtgtgatggagtcttgcaaactcaaaacaaactagagagttcatatcatgtgggtaaagctgtacaaacttctgcaaagttcttttaactaat

SEQ ID NO: 39277 - DNA, 645 bp, Oryza sativa
ttgtgtgccaggcttaacttgcgtggaacgttagcttaaatcagcaagtgcttcgtttaagagctgagaatcataattaggtctactcctactagatgctgataccgtttagtgatgacaaactggagttgtgttcttatttgacgagccgagtttagatacaaagtttctcttcgaacttcaggtgtgtgtagttaacgttaaaattgaaagtttggttaaaattaaaacgatgtgacggaaaagttggaagtttgtctgtgtagaaaaattttgatgtgatggaaaagttagaagtttgaagaaatattttgcaactaaacacggccttctaacttttctatcacatcaaaactttcctacacacacaaactttcaacttttccgtcacatcgtttgaatttcaactaaactttgaattttagcgtgaactaaacataccctagaatgtttactgatgccaatctagctatccaataaaggctgtgttatttcacacttaaactagaagtttggatcaaattgagacgatgtgacagaaaagttagaagtatgtgtgtgtacggaaagatttgatgtgatgaaaaaagttaaaaggttgaagataaaatttgtaactgaacaaggactaaacacggcgaaaga

SEQ ID NO: 39278 - DNA, 591 bp, Oryza sativa
aactaacttttttacacctatttaacggtcaactagtggtcaattgatggcaagggtatggaagcgatcaaaatctaaagttagggggtatacaaggaagcgaagaaaatttagcgacatagaagggatcgactaaagttttaggggcatagagggaattttctcaagattgtatggaaaaccacttatcacctatacttcagattttgttaggtgtaagagaatctccaacagcctctccaaatgactctccaagccaaattttagccattccagtgaaaaaaacacccttcaacagcctctccaaccggatggctaagccatctggctggccaaaaccctcccttccactagccaaatttggccagccaaaatgactagccaactatgggccctacgcacattaacatccggctattctctctcgttgttgcacgcgaccgcaccgggccgtccgcggtctccgtcgtcccgccgcgaccgccgccgtcgtccgggttgtcgccggccggggcctccgccgccggagtccgcgccatcgaccgccacgaccgtcgtcgccatttgcgtcggtgccgaccgcgacctccg

SEQ ID NO: 39279 - DNA, 601 bp, Oryza sativa
accctttttctggatgggaacatgtcagtttcttgcggctatgagatcttattgccggtgagggaggtaaatgctgcgccgacggaaaggttctcaagctggggatccctgtttccgtgtcatctatgtatcttcgagctgtctttttctgacggatcttgactggagtatcttgtccctgatgatcagtcgttccacgaatgcggaaaaaaaaaacgctggctcgatgcatcggcttaaattaagttgctccctatcacccccataccaccatcgatttatccaacaacatcctccaaatcacaaaacacaaatcacccatcaatccatctaacaacaacatcccctgcacaaaatcacatagcacaaatcacaaaaatttcaaccggatatccatcaacaattgcacattatagaatcaagcattcatcaaaaaccaaatcaaaggaggtgcagtcactcactgcagacgagaactccgcctgccgccatcgctcattggggcgccgaggttgccattgtttgcttcatgtgcgagagccatcgacgccactggatccatctgcgggagacatcggccgatccgctcatgggagcccat

SEQ ID NO: 39280 - DNA, 621 bp, Oryza sativa
tcaccgcggtaaacgacgaacttggtaaacgaacttgcaccgtccttggatttgttcctccctgcaacgtttgtcttctcttttgatttgtaaaccaaagattcgagagggactgtggtgatatatattcttcttttcttacgatggcagatgatgccgttccaaccgtccacatgccattgatttttagcgtcgaatggacagtgtggtcttgaaggtaaacgccaacattggttctgtgtggtataaaagtgacccaagggctgcacacatacacaaaaaataatgacatcaagaaagaaaacaagtggcaaagctccacattatcatgctcaaaaccaatgataattttcgatggtcatcggtgaaactaaaaggttccattaggacacagaaaattttacaaaaagaatcatagaatatagttaatttcttaagtactacttaatacaaaattccactaaatttactcagttgaaaggagccaaaactaccacccgtcttaaaatggaggtacctaatacaatatatgagatatcatctgatactatcaatcactatagcttatccatagtactatatgagccatattttaacttgtcttaattcatagtattggat

SEQ ID NO: 39281 - DNA, 641 bp, Oryza sativa
cgtcccgttggatgacggcgccagccactctggcgccccaaaaaggaccatttctaggataaattttttcaggggtctatttacgaaataagtttttcaaaaggaccaaaatgtgaaaaatccaggagggagtactaagtagataagtttatcgtaagacagagctgtagctaactagttgaaggaggataaaaaaacttatctctgcgttgtaaccttaaaatcagcaattaaagacagcatgtaatgatgagaaagatgatgctttaccgtcaccgtttatcagagagcatctgccctcgagtaaatttaataataaagttaacactactagttataaattatacctaacatgtataatagattagctacagagatttattctttttttttctattctctctctttctctcgcttcttccatttaatattataagtcacttcattttttttctactcaatttttttaagtttaactaattttatagaaaaatataataaaacacaaaataaacattttatcaaaatattttaaagtttgtcttagaaaaaataaaacgacttataatatgaaacaaattaagagagtatataactaatgcatttatcttgcagcatgggtatagctacctcttgcataa

SEQ ID NO: 39282 - DNA, 611 bp, Oryza sativa
ctttgccaatgcagtcatcgcacctccccttttgccaccaccacgacggattcaccttccctataaccgccatcgccagaacgacaaggaagggggagaggccgcactagatccgccacctctgggctagcaggagacagatcgctgtggtcggggccctcctcgacagatttttccctcctgttgtcatcggagggagaggcaccactaatgccatagctacctacctctaccatcgccgccaatctctgacgccatcatcgaaagagagaaggtgagtagactaaagtgaggagggagagagaactgaggggataagagaggacggggtgagggttatcttatgtagtcacgggcgggcaggttgtggtcctgtatttcctaagtgggcctcttaggtttaaaaaatatgatttttcacatgtggttgtcttaagagtgtcacttgtaaaagcaagccgtaaaaatacgcctacttttacaagcggacctgttaagatgaccgtatatgaaaatcattttttgtaagtgagccttgaccggacacctcttacatatttttgcaaacgaatgcctttctagcccgttggtaaaaatacgggggttcataa

SEQ ID NO: 39283 - DNA, 542 bp, Oryza sativa
caggaggaaaaatcatgactatcttgtttgccgtgttgaccggtgcatcgtaagtttcagcaaatcctccactgttgatatcaaaatacatgctgtttagtgcactacaataatgaacccccaatctattcatgtattatttggattgatggaaatataacaagaaatttatatatattacctcaaaatcaagaaggctggttagcatgcaattttagaagtgcaaatggcagttttgttcatttctcaggtgttttttagaaaacttctcaggatttcaagatgattttcagaattaccttaaattattttcaatattttcttgattactatttacaaaaagacaatgctaattgccaatgcatgaaagtaacttgtttcttgtaaacagaatggaatgaacttaaagtttgatggtcaagtcaattgcttgactatacataatccctaggccctattaccattttaggcagacataccaattgctaaggagtagttattaattccagttagtaaaaggggatcatgaactgagatataga

SEQ ID NO: 39284 - DNA, 609 bp, Oryza sativa
ccactaacgtatcctagtgcaacggattgactccactagagacgcttagatcgtgaccgaacatctgaaactgcagttgcatcagggtgaggtaattaaggtgagccaaacgaagcgtagttgattacacctacagtaaattaaacgcgatttagacaacatactccgctacgcgtacgagagcatctcgtccggtggtctcgcgctaatgttccatttagaaaaaaaaaaggtcggaaaagaaactttaatcatttctgtggctatattttattttatttttgaaaaatgaaatcgaacggtattaaaaatatcagaaaatcaattggaaatcagtacttaatgcaggaatcattgagctacagaatcacatatttgatttaacatggctatatgttgtgatcacggaaattcaaacttgcactatataaattagaatctctcttatatttattaatgtactcaaaatagctatttggttgagaagttaaactataggtcaaacagagacatgtatcacaaatattggatatttagaaatagagtaaaattcataaaactacagatattttgactaaattatcacaagatatagatttaaagtgatgt

SEQ ID NO: 39285 - DNA, 658 bp, Oryza sativa
ttaggattttattcccaacaaattataaactcgtgacaatatttgttaaactaatggaattgataacactattagcagtttatatcacattatcacatcaacccaatattaaccacaaatgattgtaaccttgtcttatgggaagcattttttttggcagttcttggtaacatagtttaacagtaaatatcaacaagattcatgaccaaacaagtaccctaagttttccactacttcatcagtataataaaattgaccaaacatttggcttaatacaaatagttttcttaatgaatctcaagctaattaaccagttcgaatgaacgccaagaatatgacttcaactatgcataggatcatcaccatagttctcctatatcatcatcatgatcagcaccagtctttaacatcatcatgagcagaaccaccatcttcatgatttgattcacatgcttttcttttttaggaactttgatgcaccatacattaagcttgatgacggctgcccattggtagacaaacttgtcaatttcgacatgtgtgaacagcaagaaatatgttttccttacataattcatgattggttttacataatctctattttataagaatattttttaacttcttttgtggtactcctacctaatacttcattact

SEQ ID NO: 39286 - DNA, 668 bp, Oryza sativa
tgcttagaccacttcatcttgggtgcagccccccgccatgtcgaacagacttcacgttccactttcttgtattctcacttggaggagtacgttgtggagccgccgaaaatgtgtgagatgtggaggtcggagtctggatacgcataatccgattcgtgaggagccgtctcttcgttcttctcgacaatgcgtactcgcttgcctttttcaaacgccatgtgcttctcgagcgactttttgaaaacaaggcaatcttccagagaatgtctgtccgtcttgtgtatggggcaccaagatttctttgtgtcgctgccttgtgggtctgggcgcttgggagggttcgcgtattctgctgcgaggacttccgcttgagctttccttttcccatttttgcgatttttcttcttgcttgactcagatgcgtctgtggctgatttcttctctcccccggtcttcggcttgtcgttcttgcgtcttagcgcatcgtccacatgggcacatcgctcaacgatctcgaataacctccgagtggttgtgatgcgtcttgtcgccattcctgggtagtgtagcgatctctgacaccggatttgaaggcgcggattacagaagcgtcggtgatttcaggaattgtgtttctgcattcgttgaagcgtcgaacatattccctc

SEQ ID NO: 39287 - DNA, 621 bp, Oryza sativa
cgcccttccccacgctagcggtggtggtgacgccatccccgcccgcccccctcccctcgcgcgcgcacaagcggcagcggcgacagtgccctccccaccaccggcagcaacggtgacgccttcccccaccgcgagcggcagcggtggagatggagatggtgggcgaatcgcacgggagccgctccggtcggccacccgctccaccccgtcctcctctccatgttgcggaggttcccttcgccggcagcggtcatggcctcctcctctatccccctcttccggcgttaggcgtactagcaggcggctgttgaagctggcgcggtggcggacacgacatcaacgagcgcggtcgggggtggcggtggtgggcacgctgggctcctccatccccctcataaatttctttttgtgatgaatgtttgaaagaaatttccttttgcacttttttttctctttttgattcgattttcgccttccttatgattgaatcttgtggagaatcggatgtgaatccgtgggtggtttctctcttctttttttgcaattttttccatcacttttgtgtaacgctccgcttttcgtgagtcgttaaaaactaattcggcaaaatcctaattgcga

SEQ ID NO: 39288 - DNA, 554 bp, Oryza sativa
ctattagcccctaacaaacttatctagcttgatcatctatctcgttgattaagacacagtttccacctggggaccgtgtgatcgacggagtcctgaaatttgttactgaagcagtcaagcagaggatgtaatactgtgctgtaaccagatcttcacgttgttcgctagaccggcaaaccggcattactacatatggtctgattggaatttgatcagttcgtctgttcgtggccatgggtgatgatgggcctcgcaagactctttggtttttatatggggacctagagcttgccaccaggcgaagtctacacgccgctgttcagtcttcagtgcaccggaggtgtggcggcttggcccggcacggcacggtgcgagcttatacggttttgctgttgcagtgggcttagtatgttgggccttgtctcggccggccgcgcggtgggcctggccccggaagggaagcaaagcgaccaggttaggagttagtaggagtgttggacaaagaggcgggggacgcctgacaaaaaaacgaaagaagagcgaggaggtgcccg

SEQ ID NO: 39289 - DNA, 1973 bp, Oryza sativa
tgtattggaggttgttccaaccccacaaagaccaatgaatactccccgaagcacccctttggattttttcaccatgaaatataaagtaaaggttcctaaatggctggagattgaagatactgtggtctgtgtaactgagccccccaattttttgttcctggatctgcccctgcctagatgtaaccataatagctcgttcggcttgtgattggctccactcaattcttcaagaaatgttaacgagctgagtcaaagattttagtttgttagctatcttactgagatgctcgcgagccgaacgagccaaaagaaatatcaggccaacagaccgagagtctaagggtctatttgggggagcttttagttgctgtagcttctaccagaatcagaagctcctccaaatagactagcttttggtccagattctaaagagttgtagttgtagaatccagaaaatgaacaagccagaagccagattctcagaagctggctaccaatcagctactttttagaattttaagcaccccaaataggccctaagaccgacaacccatcaaggcaacaaggaccatcaaccatttggcccaagccaatcggactaaccttaaaaatctaccactaccatatcagggcttatgcaacttgggctcatccccacccccccccccaccccagcggttgtcttgcacacgtcgcttggatctcgccaactcgctgtattgcatcgtgtcacgctgtcaccccactccacccccacaaccccagatctagttatctaccttactcttgttgtcgagctgctagttatcgcatgttaggtttgccactcgtttgtaacaaccgtcatgtcaccatcgcccgtaggcaacaatgtcttggttagaggactcgtggcggcatgatgtcggccaccccaccctccatgtccactcccaatccccgcctcagccagctgctagttcccactcctccagctatgcttctatcgctgctactcgctaatcccgactcattctcaatgccaactcatcagctaattaaatgagctagcaaacaagccgatatgaggcaactttttagctcgtataacaagttaaagctggctcgatatccacctctatatctgactgtaccgtcacttaaccttatgagttaagtatttgaggaattgtcgatattcgaagtttcaaatgttaagactaaatcatgcctaaacatcagatatttataatctaggaagtggcattccaagggcatgcattcaggctgatcttacaatatattacaatagcgtatagcagcatgttttatgcctaggtgtgttgtacttgtatatgacgcaaatagtagcagttttttttttaaaaaaaatggtaatatacactactaggaaaagcattatcgcaagcggccgaaaagggtcttcgcaggcggggcggccgtccgcctgtaagccaacgattgtgaagatcgccgatcttcgcaggcggggcggccgtccgcttgcgaagattattttcgcaggcggacgttggctagtccggtccgcctgcgaaaataggaatcgtccgcttgcaaaaaaaaaaaacttccacctacgaagataggtagaaaattttgaaatttaattataatttggccgtaaattacttttaaattatttaatagaaattcttgcaggtagatttttatgtacatatattggaagattatcaagcatttggtacatatattgcataactcaaaagtgttgccaaaatatatatattacaatatttttttacattgtcacttcaaataacgtcatctagttacattatggcatagcagtgttccacttccgaagatccttgaattcgtcacttgccgctagggcaccctctgggtcaaagaaatctcctttgacatgacagcactcatggtggatgaagtggcacagatcacgctggacatttgtgatacctgtatcgtca

SEQ ID NO: 39290 - DNA, 585 bp, Oryza sativa
  unsure (1)..(585): unsure at all n locations
ctatccaaagaaaaaatatcctgatggagcgatctctccattacagtcaaacggacagaaatggccactccatccggtcatccgtattccccaaaacacccttaaaaagcgtccgctgctgccataaatatctaaggnnnnnnnnnnnnnnnnnnnnnnncaaccgcatccgccataaaagccgtcgggtttagcgataagggttttaacatttggctaaaaaattttcgagccaaaaactttaccaaaatcctccgaaattcctgcgtctttcagctcggatcaggcattcaggcccttctccccgccaggatcggtggtaagctagttcatccctcaatctctagaacgtccaactcttcaatttggtggtttctgccaattcgctgtggtctcatttcgctaattggacctctcgttcggtgaaaatcgcatcgattcctttctccaagttgagttctgatgtttctgttgcctttgagttcgtttatgacggtttggtttatggtaaaaattcaaggatggagatcatcaacgggccggttctcccgcgctatgctgctccggcgaccggcgccctgacct

SEQ ID NO: 39291 - DNA, 520 bp, Oryza sativa
atagaaactcatccaatactaaattatttttccaatacaacaaatcagaacggatagaaactcatccaatactaaattattttttttaaagtagaacttaacctattactaatataatatcgtttcgattcaggaaatattatattttatagtaaattaatatatttttgaaacgaagtaagtacaaattagtagtgtggtttgtggcaattgtgttgtgcgtgtggaaaggggaaggaaaaagtggatgggagggggagggttgaagttgaggtgtggggcctataaattcggctgtgtttggaggggttaagtatgagtcaagtcaagcacaatctatccctcggtcatcaaaaaatacttgctttaggtcgagcgcaagttaaatttgattaccatctgtctaatataatgtcaaaagatgtactggtattttattttaaaaaaactttgtttaattttaggccgttaccttttaaccacatcgatcattttcgatcggggcagttgctaaaccatt

SEQ ID NO: 39292 - DNA, 586 bp, Oryza sativa
aatttactctgttcgcttcatgtaggaatggaagtgatcatttgggatggtgatcactattttgttaaagttgctaatctggggactaaccggatatcttctgaccctccccagttcagccattcgtgtacttaataagtgattcaatcaacaattgtcttcctttttaagtaacctgtcaatatctaaggatgtcctaaaaaggaaagttgtgacctcttctgatagaagcttcaaaaaatactgggtatcatcaggttctcctgcacaattgtttctggatggtcaatccattgtaattagtagtatttgtcgatgatcattcttttgtacaagtaatacttttaaccattttttttccgtagtgctttggcaaacggcaacggcacgagtttagtgagccaaaataattttcatttaactttcaccgtgtaaatcactgtttaaactgcagtacaggacagcacattcaagtgtaaaacccgcgacttgtagatgggaaacttcaaaagttggtataggaaaaaaatgaagttgtaggagctaattacaatcatgtcagctgttttccgggatttttttctgt

SEQ ID NO: 39293 - DNA, 551 bp, Oryza sativa
ttttggtagacaaaaactagaaataaaaaagacagaaaaagactatccttgaagtttttggagatatttgacttggcagatgtggagtatggatcaattgatagccctctttgcttgatataagtactcacaaggagccaaaactcgccgcccaaagtttaatagtagtaatactaatagggtgattaccgataaggctttcatgattaaattaggcatgatggtggtattttatcctaacacaaggaaggggggaattctgatctcaaacttttttgcaagcctattgtagatttaaaagaaaacaggacgagaggaagcagctagcacacctctgttgtttacaacttttaatatgctaaagaagtgaaaacaatacgggaaccaaaattataaagctgccagataatatttaaggtgaaaacaaccagagaattcagacctagagtaccatcatatgatgctttttctaacctttcacatgaccttcaagcacccttccaagccaacaagctcccccacttggctgaggtctggggacaatacaaaaa

SEQ ID NO: 39294 - DNA, 715 bp, Oryza sativa
catgctgtaaaccactccactacataccatggtgagggatcatactatcagataccactccttactttggcatgctagatcaggatgttcactagctcccagaagtcaccaccaaaagaggcattatcatgtgtttctatcttctctgcttttctgcttttggaacctctcgaaccaccgtcatggtgtggtttccaaaaatgaaccactatcattacatccccttttggtgaagtgtataaggatgctactttgggctgaacgacttcgagaatagacttgtaatttcagcttggaaggatctcctcttttcctcccttcgttctctaaatctgtaacgaccttgtaatgatcttgtacttctaggcacccttttatcaatgaaatacaggtggggaaactctcccctcctaatgacatatcctaaaaaaaatgttagatcaggatactaagccttccttttaggattatcttagcaaaactaaactatattagctgagttgatatgtatcgtgaggtacggaccattctggatagctatcaaaatgtgccttactaattgatcctctactcaataatgtttggctaaattttggattgaagccaatttttttatcaaatcaatattgatgtcctacgaaattattgataataccaataaatataattggatagtaaagaaccaaaatgaccattttattgaactgaatcaact

SEQ ID NO: 39295 - DNA, 610 bp, Oryza sativa
attccacaagccagttggtaaaccttgagtactagattgaggctgtgtatacttctacgtcaaaattagaagtttgaagaaattagaacgatatgatggaaaagttgtaagtttgtgtttgtaggaaagttggatgtggtggaaaagttagaaatttgaagaaaaaaagttagaatctaagggcccgtttagttcccaataagtttttcccaaaaacatcacatcgaatctttagacacatgcatcgagtattaaatataaataaaaagaaaaactaattgcatagttatggaggaaatagcgagacgaatcttttgagcctaattagtccatgattagccataagtgctaaagtaacccacatgtgctaatgatggcataattaggctcaaaagaatcgtctcgcagttttccggcgagttctgaaaattagttcttttattcgtgtccgaaaatcccttccaacatccggtcaaacgtctgatgtgacatttaaaaattttcttttcccaaactaaacacgccctaaatagggcctggtttgtgaaaatgcatttatgctccaccaaaggacgtgcagagccaatggtgcaaatagaaaagtataggc

SEQ ID NO: 39296 - DNA, 683 bp, Oryza sativa
actgaagtctcttcaaaccttgtttacttatgccatatgtattgagctatcaatttttactctggggcaaaggccaaaagaaaagcaaggacagcaaatgcagacagttaatcctacatggactaagaaatgccacttgttttagatgaagaagtgcctgtcaaataaacatattaatttttcacattacttgtacattaacagcttacataaatgttgcctcgaaaaaagatttggtctatcagataaatacatcgacctttgtgtagtcaattactctaagtataaatactaatgttacaaaaaaaaatatgtactatttgagaggttgatcatgtatctacagttgaaagaaaacatctaaagtgtgtgaagctgatattgaatttgtaatagttgtttagaaaacagagttgctggtgttacctctgagcgcacttctaaagcatatgttggtgatacagttgtcacaatattggaataaacaattccaccctgaaaccaataagaagcaaaaatataaaaatcatgacttttaaggtacagaattcaaaacaactgctatttctctattctataccttggcaacatttattcttccatgtgcattgtcttgcatcctgtctggtctatccaactgctcaacatcaaggccgcaatatgataaatcaggagcaggtgct

SEQ ID NO: 39297 - DNA, 682 bp, Oryza sativa
gccaatttcatgtatgggacacgttgatatacgggtagtacaaagacggtgaggaccggaagtgatcgcgattcgcgagtttcctttgcatcgatccgtaacgtactccacagggccgaaaatgatcgtgattcggaattcgcaacagctcgttgcggtgacaaaccggactacataactgagttgccattgattgcgtattttgcgtcgtagatctctgtttcctcgcaattcgcaagataggtactctactccttacatccaaaaacttcttcatttctcattatctttatcctaaaatagtttcatctttcaaaagtcattccattgttgtttgtaaaggtgaaggataaatataccgaggctagataaaattgcattgagatttcttactttgatgataaacaaaattattttggttttaaaaaaaaataaacaaagctattttgaaatggaggtagtagcattgttgatgataaagcggtgacacaataggcagtaatatgttgctcctccactgtttcccgcgagagtgtgccattgtgcaagttatttaattacggatgacattttggacacgccatttttcttcatttccccccttctccctactgcactttacctgttaattgtaatgataaggagaaaaaggaaaagaaatcacagttatataggctctgtt

SEQ ID NO: 39298 - DNA, 768 bp, Oryza sativa
ggtgaagctgcatcgttattcctgcagccctacctatgctcatttgtagtagaaaagactgctctattctatgttttttcaagataccaaccatcttttgcatctcttttatctcttccccttacagagtatttccgttgttccagtggataaataaaaccactttgctgaactaaatgggagaaagcgatcaaaggcaaccaactcaccttgggatttacctgtgatgatttggtaactgaaagattcagacatgtagtagcctttgtacatcgcttttctcatcatttgaagttgaaggatcattgcttagcttgtgatgtgtctcctatcggcctcctcaacaacggtttggatcaacagacgcgcgcactgcagccaatgcagattctcgtccacaccctgttgcttccagtagtatcaagtatcaatgaggaaggatatggatctgctgataagatcaccaagaactgcagaaaggaaggtctccatggtgaactgttataaatcatagagggaaaagaggtgtttcaggccgtactgcaggagcaagacttacggcaatcaggcatgtttcttaaatagattagcgacaaggaattgtgatgtggacacattgaaatcattggaggctgctatctagatacaatgattctacaaaggcactgctaggccgggcattgagggcaagtgattgtggatttcaaaacgtgtattagcaagttaccacttaacactgcaagagagcttggtggcctaatctcactg

SEQ ID NO: 39299 - DNA, 918 bp, Oryza sativa
tcatcgacatttgtacttgcaatgagctctgagcttctctctctgatggagttaattattgaacctgatgatataccataatgggccgcacttctgtcaccatcatgttccggcccaataaaaacaggctgtacagtcatcgatacggaccacaccgacggcctagcataaaagaataagttcagtccaggtctcgtctttacgcggagtttgaatcacgaccataaaccacaatactaaatataacatgtctcccaactatcaaaaccagtataaaaataattctcataggatttgaatggcaatttttgctgacgtgacgcctacatgactagtttgaattagttgttgtctaatatgccttgacgagtcactagaaggaagactaaaaaaaaaaagttgaaacaaaatatttaagctcatgtgtcaggaataaataaaaataaaaaagtagtaggacccacatgtcagtgggttctactctcctttctatctcccacgcgaagaccgggcgtgggtggggaggaaggcgaggatgtaacgtcggccgatgtgtcgctcgtattcgtttgatcgtttcgaagaagcattggaggtgaactgtgtgggaggagtcagaggcaagctaccattgccccctagtcatcggctttagcctgggtggccaacatccacctttgccctgtgcgcgcagaggtaccagtggcagagagcggtaggaagtggcatggggagagatgatgggaggaggcatcaacggcagggtggcaggtggcggcgcggtcgccgtctttcctcccatacgttggctagctcctcctgtcaagttcttcattagcccctcgtgtggctgaaatttttacattttggtcctttttaaaaacttattttacaaatagacccctgggaaaacttaaa

SEQ ID NO: 39300 - DNA, 535 bp, Oryza sativa
ttctcggtcttgtcaacaaaactggaaaatattaacttacttattttgagaaataaaaattgaaatatggcatgtagcctataggaacaaacatgaacttgcaagatttcagatgatctttttactcttacctgtctacaaaacttttagtcgaagccatcaagtaagtatatatgtagctgaaattgtacagaggaacacagctgcagtagaaaaggatattttgaaatgttaatgttgaaaacgtctataagatgataaacattggtacataaaaaaaattgaaattcaaactacaacataaagacttaaagcatactgactagtggggaatatgatcagaatgtcactctaactctctctaacctatagagatgggtaacactcatcatgggaaactcttcaaggtgagcacccacaagggaaaccaagaaaaggcattcaccgaattatgggatgccttcacagttgcatttttttttctaacattacttatgagaccaagcaaaagcgagagagcttctcaagaaacctt

SEQ ID NO: 39301 - DNA, 632 bp, Oryza sativa
ttcgtatttattttggtccattaatcctacatattcttctatatgtagcactaacgattctattgaatttgacctgattgttgcagatggtagtaactaaggctttgcttggacagaagcctaattatgtaagtgtttagtttaatttggattccttttcagtctagtttgaagagaggatcattttaacatacattggctaatatcatgtataataacaatcattgactttgtcttccaattcttaagtgacaccatttctttaccgtaggtataaacaacttttcatatgtaatactatccttcgctcaatgataactaaagcgagtttttattctgctgtctgacatgtagttttatatgatgtgaatacgaatagtcttttttgttttctcttgatcaccaaaatcaaatgatttatctcatttttacacccttctaaggaatgtttcattatgtacccaatagtactgttgttccctgaattaattatatttatcaatacctacgattgttgcacttattaagtattatgcttctcttgcagcgaagattaggatttggactcgtcgaaagcagatatcggtaaagtttcaaccggtcacattctcttttatctattctcaagatgt

SEQ ID NO: 39302 - DNA, 593 bp, Oryza sativa
cttgtactgtaggttggaaattcgagttgtgcagcacgcaatcggtgtcaaatattgttgttagaaactcctgacatttttgtgcttcgtgagcattggagctatggttcgtatagagcttttaaccttttgcttgtgggtacactttttttgaacaatatgtggcttgatgctatagtttctactcaaggcgagtaggcgacaacgacaaggcgtcccttgatttcatttatttatttgcgttgatgtttaaaacttttagtccattaggaataccttgaagggaaggtttttatcttttgcaaattaccttcgaatgaagtttgaaataagcattgtttgcctatgaatgcaagggattccttcactcaacgtcaaggatccatttgctttcatcggaggaacagcacactcactccctttctaaatgcagcactatttattttttttcttaaactttgatcgacaatgtttatttaattacttaggtaagtaaaaatgaaaagagtgataatagatgacccatcaaaagtacttttagcatgcttttttatatttggctaattatataaatattttttaaaaaaacgaaa

SEQ ID NO: 39303 - DNA, 652 bp, Oryza sativa
aggattacattagctcggtaggcagtagtgagcagggtttacgattccgacaggcccttctgttcaggtactggcggaatacggaatttcgcaaaatccggtgaaaaaccagtaaattctgaacaaatttcataaaccaaaatttgaatacaaattccctaagtttgccgacaagttctcgaaaaccggtcggttttggcgaaattctgatcgaaatcatcgaaatcagtaaatgttttcctttttttatttccggtcggtttttgcccatgtaagtgttttccttttcttgattatttattcttttctttcctgatgtaagtttcagtaaatacatacaatacatcatttttttcgaaaatttatatcccaataggttctatgaatatcatagtatttataaaattttatttgatttttcttttttatcaattcaaattttaatttggatgaaacttctcgaaatctcagacgatttctactttcgagcctcgtcgaaacgtcgaaatttcacgaaatccggtcggttttcgtcggaaccctggtagtgagtacatgcccaaccaaatgctactattcagcccctttgtagtgagtgcagtttaaactacgtcaagtgaaaaatactacactctccttaactatgagagga

SEQ ID NO: 39304 - DNA, 540 bp, Oryza sativa
aaaagttgggaactaaaccaggccatagtagtaaatacagattagggtggtagcatacttttgatttaaaagcttcctttgatctgtgacatataaagcaatgctaaattttaaattttaaattttgataatttttcaacatagtttttttttcaagcattgtaattagtttttaagtcacaaaggatatagtaaaaaaagttctataaattattttttatcgctaatatgccgttatatcttataatcagccgtagacaatgaccttacttcatccaatttttatactacaagtgttttttttgtttgttataagttatttttaaaaaattgtcccatttctaaaaaatcgtaacaacatcaacaatgccatattagtttaataaaatccgttgtgggatatagttttatagtttccaaaaaaaacctttccaaatttaaccaatggcttatttagtggaaataattggatattatatatgtggctatattttcttaataaataaaatcaagttaaaaagttggactaaaaaaataaaa

SEQ ID NO: 39305 - DNA, 616 bp, Oryza sativa
gcccccccccccccccaaaaccctagctctgggctgcagccccctcccggggaaggcggccgccgcggagagctagggccccccgtatctgtggctggctgggaggtggaagcagcggttgcggcgatggggggctggtctagggttttgatttgggagggaaggccgccgcggaggaggcaggcggccggtggaaccgggcggggcggggcgaggcgcgggcgacgtggggacgggggaagagagagagagagagagagagagacgggacgggagggacaacgaggagagagagagtgcccacaccggtttgcgcgatattatggaggcgggggagtgggatactggcgtgtggggaccctgtggtttagctgggacccacgtgtaagtgtgtggtccgtacactctgttgaattttttttatttataattttttttattaaaagttttacaaaaataattttccattttgaaaattgacggaaggagtcgcctaccgcctctgggaaaaatcgcctctcagagggcggcgaaaatgacgtggcagacgaccgttcgctctcgggcgacggccgtcaacgaatttgcaggcggcccccttgccgcctccgtaggg

SEQ ID NO: 39306 - DNA, 508 bp, Oryza sativa
agctcggtacccctaaaatattttagagtttaaatccctagcacttatattctgttggagctataagcattctaattttgtgatttagttggttctcaacctatagttttgtgatagttttatcactaaatttatagttttatgatactcagtcttaaatatatagttttataataaatttgatgctaaatctgtaatggattatacaacaccttaaatcttcatttttttataatctattatattattaagacaactttgaaagaagactccacgctcgctgtggaggctagaaattcctacattaatcggagaaaaagagaaaaaaagctacaccttagattataatagatccagattaaagggcatagatttatcataaaattatattattaagacagctttaaaagaaagcactacgttcaccgtggaggctagaaattcctacattaatcggagaaagagagaaaaaagctacaccattagattgtaatagatccagattaaa

SEQ ID NO: 39307 - DNA, 1743 bp, Oryza sativa
ccctcattgtctgcacatagcatataagacaataggttagtcacttcatttgtgtcactggccgtttgcaccttgtttccgttcaatctgtgctgagtactgagtactgatccttgattctttctacatagcaaacatgtacaaactcatgcaaagtaagcgaggaagaaatggagaaagatcagtactttggtcggcaacagtggcgctgacaagctggcaggtgatgctgtttccaaagacctcatggacgttgtcaaggagcgaggcagtgaagtcccttggatccagtaattttcggctcatcagcacagccaagcctttgatcttatttccatttttccctgtcagcttgtccttgagccctcccagcattctgtgatactgtagtcagtgacaaaagaagctatgttggtggtggtgtgtgtatgttgccgttgcaatggatggggaagaacttagcaatgcagctgagtttttatagaagggggagagggaggttcgcgatgtcagtgtgcccatgagtattggctactaatgcgactatgcaagtggatactatgtcaagtggaagaccgaaccccaaggcatcaactagcccattcacttggacaacacactgtaagttgctttcttttagtcgagaattgtagagatatttctcctgttttgaaactttgaagagtatcacattttagcttgaaaattttttagggtgtaattcgaagtctaagagatcgagctggtcatccttgtctcacagccttgtcaaaatattaatacttattcccttgttgatagaaccaggcaagggttcgacatttttgagtcgtatgagctgggttcatattggcattgaaatgaaccatctgtatgtgaaccttaccaactcttggctcttgaggtgtgctgccaaaaatattcgaacagttttcatgggtgtgatacacattggcctcctgcctagtactagtatatttctacattatcctttttattatgaggtttcacccttagtgatcctatagaagttatggcattacattagtatcaactgtcatttacagtaaggtgttaattattccctattggcctcttggctttacttgctgacaggtccacttcagctgcacagtatactggataagcactgaacgaagactgtattaacttattagcagtttgaaacgtatttgatgcccgtgccaagcaactaaacaagaggccttcgaattgtcattgacgaagacctgagctacgggcctaaggtgtgtccatgttttactccagtttggatcatgtgaccggcatcttggatcttgccaattgcagtcccagaaattcaggtaggagcaaatgaaatgaggagcatatgcaaattgggactatctttaggacacgtttgcaggcaggattatttttgccgtttatatgggaaatcgagctgatttgaattagattcctgtatttggtttcatgtacttgagttgaatgcgcttaaatgcgtccgatttccataggcttcagtagagcgtgtttaatgttctttctacctccaattttagcaactctttgattctgtgcgcatgcagcatatttcttccaaggaagtacacctatcatgaaagattcgttgtaaaaatatgaactaaaatcgaaccttccaatcattaataggacttctccagatttgaccactaacatggcaacacataataagattaagtagaacggccatgtaac

SEQ ID NO: 39308 - DNA, 1242 bp, Oryza sativa
ttttttgttcctggattcgcccctggtcggatctcgacaacgccatgtcctaacacttctttttagagaatggtttttttttacctgacctctacatccaaccagatatatgatgctatttaaattggtaacttagccccgcaaacaacccaatctaaaattcactcctatggagatttaaactcaagaccttgtggtgctactcatgtcactgcaactactaggctacatgccctttcgcaagttcgaaacccactaggctaagtgccctaacccatattttcctttcaagttcggaaccggtatgaataacatatcattcatccgatatcctatcctatattatatttttagaattaaattcgggaacagatatctatttgtataatatatagggagacaattaaagtgttaaaagagatacattaaggaaaaaattatacaatattacatgtgagttcgtaaaatattgattaaccaatcttatattatatccgtaggtgaatttataatagatttacatttttagataatggaatcaaacatcctggcctttactcagaagagctatagccaattattacagtctagcaataaaaaaagagtgtagtttaatgaaacattgaaaaacccaccgaaccaaaagaaatacccaaccaaagatacggagtacacatttattgaagtatactccctctgtcccaaaatacatcaacttctggaattcaaactttgtcccaaaataaattaacttctaccttctcatcattatcggttcgtaaatcgaaaaattgtattccttcaataccccttatctacctatctaccaatactaatttgctattaatgatgggtattttggtcctttatcctcttctttaatcatgcattgggaagctaggagttgtctctttacgagacagagggagtatttgtgaatctccatctataattagcaaaaagttaaataaccatcgtttcaagcttccaacatgcaactcttctcgtattttaacctatatatccttacatatttgaattcgaaatcgaatggtaccagtatatcattttctcaaacataccatattctttccgcgagccataggtcagatgacccgtcgagaaatgccgtaccgttttcatccagtagaacttacgttgagaatagctcatcattgtccctgaccatgccgctccaggcccagtttgggcgaggcgaccttatcgacgtatccgaaagag

SEQ ID NO: 39309 - DNA, 647 bp, Oryza sativa
ccgatatatgcttatctgtagtcgtatgttagctaggatggtcaaacaatcatcatgtacgaatctgattaaaccaggtctagatgctctgacttgcaatatattgagcatcgacttgccattgtaaactccttaattagtcaacattttaccacgatcggagcatacgcacgctacccccacatgcacgcatgctgatcatgcacagcacatctcggtacccggtggtcgcctgtactcgcgtactgcctataaataggcagccgatcgatcaagcagcttaatataaactcctcggtcacttgcaaatcttctctatcttataagttctgaacaatggcaggcggcgcctcttctcctagggtggtcgcctgcgtcgtggtggcgctgctcctcctgtccttcgccgtggagccgctgcaggcggtggccgcggcggcggcgccggcgacggcgacgaagccgatccggtgccggaagtgcgaccacgcgtgcaagaagtcgtgcaagggctacggccgcaactcggactgcagcgtcccctgcggcgacccatccaacaaggccggctgcaagagctgcctccaggcctactactcgaagtgcctcaactactgtggccaggcctgccgcgccgtctgcatcaa

SEQ ID NO: 39310 - DNA, 840 bp, Oryza sativa
ctgaccatgtgagctgtagtagttctgctgttaattgatataggccataattgtccttgcacaagtattaaggaggtgataaaattccccgcaaaaaaaaaaaggaggtgataaaattgagaatgcttactaggaatttagttctgttatgtaccatctcatgattgtttttggaggatgagggaatacttagtagtttgtatgggttttaacgaaagctgcatactgaggaaagataataagcaggggcatggttgggaagctcattccatcgacatgcaggcattataaaatcagaaaatatctcaaatatatacctttaaattttcaattgaggactgattatcatatcagattatcagctatgatcataagcattgcaagctagaaattgtagtatggtaagacggtaatgtattactgttctggcctactagttctgtgaacaatttccattcagtaggattctgtagagtttaactgggtatttccttccactaagcacataccttagataaagaattggattcttgaattaaaaatatcagcctgttccattgctctattgtggtatacttgtttttgctaatgtcccatttatttcgactttatgattccataactgttgttgtcatgttatttattatagattctaatattacgctaaaaatggttatcctttcagggataaggcctactttgtggatctcttcgtaagagcatctaacatgccagcaataaggatgtatgaaaaggtaagcttcatacaaatttcatgatcatctagcactctaactcactgatttatatgattacacatttatatatgaatactgaata

SEQ ID NO: 39311 - DNA, 707 bp, Oryza sativa
ctgcaagtagttcatcactctcatagccagatcttaagggatggcttaggtaggatgaggatgtgaataaaactatcactgaagattctctaaagttagctcaaggtgagtgtgagacatattcaacgagagcatgaaccatatctgtgatgactactagctagtagccaatatattatatatttttgactcaaatccataatggttgccagtgcactgtaaactacattacagatttaaatccattttaacaagatgggttggatcagaacatatcatcttttatggtctaaaacgttataaaaatgaaattaattcatgtagtgctaatatgtttttgacatcaagtttcaaaagatagtataagaaaagttgccaatgtagaaatgtatcagctttcacgtactgggacaatatattgccgaagcgccgcctctctgacagggtgaatcctggctgtccacaatcctgcagagtaggatgcaagagatttaattgcatcaaaaggctcaatagtgatccaataggacttctattttgtaacaggcagtatgccagctggtacaatagcacgtgaaaggcacatttaaatatatatcacattctcaagagcctaggcatatcagtattctaatggttgcctaggtaggctaggcagcgacctttttagaacagtgatgattcaagtaaaacatactactataata

SEQ ID NO: 39312 - DNA, 551 bp, Oryza sativa
  unsure (1)..(551): unsure at all n locations
tttgagatttaatggaaatttcaggacatgnccagttccaaaaaaattctatatcaacaattacctgaagtccatctcctaaacatggggaaaaaaaaaaaaaaaattttnttttttttttttttttggggggggggggttttaaaaaaaaaaaaacccccccccttaaaaaaaaatttttgggaaaaaaaaagtaaanatccatnagttttcacacattgtcggaccagtggattttacgagacattttaactattttatagatgatgtgagctaaatatactagacttcaataaaataattatatttcctgtggttgcattggaatttctaacatgttgcactgaaatcacaacatgtcaggactatcctgtggttgcattggaaaatataaaaatatattccatgccactaagtttgctcttgttcaactaatcttgaaatcatgatagcagacaggagtgcaggactgcagggtaacataattgcaatttgtaaataaaagaagaatataatatgaattattcgtcctgcactgattctgatgaact

SEQ ID NO: 39313 - DNA, 692 bp, Oryza sativa
aaaatactttcataaaagtatacatatatcacttttcaataaatatttttatagaaacaagaagtcaaagttgtgttttggagaccgtgttgctgtccaaaacgacttcctttacgagtatggagggagtagttcatgtgaagtcatttcaccttagcaagatacaatcgagaatagtatgtatcatggaccatttctgtaatcagcacaaaacgtacctaaagggaacagatctgaagtaatcaagtaactgataaatgaacatattatatgacatttaagagaacagatctgcagaccgtgaactgtggaaaacagctttgcactagcacactttagaaaagatgtatgtattgtccgagtgcatgatatccagcatacagtaagtaataatgttaaaatagtaacacacataagcactcccatgaaacactaaacagaaaacataggccatgaagccacacgaaagttgcaaaagaaagtctgcttataagctctcatattaaactcaccgcatatcccatccgttcagtcgtgtcctttaccacattatatatagttggcgtggctggatagacagaagagtcatgcaaatcatatatagatcattaattctatctgtcaccacgatcatgtggatgctccccatctcacatatatttatgatttccacatccaactctttcagttct

SEQ ID NO: 39314 - DNA, 635 bp, Oryza sativa
tacatagtccatcagagatggaatcaaaagcatgcaaccgttgtggagaaattggacacattgctagcatgtgtctcacactctgccctcattgtggggaagaccatccaccaggtgaatgtcccacccgcaaggtcacatgttttctgtgcgaaggtacaaaccatgtgcccaaggattgccaactcagtgtgttgttgaccaagaccgcagaaatccaacgaacaaccctacgattgtctcatcagctagttagctccaacagcaacatcgacgatatcatccacagcaccaatgctcctcctgctgcacctgactctgcaataaatcatagcaataataccttcagcaccaaccattctctgcaccgacagcctcagcaaagaattgtcatcgatggaagaagttgtgtctctccccgacctactccaggccgagcaaagggcaatcaatctcaggagggcgataccaagcagaagaccgttctctgcttcgaatagcaatcagaaggaagcttctcctgtgaatgatagcaatatgcagtcctatcacatcatcacagaaccaatcaaggatgcagtcactagaacaatgccagctatacctctccagaatcagaatgagtagccatgttt

SEQ ID NO: 39315 - DNA, 2509 bp, Oryza sativa
ttatcccctctcttttttatcatgtgtctaggggagggaccagaaacctccggaaatttccatttatttagctcatctgtggtttgtttatacatgtacccttttcatccaatgaccattgtttatccaaatccttcatccgatggctaatatatttataatgatttggcacgttctcgtgtaagaaagcctgctgctttcattatataagataagataagattacccttacgtgttaaatattacctcgaatctaattatattttggccataacaaaaatattctttttccaatttaagagtataaatctatcagaatttttttctccccatatataagtaatgaatctgaattggactttagacatagatataacactactaagggtagatgtacattttttagagtttttttctcatatttttaagttggtgtatatggtgtgcacacaagaaaatttgtatgtataggatacgttttccaataaaaaatgctcgatttattgaccaaagttataatatgaatagtcatcggtgatatagatgtattatttatttattttttttcaattttgtatggaataagctgagcgcgatttctctaggtgtgtgatcgacagcgaaaccttgaaactgtcgatgattcctctttgttccacgtgcacacaccaccggaccgcagcagattgcaagttgcaactgcagcatccttaatcaactcaataaaaaaaaagcgtgcgcatgttatcctagcgtactaaagtactaaccttaaacaaggctgcgtttgaatgtaccatgacctttgaattatctctcatttttcgttagcatgttaaatggcacatttcgtgaaatgatctatataaaaattgagatcatctatttttaacattatattaattaatatttaattaattatatgactcattggaacggccccgttaacatccgtgcatgacgtgcatggagtcatgtctgctgctgtgctgcaccctaaaatgcacaggtagaagcacaagaagttacgtacaactgcgggggattggttggcattacatcccagaccgggcaaatcggcaaattgatacagcgttgtgaacgtgggagggcgaacatcaggcagggtaagctcagaactcgggaagtttcagaacgtgaaccacgcgagagggagtgagtgagggacggtcggaccaccagaaaggcagcgctgatgggaagaatctgggactttgtgcaaagttgtgtgaagctaccgcgagaccgcgggacggagctgggacaatcagtacacgatctgcctttccagcggccgggcacttcagatctagtcgctgtgctagtactgcttgtcaccagccggcaaaccaaaactttttgctcactcacagaaatgtggttgattagacccctttgctgttaaagaagatgagagtgcatgttgctttctttggcgtcgacaaaggaacgaagtctcttcttgacatgaagacacccagggcatcttttgaaacacgggattaaaaaaaaagaaagtataaaaagcacaaaatgtaaaacacacatggctccaaataggtccttttcttactggttcaaacacacctctgttaggcctccctaagttctctccccctttttttttttccttttttggaaaaaaaaatctgtagtcgatcatcttaacacctgtgaaaattggttcgcatgcggttgtgatgctcgcaagtgaatattgtgatttttcacatacacctggagctagacagttgcttcacccaccagcaaaaaatacttttggctgtctaaaaaggtttctttgtagcagtagtagaaaaagactatcaataatagatttgagtactgctgctacagtaccttgtatagtatgtgctaatgcatggaaatgcagtagtacaagacttaaacgctgcggttttttgataaaaaaaggtgatataaaaggcttttaaaaagattcaagtattttttaaaaatctataatagttaacattaattaatgatgcgataattgagtgtgttctccggcaaccaaaatgacaactcacctcacaatcttcaggggcttttggctcttttaaggatagcatggcaattgaatgccaatttatcgagaaagagagatgacacaactcaataagatttttttatgtgtccctataattttgttaacacctcaccattcttaaaaatgcttgattatggggagtaattaaattgcatgtgcggtacacagaaatatcatacatgtgcaattagtacataaactaataaaaatatttattctagtgcataaacttgtctagtacatatgaatcaagtcttcaacgatatattataactaattaggatgtctcacacacatataaggccatgagacatgttgtattcgttgcatactccctttatattttacgttttttattcgtataataaacattacttatttcatgtttgatcaagcatatgtatacgtaggtaacat

SEQ ID NO: 39316 - DNA, 509 bp, Oryza sativa
accacatatatggttaaaaaaatcgtgacaccaataagtacattgcaaacatgtagcactacaacaagccaatcctaagaacaaatgctaaaaatcacaaatttgggtaaaaaaggggttctagggttacccaccgatctacaaattcaaccactaaaaacaaaaaaaaagaggggtgaatgaaagagtctacctttctcttcgatttccacaaaaaatctcgcgaaaaacgagttcaaatggagtggatttgaggtggggaggtgagggggagagctgctgctgctcagctcgggctggtgcttgggcgaaaatgggagtggggaggagataggtggtggggcccacggggtttaaggggtcggcccacagaggaggggcgcgccagccatgctggcgccgtggtaggaggggcagcgccagtgtggctggcgcccccattctgcccagtcagcacctctacgacagccctagtgccacggtggcacgggcacggcgccagtgtggct

SEQ ID NO: 39317 - DNA, 3262 bp, Oryza sativa
ccgccttgcgcccgtgagccaccgccgcgcctcccttgccgccgtcgcccagcgccacccctgagcagcccgccgccgccgcccctcaccatctcccccgtccctttgcctgcctctccctgtttggaaaagaagagctctttgagagcatagaagaacagataaaacgaaagtttggaacagaagagctcttttcagtatagaaaatataattgacacttgacactttatttatacaccacattttaaatatatcagttaaaaagatttccgttaaaatctaattgaaatattatcacgataaataagtagttcaaaaaatatatctcttaaaatacaaatgtaaggttagttggaagatattcttaaaatacaaatgtaaggttagttggaagatattactaaaatatagaatgatgggatatggatgagaaatattttttggatgatactttatacgggcatttggagaatcaaatatagatcatctactggggatgctataagtaacaagaccggtattcacgtggtagcaagcctagctaatatccatctcgtatcataccgttcggaatggagaattccgtttaatagcagtcaacattcatttgtccctgctcatagagcttgagctaggagtacaccctcctcaccctagtgcgtaggtcagtgtacctagagccggcgccttaggtcttgttgagttcgcggaaagaaatattttgtgtgtcacatcgaacgtttgaccggatatcggaaggggttttcgggcacaaatgaaaaaactaatttcataactcgtctggaaaccgcgagacgaatttattaagcataattaatctatcgttagcacatgtgggttactgtagcacttatggctaatcatggactaattagagcaagtttaatagtatagccaactgctagctccaatttatctatagccaatctaatatctcattcatataatagctacatactacactattaatacctggtcctacctggcatacatacactgcgttttggagttcgtgctacagctggctccaaatctgtagcccactcctcttctctctcgttatttatcttcttaaaatatatttgcagctggcttatagcctgctattgtacctgctcttaggctcaaaagattcgtctcacgattttcatgcaaaccatgcaattagtttttcattttatctatatttaatgttccatgcatgggtctaaaaatttgatgtgacgtttctgggaaaaaaatttagagaactaaacaagcccttattgtcgtcacgagtttgccgctatattgggatggggcgacctgattcaagttttggttgggtgtctttcttatatatgtagagtttctattttagataagctactaaagtattttttagaccgtgtaatatacggattagcgactagctagtaatattgctcaatagtcagtcctaagtcaaacctctaggatctagctccaaaagagttgggtagtcggccaatcaacacatgcatatcgatttaactaaatcagaagctctgactttataaagaaaataaaatggcgcaaggtcacgtttgaagtcaacacttaccatgccttatctgatgcatgacgtgcacatgcgttgagtataaatatatccatactgataactagaaacaatgttgcatttgccatatcccatatgcctataaatagaaatagagagatacagtaactctcggccaatcaattcatcagagctagttaattaagggcatgttcaatttgataccattttcaatcttatcaaattttggtaaagttataaaaaaaagctaaatttagtttgctgccaaattttggtaactatataagaaatcctgccaaaattttagcaactcgccgaaattttggcatagttgccaaaatttcaacaatgccaaaatttattaatgttttttttatatcaaagtgaacaggccctaactcaaactcacagttgcctcctcctctcctatggcctctggcgccgtcgccgtttgcatcgtacgtggtgctggtcctgctgcagtcctccgccgtggagcgggcggaggcgcaggcccccgggccgcaggcggcgccgatggcctgcagccagtgcgaccagatgtgcaactcctcttgcgagggcgccggcagcgagccgtgcagctacgcctgcggctcgtgccagggctgcatgcaggcctacttctacaggtgcctgccccgctgcggcgactactgccgttccaactgcgtttaattagcagctggatgccacaactggagagacgggcgcgcgcttgcttttgttgcatttgagtgttattatgttatttaattatcgctatcttggtcctcggtagttatatttatactccctccttccttaaatatttgacgtcgttgacttttttaaacatgtttgaccattcgtcttatttaaaaacttttgtgaaatgtgtaaaactatatgtatatataaaaatatatttaacaataaatcaaatgatagaaaaagaattaataattacttaaattttttgaataagacaagcagtcaaatattttaaaaaaaagtcaacggcgtcaaatattttgtgatggagggagtatttttagaagttgtgtttgatcgatttgtgactctttattaggagtatatttgtagaagccattgatcctttgggtctatgcatagcagccttgcacgtaggtagctttgttgacactgtttctatttggttagaaacaaaatcaatgaactcagaagcaaatatttttttaattatcttcttataactgagaaacaacaaagctaaaacgctactttctccgtttcatattataagactttttagcattgtccatatttatatagatgttaatgaatctagacacatatatgaagtaaaaaatactagaaagtcttataatataaaacggagggagtaaaagactagtttcgatcttctgctgcctaacgagccataccacacaaaaaatggaataagccaatctcgataggcagtccgaactcctacaaccctcattcatgtttcatccatctttgattggttcgtttgccaccttgtcttaaccattggctggatccaatggatccaaattcagcaactcatgaccccccccccccctgtgcctttgctcgccgaagtcatccaggcaagggatgcagaggagacaccccacgccacaatttagccttgcacgaacagatccgaa

SEQ ID NO: 39318 - DNA, 1023 bp, Oryza sativa
cgagtcaacattaacttgtactccatgtgcgatgcaaagctttgctctcttccaaatacgctggactgtacggatgctgacattgaacacttgagcaactgcacgtgtggtgtctttttctagttttccatccttactttttgcaagcaacaattcataaattctttgcctttgtgtgtttgtcaattctctagaactgttttcctcatttccatttgcatctggatttggatttgcatttgcatcttcttcttcttctgagtctgacaactcctctctatcaaagacaacattgacagtatctgtatacacgccatagtcccgaagatcatcctccaaggcttccagctcatgttgcaattcattgtcattgtctacaaaaaaatttacatggtaagttaatgtgtgttaatcagattgtgtagatttattcagtcctaaaatcaagaatgtaaacatgtttgtaactgatcaaagagtaatgaacttttacccagttgaatttcttgttcctcatttccatttgcatgcatatccaggtcatgctccatgtcttgctgataattgtctaaaaaaaactacttgctggtcagtgccgcacaaagaatattgaatatgtttaggatttgcaatgtcatgactcataactgtagtttacaatagtactaactcttccatatttccatatcaagatccatgacttattcatacatctgttcgtaaggtagcattgatttgttgtcatgctaattcagttatgtatttaattctacctctagctctatttaagttctaagtgttgacaagtaatttttttcaggtacttaattcagttcttgcttattttcagtagcaggtcaacaggaatattgtgtctgggactgggagctggagttaaggatgtttcacaattcaaatttcacaagtatgtgaccatctaagcatgattcaatatttcgcatcataaacacgtgatttgttgatgaatattaaatacttaaatttggcaagacgtgtgggttc

SEQ ID NO: 39319 - DNA, 788 bp, Oryza sativa
ttcccaaatattcaaatcgattttaagctatcgcaaacgtggccgatgccatggccctagtcctaattaaggccagtagcaccagtgtggggggtggtttggtttgataacgtattccttctgttttcctttttaatgcacccgtacgtgaccggtcgtaattagccttcttccgttttatattataaattatttttaccttttttataattaaaattctttaaatttaatatagaaatatttaataacatatagaaattaatatattttgataatatatttgttttgtgtcaagatattgtaattttttttataaacttgatcaaactaaaagaagtttaattagaaaaaaagtcaaaacgatacaacaaacgatagactaggaggtgattaagaatacaataacgtactctctctgtcccacaatatccagattcagcatactagcatatgtcacattcacccaaaatcccttatattataggacggatggagtattactcacttggatggagggcacagactcgctaggaggacaagagggaagtatgacaactccaattcatttctatagtagcagaaattatgtcattcatttctagacaagacatttatttttcatcttgtttaaaaatttgatataaatatatgaacatataagtcatacttgaaatatctttaatgataaagtatgtaaaaacaaaataaaaatacatacatgtcttataaaaagtagaaacaacataaataatgcttatataacttttttttataaaacaaagcaaatg

SEQ ID NO: 39320 - DNA, 629 bp, Oryza sativa
ttcctgcagccccttggctgtaaccttcatcgctgcatactttgcatatgcaggcaaaagaaacgaagagaagtaaagaaaggaagagaagctgagagaaagaaagagaagagacaggataagactgtgggacccacgaaaataataaaatatttatgttgagtaaacataaaatttcttcatggtacatatggactataatgtctactccctccgtcccagaaaggagaccttctgctcctaaccatttgtcccataattcttgacgctggcagcctggcagcctggcaggcactaacaaactcctagacaagcacacataaaaaaaagggtaaataaaaaaaaaaagtggggccatctaaaacagtactagcgaactctttcttctccaaacgatttttgctctgaagcgctaccttatcctctcctctggtattctcttcttacccatcgctcgactctcgttttcttctccttccacaccgcgtcttccacaccagcaccccgcttctccttaccatcagcacaccgcaccaattgccatccatgccccctcccccacccccagacgagcaagccatatccggtgtgcgacaacatgctcaacggccgcggcaacactgagagcg

SEQ ID NO: 39321 - DNA, 563 bp, Oryza sativa
aattagcaccagcatagcttatggatcggcaatgctacatgtgagaagcgttttagaagggatttggaagcaaattgtagcttaaaactttgctatgtaagttcgttgtccaattgcatcgcatattcacatccaagtcggggaactagacgtgagatgtgtcgtcgtatgggtaccgagaggttgaagaggacgacggagacgccactgaggagcccgacgaggcaggcggcgagcgtgacgaggtcacggccgggcgccgccacctcctcctcccaggccgcctccacccgctcaccccgccggtccccgtcctcctcctcggtcgccgcgccgcatcggatggtccggaggcgcgcgcccccgtccccgccaccgcagcggcgacctgccgggcggcggcgggagagagaaggcggggatggggtcgagacgaggaggacacgcgcgggacagggtgccacggacggcggcgccatgaattgggagaggcatctcatattctcatccctagcatactactgcgagtctgcgagagaggagggagtgccgcgaggccacgg

SEQ ID NO: 39322 - DNA, 524 bp, Oryza sativa
ttacctggccctgcatatctgtagatacttctcttgatttattttgttttacagagcctagcaattttttacacttattaatttccaattatttctcaaacattggtgtggaactacagcgaaactaaactgcaagagagatgaactgcccgcactgtacaagtaggggcgtagggctagcgtgttaacgtgttcttgtggatcaaattctgggattccacaagccagttggtaaaccttgagtactagattgaggctgtgtatacttctacgtcaaaattagaagtttgaagaaattagaacgatatgatggaaaagttgtaagtttgtgtttgtaggaaagttggatgtggtggaaaagttagaaatttgaagaaaaaaagttagaatctaagggcccgtttagttcccaataagtttttcccaaaaacatcacatcgaatctttagacacatgcatcgagtattaaatataaataaaaagaaaaactaattgcatagttatggaggaaatagcgagacgaa

SEQ ID NO: 39323 - DNA, 611 bp, Oryza sativa
  unsure (1)..(611): unsure at all n locations
cgtcacacatatatccagagcaaactccattgctcaagtcaatgccatccacatccagagaatgcaaactttataggccgtcacaagaattttggttaacttggtaacccggaatttaagtttgggctttttggtagatgtccactaattaacagtgattgagcaagggttccaaaaaagaaaaagaaaaagaaaacactagctggggttagctcttacatttcgatcctcttgctagctacttactatacatcttatgcttcgtgtctatatctttcaaccncatttntntaattaaggaaaggntttggggcccccaaacccccaaaaaaaaggggggttttttttatttttttgggggaacatgttatcggtcgctctgtgcaggaattgcttggggccaggccggcggccagctcaaggaaactttcgtccaaattgaaatgtcatacttattcaaaaatgaatttgtctcagaataaatatgcatatgtatcttcaatttgtcatcaactctgatgaaattaatcttgcccttttcagagcatgagaagccatggttaaggtaggggaaaaacatttcgcaagtgtacaaatgcagcgttcaattt

SEQ ID NO: 39324 - DNA, 870 bp, Oryza sativa
caaatgatgggtgccatggcatctaggcgtacaaaatccttggcatttaggtgttattttcactttaatttgttatttttgttgcaacttatagaagttgaatttggtcttgcatgtttgtggagtgatatatttcgtattaatctatgttgtcaatttttttaattttttaataactatttagatgacatgcaaataacgagggaatgtcccctcaagggatgaaaatccacgtccgatttctgttctcaatatggagtgtgcaaatgtgacagaaggaattctactcgcgttaataatcaattgtcactaccatactattattagtttataacgtgttgtcatttttgtatgtatggcagaattagtccgttgcatttactgtgagagcaaggggactaggattgtgcatcctggtgagaagagcttccatggacgtgacacggaatttgagaaggtgatgcgtggagaacgactctttcctggattacagagaggatcctacagcaacattcggctcgctgaaagaaccgatgcagattgggtggataatctggaggaagattgcatctacatcactgcctgcgcagcggataatgatagaagagtgaacccgctcaattacccgcctatgtatcgagagcgtgtgctaccgtgctgcgaagcagcaagtgatcgttcctagttatcagttttttttttcatatatttttcttcacaacattataaggtggcacactgattcggtatccacacaacgctaatctctctacatgctcccgtgctgaaggatcaattattcgtaatcgtaggtacatattcagattaagatcgggagctcagatttcagatcgagatgctgttggggat

SEQ ID NO: 39325 - DNA, 2418 bp, Oryza sativa
gctgtcctccgccgtggagcgggcggcaggcgcaggtgccttgcagcaagtgcgaccaggggtgcaagaagtcgtgcaagggctacggccgcgactcgtcgtgcagcctcccctgcggcgacccatccaacaaggccggctgcgagagctgcctggacgcctactacctgaagtgcctcaactactgtggccagtcgtgccgtgtgaccggcaccagcgggtgaaaaaaaccgttcacgcttcaattggtctctgagctcacggcgccggccgccgtcgtgaagccttttgatgtgtcacgtaaatgtatgtactgtctcgatcatatgtagttctgttactttctccgtttcatgcatattgcaagttatttttgttttgtcctatttcagagtactccttcgtcccaaaaaaactcaattaggaggggtcacatcccgacccctcctaggatgataggatgatgaatctggataaagggtagtctagattcatagtcctaggaggagatattgagttttttttttagaacggatggagtagtttgtcactactagtactctagtagttcaaataagctagcgtgtggtgatgcacgcagcaacgcgctggctcggctcgagctcaactacagagcttgatttttaagtaaaacaatatatatttcaaagataatcttttaaaaataattaatttctagttcatcatattaatagaagaggaaaaaaagaataaaataaatatatgatgtcaatataagacatacaaataatatatttgatctcctaatttattaaataacaacaaaaaatcatatattattaggctcgttggaagctcgagctcggctcgataaagctcgcgagcttagggagaggctcgggctcggctcgtttggagctcgagccgagcttgaatcgagtctagaacgagccaagctcgagcagctccagttttcgagttttttgacagccctacggccgggtcggctgcaagatgtgttgggggcggtaagcgatgtatcaatggcttaatgctttgtttcgttaattgaaactcttatcgacgtcttcgattttctcactgctgcgtaagcgaaactggctacattctttggtgagctcgattctccgattatccttgtaaaatttaattaatcacacttcgagcgctatttatatgggggaagttttaccgtgcttagtgctgaccgtttatcacatccgatcaatccaatattggctaatatttacctttgcctttttaaagtgggtcaattggatctatattattacaaatatgtcattctagagaaatatcattactattcgtctattcgtatcctatcattcgaacacgaacaaaattaaaaccatgctatcgccatcacattttctatcacatatccttttctttccttctcattttcttttcttctcctccccgccagcaagattcgagaggctgattcaagcgtccatgggatggggtcaacgacaacgacggctcttcctccttctttcccctccaccacaaccaccgctgctccaagtatagatgcgctgccggctagggggagggaccaccaaccatgggcgctagcgtcgactcggactctaggaggggcactatggccttgctatcgaggacgaacttagccttggaagagacgttggcagtgttgaatgcttggggaagataccgaggtcgatggaggttaagcatgagctacccatgaaggaagacgggtacggtgctagaagcggctcagatcctcaccggcgagctccgcctcccctctcgtccatgaccctccgcttctcaccggcgagctccttcgaggcgcggggtaggagtagcaagcgggaatggcttctccaagtctccgagaggcgaggggtgggcttagggttgggggaggccggagccggtgaagtccgcccaggcatttcatgtggatttggctgccggcgacccaggattggtggaagggtggatagtgggggagagagagtaaggaggatctggcgatgttgtggatcgacggtggagggtgatagcaacgacgatggagttgcagcgcaatggccctgatgcggtgacaatgatggtgcggaggattcaacggtgagggaggcgataggggaggcaacagccaaggctgcctttgcccggtcgctcctccctgtgtccccacactttttttatcagaatgtccccacacttcattgtgggggcggcattggcatcgacatcgctgttgtggttggctagctgagaggggaagggaaagagaggaggagaagaataaattgggggaagaagatgaaaaatatgatagcgatgacatgccaacgtctctctgtgatgtgtgtaggcccatgcacatgtatgcgtctatgggtacatgctgccatc

SEQ ID NO: 39326 - DNA, 1269 bp, Oryza sativa
acgccatgtttgctttgcatctgcaatccagtgacaaaaacctgcaagttgaagtatcgcgtttactgcctataaatagcgctggtaatctgccacaaatccaacacatacgcatatctgcatcccctgttcttctctcctgtgacttgcttgatccacatcaaatccaacgacaacaccaacagaccaaataatggctgctgcttccggccgccgccgtgccgcggccttcgccgtcgtgatctgcgccgccctgctgctgctgtcctccgccgtggagcgggcggcggcgcaggtgccctgcagccagtgcgaccaggcgtgcaaggaatcgtgcaagggctacgggcgcgactcgtcgtcgtgcagcgccccctgcggcgacccctccaacaaggacggatgcgagagctgcctggaggcgtactactccaaatgcgtcaactactgtggcccgtcctgccatgtcacctgcaccagcggctgaaaagcccagccggccgtcgtcttgggccttgtttggatactccgtaataataattagccctcccaaattttactatttaagagtattaaatataaattactgataaaactcatttcataatctctggactaattttatattcgtcttgcaaattagcttggtggttataaaataagttttatcagtaatttatatttaatacttctaaatagcaagattttagagggctaattattagcccggaggatcctaaggccttgatgtgtgtcatgaggatgcaccgtgcatgtacacgtactgttagtattgtatactagcaatagttagtactgctatttcgaataagctagctggcgtggatgtacagtatatggctatatgccgaccggctctgtatttcatatattgtggtcaatgcttcctttcgttgttaccaaggtcttctaagacagtggtatggtcacgaagagaggtactctgtctggttttattttaattaacgtttcggataatggcactgtttacaaaatattaccttaattttctattataatatacataataaataaatgcatgtttatttttattatagtgttttgaaacacaaatctatatatctatatatgttattctagtttctttaaactttattaatggtcaaagttataaaagtttgatttgaccttgtccaaaacgttaattattatataaccggagggagtactcctaaaacctatcaacaaatatttaaaactgttttaagacaaatctaaccctatgag

SEQ ID NO: 39327 - DNA, 586 bp, Oryza sativa
gaatatttgaagcatccaattaatgctgggtgctactactagtatcaacactacagattggtgttatacacctaattcgagtgatatggcgccaaaacataagggcttaaaagaatccaaccggtctaatcaaattcaaaaactccatggatggtgctttgccacccaagggtaccctccataatcctcaagcagcgaggcagttacaagccttttatcacttcatccatcatcctacaaaccaactccacacccacccatcacaatggctatagatctaaacatattagcagaagaagaggaagatggaggggctttacctgacctcaatgaagcacaagccaatctagaagaagaagttcctggaaggtatgttatccaggtagatgaccttgctcgagttgcttgccatggaaatgatcaagttgtacattcttttgatctcaacttgggagcttttgatctcaacttggaagcaacagaagaacaagaacaactgcatccaggttttttacttcatctaatctttctcaatgcataaaatgggttctttctcagtgcatgttgattgcattagtaaatctgg

SEQ ID NO: 39328 - DNA, 691 bp, Oryza sativa
ttctcgaatgccttagaaatttcggccaatgtatgcgcttatattttgctcactttctgataaacgtttggaatttgattttgatttacgttacgtactcattttgccggttgagctttagttgttcgtttaaaaaaaatccattttacccttaagtacggaagaattatagaaattcatggagtacattgttggtacttggtagtgtataagtttattgtatagtatgactttatattcatgagtttgttgtgcggaatattatttatgataaaaatgcatgtcttatattataaaaccactttaaaaattagttgtgcctttaaaaagtaatagaaaggttaaatatttatttttctatttttcatattaaaaagagtaatgtggtataattttttatgatacatacaataggtttgtctaatactaagactttgtttggcgcctcttgttgtggctgcaagcgattgaagaaatgtaagttttattctatagtagctggttgtacaactatagtcataacttctgaataagttctaaggttgtgttcgaatataaaggtctggaacctactctccaacatgaaaaataaggtggcttattagcatataattaagtattagctataaaaacctgaaaattaatataatttagcttttaaaacatctttcttatagaatttgttgtaaag

SEQ ID NO: 39329 - DNA, 1106 bp, Oryza sativa
ttcctgcagccctagtatttccattattgttgatgataaaacatgattaatactttatatgtgacttatctttttaattttttataatttttttaaataagacgaacagtcaaacgttggatacggaaatccaaagtttgtctttttttttacgagggagtagctgtggctcgttctcgaggtggtgctgtcgcatcctttgaattaaacgcatgtgtaatcatttttttttctaatagaaaagggtaaggtgacgcatgctaatgagtttgtgccgattcttcgttagtttactcaagtagatatggtaaacaaccaaacaatagactgaaacatgcataaattgcatacaagatattgagttttacttttccatggagttgaatgccttggaaggagcaggcattttatacaagttcgtaaaatattcaaaattcgcaagaagccaaagcaccgtgtccacagcgcgcctaatgaggtaatgccaggtttgatgcatcggatatttgtaagaatgaattaaccagctgacgggacactgacgttgtacgaacccagcaaaattcaacattctgaatagtacccgaattcaattcctttccgggttcaaattctcttttgaactttgcgatgcatttatccttatccatcacacgcacacacggcacacgggtgtttatgctggtgtgcggcgaaacaccccgagtatttccccttcgttttgatcatttcgatcatttccatggttggggttccaccatttaggacagtcaaccccggcattgttggcatcaaccccggcggatggcaccaaccgccgaccggtacaccgcccatgtgccacagcccacccgcccgcgcgcgccagcggccagcccttcgcaaatcgatcccaaaaccacaacgtttacaaaaactattatgaactaaagtggattttaataggaaatatttataatggtttacacacttaaataattaaaaaacataggtaaaattaaaattttgagaagatatattaccatatgatatatcaaattttaagttataccatttaaaaaaggtaaattaaccattatttaatgcatatttatagtaaatttttt

SEQ ID NO: 39330 - DNA, 954 bp, Oryza sativa
acacgccgccggtcgccagtctccccaatgatgacctggcgccgccatcggtaccgtccgcccaagtaacgatgccagcagcgtggctgcaaccggtgaccgactacaccttcgccaccggcgtcctggcgcttctatccccttcgccgcaaccacctgtcccagtgtcaccgcgaccagccgccgacctcacctccaccgttgatgacatatttccctggacaaaaaaaataccatgtacaatgagttaggggcaaataggtctttttagagaggtaacagatgttaactggactgtgatggcacacagtagatgttaaagaaaactcgatggtatataattgaacttgataaagtcagtggtacattatagaagtgcgataaactcagtggcactgagtggattctcttaaaattaaagggtagtgggtcctttgtggtggagtggagttgtggacagcacaacccagctctaccccctagtatattttttaggaataactctgctaactacactcccaaaaacagaggatctgaattgtttggcacaactccgattctaattaagttgaagttgggagctataactgtgtcaaatagaaccaaacttggccttgaacaccttcttcgtactttaaatacgaatctaacaacataaatatcacaaaatcatatgcatttgtcaaaggttcatatcctaacgaaacaaaataagttttatattttttatggagggagtgacaaagtttaactaaaaccaaaggttccttggtactagtatgatactccctctgtttcaaaatgtttgacaccgttgactttttagtacgtgtttgaccattccgtcttattcaaaaaatttaagtaattatttattctttttatatcatctgatttattgttaaatatacctttcatgtacatatatagttttacatattccacaaatttttt

SEQ ID NO: 39331 - DNA, 876 bp, Oryza sativa
tttcaggggtagacaatgtacccgtcgatagcaaggcccctgtggtgacttcgtcaatctccaaaatttgcgggctcagttatcgaaaatgctcataagggtagggtttacgtacgtgcattcatagggtgagtatgcgtgcattgtgagtgtttatgttgtaaagtgtaattttaaaaaaatattgtaagcaaggcacaaagattgagtaatcccctacgtttgtaaacattcctcatttggtcgctattatttttttaaaacgatcagttacagacaacacgatcattcattgaatagagcagaaagaaattacaaaactattgccttaggagacattcgccaggaaagaaaaaatttaaccaccacgcaccgacagcgtctacacacatccaaagagaaggctagcaccaaatcaaccacttttaagcgtaacttatgtccctcttattgaactatgttcgtggctattattggttttcttccgtggttttttcaaagggccgcggtttttcaatgtgtagaactatgtcttgatcacttctttgtctgtccgtttatcgcatatatctatatggtcagagcacccgctttaattctttgatcttaagctgttctacatatattagtggtatttgaccgtcctaaattacgtcttagatgagccatgcatgaccaagaagttagattctgacttttggatatagatatgcatgacagtgaagacacgccacccaatgtgtattctatagaaaccagagtttttaagcagcacgaaaaaaaaaaactattacttcagtcctagactagctttttttcatgcagtagtaacttcgacagcagggaagagctttgttgatagtcagggctgcagga

SEQ ID NO: 39332 - DNA, 1037 bp, Oryza sativa
atccttgtccataagtctatacacaaacatgtatgactaaatttgatctacaattaaagaaacaaaaataataaaatcagacagtgaatagtatccgtactccctttaaaactggacagatcaagaaactgtgcccttttgaaacaggacagagagagtatcacctatgtcatctatgaagcatcctgcataagtaatctatcacacgttagcatctatttaccatagacagatctaatataatctttctattggacagattttagcagcattcttttttcttttctgggcatcacatcactatttttgcttaacctttggtcctctgctatgtcggtgagttttcaactagagatatatactgatatgaaattgattacgatagcatagacaaatctacttggaagggaaatattgagatggatattgaaaggtttttcgatcgtaaggtcaagaccagagcataccagtatctcgatgcggcgaaaccacagggatgcaccaagactcctcatgaacgctatagttgctacattcagcaaagaagagcgttgcaggatcattggcagattgggggtcatcgcaaatcgccagaaagttgatatgagagtgattatatttgtaaatcctccatgggctattgcttctgaccgggccgtactccaggccagatacgcactcattgacaccacagataaaatgaagcctatatttgtgcaccttcaactaaagacacaatcgaagagagttaattggacatttgaggctaagcatatacaacaaaaatagaggggggtcaacttgaagaaaccaaaccttgtcaaggttgaatgtggccaatgcaacttccacgttcttgcagactaggtcatgatgtagccaaaacttgaaacgccggtgacaaagcgcaatgtaggcatcattgcataaccttttaggctctggctgctgttgatgtcgcaactcgaagtgacgcttgcgaaacaacaaggaaatcaaggtgacatcgtcagagcagagcctgtcaccgtgctgca

SEQ ID NO: 39333 - DNA, 517 bp, Oryza sativa
ttcctgcagcccttccggctcaatcggagagaaatttttttcaaaaagacaagaatgaccctagggtcaaaagctttttgagccgagactaaagtgaaaataaaataatggtgtatgctagtgatgtactttgggctatggcaaatttagagttacataatttccaaatttttactctaacaccatgtttgaagcatgtggctagaggggcattctcgtcttttttaggaatccatctcttcaattgagccgaaagtgtcctctagcaaattaccagttttttagaatgtctttcagccatgacacgttttttcgatgtatatcagcaaattacacaaattttgggtgtcctatagcaaaatttaccattttagacattctaaattttgacattattaatattttttgacacgacattattaatatttgattgaattgagatgtgtagattgtatttggtttgttacctttactaagtttttctttttttaaaatagattctatagttgccaaattt

SEQ ID NO: 39334 - DNA, 578 bp, Oryza sativa
aatggaaaaacaaaggaaaaaacatatgattttgatagaaatacaaatgtaaaacagagaattacaaaacatagaaaaaaacataggaataactgtttaattgaactaaaaaatgtaggaatcagatgagagagatagtatcggaggaaattttccaagaagttgaaactcttactaagttttcttcaaaatctctatgggattatcagttccatagaaatttttgaaggataaaatattatttaatcttttattttaaaggttttcataggaaaattttcgataagattgaaatcctctaaaatttctatatttttcttataaattaaagtggtgctcaatcatttggttgctttccctaatgacgtactgatacttcatctaggggtgtacgacagatgtagtggaagatggatgacgaaacccaaaaccacgaacgcagtggtaaccagccgttgggcattctgttttcatttaccactaccaaagtatcatcaagtgccagtttaatactcctaacatcgacgccggagcgtcatacatgcatgagatcatgtcatattgtcattcttaagcgt

SEQ ID NO: 39335 - DNA, 587 bp, Oryza sativa
ctttctgccataaatataaatgtatttatatatcccaccatccgtcctaaaatatattaacttttacctatagatctcgacatgcacttatgtagattcggaactcaaaatagttatatgttgagacagggggagcatattattattaagatagctctaaaatgagtttcaccgcgtttactctggaggcctaaaaattaccacatttaatcggacaaaaggagaaatatgttaaccgttaaattgtgttggtctagaatacatcggtggagatttattgatataattgtatacaaagtacaatgttaaatatggtagcataaatcgacccgtatagaaacagaatcaaagttgtatacaaattcaactcaatttttaaatctagctccgtgcaaattgcacaggaaaatcctctagtttcgttaaccagatcgaacaatctccccagcctggcatatatggtttataacttggtatcattcctagtatttgaactcacatttgctatctgatactctcttttttcatattataagtcactcgtcccaaaatataccaagccaagattggatgggacccggtatatt

SEQ ID NO: 39336 - DNA, 669 bp, Oryza sativa
atcgatctcacttgctgtgttcgagctttcgaaggtcttggaggttatcaggtatttgtattggtggctgctgcctctgcctccacccgcttctcgtgcaacacgtgcgggaagagagcgagcgagcgcgtcgcgttttcatcgcgcgcgcagtaagaaggccgctcgctcgcgcccgtcaacgcctaggcgacggcttgacgagatcgcagacgttgatgcgcctgcgcccggaggattggtcaaatactggcgccacggtgggcgcggtctatgggctggatcaccctccgtttcggacgcgcggactgaccgaccgaccgatcgatgcgttacggatcgtacaattggcttactcctatgcgcatattcgttcagcggttcaggtgagcacggaatctgctttgaagattaactgcacgctaatcttgtgtccgtggcggataagcttaagctatgcgtgccgtatgagactccattctttcccttcacttttgcctttgggatggacttcctttcccgattcgccgacttggctgtatcgggagaaatatattcactgcatcggaaagccaccagcccacgagccatggtgtgaatatcagatcaacgtgaaaaaaaaagccaatcatactgatgcagggaggtaatcagctgatcaatggacgt

SEQ ID NO: 39337 - DNA, 561 bp, Oryza sativa
agggatacctcatgccacatagaaggatcaaatcttcacataaacataggccattttagtcgttccccaatcaaactccaaccacctcgatcggtaatgcagcaagcttctcgttcttgcatgaccagaaacccggtttggctccatctgaccccgcaccggcgttcccaactataagcatgcgaggtttccctgaacaaactagctacttagccagggtgtcccattccgccttgtggttgcactttgattatgttcgatgagtttcccacaggaatcggtccttatatgcgaatacggatcagtgccacataggcacaacccccgcatcgcgagttttcacaattcattttattttcaaacaccctgacaccacatgtcgggttttgaaggcttcacaaccctatttcccaagttttcgacaaacaacggtgtatgtgggatatttggtatacgcgctcagagagcccaaataccgaggtaccacaagggtggagcgacaaggaatcagggtagtccgacctacggaaattagtgcgcctactgggtaggtccgcccat

SEQ ID NO: 39338 - DNA, 561 bp, Oryza sativa
cataaagaaataaaattccgatttattaaaagaagttcaatgtaagcagtcaaacagactccatagtccatgtacttaccagcttattcaacaatctgtcaggcacgggaaaagatgggcaataatatgtgctcaaattatttggatcatctgaaccagcagtactcccatatgagaaagggacagaattataatcagcccaacctgtatctgtcccatttcctgtataaagaaaagatgtcagatgtaacattgtttaccacaagcaacataaaatatagtgttgaatgtagaggaagacgtgtagatgcaaatatgcatcttagaagaaataaagtcccttacttgaactgattaaagatgctcatcaactaaattcaagcatccttcctgcaaacttacaaaaggtacaacaaaaaaatgtttgggtccaattagcattgctagttgtgctacttgtgcaagtattgctcactctcactatatcgagctccataacaatgtaactatttcctagtttggttgctagaagaatagctactgcaggaattcaacagagag

SEQ ID NO: 39339 - DNA, 628 bp, Oryza sativa
aaaaaaaaactttccaagaggttgaagctattactaactttccttcaaaaatctctatatgaatgtttattctatagtaatttcaaaaaaaaaaattagtacttcctccgcatctagattcattaacatcaatatgaatgtggaaaatactagaataacttaatgtggaaaatagtagaataacttatattgtgaaacggaggaagtagtgtagattatctaatctactcttttaactgtttaacttaaaaccatgaatatgctaatataaattatggacgactaaccgtttcctcgaagccatggatgttgatgtagcctcctaaatcaaagtggaagtagaggttgcagacgcaccttgaaccacctctcatattgtctgtgtagaagaacaattggcatcgctagcttgagtctagatagattgtcggcagtcagcggggtagcggtgtccttctgatcgtcacctgcactgctctagaagtgccacacgttctccctccagcgtcttatttatcaaggttggaacattggaatgaacatcataaaaacagtgtcccgtttcacggccggactctctttttaattttgcgctatggaagatcgagggagatccagggctgcagga

SEQ ID NO: 39340 - DNA, 597 bp, Oryza sativa
agtcctaacaccagtcttgaaaatatagaatggtcaatcaaacatgacagaatcaaacggacaacttgaatacaatgaacctatttaactgtcacgagaatgtactcgatatgattttttttttcttttggaagatactttcagaaattaaactgcagacagttggtcatacaatccccaattcctacaatctcgtggatcaatctaccataaaaagcagcaacaatgaggagaatggaatatcatactgaatacgctaataaagataacataaacatatatgcactagccattcatttgattcttgtaagctgtcattcattttatttttccaaagttgaaaacatgattcttacactagtgtcatttttcgatacacaagtaaacaaccatgaactatgattgtacaaaaaaattaactcggaagataccctacgcatcctcaattttgagtagcgtgctgcaacatcaaattaacttgcacttgctgaattcaggtttcagtaaagtaaagatccatcatacacttgacattcaatttagcccctagaccacactacacatctcattggtcatgggagaaacgtaccagctaga

SEQ ID NO: 39341 - DNA, 521 bp, Oryza sativa
ctttttgccacccttggactccattagtgcatcaatttgttgactgcagagaagaattaaaaggatcgatgagaatctgcaagactaggcaatgcaacagattgtctgatcgtcaaagtttcaattactaaagagatacattcatgtttcatcaaccgtatgaactggagggaaatttcagtaattcgttctgactatgactattatttgcaaaagcataagaaatttcagactcaaatagcagattgtcttgtcatcaaaatcttcgttgcttttgagacacattcatatttatcaaccatatgaactacacaaaaaaatcaccaattcttttggactattatttgcataagcataagaaaattcagactcgaatcatataaccaaagtcttaattcctttacattcatgtttcatcagacatatgaactggagcgggacaattatttgcatataacataaaaattcagactcaattgaagaatatttcaatcagccacctgtggctaacagaagagatg

SEQ ID NO: 39342 - DNA, 631 bp, Oryza sativa
cgatatcacaaaaatccttatatcctccgaaaaggactctaacaccttctattcgaagaggatgatttccttatagatcatccgatttcctcatttcggaggtatcttcccatacacatgagggtatatcgtattcgtatatttcacaaccctaaggataagaggtatgtcttatctataaccctgacaaacaatacaatggattgggctaaagctttgatgggatggcccaaaccttggcccatttcttggtccactcctctgctgagaagaaaagacttcagtgccctcaataaatatgtggtgagtggaggtgagagggtaggtaggggacaaaataggaataaatttgaataggaggtgattgatgagataaatagtaagtgaattgggccaaagctttaatgggacaacccataccttggcccatttatgggtccactattgtgctgggaggaaaagactttagtgccctcaataaatatatgatgggtggaggtgggagggtaggtagggggataacatgggaataaattttaaattgaggtgattgatgagataaatagtcagtggtttgggcctaagctttgatgggatggcccagaccttggcctatttcttgatccaccct

SEQ ID NO: 39343 - DNA, 2190 bp, Oryza sativa
taataaatcgttcagaacacgcgaaatctgcggtgttcataaaatcgaaagaatgcacccaaatatatacgactaggccgcagcaaagatattttttagataagcagggaaacataactctagaacttagttataagtctacgattaaaacgtcatagcacaaaaaaaacagcaaggtttaaatggtagaaatattttcacaaaccagtaagcacaagtacatacaaaatttaggaaattgagatttcaaaactaaaataaagttttaaagtgcaaagttaagttccaaaaagagagtaccaagttgaaattcaagtgtgaaaaaacaaccgtccctcgagaaaccaaaataaagttttaaagtgcaattacaaaaaagccgcaaggtttaaatgcaagcaaatattttcttttcacaaacaagcataagttcaaacaaaattacagaaattgccatttcagaagtaaaataaagctttcaactctaaagagaagttccaaaaagagactttgtaattgaagaaatcaaactcaaagcaccgagttgaaacttaatgttgaaaaataaccgttacaccagaaacaaaagtaaaagattcaacgaaaggacgggaaatgaaacgtcgagaaacctaaaaacgtttgataaaaaaaagccgcaaggtttagatgcaagcaaatattttcttttcacaaacaagcatagattcaaacaaaattttggtaatttacatttcagaactaaaatagcatgtcaaaagttttaaagtccaaatagcatgtcaaaagcatgaatacaagagaacattcgaaaataaagaaatccaacaaaaagcatacagtttaaatgaaaggatgtaaaataaagcgtcaagagagaagcctagaaatgttttatacaaggaaactgtgattttcagaaaagattgaacgtgcaacaaactataagggtccagctcacaaaaaagttagttgttttcaataaactgggagaggcagctctacaactcaattaaaagatcaatattaacggcagagcaaaacaaatcagttagggcttaaagcaaaagaatattttgttttttaaaccagaaaacaaagttcaaacaaacttaaggaagatgaaccgtgacaacaaaaataattggaaactccaaaaaggatatttgatgaattgatgaagaagaaagtttcaaaatcaaggaatccaattaaaagtggtacagccaaattacgattttcataaaatcaataagatgcgaccaaatgtagatgtccagctcgcaaccaaaatatttttttcgataaaaaggaggcgtaactatttaatttaattataaggccaaagttaaaacgtcatagcaaaaaaaaccataaggtttaaatgcacacaaaaatgttcttgtcaaaaactattaagcataaattcaaacaaaatttaggaaactgggatttcagaactaaaataaatatttaaagtccaatgagaagataaagaaagagaaactttgtcattgaagaaatcaaactaaaagtactaaattgaaactcaagaacgaaaaaacagttgtctctcgagaaaccaaaataaagttttgaagagactaaatagcatgtcgaaagcattaatacaagagaacttttgaaaataaataaatccaacgaaaagcttaatgtttaaacaataggatagaacatgaatcgtcaagggaaaaacctagaaatatttgatacaaggaaaacttgactttcaaaaaagcttcaaggtgcaacaaaatgcatgggcccagctcacaacaaagttatttgttttcgataaacaaggagaccaaaatctacaactcaattataagagcaaaataaatcaattagtcctcaatgcaaaagaatattttgtttttacaaactagaaaacaatgttcaatcttttcacgaactagtaaacataaatacatacaaaacttaagaaattgagatttcagaactaaaataaagttctaaagtccaaagagaagttccaaaaagatagtaccaagttgaaattcaagggtgaaaaaacgaacatcactcgagaaaccaaaataaagttttaaagtccaaatagcatgtcaaaagcattaatacaagagaactttcgaaaataaagaaatccaacgaaaagcataaggtttaaatgaaaggatggaaaat

SEQ ID NO: 39344 - DNA, 674 bp, Oryza sativa
ccccatatgagtgtgctatatatatatatatatatatatatatatatatatatatatatatatttgtaaggtatagcaccgactgcaaaactgatacgattatgaccactgaaccttgatagaacttttatcaaacaacaaaccaaaaagatcaaatccatgaaacttggtactcaccagaccattgtaaggcaccaaggatgatagctcaagtttataagacggatcacccagcctagtgatcactgagacttctccttgtcgctcctgaaagtcaacaaaaagtcccattagaaagaaagaagtatttaggttccagtaccacagctacatgtgaaaagctgatcaattttaccgagaaactgtctaaatgaaaaattgagaacccctttctcgcgattagtaaattaacaaaatgcacacatactatatcataagcaacggaacagctgaacaacacttgatgggtaaatgcgggtgactaaggattcaagccagaaaaagaagaagtgtgccatttaccttgacatcgtgtgagccgcggagctggatggcgccgccggggagggagccctgcccgctgagcagcgcgttgcgggcctcgacgtcgtacagcacggagaaattcttggcgatgagcccgaccacgggcgcgacgaatagctgccgccgcg

SEQ ID NO: 39345 - DNA, 549 bp, Oryza sativa
atgctattatatgagagaaaatataataatgctagccgcgcaatctgtgcgggccgctatattaaatctttaaaataagatatcggatgataatattttgataaaaatatatatatgacaaatgggccgggtcccactaacttttagcttttcccatccaagctatatccctccaaccaaacaagaaatttgatcatcctatccatacaaaccaaacaaaaaaaattggatcgccatatcgaataaaatatgtttggtcatatcccatccatacgtaaccgtgagccaaacacaccctacaatggttcatcatcctggcaccgatgcaaggtggtctccgctacaatggcagcggtcaagctctcttttcaccgagacgattggcggccaagctaagctaagctagaggcaacagcaaaagcgaattaaagcaggcagcaaaaggccgtcgtgccgtgcggtgcgagaagggctttcccttctccctcccgtcctctccccacttcaccatcatccagcgaagtggctaagtgattccctcgaaaagat

SEQ ID NO: 39346 - DNA, 542 bp, Oryza sativa
tagttcgtagaactgaccaaaagctacttttttttttcgcggggagaccaaaagctacttacgtcctctaatgaatgagtcattaaaaaaaatcgaagggtgtacccaatcccatctgtccatattcgtagttaggattaaacttttttttggacggagggaatactcaattagggtgtgtttagtttacgctaaaattgtatgtttggttgaaattagaaagatgtgacggaaaagttggaaatttgtatgtgtaggaaagttttgggccatgtttggttgcaaaaattttcttcaaacttctaacttttccatcacatccaaactttcctacacatataaatttttcaacttttccgtcacatcgatccaattttaaccaaattttcaattttaacgggaactaaacacacccttgatgtgatagaaaagttaaaagtttgaagaaaaagtttggaactaaactctgctttattgggaaaaaaaacggagataagtatgtattttgttttgaaaacaaaaacactggatgcatgggttgt

SEQ ID NO: 39347 - DNA, 590 bp, Oryza sativa
aatgctccctcctctccccccttcctcctcccctttttctcttcctactacaccataaatatgtaaatttaatatttgacttataaactttgggtctataaactaatatttgaattcaaattcaaatttgaatcgggtatgtaaacttttgacttataaactttgggtctataaactttaggtgtataaactttagatatatagaaatactatatatagaaaatatttgaattcaaattcaaatttgaatcgggtatataaactttaggtctataaactttatgtctataaacttagggtgtataaactttagatgtatagaaatactatatatgaaaaatatttgaattcaaattcaaatttgaatcggatatataaactttaggtctataaaatttaggtgtataaactttaggtgtataaactttagatgtatagaaatcctatatataaaaaaaatatttgaattcaaatttaaatttaaataggatatttgaattcaaattcaaatttgaatcggatatatttcaaattcaaatttgaatcgggtatataaacttttaagttataaactttgggtctataaactt

SEQ ID NO: 39348 - DNA, 537 bp, Oryza sativa
tcattcttcatttgttagggagaataagtctgtaactgcagcaactacttttctgtacagacaaaacgttgtggatggggtgctatttcattggagccattggaaaaaggtgattttataattgagtatgttggtgaaggtacaagttactctaccatttaaacttatattatacaaattagcatattctttagtaaactgtatgcatgtcattgtggagtcacattatgccattacagtacaatccaaatttcttgacatgaatatttcctgaagataaatttgaagcaacttattggtagttagcatgaaaaagcctgtttagtcattgcatctgtttaacagaaaaggtacctcagctttagatgaaaacttattatattaatctgaaaattggataacgagtgtacattttgttcccactctattttataacataacatagctacgaagcctacaattatgaacaatggcagttcttgttgccacttattcttgtgaccttagctctttgtggtttttattttattactccct

SEQ ID NO: 39349 - DNA, 573 bp, Oryza sativa
tcaagggctatgaatctagagagacatgctacattactagactcgtttattttaaaatagaaggagtactagacatgttaggcatgtttggattgaggttgatttttgtcctaccaattttttttggcaacttcaatagtaacgggctgttttggtttgaggcctaaattagccataccaatatttggtaatttaaatagtgtttagtgtctatttggtttaaagccaaattggcatgagtaagaaaataagccatttcaatagtgaacttaggctattttggctttaatccaaacacaactttgccttaccaaaattagtcatgccaaaacttaacaaaatttggcattgacaaaatttgataaggtctatttaggccacaaaccaaaccaacccaacatatagatgtttggtttgctaccaatttatatccacgctgctaaaagtactatactatcaatttggttagtgtcaaaaattaccaagattttagcgctaccaaaatattgattgggcaaaattggtaacaatccaaacaaacccgtctgcaacttgcgtagagtgtatatggag

SEQ ID NO: 39350 - DNA, 590 bp, Oryza sativa
agtgttcagttgattccatacatacgttgaagtaaccacaaaaccggaattctttatacctccggcaggtcggaggtcttaaatgctgtaacccaaggggagctttcgtacatcagggaggaacgactactgctagacttctttttgccacccttggactccattagtgcatcaatttgttgactgcagagaagaattaaaaggatcgatgagaatctgcaagactaggcaatgcaacagattgtctgatcgtcaaagtttcaattactaaagagatacattcatgtttcatcaaccgtatgaactggagggaaatttcagtaattcgttctgactatgactattatttgcaaaagcataagaaatttcagactcaaatagcagattgtcttgtcatcaaaatcttcgttgcttttgagacacattcatatttatcaaccatatgaactacacaaaaaaatcaccaattcttttggactattatttgcataagcataagaaaattcagactcgaatcatataaccaaagtcttaattcctttacattcatgtttcatcagacatatgaactggagcgggacaattatttg

SEQ ID NO: 39351 - DNA, 610 bp, Oryza sativa
ttagtgtgatgcttaagacggaatgtattagtgtcttctcaaaactctttgttgattaaacctcactggatgaatagtttgctggtgtccggtggcttagggctactttggtttgctaccataccaaattttgccctaccaaaatttggtagggtaacaaatcaagtactgtttagttttaaaaaaaaataaatcaagtactgcactaccaaaacgttggggttttgttcacatagttgtctctcatagtcacattttggcatcaaatcaattctactcttctcaactttcctctaccaaaaatttggtagtcccaaacttgcccaagcattgggctttgcactactaaaaattttagcaggtcctcaaaccaaaccagccattagttttctgcaatcagcattcattgacctggcccggacagttttctgcaattagtttatcatcgtcagctatttttatctccttgaaaatattctcctcggtgactgtgtctttgcacctttaatagtcaatgtgcgggtatgtacttgcacatgcgaatagtggcttgagcatgcacatctaatataggcacttacagtgtacacatttaccctctcttccttta

SEQ ID NO: 39352 - DNA, 735 bp, Oryza sativa
cataatacaaattgcgtctaatttaatactaattatattattttagaatagaaaaggtagcattttataataaataaggattttgttcatgtaggtacatggaaaaaatcctttatattcaggtagtgatcattatcaacttatcgttgtcgctagctcgctccaggcgtttcgatcttctgaattgacgagagagtacgtaataatatagctcacctgttgggaggaaagaggggaaatgccatatcaatttcatttgaattatgttcggattttgccggaatcaagtcaaaggcagcctaatctcagtctgacgcaactttgggggagtattttaggtggctgcaccatcggaaaatttcaggtcaggacagcaacgagttctccagagagttgctgacgtgcttgctccctctaggagtcaacgacccaagcgtgcatatatgctacaagtagtataatacacagtagtagtaccgcacaaattttgacaatttaatcatttacaaaaaaaactatttttacaaatgaactgctgccaaaacttattttaaatctgacccttttgctcaacgctaactcgtgtggcgctgaatttagacacctcagcgtcaaatagcatggcgctgaatgtacgttgacacactgacttactctctcatccaccgtggcacggcattcagcgccagctgacgtgacgtgacgctgaggtgtctaagtttgatggactactgt

SEQ ID NO: 39353 - DNA, 1707 bp, Oryza sativa
attccactcggcactctttagatttttaatacataatgtcattaactttaaaacattttaattttaagacatatttttcactatttattatattagaaattatataaatatttttagtatttattttaacataaaatactttaagcgttatttctgtttttcatatttatatatgtctgagggtgaacttctcaagcaagggaccgtggagatccctttctggttcggtctaggggcacgggtaaaggtctcagagttgatggggagaggcagagggggtcgggcccctcgggagtgatggagatgtaagatgtttatataggatcggactgctatgaaaacgtaataccctactcatatgtgtggttgatttaggtgggagaatacaagtgcttttcttctctaggattcgtccccgtctccattagggtatgaacctacttttatatcttaagggattaccataaaggctcaagacctagcttcaagggtaaggaaaacattctttacaggcaattaatgcttgtcttgtcttccgacgtgtggagccacgcgcgccttaccgctgcatgggcccatcccatcacgccgagcgtcacgggcagacgcctgtgtcattcattcttaattatcgatgacttctggtcgtccgttcccaccgttgggtggggatctctcatacggaccggtgtaagaagaaccggtccgagctcaaatgcaaggcaaaaatcccctcattaatggcgattagacgggcagccgcaggccacgtccccttcaagcaacaggtgcatgcgcagggctccctgaccgccatcacatcggtcattccggccacaagtggccagttagtgcgcctacacatcgcattaaatgcgacgtgccgagtaagtactgcctcaataaatgctgtaggtgggcgctgggagtgcccgcccaagcgacacgcgcgagacagagcgtgtagggggtcgggggcccggggcagcccgacccctggcatggtaggcagtcgccgctccaaccctaggcccgacccccgggggggcacgtgggtttggggcagccttctccctctgtacgtggtacaccgggtccatatcactgacaatatacaattttagataaggcatatatggtcaaacacaatgtatatttaaaagtcgtgtactttaaaataatgggaagtactgttttttcatcatatctctaatcaccgtccagaaaaaattgctacgaaaatgcagcacaaagggaaaaaaaacatctcaaaagtttgcttttgcgccgcgcactacagtgaagcgaaagcatatgtgtgagagacagggaaaaggatcggccatgagaatgagggtcacttgcaactgatggtccaatttgggagaaaaaaaagtttgacaagatcattacatgcttggttaaagagcaacctttgatgacaaaagggcattactttgttcatctaatctgggcttggaattatatcgctttctacactttgcagaaaatgatcgagcgttagatcgctccttttggctgtgtgtgatttgtgaaggtagcatcagagaaatgtttaatagtagtactagattgtgtcaatggagagtagacagtaaagtaactgagttattaatagcacgacacggtacttccacaaattttgagaccctttgcaaaaactatttctacaaatgaactgctgcc

SEQ ID NO: 39354 - DNA, 656 bp, Oryza sativa
aataggtttagggagttttgaatgagattccaccatgtccaagctcaaccagtcacctaatcatcattcttacatattttagttgttacccacagtctaatttatagaaagggattctatgttagatctaagcatagataagcccaacctagagcaactagtaagtccatcatatagggaaccatactagtcattttatcattttactaaggttgacaagagcatgggtagcaattcaataacatggctatataacgaggatcacaggaatattaactattaaataaataatagtgaacgttatataatttataaaagtgatgcatatagaagtaaaacaacatagttttttttgcaaaaatgggattcaatatgttcaaggaatatggtatgacttgccttgctcgaagagaaggtcttctgacaacttgacctgcacttcgggaacttccgaaacgacgacagctacacgaaaaaaaaacagggctacaaatctaagaaagaaacgataacaatacataacaacatcaaacaccggttccttaagttataacaaaaattaaacaatttgaacgagtcaattaggagctcgtatggccgagaaacgaccaaccgaattttaagtgcaattaaaatggatatttcagagttgttta

SEQ ID NO: 39355 - DNA, 541 bp, Oryza sativa
tatatagactattgctacaccaccggtaacttctgaacaatacaaagctttaacatatcatatgcacaaacatctcgatcagtacaacatgcacctgccattaagccaaaaaaaacacacgaatgcccaaaccctagaaccctgtgggaggaagggtgaagattggggggggagaacgggtggcttaccatcgagagcgcgggcgggtcacttgcgacggacttggagaaggcggcgcacaggtagggaccttcccgacggcacaccggactcaggaggagtcggcgcgcaggtcagaggaggtggagtcaaaagcggtaagagaggaccgctccggagacggaggaggcgagctttggggggtgggggggcgagaagagctaggtacggggcggaggctcgccggaggcagctctgagcggcgtcgagttcgtcggagtagccggcggcggcggcggcgtgtcggctgggggatttcacgagtcgcgggggaggggggaggggggagagcgtcgagcggtccgggtcggtggatggaaaa

SEQ ID NO: 39356 - DNA, 687 bp, Oryza sativa
attcccatgttatccccctacctaccctcccacctccacccatcatatatttattgagggcactaaagtcttttcctcccagcacaatagtggacccataaatgggccaaggtatgggttgtcccattaaagctttggcccaattcacttactatttatctcatcaatcacctcctattcaaatttattcctattttgtcccctacctaccctctcacctccactcaccacatatttattgagggcactgaagtcttttcttctcagcagaggagtggaccaagaaatgggccaaggtttgggccatcccatcaaagctttagcccaatccattgtattgtttgtcagggttatagataagacatacctcttatccttagggttgtgaaatatacgaatacgatataccctcatgtgtatgggaagatacctccgaaatgaggaaatcggatgatctataaggaaatcatcctcttcgaatagaaggtgttagagtccttttcggaggatataaggatttttgtgatatcgtgtaagggcaggtgtctctgagttctactttgaggtcaagataatcgacagtataaatagaggacccccggagggggggggtaaggcatcgaatcttagggcagacacccgccatagcagaagcaatctggaggactcgaatccaactcgtcgata

SEQ ID NO: 39357 - DNA, 591 bp, Oryza sativa
gccgcgccgctcgacggagaacgtggccgacggggagtcgacgccgacggggaagggtcgtcggccgccgccgccgccgcctcggcggcgggaggggaggaagtggtgggcttcatgaaggattggggatttttttttttgctcctctcctctctctgattgttttttgggatgcttttctctcttttttttttctggggggtgatggtttgggttttccttggtcctgcggcaggcagaagccagaaacaaaggctttgatgaggtgatgaggctgctgctgatgctttccaaccagtgatgctaaaatacatggttttgtttaaggttgctttacatattatacggtttgtaaggtttattaggatatatttccagtcagtgatagatacttagatataaattaattaatatacataaactaatagttttttttacctataaactataatagttttgattggatgtatttgtaatttttgccctgggagaaaagtatgagttatcacgagattggtgctatctcaaacattaaatccttaagccactagtgatgtattcttacttgttcaaagttactttatggtctat

SEQ ID NO: 39358 - DNA, 668 bp, Oryza sativa
aatcattttcccctttttctcctataaaacgtgaatagtgcatttaaaatatattataagtgtatgtaatttaatgtgtaagatatggacttacagcataagatttaacttttactaaaactgtcgcaccacagtagataggcagttaagtgaaaaaccataaaaatagagaaaatctataaaaaaaatataaggtaggttgtgtgcgtgacaaaggcttttggcggggatgaagccagccatgtctacgacgtagatggggagtaacacacaactccgatgagaggaggaggagataaggtaaaaccgttacgcgagagcttgtgagaacagcgaagatgagggggtgttttggtcctactctacttcaattttcatttttttacttgaaaccaacgctcttaaacattaaaacccatgaaagtactaaatttattcaattagaattttgaagttttgatacaataactctcatttgaaaaacataaaaatattttaatgttgattttttttatttattcataatattatgattttgttagctattattgttatgttttaatatagcaatactactcaaagttgcacaacaaagacataaaaaaaattaattgtgtaatatatttacataggagcctttttggaaggaaattcgatatgaaatatat

SEQ ID NO: 39359 - DNA, 548 bp, Oryza sativa
ataaccaaacccaaattttttccccaacttaaccagggcttatggttatttctaagtctaagggccagcttaattcaccaaccaaaatttttggcggggcacattagattttccggccccgaaaaattcgtctcgccatttaccccccatctggattacttagttttttttttttttaattcctcatacattatccaaccattcgatgtggcatggggaaaatttttaattgggaacctaaagagggcctaaatgtatactttctacacttctttcattctaaagatgagtgtcttttcacactaccaaatggctcagatgcatttcttcctcttccttaatttgggctatatggggcataataccctataatcttcgacagagggagtatatactaaaaatacattaaacttcttaaaaaggctctcaagcttacatgtggcattaaaaaatgctctcaagtttacatgtggcgctttaataaattagataaaatgctaagaaaaaacaaaacatatcacttgatttcacttaaattggtgggtcta

SEQ ID NO: 39360 - DNA, 523 bp, Oryza sativa
aaatacaaatatatatctttttatgcatagcaaatatagttatcaaagtggtattataatctgactaacatgattaaatagttcaaatctcttttttcttctttaattaacgtgttaatttcattctctaccttatgagagtggtattacgttccttttctacgtctcctaaaccttgcaggcttgcagcctgatcatttctagctcaagtaataagtgatggatatcaaattaatgtgacattttcgtgagttggtttgaatggcaaatactccgtcagaaaataaacccaacctggctgacaactctatcggcacatcacggcgatacaatgatcgaatttggaattttttttcggttttagattttttttaaatatttacagaaataatctatcggcaaaaaaattacaaaaataggccctgccgcccacctctggggcggcaagctgacgtggcaaacgggggaggaacgggcggtgacggagggagggttttttgcaggaaaacccttgccgccctct

SEQ ID NO: 39361 - DNA, 530 bp, Oryza sativa
gagtggctaaagacccactacccctacatacttgagaaaaattacccacctatgccatcaaccgaacagatagctgagggcattatagactttagccattcaaacccaacaatccatgccttcaataatccatacaaacaaacaactcacagcttattctatgcctgcttattataatccagcttatagtaatctggcttaataatctatattataataatcataagttgaaacaaatagggtctaaaatgataatccaaaattagcgattaccgaactcgaaattaccagaaagaattaggtcagggtgcgtcaggcggcacgaccgcatgagagagagaggtgaggcgtcatttactcctctcgttcgttgcgattggcgattggctaggtccacagtaggaggcgattcaagattacgaaccagcgcaactgtgcgaaccggcaaaaggcgtaatcgaagctataacgacaagaaaaataacaaattttcggaactatttagattaccaatttacttattaagttgt

SEQ ID NO: 39362 - DNA, 707 bp, Oryza sativa
  unsure (1)..(707): unsure at all n locations
atcaagaacccatttttgtgctttgttgctgcttgttatatggagtttattagagtaaaagccttttcttttccgttggtcgtgtagacgctgcagcttcggaagatccgctcttcgtggaagttgaagccgacggttgggaaagcgagcaaggcaagtcacatcatccttgaacatattgaatcccagtttataaatttatgttgatttaaattactgcattatcgctttatttaaattcccgcgttatcactgttttatctagccatgcctatttacctttgttatgaccttattattgttattgttattatttccttgttcaccctagaataaacaaaaccccaactagtggacactctactcacggtaccactagtatgattttagatagatgcttcgctggttaaataggcaacattaggtggttttacaactctagactttggaatattcatatcacctggacactatggaatggttggattattgtggaattggattcacacctccccctctattcaaaatcctcaaaatggttttaggctgggctcggngtgcatggttttgatagtagcgcctcggccatataaggaccggtcttcgggcctctgttgcaaagcactaccgtacttccacatgtctagtgggtaaggcttagtttgtggctcagtctggttataaacaaaagtacacggatggagatg

SEQ ID NO: 39363 - DNA, 2380 bp, Oryza sativa
cgacggcgacgacgaggagaggctgcagctcgcgaaattcgctgatcacgtcgacgacgacgacgacgacgactgaacatagttgatcatacgacattgttgcagcgcgttcttgcatgcatcctgtcactgtcaggggaggatgcagctatagtagctctgatcaatcgatcagatagattcgttgattccttcatggcgaacgcatgcatgtctctgatgagacgttgcccagtgacagaaatggcatctctctctgtacgggcaacccggagtggaaagatgagctgggatgtacggattctgttttctgttcatttggttagcataggaggattctacagagaaaaaaaaaaaagggagaatttgaaccatgccacacaaattttacaaaatttgtgatatgccaccctgacccacatgttattgactcatgtgggtcttatatgtcattgagatacgggtggtatatctcaaatttataaatatagggtggcatggttccaacaaacccaaaaaaaaaaatgaagtgatactaaactctggatttgttttagaaaagatgctgaactttgggttctatctcaggttgcagtacatctctactttataagtaagttataacaactgggaatatatatagtagactatatacacagatttgttattcattgatcgtctgatttcttgctcatccttacttgatatcctcatcatggaatgctttctaaggttcgtgctctgttggctttctaggtttctccggcaacggtggcaatggtggccatctcctgtttgaaagtgatgattggctgatgaaatgaaatgggacgactcacttaattaacgtgatacattaatattttaaaagataattaattaataactaggaacaagcggatggaaaataagtagaaaaacatattttataggcatgaagtaaataatccataaataatacgagccaataatctgccgaaaaaaagttccgaactagccatatataggcatctactccatctgtcccaaaataaaacaatctcgctaagatgtgatacatcctagtatatgtccagattcattgtacttggatgtgtcacatcttagtacaaggttagcttattttacagaaaaactaatacacggaatcccgtcgggggcatagggacacgtgataaaacaggggtaagcattatatatttcctagatccgtttctcccgaatcaagtttcccccaccgatttatttttctcccctaccgaggagtagcacttcgtcttcctcctccctccatccactcctctgccccagtggccatcctccttctccctgtcctcgattccttgaccatcgtcttcaacgccgatgatatcccctatcctcttttccccctttctacaccgaatctggagcatgtgagagtgtggaggttgtcgagggcatgggggttatagccaaggacgaagccaactatgactatgaggttgggggttgccatgtgcgagcagaaggaaagagaggcggctaggccgagggggacgagctcctgggcaccaacatgaaggtggaggcgtccagtctcgacgaagatgatgaccttggtgttgatgaagtggatcgatgagaggtcgtcgggtttcttcatgctccttgctagcctatcacttctactcgctaatgttgtgtacaggtatgtcacagctgataccttaggtattagagggttgataccaaggtttgataccttggggtatcatgtctggtacccaagtactagggtctggtaccttggggtatcatgcctggtacccaagtactagggtctggtacctcgggtattgtgcctaatacctaggtaccaggatctggtaccttggggtatcatgcctggtatcttaggtaccagccggtacccataggtactaggtgcatgttatcaagtaggagtattaggtatcgggtctggtacatatggtatcaggtgccaggtcaagacatgaggaaagatagtgcattgtcatcgtttggttgaccaacaagtcactatcattgtctcatcttctcttctcccttcctctcatcgacgcctccctccttcttttgttgttgttgtgattagtgagggcaaggagctaggggtgccactgtttcatttatttacaacatgggtgctcgaacatggggaagacaggtggtgggggattagattcataaagtatcccgttggaatggaatcccgtgctgtagcaatcctcttattttaggatagatggagtagacagcaatacaatgtttgttgtgagatagtggtaacgacactaaacctacccttgatataggagtttatggttgattaggacgaaggatttgcaattgagtc

SEQ ID NO: 39364 - DNA, 878 bp, Oryza sativa
catagctaaatcctggagcatattacagcttaaaaaattggtgataaaaaataaactaatcagtgtgatccatgggtagcctactgggccaaaaaaaaccaagatttatgtgaaaaaattgaatgaacaccagatagttgttcgctttgaaaaatttaattgagcaatagactaatagggctctgtatgaacatcctaatatatcttctatatttgtgaaatacaaaacagatatttgggcctggtaacttatggttctggtaacattgagtactgacgcagaactaggctattcttagtcctgttccagattttaaagaaagtatacatgccaagtaaaaaaaatgctatagtccagaatgaacatttttttggactggatagattggtgttggtggtagggaaattttgcttagcattggcacaattatttgatctgttgtgtttgtgtgctatttgtctaaaaagaaaatttacaaactaacagaataataacatatacctgtagggggtgctcctttgctagtgctagtgttgttgatgttagactttgttttatgctctgcagttgattttgtttgtggtgtttttggtagttgggaacatacatcagtgttgtttgggtggttttgttctaggggtggggcattaccattatgtgctacattgttgccaccctgcttgcttccccccttgctcttctcttctccactcttctcttctcttgttgtggtggtatctttttgtgtgaataggcttgcttttgacatgtagacgcaatccaaaaccttggcagctagttgtgcattttttccgtatgttgtgtcagaatgttctcttgtgaaccacttgcaaactgtggaaatgtcatcaatgag

SEQ ID NO: 39365 - DNA, 1665 bp, Oryza sativa
gtgacactatagaatagttaatctcttcattcttcctagacattttgactctccccttgatcccctagtacttacgtctataaaataagttaatgatagtaaaaaaaaacattttatgtgtacagagaaaaaatgtcaaagttatacctgataaatgttgaactccatctttattgtttatgcatgtttttggtgtgtgcatgtaactctccccctgcgtcacctgcatgctgctatgttcaatgtccatgatgtttgtgcctgatgttgtttgggacaagaagtgcccaaggctggcacttttgtttgtttttgatttatcatcaaaatgatgtaagcattcaaatttgggttgctgtgtgtgagttacatgagaagaaatgagaaagttacaaatcgggacagatcaaaaatataaattacatttttttctacattaaaagtgcaacacagatataaaaaaaagttagtttatcagtcaatcaatgctgcaaaaattgagaggattaaaatcaaaacaataaaacaaatcagtacatggtactagtagaaaaattgtgacaaaccatgtggagtttagattttgttcttgacgtgtataagtaaagatggcactgtaaattaaagatgacccaaaaaataaaagtgatttagaaaacacctctatgctctagtttcatctgttttctaaaatttgaattctacataggcacggcagtctatcgttttgtgtatagaggtgttttctaaaaaaatgtctatctgcttctaaaaaatcatccacacatatataatatgtacaaaaaaaaattatggaccagtgtacaatgcaaacaaacattatataaaaaatagaggtgtataatacacaaaaataagagaaaatgaaaaaaaaagcggtttgttgctcacaaaacaaacactaaaaaaatactagtgctttaaaatgcatgatatatgtttgatacatttgtgctcttgtttggaatgttgtctgattcatcttgtgtaggatcttggctattatgttcttctgaagagtttgaataattcacaagaatgaacttcgtcttatcctaaaaatattaaaaaagcataatcaaaaaagatataaattgattaaaatcattggaaaaaaaatggaacaaaaaattatttttttaaaaaaagtacattatgtagtcaaaaaaaatctttttctattaccgttgtgtgacctgttatgtcttcagcatcatatggaccctctatatcaataacaaactctgtagagctgctttcaagattcttggtgggctgcaccttttttacaaaaaaaaaagacatgtagtgaaaagccagggggaaaaatataatggtttgaaattttgactcttgcctaattttgaactttacctcctcctttttggctggtatagtacatataggttccacgaaaagagcatccttgtttgattcttccctgtctggttgagtattgataggttctgttgctttcaagggctgaaaaaaatgaacatatattatgcaaactttttttaattttttaatccatgaataatgtattgtatataatgatatgacataaaaaaagtaatagtgtttttacctgtttccttcctgctttgcgaatcttttggtcagaagaatattttttcgatgggg

SEQ ID NO: 39366 - DNA, 620 bp, Oryza sativa
gtaaaaagaactggttataagcgaataatgtagggttttctggtttacacatataaaataattaacaaacttgaagtaccacgcatattaataatactaatttcaacaaacaaacctcaagttttatcttctcttgaatggaatttttaagtttgttctcggtctcttttaactttgtttttgttctgtcaagttcctttcgaatagactccttctctttcatcaaagaagatgatgacaagtatccaccttccttttggagagttaggagctccgatagaatgctatctttctccagctcattttgaatattacaatcctgagtacaagcaatgattttagaacataaccaatacataaagaatttaatcaccaaatagggcttaagcagtcacagacctccatagctttctcacaactttctaagctagatttcaaccgttgaagttcatctttctgatctagggattgttcatctaatattttctgaaatcaatggaagccaatgagagctgcttagaatgaaaatcaaacaatgggtaaaaagaacttaaacatgcataccttctccatttcaagtttgctgagtttttctcgcaaacagtttgaaatgttctcgt

SEQ ID NO: 39367 - DNA, 698 bp, Oryza sativa
tgagggtgtatcaaagtaccagtgtattaaaatgtcaattcctttagtagtaaaaatgcaagtttacattctaaatgtcaaacagttcaacacggtaaaatatataaatataccatggtgaacttgggtagttaaaaagtcaccccctcaattgttttttcactaggaaaacaaagaatgtccaacatcgaaagttcgaaacattgtagcttcccacgtgatggtttctcacgcatgtatagtaattggtcatgacttgtgactatatgatttagggtgaaaattcttccatttgatttactcatgttataagaagacttttcacaatggagggcaaaaggaatagactgaagacttacattttcattcacaccggtgtcaatgtttctttctttcttcagaagtcgttctgattcttcaaaagtctccctgctgcacaaactttctagtgtcagtagtaaatcagctagccgaacatttgagcctacggcatattaaacaacagatggcgatgtatttgttttcttttttcgaggtaacggaagggagctcctacattacactatagaagaagagagttgatccagtttataagggaaaaccggaccctaaaaccttacaacggcacggttaattatggaaaaccagcgaaaaccccggccttggacatactgaccccaagaccctaataacagcag

SEQ ID NO: 39368 - DNA, 571 bp, Oryza sativa
caatgtaatggcattgcatgaacagagagctcccataattcaaagaatgaccacaagagaacaactacttgaaccagagcagttttaacagttagcgaatcaagatattctgagttgtgcactattagaaattcagtcaccctattgtgcataaggaaaagcagacactctgcacaagatttgctatagttgactgcagtattgcattacaaccacatgaaaaaatagaccagatcaatattgtgttgcttatgagcttttatataataaagttttgtgcagggaagcagcagaaaacgcagggacagtggaaagggaagaaaagcaaaaaaaaaagagagaaaggaagaagaggttaaactagagagaggggaacacaaaacaaaaaaacctccatcaattaaatttcctccaagttttcctgttctatcctcaacacacgttgtttttcagaggaagggagtggtggaaagggaagagaaagcaataaaaattaaaagatgggaggaaaaggtgaaaaggagggagggggaaacagagaacaaagagacaaacccccatgaagtaaaaa

SEQ ID NO: 39369 - DNA, 513 bp, Oryza sativa
agtagtccatcagacatgtagacgcaatccaaaaccttggcagctagttgtgcattttttccgtatgttgtgtcagaatgttctcttgtgaaccacttgcaaactgtggaaatgtcatcaatgagctgcatttaaaaaaaacacaatagaaggtgggtaaaaaaatcatatatacaaaactagggattaacaaaaggaaaaaagcacataaatcattataaaaaatgtattcatcatttaagtgtggcgaggagagggattgaaaagggtgattataatctgattggtaggattcatacaataggagtgactatattggagcatacatatacaaactaggaaaaaacaatttttttaaaaaaacagagcatttggaggagcaaaaaaaattactcgtgggttaaatgatttgctatggtattgccagagagcatcgttgcatgacatgttgctattgttgccctgttgctcaatgcaacgggcccctgaacatattgcgtcataacttaattt

SEQ ID NO: 39370 - DNA, 735 bp, Oryza sativa
cccctctgtcagcttcagcagcggcaacgcccttcgctgttgcaggaacgacacaaaccttacaagcaagttaaaatatattataaagaacgagtaagtcagtaatttctcaaaacctatggacgagtatttcaggtaatgtttaaaagaatgttatcctgtgagcaaaacatctgatcggagagaatatcgtaattggatgggcaatcgggcacactttttcctctatatttatatgttgtgtgctctttgaaatatcagcaaggtgatatgttggactgcgatctctcttatcacaaagtatgctacgaggcacagcagatactggaacttctatagactactgttcttgtacttgagtggtttgcacaggttacaagacgtttcgactttgattaaagttaaactactttaaatttgactaattttataaataaatatgataatatatcaaaaggaggtagtatgtcaaagttaaaatatcttattacctgaaacggaggtagtatgttattacaattttcagagatatatacatgtatcagacaactatactcgaccataaggatttggactgggaggatccaagagcagtcgccctacatacggcatcagttgttctcgtgaagttctagctaaagatgatcacatatgcattctaaccccagaaacagtaagagtaataacataggagggggtctgtcttcggatctcgtggatatgtgatcatcttga

SEQ ID NO: 39371 - DNA, 721 bp, Oryza sativa
  unsure (1)..(721): unsure at all n locations
acatcacttggatattatcagggacactacacatacaaataatttaattactgagtgatatgttaattaatatgacatgaattatctattattatatactaaagatccgttagatatcctacaaattctctcaagctaccacgtggcttcccataaacgttcctaaatcaccacatgacgctctaatatatctttatataaaaaattttgagaaaaaaaatcttacccaaaccggtggacctattttaaaatgttagatctatatcttaaaaataaaacctaccgatcgatcaggctgtcaaaatccatatgtacaattcacatatccacttccctcctcacggatgagacgaacccactagctttcgcctcttttttcttccttacgacaattaagttaacaactgaataaaagaaaatcctaaaaagaatttaacaaaaatggtaggcacattactttataccattagacatctaacaacttctactaacttaattatatctctcaacatgtatatgaggtctatttacctatataaatatgtaaagctaaatcaatctacaaacgtacaaatgaaatctngtaaatccatctatgaatgaagctctttttaattactatgtctgtcctataatgaatcctacaattttataggaattaagaaagaatgtaaaaatatactaagattcccctctctaaataaggctcattaaatatgtg

SEQ ID NO: 39372 - DNA, 650 bp, Oryza sativa
agggcgaattcgagctcggtaccccattacattgtacaaaggatgtaatgtcatttttttttcatctatccaaatgtacagggcacagagatagaatcaaatgaagactatgggatgttataggttatcacaggagggaggcatcacctatacaaatttaatccagcaagtctctgtcttacctaatgcaatttttcctggtgctcaggtggcagtgagtagaaataaaacacatattaaatgaaaatgtttaaactaaaaactttatgtgcacagtcataacccccactgtttttttttttttgcaaaacagggtggtcttaccttgctccaaaacacttgtggcaatttcatgcagctattgcaagctcctattgaatcacaagtggtggtggctgctgatcaccagtgcttcagtggtgagattacagagatctgctagcggtgatgagggatcagatcagaatatcccaactagtggcccaaattttgacaatttaaggttttttttaacttattacaacaaaaagaaccgtgccaagaaattattttagaaataaatcacaattcaacatcgtctaggatgacgctgaaatataatgtatccccgcacataccttttagcgggtagaacattatcacattggcac

SEQ ID NO: 39373 - DNA, 741 bp, Oryza sativa
agggcgaattcgagctcggtacccgtctaaattcgtagtactagcatatgtcatattcagtactaggttggttttttatgggacggagagagtagtcaaaatctgagtggatattttatcatatcacattgttacatcgaacttgccttgaggcatgtaaaaactaaatgatatgccctgtttagatcccaccctaaaatttttcaccctgtcacattgaacgtttgaacacctgtataaatattaaatataggctaaaaaataactaattgcacggattgcgactaatttgcgagacgaatattttaagcctaattactctatgatttgacaatgtggtgctacattaaatatttactaatgatagattaattagaattaataaatttgtctcgcggtttactggcggattctgtaattagttttttttattagtactcaaacacccccatatgacaccctatataatacccgatgtaacacgtcaaaactttacacccctggatctaaacacccccttagttctttcaaatgcctagctccaccactatttacattccatttcctcgtttcaatgtggcttaatatgtaggggtgaaaaccgagcggatttggacggacagtggtcataccatattctaaaccatattttttaagcggattcggagcggtgtggatagtgtaccgatgccgatgcggagcaaattgtttctgatgtcagaaatggtgtgggagtagtgc

SEQ ID NO: 39374 - DNA, 738 bp, Oryza sativa
taataatacaaaagatgtaaataggataagcatttaaagttgaacacgaaaactcttggtttcatttacataagacgaatggggtagatgctaaaaaggaagtcgtcttgtaaggacagagtaagtatttagggggatagcaattaagtcggggaggcattttaatccttaaggggatgtcccctagtatatatttttcttccaaattccaaccaaatacttaaaagaaaaccatttaaaaaaaacaatgacgtggatgtataatgggaaagggggtacacgttgggtccatccgtccatggagacgtacgtagggggacgcgaagctagggcatcaccatcactggccagctgccagctgccagtgcatgggcacattctgacccaaaaggcttggccagataaattttccttgggttttccttatgtacccagtgcaatcatagtcatttaaccgtgcaacaggaccttccattaattgggggtctggtaaaaaaacaagggttccaaggcatgcccgattatttccctaaaggtccttttttaaatcaaaaaaaaatgatttattccccccactttaaatccaaatgatgttttaccctcaatttttaaggactggaagtttaccctcaattttgaattttaaccaaccgttcacgcccactgttaataccggttgggtaggtcccacgttttgtgttaaagaattgcaaaggaaataaatgatgaactactgta

SEQ ID NO: 39375 - DNA, 653 bp, Oryza sativa
  unsure (1)..(653): unsure at all n locations
acagtagttcatgataaaataagaaattagaaaaatgaaaaaagttaaagtagaaattaaatttaaaaattacttaaattcggatttaaaattagaggtccgattattatttaccccatttggaatttatttaaaattcggattaaaaaattaactaaaatacgaaatttggaaaaaattccgagaagttcttgtccgattttaatttaaaataacggtaattcaaatttataattacccacctttgaaagaggagtccttagagaaaaccattacgagattaataagatttcagaataaaaaataaattaaattctgaaattagaaaatttaaagtagagttcaagtaggaataccattttggaacaacatanagtgggaaagaaaaatagaaatataaaataatagtccgtataaaacacagtacgagatcaagtaaaattcgaaataaaaaacaaattgaaattagaaaaagaaaaataacattttaactaggaatacaatttataaataaataaattgctaataagaaaataaagactattggaagaagagaccatctagaacccacgatgagattaattaaattctgaataaaataaaaaattcaaaaatataaaacaattattaaagttcaggtggaatataattat

SEQ ID NO: 39376 - DNA, 662 bp, Oryza sativa
acagtagctcatcatgtccacatatagtacttgtttcgtgaaaaaccaatgggccttcttcaccaaaaacaatttaaagccacttcccttttcttactgcccttgcttaacctgctgtccaagtaagtactaatttcaaatgcaaggttgtgtaccaaagctacaacccgaaagtcaaaaatgacctgatttaactagctggtaccactcgccctacttgtttattcgttccaactattctatttgttggctggctgaaccaaggaaatataggcctgctgacttgtccaattaaaagtagctttcctactagtggttccaacttaaccaacaaccaccggattgagcgcactagcgcaaaagcgtaacacgcgcatccgttttcttgctccactcataagaacaaatctggtaatcaagaaatgaaaaggtattggtatatcaatgaacacactccatagagtttctgctcaaatcagagtgttgaaaaattaagaaacagtttcatcccgcctttccactaatcccccgattttcgctcaaagctggtctttcatttcttcccctttagaaggtctttactgcaactgagtttgaaagcttttactcatcaaatatttttggccagcaaagtaggtatcaatctggttgaaagctgcaga

SEQ ID NO: 39377 - DNA, 571 bp, Oryza sativa
tagataaaaaaatgtttcatagttcaatttgtaatttttgtttggataactattgatttgattcactattcctggttgccaaaagaaggataatgaaggaatattggccacccaattggttaaaggattttcaatcttatttggatggtatgccaaaccccccaggctgaatggggccaattgtattatttcgttttagaaaaatttaaggatccggatcttaaattcttagttaattattaaccaaaccaccattattttaaaaaataaaacttgtacttaaaaaatcttggtggtttaaccaaatggataattctcttttaatttaatcctaacccaaaataaggaatggaatggcaagggtcttcccccattgtaaaggggccaagcggtaaattggaattatttttataacttctccaaataatgtaacttaaaatcaatgatgacagggttaattttttctcaaaatttctaagaatatttatgattttcaggacatgacacgtggcggcgtaagattttttttggaaattaaatctaatggttgaaaataacgggtctatcgatt

SEQ ID NO: 39378 - DNA, 591 bp, Oryza sativa
ggataagagagattggtcccaactgcccttgggcaagaaaaacggaagaactttttattgggttctccaaccgaataagttcagaaggatagccgaacgactggaccataagtcggaatggttcggtaaccagtaagctccgattctcccctttttgggggaaaagctgggggccctttgggggtgtaaattctttggacgggccgccctttttggtcggtagatccggtcaagttggttttggttaacaagggcgaagttggtttaagttctaatgacgaagtcttttgggccctggtgacaaaatttttttaaggaataaaaaaggcctttttaaccggttaaaaatgggaagtggtccataacgggtaattctgggttgggttcgattacgcaaattcgggaagaatcggtagttgggccctggatccctttggacctggaaaacgtgtgaccatgggtcggggtttggtgaaccaacaggtcggtcctttaggtgaaggatcgggccccttttttgttgcctaggttacgctttggaataccccaaacggggaatgaggtttattcccccccattttcactttacgc

SEQ ID NO: 39379 - DNA, 560 bp, Oryza sativa
acagtagctcatcacatattttgtatataggaaaatataaggatacggatcttaaattcctagtttaattataaacagacaaccattattttttaaattaaacctggtagcttaaaaattctgggtggtttaaccatatggataattctcttttattttagtcctaccccaaaattgggatggaatgggcaggggtctgcccccttgtcaagggggcaaggcggtaaatgtgattaatttttataccttttccaaataatgtacttaaaaatcaatgatgacgggttaaattttttctaaaattttctaagatatttaatgatttcaagacatgacacgtggcggcggtaggattttttttgtaattaaatctaatggtttgaaataacgggtctatcgatttaattgaaatattttataatttaaaatgtgacatatggtgacttaagtgggctctaaaggtggttaattggcttttattgcgtagattggttaatatgaaaaatacatgttttcattctggtataaattttcaatttcattcaagtgccctgcgagga

SEQ ID NO: 39380 - DNA, 748 bp, Oryza sativa
gcacaggcgggcacgcaagggagctagcgaggccggcgacagagggaggcgcggcgggcggcgacgtcgccgtggtggcccgtggccaacggcctacgccttgggtggatttgaattattttttttaaaatttgggaattccaatgcagatttgattttgggaataaatctaatgaaggaatttggaattgggggccgaatgtgattttgtaatgttttgggaataatattttaaaacctggtaatgaaattttttttaataatttggtgatgtgggtgtggaaaataatcgattggaggattggagaagatccttttggtctgggatttgtgaagatcgatttgggatttcacaatttggggatgattttgggatggagtgaaatcaattttcaatgttaaaaacaatgaaagaaaagaaaaaaactggcaaccggacctggcttggctccatctttagtctcgattggtaacactaaccggaactaaaaatgaatttttaatcccggttatttcacctcccggattcatggtgccggttgcataccgggaatattgggggttaccaaccgggagtaaaaccccctttctctagcagtgaactgtcaaaattttggcaaaaactttacggatattttaagtaggtatctaatccgttaagattaaggataagaattaaattaaccttaaaattaatttgatcctcgacttgtggcaaacataaaattcctttatttaggatggagcc

SEQ ID NO: 39381 - DNA, 709 bp, Oryza sativa
actcatgatgtttttaagcggccccattgtaatatcactttctatagaaggaaagatctcctgagagagagacatttttatgacagattcagatgccatcatggctaggccatttcaaattttcaatcccttctcttctagtactatactgcagtttttttacccaaccctgatcgtgcagtgtgtacttgttggaacttgtcaaacttttatggcaaattttagttgttgcagggttgacaaatggggagatgaatggttggtgctttggtgggcacctgatgtcttggccatttatacaggtactgtggttttgctgtttgtacgtagtatagatggtagttagccttggtgtccatgtgccaccgtgtcatgagttggctggaacatgttacatgtatttggcttattctaatttggcttgtctgatctgatcgccaccaaacgctcaacatttaggcgatgaaaacagcgagagatcgctggagataacataaccccgtggtgttaatgaccatcgggtatcaagctcaccaatcttgatttggtcatggacattactaatcgtactcttggaagtttctctcttcgttggttggtcaggtctattgggacccacttgcagcgagaggagtggtgggcccacccctcgtggcgcaggtcgatgctggactgggagtgacgggcgcgaatttttgggctgcaggaa

SEQ ID NO: 39382 - DNA, 731 bp, Oryza sativa
ttcgctcaatgtactaatacttctccatgttttttttgtcttcatatttattggaatctggggtgcttattttttttcctaggtagttttcttttgtagtttgcgagagatgaaattcgatcaattatttcctatttacattagtattgtttgcaaaggtatgctactatttgaaattcatgtatatttctattccttatatttttacctgttttcagcttttcttacaactcatctcaatagttgtcagttgtgacatgcagactgtactgtaataaagtactctacagtcatttgttctgttcatattgctagctttagcttgtagggaacacaccagagtctgtaggaagtccttatatatcatatgctgaaattcatccatttgctactagaaaaagttttttttttccttttcttgatataaccacaataaacttgaactatttcttatcttcattatttgttgcttttaccttctctgaaatttgtactcactagtgaaatgttattatgtttgttcctcccaacagttgtgttgatttgagtaagtgatttgtttatgaggctatgtgaaaatgtatgacaaaaattcagttctgattaattggtaggtagatgcttcttgtatactttatttagtgcccatgtaattggtggctcaaaatacatcgcaactctttaatatcagccatacttagttactttatggcattaatgattaataccaa

SEQ ID NO: 39383 - DNA, 686 bp, Oryza sativa
cccgcgttctgctgccgcggcgcgcacggcacggcggagacgtgccgcggcagcgcgtactcgcgggtgttccgggacgcgtgcccggcgtacgtcagctacccgtacgacacggcggcggcgaggtgctacgcggaggtgtacgtgctcacattctgtccgtccagatggggcgcgggggcagatcgtgtggcccaggcttgacggatatgatgtgagacgtatcgagtagacgagtaacactccggcatgcgtgtatctaagtaggagtagtatgtactatatacggagtatgtatttatacgtgtactattacgtatttacattcattatcgggcgaacactttcgttatagggttaattaagtgcttcctcagttttaaaatataaatatttttagctacaaaatctaaataaataattatctatagatacatagctaaaatgctcatattttaggacgaatgtaataagttgttaaagttcagtagttctctgtaaaaagaatatcacgtacgtacacatggcatttcatagtcgcatgcatagtagaattaaaatgcctattatatcctcacctataccatagaaaaaataaagggaaaaaaaagcttggtacattaccatgcaattaattaagtaattactataacgaattaaaacactggatttgatagatttcttat

SEQ ID NO: 39384 - DNA, 519 bp, Oryza sativa
ggcgtcaaacatttaggaaaggagggagtaataaacatgaatagcaagtcgatcataaagttgagtgattctttatcttggttataatctgaaattccgaactgtgatcttctcccaaacaatatgcttacgtgttcactttcatttggtggcactattctgctgcagcagttcagcaaaaataggaaacctcggcaaatagcaatttcagaatcactgcattatagccaatagcagtcatctgatcatgcacacgacacatgactggatatttgcacatatggtttatattgtgatcatggattatttaattaaagtaatcagaaaacaatggtttcaaacacatgactggaaattgactgcaacttaagcccagtttttgcaccaattaagcactgcatccaactcagggccagtcaggacacaatttacccaataaaactcaaataatgacttgacacaaccaaaaaacaggaaaaaatggaagaatatttgactcataaaactcaaataatgttg

SEQ ID NO: 39385 - DNA, 657 bp, Oryza sativa
caatttttaagaaaaaatcggaaaaaaaatcttacgatggcacgattaattataagaaacgggaaaagaaaacacgaggaagaaaaaagcactggtcgatctgccattaactcctggagcttttgggttgttggcggatgtggcttcatcttctgctgctgcttcttcttcttcttcagctgcgaagtgcagtggccccacatgcagtagaaggaggaacagtggtacagtactacagtgtagctgtgtagtggctgctgctagctaatctgaatgtcgaaagggaaaaaaaaaagggtcatggcagtagtccacccaacgctatggataggtagactgttgttgttaatggctacttcgaggaggaggaggaagaggacgacgacgatgatgacaactgccagcggctcatccaactagaactgaacgagaactgaactttttagaccggttcgagaacacaaaccagtcatcaattatggcaaaattgcatgaccattctaattatcatcttagttttgagatttcaccttataacctattttattgcaagaactcacccacccaacgttatccagtcgaaattgtttcctttgcgcatatgaaaagttaatttgtcggcccactttaacgctcggtcgctccgccttcgggggc

SEQ ID NO: 39386 - DNA, 530 bp, Oryza sativa
cctttttttttttgcatggccccgttgctgcatggtttatatatatatatatataaaccatgcatatatatgtttcaatacatatatatgcatatatatatatatatatatatatatatatatatatatatatatatatatatatatatatatatatatatatatttatacatatatatatatatacatacatcatatatatatatatatatatatgtatatatatatatatatatatatatatatatatatatatatatatatatatatatatatgaccaaaatatatttacattatagaaaatgtttacacatgcatatagaaacatatgtagtcatgtattaattacaatccattatatgtcctagctagctacgatttcgacgtagtagtagtcactagctcagaagctaaggacctatgaattgtgtttccgtcgtagtaaaattcacccttgggatcaaggatttcttcgttgctgaatcccatgagttgttcttgaaccgccgcgataaattgggctgcagga

SEQ ID NO: 39387 - DNA, 925 bp, Oryza sativa
tattccttgtcccaggaggcaaggtacaccaaaaggtgatacaattcagagtttaacaagcggaagcgtaaatagttaattattacatgggcagcgacggcccagcacactcaaagacaatgaaaaacaacggaagactaaggcgacgaccacaggcgcttgacggcaggcacgagctagacaccaaagccttcatcatccaggggctcctcttctgggtttgggaaaaattgagcaagactgagtacaaccaccgtactcaacaagacacacccacaagtgcagcttaaatacaaaggagtacaatggagttatagtataggggctaggttttgcaataaacagcatttaaaggacccttagttgctcaaagctaaatttaaaacacgatcctagaactatttaatattattaaacaaggctgtgaacccacacgaacctgccttaacccaaggcctacgatgattcagaccgaactggcaacccgaccctgggtcccagctcgtcccaagccaacccaggccaaccattccacattttagttattaagcaagttttaagaattaaaaacactaacttgggtacattgctaggcttgcccataaccgagggcacggctattcgaataggttttactctgatcagaggtgtacatctttacccacaagacacgtcttcctcacgtgcaaccacgtgccacataccaccacggcatatggacggaagacatgacatagtttccaacccatcctagccatagacaagagtactgacccaacccacctacggctggaacccccggacaggcaggcagaattgagcccctagcagcaagacaccagccctgtgccatgacatctcgactaccgggccgcagcccgtgtagccttcatttgtcctagagatgtccatcgacccccgactt

SEQ ID NO: 39388 - DNA, 853 bp, Oryza sativa
  unsure (1)..(853): unsure at all n locations
cagatcgtacagtagctcatcatatttaataaaccctttaagaagctcttaaaatgtgcactcatattttctggatatttcacaggatcctgccacgacattatatagaccatatgtcaattttgacaatgaagataaggtatttgaaaaatgaagtcaatgagccaaccttgacaatgtgccgtataagtgcatagactgaatttgtataaaaagggggctgtccaacaaatagttcatacctgaccaaccaaccagaaaagttagcttgaggtgtcaggcaagttggaagtggtggaatattgttttatatataaaaaagagcagagcaatgcatttgccatgatcattttctagcagaaagccaccaaccttgctatgcaaggctaagtaagggtgagaaagggaagcaaatatacccttaagaaacagattaagtagatgagtttttcattgaaaaattgtgcatggacatcttctaacatagtaaactaaagagaagaacaaatctaggcatcatggcttgcaatttatgtacatttaatccacaaggagtgttatgccttgcttacatcatctgggaacaactgggatgtgcanactgtattgcgatgtaaaaatgaaatggattgtgggtctcactcttcaaatcatgcatgcgctagagaatgtctgaatcaaagaataatatggtggttngtctattatctctaacgtgggtgtgctacagctagccatacagtacacaaaggaacaagaagttgcactcatgtcaaaagtcatgacagagatactattagtacagagcatcgtcaaaatagagcacatacagatgacgcaggacacaattgtg

SEQ ID NO: 39389 - DNA, 665 bp, Oryza sativa
tatactaaaagtccattaactttctagaaacgctcttaagtcgccacgtggtatttctacaaatactcctaaggtgccacatggtactatttaatctcaccgtcgtttttcacttaaattgttggacccattattttacaccattagattagatctattattaaaaaaattaataaattcctcctacttatatgaatacacagagtataactgttctctcgtacgtatgtacacgtacgattgaaagcaattacctactattcacaaaaagaatcatacaaacttagatgaaaaaagacagtcaaaatacatgtatccataaaaatcgatggtcaacagacgtacgtaggagagagaaaggacgactaaattctttattcaatctaatgtaatggtttaaaacactaaacccatcgatttaaataaaaatcgagggctatgtttttttaaaactatctatttatctatctattatatgctaaaagtccattaaattttctacaaacactttaatcatcgtatgtcactcctacaaacgctcctaagatgtcacatggcgctctaataaatcaaagaaaatcataaaaattctaataaaaataaaatctaaccatcgattttcctctaaataaggtggacccatcatgcattgtctaccattagat

SEQ ID NO: 39390 - DNA, 8131 bp, Oryza sativa
cccccccccccccccccgtcgccgtcgccgtcgccctgcgggccaccgccgcctgcctccaccgcccctcgcccgcccgttgcagccaccgcccatccgcgccccccgcctgcctcctccctgcccatccgcaccccccgcccgccgccgtccctcgcccgccccgaacgctcaccgctgccgccccttgctcgcccaccggccaccgccgcgcatccgcgtctgttggccgccccatctgccttgcaaacaaaagagtagaagagtagggagagtaaagaagagtagataagcgtagagagaaaagaggtgagaaaataaggaaaactggcagttgaacacatcaaaatgagaaaaaaaatactcactcaatacaaatatatcaattaaaaattaccaactaaaattatatccattaaaatttacttattttgaaagattatcacgatgaataacatcatagtcatccataatatagtccttaaaaatacaaatataaggttagttggagaatataggagggtatgatatagatgatgtagtatgaatgatctgttggagtgagaagagatatgaaggaggaatcttttttagatggccatccatatgggtatatagaagatcaaatttggatgagatgttggggatgctctaaacccaactccacctctctagttcattttgtgagatagctgggttcgctctcattttaggtagagctaaaactttttggctgagctccagctccaagagaggtggacctgcagctgcgctaaaaaggcccatattttttcgcaaagagcaagagatgagaggaccataatggtaggaagtgggtgcctcgaggaggtaggcgggatatatctttatcttaattgcttaaaaaatttgtatctttccaatcatcagacgcgattttggtatgtgttccgattcgcacgcgattggacgaagcagctgccatccgaacgcccggctacatccgttcctcttcttcttcctcgattcagtctgagtaggaagagcgggcgaacggcttcggcgtccgataacataatgtcgatgacagaggcacctcgatgcgctcccgaactcggcatgatggacgaaggcggcagccggagtggggagcgagggaagaattgggaactctggcggcaagaactcagtccggtaggagagagaaaactccagggtgtcttgatgtaagtgggagataagggggaaacggggaaaaaaaatggactcaccggagttgggagatacgctctaggggaggagatcatcgctccagcgaggcggcagcggaggtggcgtgcacacatgccacgcgcgtgtagaacggaggtagttgctggatctcagcttggttgggccgggccatggcatggctgcgccgtgtgagccggaagggcccagaaagtgcagtcagctcagcagggagaaagttggtggaggggatatatataggaggattggagggatttcggcccaaaagaaatagaagatttttctaaatttttagagggatgattttaatctctatttttatctatactaggaaaacaaaattttttgaaatgatccccttattcccgtgtcttccgaataaatggcgagctttagaccaagtgctatcccttaatatccgtgcgcttgcatcggtcaggttaaaacaattttaattgtgcatatgctttgacagataaatagtcaaaccatgacgattccttgaccacaacagtggagccaaatgagaaattaagaaaaaaatatgtatacgctccggctgataaatagtcaaacttgacaattcctcagccacaacggtggaggaagccaaaggagaaattaagaaatcgtgagaccaaattgattgagatttctgggccattttggtttgatgccaaaatgtgctctatcaaattgttggtattttgaatatagtagtttagctagtgtttggtttgctactaaaatgtgctaataaaacatataagttgtcaaaacatttggcactaccaaaatttgcctacgatttgacattgccaatattttagcgtggtagtaaaccaaacaagccctccgacaccaaatcgacgcttcaacagctacataagacagacgctcggatgtgatctatttgcttcttttgttgcaacaaatttccttatatatagatcctaaaaggaaaaaaaagtttctagtgtattaagtcaacaggctcagaacaaataacagaaaaatgccattgtttaaatctttgtatccactctgaacactggtggagaagtggcttttactaccagttcataaccagtggcggaggacggaaaaaaaatgaggtatggctcatggacacatacctaatcgcactatactgtacggcacaacattgtatcaatatttagcatggcaataatctttggaatcaggcaataatatgcataaaatctgaaaaaaaaaggagagcaaggattgattagggatgattgaatcgggaggaaggccacttgcttcagcttaccttgctgctgctgcttgccttccgcctgccacatcgctcctgctgcctgctggctcgccgcctgtcacgcgcgtgtccctgccgcgtagccgcgccgccgcataccagcattggcgcccagtcgccacttgttgatctcactagatggcactccgcgctttgctgcggaaactgcatcggctacatcaagagatattagtttagcatttattaacgtatttcaataaaaatcatcataaaaataggaaataacatgtgtcctaagaaacattttgttttttatatactccctccggtacgttttggacaatgacataatcgtcataatatatcttttttataatatatataattaataaatgtatttttatttttattaagtactttgtaagataaatatatatatgttattctaatgcctctaaactaaatacttttaaagttattgatagttggagttataaagaattgactttaaccatgttcaaaatatcaagaattatagacgatagttttatgatagactactcaaatacttcctctatttcagaatgtatgacgtcattgacttttcgcataacgtttgaccattagtcttattattatttttatatatgttatttattttgttgtgacatgttttatcatcaaataaaatataatacattcttaacttataattttacatatttatagtaaacttttgaatagaacgaatggtcaaatattatgtaaaaagttaacagtgtcatgcattttgaaaatgaggtagcataatgttattctttcaataaaaaaataatgctaattggtttttgcaacgttgagaaaatcgtagttcaaataaaaatgcttaggaataagcaggatcaaattttggtaaaagtaaaaaaaagaatcatattacaactatgaccatggtaaaataaaaccattaaaaatattatgatgatatgatcccagatgaaaaaaaaaattgtgccaatgtgggtcttaatttgttcgctctattataaaaaaaatacataactcataagaaaaaatatatagatatatagtttaagaaagatatacaacgctttcaaaaatggtaataaaaaagagaaagatttgtgtagctaatatgacactgcaatttgggctggccgcctgaggctttgtgttgagagttggcttggacaggatggtgggatactacataccgacgaacgtgatgctccaagagtaatccaacggctgtggttgtaaactgttgtttctacagtgatctgagagagaagatgggataacgtggcaggctgttgcacttgatgccgtacttcaccgagaataaagactttataggatgcggggagctggatgcggatgcctcccgcagttccaagcggccgcgccgtcgtcgcctcatcgtccgccgcggcggcggagatggggaatttctgagctagggttaagtctagtgaatcacccacatatgcccacattaacacaaaacgagcccaatgggcctacgattcagtggagagtgccccagcagcgagtgccctgtcttcgcccatcgcctgacgccgcacttcgcctctgcgcctgactgccgtcagcggcctgccggagttggaggtggagggtgttggtacgagcgggcggcgccatacctcgccctaccgagtcctctgcaactgttcataaccctttgtagtcccagtttttcaaccgggactacgaatccgggactaaagatcgttatctttagtcccgggtgaaataaccgggagtaaaaatccatttttagtcccaattggtgttatcaatcgagactaaagatagagcatttttagtcccggttggaaatagagttaggctagctagatacggttgctccattattctgttcttttcttcattgtttttaatatattgatttcactccatccccatcccaaaatcccaaatcaatcatccccaaatcctcaaatcgatcatatccaaatacatcacaaaatcttaaaaaaaattacattacaacttctacaaaattcatcacaaatacatcacatattcacatcacacacaaatcaaatacatctcagatccgaatcacaaattctcaaaaaaaaacaaagaaacgcccgctgccgcccgccttgaggccgcccggccctccgcccgccggagcgcggaccaccgccgcaccgctgcgaggccgaccggccctctgcccgccggccgcccggccctccgcgctgcagatcaagaagtggggaggatggggggagggaatggaggagaggcaccgccgggcctctgctctgcatatcaagaagtggggaggattggggagggaaaagaggagaggaagagataaggtgtaaggagctagttagaggatacgaggagccgggagttaaagggagagaaaggaggagaggaagagataaggtgtaaggagttagatgataggaggaaccgggagtttaaggagagaggagcgggagggaggaggagacctcgatccgatccgcgtgcacacctctccgtgtatgtcgatctcttttcccggttggactaaagattaaaaagtacctctgagattttaaaccgagactaaagatgtttttagtcccggtttttaatataactgggactattgtgaaatcgagccaaccgaccaaagatggtttctccaccagtggaacttataaatatcggttactcgaaataccaacaaaatcagtaaacagtaggtcaaaggtaagtaccactggtcatatcgtaccaatatttgggccaagttaagtttcaaactttttcttcaaacttctaacttttctatcacataaaactttcctacacacataaactttcaatttttttttcaaacttccagttttggcatggaactaaaacagccttagattcaaaatcttgattgaaaaactaatttatagaaaactggcttacaaaccataggcaacttattctaatctaattaaaatgttttgattatgcatgtgattacttgtagtatgaaaatttctcaacagttaattcggtcggcaggcaccctgggataattgaatgaccttatgaccaaatcaggtagaagcaaagtgcctctagccggacgtggcttgcttgctccctgcaaatacttctgtctgtgctctcttcgacatggcataaactcatttgtttgcagtacatgcccacaagttcttttttttagataatacatgcccacaagttctgttgtcaacaaagtaaaatattggacgagagctttggttaatagatcaccacctcacacacacacgatcatgttcctaaacatcacggcacgaattaactgttgtgaaagtacatgtagcctagtggttgcagcgaactgagtagcaccttaagatccgagttcaaatctccatagtagcgaatttcagattggttatttgagtactaagttcctaatttaaaaaaggttgcatatattcggttggacatagaatttcagattgggttatctgagggaaaatacccttctaaaaaaacatcacggcgccagagtataccgtccatgtccctctcactagggttccccttaccgtttttggcgcggttaccgcacccccgcggtaaagctttcactgcgaaaaccgcgtggtaaccacaagacataccgtagtttcaaaaattgaaaaaaaggttaccgcgcagttttgtaagccctagctctcattacgtgtgacaagaccttcgccggtgattttttttctctgcccttctcgatcaggtaataacatcaagcggctccaatatcagccgaacagcccagcccaccaggcccacattgccaaaaccctaaccgcacggacgcgccaacgcggcaacactgcaccccatccccaccccacacgggctcggcagaaccgcactcgatcggttgccgtttctcttcccgcagcactgcgccaaaccgacagccgccgcctcctcttcgcaccatatgccactgtcgcgccaacagcacagcagtctcctcctcctcatcctcatgccgcgccgccatcactgccgatggtccttgcgccgagccatcgactgcaccctctccacctcgccgttgtgccaccgtgctggtcaaagcttggcggtgtacgatgagggggtgagccgtgggcgctgggccacgcccgagccaccaatggtcgccctcctcctctccgttgtcccaccgtgccggctattgcccaatggcatgagatgcgggcgtagactatgagcagtataccaccaccgccaatgtttaccgtgcccacagtctcctgatctccttattccttctgccgattgcaatttgtgttcgatttatgtgagttttttcttctttttttttttgatttgtgcgatcttcttttctctctttttcgtttggtttctatctctcttttctgtgttgattccttactagatagcgtccctgttttttatcgagaatgctaatctgcgaccagtcgcgtcacgcgcggagaggggggcggtggacggcgcgtgatttttttgggggaacgttttttttttctttctatttttctttctgtacgagtttgttttctttccgtagtttacggtttccttttttttcgtttttctttctgtatcttacgatttccttttttttgcttttctgtttttttcttttcgtattatttttaggttttttttctaatatgtatatgcaaactttatatatgtacaaatacaaattttgtatacacgaatacaaactttgcatacacgtatgcaaagtttgtatacatgtatgcaaagtttgtatacgtatatgcaaattttatatatgtacaaatataaactttgtatacacgaatacaaactttatatacaaagggaacacccaattgaaagggagctaggggttgatgtggatcagcatctagcccgacagagtctcacaagggttgaggagatggggaaaactgagatgggtaagacaaaggtggcactcagatcttgaaggagggatctgaatgtactttacaggacttgatggaaaaggatatcagacagctagaagctattgcaaggaatggtgagcccaatgctgctgaagatggattcactcagtcagccaagaagagaaggaaaaagaagaaatcgtctgatccagcggttgcaacaagacaaagcatgagaattataagagatggtgtaccggtggctatgaaggcccagaagaggacatctgaaaagaacgacatatcaggtaccaataaatttgcagttttcaactcgttaagtaatgatcatcttgcatctattgctcttgattctggtattgatttaggagataaccaggatactatctttaataatattcaaactttaaaagcaaaggagctagcacagtcgctaatttgtatggcacaggataggttagataagaaggtaggggaggaaagattgcctgaacatattgaaattgaaggttgtgtgtcatcccaagatgctaggggcagagagccgtgtgcacatgggggtgacagcaacaataacacaaatcttgaatgatgaatatccttttctggaatg

SEQ ID NO: 39391 - DNA, 1584 bp, Oryza sativa
taaataaacctctaggaccatgtaatggggggatccccaaaaaattttacgaatcaatacaattacttttacattccaactactgttgagagaaccacgcctttcgacgtggcatagttgtccattcgacaacaatatcataagacaatctatctatctatcatatactagaagtccgttaaacttcctagaaacgctattaagtcgccacgtggcattcctacaaatactcctaagccgccacatggcactgtttaatctcaccgccaattttctattaaattggtggactcattattttacaacattagattagatctattattaaaaaaattaataaattcctcctacttatatgatacacagagtataactattctatggtacgtacgtacgtaccaacgattgaaagcaattacctgctgttcaaaaaagaatcatacaaaaacttagataaaaaaagacagtcaaaatacatgcatccataaaaataatagatggtcaatagaagtacgtaggtgagagagagaggacaggaagagactaaattgtttattcaatctaatctaattgtttaactactaaacgcatcgatttaaataaaaatcgagggctatgttttttttaaaactatctatctatgtatatatctattatatgctaaaagtccattaaattttctacaaacacttctgaatcgtcatatgtcactcctacaaacgcttttaggatgtcactcggcgctttaataaatcaaagaaaatcataaaaattctaaaaaaacaaaatctaaccatcaattttcctttaaataaggtggagccatcatgcattctctaccattagattcatcttaataaaaaaaaataagatagggaaaagacccatgtttttctaaggtggactcggacggtctatcatactatacagcacgtccggttacgagccggtttggccgtggcggcaagtttatcgctaattaacttatctctgtatatacgtagcacaagcggattagctcccatattgtgttactactaactcatagctatatttattatatacacggcaatatatataaatggaagctaggagattaacactaagattatacatatatagctaattaaattagttatatatgatttgtcaaaggagattaacagcaatataacgtagctaagtaaatcagtttgcatgctttgcagcaacattacatagctaatttgatccaatgcatttggcagtctctagataaattgtccagcttaaatcagtgtatctaagatctaatccgttttaaatcaccgtgatgtctttaaaatttaaaaaagattttttaaaaaaacaaaatacatgataatcggttttaacttaaatgtttagaaaaattagaaaaacaaagtcccctccacctcaccctcaccatcacatacgcactaacactttccgccccctccatttttgggcttgatttctcccctctccacttctctctatatctttgggagtaacaatgataaaagagaaacaagcaataatatcgaaacatccatagttatattaagctacatgtctcatatc

SEQ ID NO: 39392 - DNA, 1027 bp, Oryza sativa
caaggagttcacagttactagaactcttatgtgagtgtctaatagcttcaggttcagatatagtatctgggtccactaacatggtaccagcagcttgtgaggcatgcaaggccatttggtatctagctcatgctgttgacattatgtcccttggcacacataatttttcatttccattagctaactcatggagacaagttcatgcaaaactggatggtaaaatgcaagatcaaggatcattgccagcctcacaaaaaaaagattcattatcagatatagactctacccatctgataaatatatttgtcaaatcattcctggcttcaaaaccgatgcacgttgctgtttatcactgctgcataatggtttggagtctgctattcatgcttctcttcaggtaattctatcatgcttttaatatacagaccaatacattatattgaaatgtctctcttcaatgctatgggtctaacaaaatcttaaaaatatgggattaaaaattgccttaattctatcaatctcaattgcgatgttggtgctattatccactccctcctttccatattatatataagtaattttgagtctgtcctaagtcaaacctcttcaagtttgaccaggtttatagaaaaaatgtaccaacatctacagcaccaaatctgttgtgttgaaaatattcaccattttaatctctttttatagcatattcttttgtgttgaaaatattgctgtatcattatataaacttggtcaaacttgaagaagattgagttaggaaaaactcaaaatgacttataatatggaatggagggagtataatccaatcaattagtacattcttcagtgctatttctgttctcatcaacttttggacaatatcatccattgcctttttctctgattctaccatgtttcatcatcaaactactttaactatttattctccctaattctgattttatcatacgagattgatgagtaagaataaaatcaaaatggcttgatttcatttttttttaaaaaaaaa

SEQ ID NO: 39393 - DNA, 644 bp, Oryza sativa
gaactgaagcttcggctctgtcttggtacatgatcgagtataaatgtgaacctagcatctcgctcttactgatgctcatttgttttgggttacaagatctgtaattaatatacatgcgtattttcgttccggtctgatcagcgtagccctgcatgcacacaaaggcctcatcattcactttccgattcccatacgcacaaaaagccctcattattcacacgctagctggtccctatgtatatgcacataaaggcctcatttagcttatacaagaggcagcaagagagctctgagctgagaagagaagagatgagtgttagttcacaacttcacgttgaagtgatactagctccagtgccttactcttgtcagctgtcgcttgcccatggtagcagacttaaggaggcgcccgggggagctttccttctatatgtggactctgagatagtggatcaagttacctacagagcatagagggctacagaagaccagcatgccactcttgcatatcttcagtaaaataaacatgcacgggaatgctctatagtataatcataagaaccaaggattagacgtagttgagctgacgatggataaggtgatatgctcagtaatgatggacatgactatgttgatgatctgaa

SEQ ID NO: 39394 - DNA, 571 bp, Oryza sativa
agctcaaagtgaactgggcaaagttgtttatgaatggcttatgacatacatagcaagttcaaaaagagagtaatcaaaggacaaacatcaaaacccttgccggctgcggacactaacttgctgtatgcatctcttttttattattaaaaaccctcttaagtcattttttatacccataatatttctaaacattgacttattctttttcttttgtgttgttcccttagattaattatcttgattccaaagattttggaattagaagtattccaattggtcccccaccaagaatctctgtttggaaaggcggaatgataaaagagtattcaaaaatggatgaatgcaaaacaggagattttggaaagcgactagtaagtaaaatcaacagaaaaattttattgtgtcaatttgtttcttttttttcttagatcatactttgtttattttctcagatcaaagcaatggagaaattaagttatgacgcaatatgttcaggggcccgctgcattaagcaacagggcaacaatagcaacatgtcatgcagcgatgctctccagcaataccatagcaa

SEQ ID NO: 39395 - DNA, 3008 bp, Oryza sativa
cacaagtcacaactatgctacttttgttttgaggagtacgacgataggctcagactatctataaaacatgcaactgtgacactactgtatatgctaaataccggaatttcaaacttcaaatttcagaccaagaacacaagaaaaccaagaaaaacaacaccaagaactgcagctcaatccttccactccaccaatacattgcagcctctacctccttatcatttccgctcactacctcgtccgtttggggctcgccatgggccgccgctgccacccgcgactggggatttaattgcatcaagaagccttaacccttaggcaatgggcacaggagagaggatgaagatttcttacgagtgagaaggtggccaccgaaggtgatagccgcctcgcaggggagagcattgtgtcgccgtcacctccagcaccatgccatgctacacagccactgctgcatcgcctcctgttttcccgagagctcatttccatcacagggttttttttccacacgtcatgagtaaatgatattttttcctggtccggatgaggggaaattacgtcatgagtaaatgatatttttttgctgacctttcccagcctaaccgaacagggccttagggataaaattggggattttactattacaatcgacttacctcaaagagtatatagatctgcacaagatgagggaaaaactccacaatgcaataccttaatacttataactatcccaacctctcaccaggcgaaatcaagggacctttgtaccgtcaaagttctctttgtataaatcacctagactaagaggtaagatgtacagcagggatagtccgtttcttctgttttgaaatatatccaggtttaacaaactctggaattaggaattgagaactaaatatccacgttggcattagcattcttgtactcataacaaatgaaccgtttattctcgcccatatacaagagagcgcctaattaagcttcagatcatcaacatgagtcatgtccatcattactgagcatatcaccttatccatcatcagctcaactacgtctaatccttggttctcatgattatatatactacagagaattcccgtgcatgtttattctactgaagatatgcaagagtggcatgctggtcttctgtacccctcaatgctccgtaggtaacttgatccaccatctcagagtccacatatagaaggaaagctcccggcgcctcctaagcctgctaccattattcaacgtgaagttgtgaactaacgctcatctcttctcttctcagctcagagctctcttgctgcctcttttataagctaaatgaggcctttatgtgcatatatatatagggaccagcgactgaataatgaggactttttgtgcgtatgggagtcagaaagtgaatgatgatgcctttgtgcgcatgcactgctacgtcgatcagactggaacgaaatttggcatgtattagaaatcttgtacccaaaacatactggatcgaccgaaaaccacaatagtcctgttccaaaaataaccggggactaaaaatcatctttagccccggttaagaagcccacaaccattttatgatatttagtctcggttggtaacaccaattaggactaaaaatcatctttagcctctattgggaagcccataaccattttatgatctttagtctcagttggtttttagtcccgttaagaaagtgtccaccccctactctttttattcccggttggtaatgccaaccaggactaaaaatcggcgcatagtatatagtccctagtacttatcctctagcaaccacctcttcgcttatccttctctctttttttatcctctccctttcatctctctattctatctacgtctatcctctcaggcggcagaggcgagcgagccttctatctctcacgcagcaaagggcgagcgagcggacgcagagaggcgcggcggcgctcggaggggcgcggcggctgacgcggaggggcggcggcgctcggggaggcgcggtggcctgcacggaggggcgcggcggccgatgttttcttttttccctttttttccctctttaactggtggatgattttttgtggactatatatattgtttggacgatttgagattgtggatgatgattttgttgttgtgaatgatttgggatagtggataatgttttttttgtatgatttgggattgtagatgatttaggatgttaggagatgaatcgtggatgagttcggctaaaaacaagtgcaaacagctaaaaacaatgatctagaagcaaataaaaaaaatatatctctactccaggttgataacaccaatcgggactaaagatagcactatctttagttctggttggtgttaccaaccagaaatagagatatttctttattcccgggtatttaaatcgggactacaaatgacgatctttagtctcagattactcctctcggtttgttacccgggattaaatggggttgcaaatcgggagagaagaggtattctccagtaatgattttatactcgtgcagtaccaagagagagccgaagcttcagttcatcaatacgagtcatgtccatattactccatcatcagctcaatgatgcactatcgttggacctcgtgattatacatcacctcactttatccaatggagaattcccgtacatgtttatcttattgaagatatgtaagagtatgatgctggtattctgttcccctcaatgctctagtgcaaacttgatctgctgtctcagcgtccatgtatatcaggaaagctcggtggcctagctaccatgggcaagcgacaactgacaagcctgatctgaacctgttttgtatgaatcacctaagagtaagacgtaaaatatacaacagggatcgatagtccgtttcttcagttttgaaatacatccaggttcaacaaactctggaattagcaattgaaaactagatatccacgttggcattagcattcttgtgctcacaacaaatg

SEQ ID NO: 39396 - DNA, 1320 bp, Oryza sativa
aatggttgggccctttgcaacagggtatgttgtatagtgttggattaatattgtttaattatcacttaactgttttataattctcaaatgtttgctaaatgctgcttttgcaaatgaaaccctactatgccatcctttggtatccttgtgcacttgcatatttgctgcgtgacttgctgagtatgtcatatactcaccttgcaatcattcatcagaggaagagttctacaatgaggctgatggtgtggaggattaggtgtagccttggtcaagctgcctgtggagtggagtcgtctgcgccgtttaatttattttccgctgcttagattttattgattgagaggaactatctacctctgtaatgacattttattcgcttattaattagagtaataattgtactctattatcaatttgttattgtgtgcctcggctgattcctggacgagggttcacacacatgtaagcgtttggaattttggatagaaattccgggcatgacaatcagatagcttacattttagtttctcgcacctatgttgatgaatcttacttagtgcaagatcatatacataagcatggagtagatggatcactcatattctttttccaggttgtacaaatgaaatcccgttacctaacccagggtatcatttgtataattgtcttgagctaactattcccctgcagacgatagaggaatttcgtgctggtacaatacatagagagccctgttacatggcatggagatgaacatgaaggatcaacgtcctcaccatcagtgcagatgtacgaggctgactgggaaccaactgggggatgctcctggatggacccaagtatccgactacgctggaggttcagcctggcagagtgccagtgaacaccgatggcaagtgcctcaagacacatcctatgggaactcccattcctccagcactagtggcatgccacccatctccaagatgtggcgctctagttcctctcgaggggacttgtgggagctcactaggagaatggacacacgagagctgcaagcaggagagatccagcacaacctcgaaggacacatggcccaaatgtaagtatggccaacctctgatgctcagtacgccaacctcaacaatctgatgcagcaacagcaggctgacctacaggcgtactttcgctttcagcaattcaaccctatcaggggccctgagcgaaaagcaagcttgggggagatatctcttccccactgaggtaacttgtagtagattgcatattttgcttttccaaatgcatatttctttcatgcactgcattcatgaacttgaaaac

SEQ ID NO: 39397 - DNA, 2131 bp, Oryza sativa
tgcaagtagttcatcacaattctgctgaggtgtaatatatatccactagttagttactttatggatgttggtgttcttcacccttggcaattcaggacgatagaattaagatgcaagatcactttgtgttgttgtgaagatatgagatattctacacgctgagatcaaaaatagagagaattacatcagtatttatcctgcatgttgcgtgcacaaaagtagttgaggtgttgcaggcaatctaatgatatttgcggccacaagcactgctccagcctccatatgaactgtttatttgtgaggtgaccatcaatataaatgtatcctgacgagcgggtcagatggttattccaaaaattattagaagacatgtgaaaaattaaccttttttaactctcctcagatggacggcaggaaaccatggatgtgtagaactcattcagctgtacgaaaccgagcatatatttgctacaatcagagttgggaagaactcgtagttgtagtggcgtatattttgtaccgaggctgctgagcagtttttcctcattcagaggctgccttattttagcttgctgacacccgcacatacttaattgctaccgtactgctttcagaaaaccacaggatccatccggaaccacatagaaaaacagaaaaacggttcatcccggacgtccgatcctgtgattcacgtcggacgctcaggacacatagaatgccatttgcagctgctagggcccaccacgtctttaccacacacgcccttgtgctgcacgtgtccccactacatattccgttgtacaaatcacccacatattttgaaaaccctctattaagggaattcattctatttttctccattaaaaatatttcacctaatgtactcacaatgtttcactatgtatagatataatgttgcaatgaattgaaatattcttttgcaacacatcacccacatattatggacaccctctattaaaggaactcggtttatatttttgttcaccaaaaatatttcacctagtgtacttataatgtttcactttgtatggatcaaaagttgcaatgacttgaaacattcttttgctatttgctgaaacattatttttatataaggtgaaatagcaccgatttaaacgattaaaacattttcgatctacctagtgaaacaattccgatatacttggtggaacagcgtgcaatatttaaaaattattcaataataagctaaaaaaattttcatcggaatagatccatgtgtggtgttgttttaaagatttaattgcaacaaatttaatggtgtaatcggatcatgatttggatacataatttaggagaaaaaatagtttaaaattgttttgcatgcatgtattcttgatgacgttcggatggttgacggcgtgcgcgtggatcggatggcccattgatgtgtctgatttttcgtctcgcgccgcacgtccgaggcgtagtgctctccagaaaaacaagcatgcttatcttgttgctaaatgtactgaaggagctagagggatgccttattgttgtgatggctacaagttataacttgacactgatgatatgatctcagctctacaccattttttcttactaactttctcgccaatccgtagctgaagataccaagttagcagtgtgaatcatgatcaaaccatgacaaggtctgtgtgctatagcctgtagaattgtgttcatcaggccttcaatcaacttttgggttgcaccaacaagaagatctctcttaatatgtgtactgtttctcccttcttccgtatcgtttgagcactctggcttccccttcataactgatttttaattcagaaccacatgaggatttcctactcagtcttataaatatttagactctacaccactacagattttcttatctgtaaccgcttttcccataccgggggcttgcggaccgtcgcaacatcgtcatctctaacgggctaaaaaaaacaccgacaaagatatactcgtgagtgaagtatgagcccgtcacggatgatctccatcggtgacgggctttattttgcccatagtttgactcatctggcccgacacgtggcttagccatctttagtccccggttgttgtcgatttttagtcc

SEQ ID NO: 39398 - DNA, 1129 bp, Oryza sativa
cacacacccaaaacatgcataaacaataaagatggagttcaacatttatcaggtacaactttgaccctttttctctatacacataaaattatttttttgtactataattaatttattttatagacgtaaatagtaacaatcagagggggggaatcaaaatgtctagaaagaataaaaagattatctagccaaatttatatttgcacaatcatgttagatgttttttcttgttactttttttttattttttatgtggatgattttttgttagcaaacttcactgcaaacatggggaataggaggcttgagggacaacactgtgatgaaaacgagtaccaagatgactttgcagaattcttatatgaagaggaaccatcagataacatcgatatggttgaacaacgtgcggtaataacctctgattttttttacttgtctttttttttcaaacatcaacccttttttgggtatgctccttattggacaatttcatccttgcagcaaccacaaataaacaatgagcaaagtagccctcaaacaccactgcacataaacattgcttctgcaaggacacctgctacaaaacaagtaatgcaaattgtaagtactttcctctctattttttgcttaatttttttcaatcagcatgacataaaactatgtcttatactcttaaacattattacaataaattctgtttttcccatttttcacttgttttattttttaatgcaaagttcacaatcatcacctgatataggtatgaattctccaagaatagcacaaatgagggaaccaaatcaacatgatcaaccagaagaaagacaatattcaatgacaagaatcatcgactcactaaatgcttctggcaactgttctggtaccagactcaatctttatcgccctaaaagaattgtacatccaagtaaatacaagagctccccatatgacaattacacacggcaccaaacaatcttggcagctgaactcaatcactacaacaacatactcagcattggtgagacgcaacaatataaatagtaagtgtcacaaaacgacattataatggttgcatttttacatttgctttttttagattgtgtgatcatttcaagcttgtagttttaca

SEQ ID NO: 39399 - DNA, 529 bp, Oryza sativa
tgtgtggaatataggatggacttttggcattgtttgatgtgtggaatatgtgatggacttttggcattgtttgatgtgtggaatatgtgatggactatgtgaggactatgtgatggacttttggcattgtgatttgtgcaattggaacttgttttagtccgtatgaatttgtgaattgtgatttgaattgcgaactgtgaattggtacatttgtgcaatatggatcttcaatttgcagggaggcagagcgcggcgccaaccaccctggcgccgcggttaaggagggcggcgccagccagtgccgcgaggcagaagggtttcgggctggggggagggcggcgccaactaccctggcgctgtggtccatgagggcggcgccagccgaggcccggaggcagaagggcttcgatggggggaggaggggggcaccagccaccctggcgccgcggtctgggggggggcgccagccgttgcccggaggcagaagcgaaaattttgagggggggaagaaagttggtggggcccgtag

SEQ ID NO: 39400 - DNA, 507 bp, Oryza sativa
ggctatggccggccagagctggggctggagccccgaccagccccaacgatggattcgccgctgatgttagcctgctggagtgctggtctttagaaagttctgcctgggcattgcaggaaatgcaatgcaggtactggccctgccatgcagcaaatcttggtggacagctggctaagttccttgttattgtaacaaaatattttttagttactagaagtagtatattattggaaatgatcttgatatttttgacgtacaaaacactaactttaactatctgtttctctttttctcaagaacacaattttttttattctttttaattgatccaaggaaaaactttttcgttgtggatgtactttctatggttactacttacgccatttggcctttttcatatgtaggtgcaagtcctgagttttattctggttctccttaattatgttggggacgacaggatcattccatttgtgagcgagctatcacaattttttctaaaggtacggg

SEQ ID NO: 39401 - DNA, 649 bp, Oryza sativa
actcatgctagataatatgcactggactagtagatgaacaatatagcctaattcaaatacatacaaaatgttaatgaacctaaggatccatgggtattcatcggtttctgtggctttcatgttatgtgaaagttgcatcgctacctttgctcctgctcaattatgcaggttctgtggatatctatctattgatctttcaaatggcaaccccaatatgtgcatcattcgtcgaagaattgcattgttacttggacaatgtgcttttgaggttccgttattaacttcaatattttccctcagatattaaacagaaattagaagcagagaacatgttaaatttcctacttgtgtgtctgctttaacataaaaaataataattctacagataaagggcgttattcagaaagaggtctgcgatgctttggttggacttcttggggatcaggacatggccgttagggtatgtatcatagttaaaaaccttagcattaaaagcgagaaatcctttttctttagtttactaattctgctgtcaactttcagctggcagcatgctcttccctatgttacgctttccgagtttttggcatctgggaagtagatttgcttgagtgtattcctacatgtgggcaatgtgcttcaagttgat

SEQ ID NO: 39402 - DNA, 3129 bp, Oryza sativa
ggaggcaagagatctagccgctcccgacgccgccaccccctcgtccctcctccctagtccgcttcagccgggggcggtagctcagtggtttcaactttaattcttagccggatttatgggtgctggtgttatgtttgaactttgaatcctcaacactcaattttctttccacttcttttttctcccttacctcacgtgaagaagttaccttaacaagatgagatagtgaattcagcatcctcagcatgtttctttgccgtctgccggggaagttgagatgggggatgcctggtggtgggtttagaagggaagaaggggccaaaaaggagttgaagacggagagagcgctaggccgtggaatcgcgttggccgccgggccatctcactaccgtcacctccaggacaagaggaccaggggggaaagaccatgtaccccatgaatcaaagggcgcaaatgagaggaaaatgggatgcatctacaggggcctctccggcgcaagcaaaggtgagacggcatggaaaaccgctggcaaaaaacctcgtcgccaaatcaaaaggaggagcaatgagagattgcggaggtgtgaacagaagacatcgggtaaggacaggaacagaatggcgctagctagatcaacctggaacaggcttttttccatctctgtcttgcccctactaaatcgaaggtcggatttgccacctcctcgaggatggtaaaaatactattaaattaatgtaaaagtattatcttatatgaaatggtgtaagaacggaacgattataaggtctcattttgtaaaatttcgttgcaacccacgggtgtatatttagtttagggtgtgtttagttcacgctaaaattagaagtttgattgaaattgaaacgatgtgacggaaaagttagaagtttatgtgtgtagaaaaattttaatgtaataaaaaagttaaaaatttaaagaaaaagttagaaactgaaccaggctttactatctgtaccgtacatgctgggcctgctgccacctgtatgattgatttgatattcatattgctgccgtcttacgccgctcgcaccgtcgttgcggccggcgcacgtggtgtatccatctatcgcgctgtctccccttcttcccttcgctcgtgcgcccgcgcactaccggctgtctgaaacctaccgactcgcccgcacgatgcactcaccaccaatctagctactacagtactatctctatctgctaattcggtctggctccgttggccacagcgcgcgcgcgcggacggccagcctaatcaacggcaacaaaacctgcaggcccgcacgcccacctgaatcacgcgcccgcccgctcaaaaggccgggaaatccacaggtggatgagtggatcgggcgtgacgcgagaccagctcgcgcgcgcgcgcgccggccgctagctgcgctgcgcccagacgcgggctttgccgctggatcatcaattcatcatcgatctcctccgtgaattcggggttgtataggtttgtaggaaagcaagtaacgccgtgctacgcattagattggatcgtcggtgttaggccatataacagtcgtagcaacatgcgcatcatgcatgtgacaggtgctgcaggcctgcagggctttgcttggcgaaaatcttgagagcctcaccttcccagccagcagctgtaagataaggacgtaacacagtgatgatatgctgttttctcttcttaatggcagattaatttgcagccagcgtcacatgcaccaggaggatcagtcttgggataagcacagtgaagagtgcatctaattaatatctggtgagaagtactgtagaatcttcactgttatcttactctctttctttttctatcttaccttctcttcttcaccaacctggcccttctctggttgacagctccacgtcgatttcatcctttattacagtatggttttatctgaaagattattccatagttcttttcaattggatggttttattttttttcttttggttttctaagttttatcctccaagacaatgtattagagaatatccacggaactcaaagttttatcctccaagacaatgtattagagaatatccacggaactcatctttagtcccagtttataatccctttatttctgaatcgaaaaccggacatccaatccggaactagagatggatcattaccaactagaactaaatgtgttttttttctttttttcattgttttttactgtttgcatattaattttcccaaatcaagttgctctctacactacatccccaaatcacagattcgcaaataagataatatcacggattaacaaataacatcatagattcacacattcaaatacatcacaaattcttaaaaaaaaaaagaatgaacatgcgccgccgccatctcctcccctcccaccgccggagcaagagagagagcttgagagagagagagagggagagggagaggggatcgagagaggcgccacacacatcactaagtgctagttatatacgccgcgttaatctatagtctaaagatagtggggggctaacactttttgaatcgggactaaaaatgatcaaaaagtacagctgggcttttgaatcgggattatatatatcttttagtctcagttcctaatagaatcgggactaatgttatttttagtatctgagtaaagatcagttatccagtagtgatcttaccccagctcctataatttggttttaatctatagtaatatcttaagttttccaaaagaaaaaaattacatcccgtacaacatgggcctgaattcttccaagaccgtatacaacgtgtttatactgagtcttgtagtagtaacttgtaggaacgccaactcaccatcaagcaaaacgtgtttgctccggttggccgtcggcattctaaagtcacgtagaacacgcgcgcgcattctaaagtcagccccggcccgcctgcatcagcatgcggaccggcccggccgcgctgtcgtgaactcgcgcaacatgcgcgcgcgtgcgtgatgcgtcgaccgatcgggacgcggccgagcgctttgctcctcctccacctcctccgtttccaccgcatccgcggatcgatcgatcgatcggtgggg

SEQ ID NO: 39403 - DNA, 596 bp, Oryza sativa
gtgaatgaaatggggcatgccctccaagctccgaggggtggtgaggacacggagaacacactctgcaatgttttaaaggtaaaatttatttagcactttgcattacttgagttatgcctaacaaacttctttttttttttgaaatgcagaaagttcgtcaaaggtgccggagactttcagcaagattaggttgcaagtcggttggattggacgacgtgtaccagccgcgaagactactaccaccactacctcactccgggcgtccaagtaccgctcgacactccatcaggatagaagagcgtgaagaagttggtggctcgtcgtcgtcacgcattccgcaagggaggggaaaggggaaggcgccggctccacctagcgacgacgatgacgacgacgaggaggaggatgaggactacgtcgcaccagacgctgaggagatagacatgtcgcagcttcccgacgcgcctcaggggatgcaacccacgcaatacaacttgcgatccacttgggcagtgaaaaagaggtaaaatgagcttaccattctcaaatgttatttgatttccctcattttgtttttaaaatgttttaaacattgg

SEQ ID NO: 39404 - DNA, 1889 bp, Oryza sativa
agagagagagagagagagagagagagagagagagtacggttacgtgaagaaactggctacttcagcgagaacaggttgcacaactctgctgttgcctcgccagcttcatggaatcaatcaacgccttcttttttcccctttgacagatgggatgccaaaatccctgctcaattttgtaacagaatttcattcatatccagttttcctgggctgaaattgaactggaaacttcaatccacgagagcttgatggattggatgttccctcttagtttgggaggatatggctttgtaaaacgtggagaaaaaaaaaagcttaataagtattgtcggataaggaacaatggtcccgtcacactgttctttctttcttgcctatgctctttttggttttatcattttttaaataatatgcaccacttttaacatatatatttttgcaaaagaatcgagagctggaatcggtcatagtagtataatactaattaaaatattagacaataaagttccattctaacaattatgaattaatgttaataaaggaaaatgctatgcatacgatttatatgtacgatcctagtacgttgcgaatggatggtgaacagaccatgggtttcttcgttgtaaaacaaaccatgaacatagaccatgaacatcacgagctagaatagaacctttacgtcgtatgagcattgtacgcaagaaaatcgtacgtatagcagctctagttattaagtaacaaatgcaacaatgtaattttgtttcttagggtagtaggtggataacagtactatcagagtgcatactctgttctcttttttcttaaagaaaatgtggattgtaccgtgaaaaatgggacggaaaagaatgagttttgatatatgcagggacctaataaatgtcaaaatctctagatctgatgaacttgcgatgcttgtgacctctgtatagtgatgggtataatggcatgtatgagtggattgggctcatttgctgattaatagtatctttcacgaagatgacatggatagctcaattattctgccaatttgcatggaccgtcgataattgctcagtgatcactcagcatgcatgtactacaatggattggagctaccgtcccaattagctagggcggacacttcactgcttcgtctcatcgtctattgcttgtagaagggtgagctatttaccaaaaacatagtacctataaggtaggctctgtgcataaacgaagacgtctcatatgtggtgtctattgtgacctatttgtccccagtactaagctcagcatgacggacaaactcaagtggggaaccatctacatataaagtcaaattgcaagttggtcagtggtttgtctagaggcaccaattgtacacgcactttttgagtgaaaaggaaagattgctgggtgaaatttctcaaattttgacaatggtatgaattatagtgtatggacaaaagttctatataccatttcttctctagaaatacctttaatttgtaaaaattaatgcggacaacaacagattttatcctaactatatatatactacctccatctcatgcataattacaaagataaatcaagtgtgtatggccccctttgaccatatatatagtacatgcttgaataaatcgagtgcatatgacctgaaagaacagaaggtttctttgattttaccctagagagggcaaatcctaaggataagtttcagacctaatcccaagagtcctagcatatgctttgaagtttaaccaagaatctacttccggggatggattctaatagctcgagtagacgtccacccgtttattacatgtcaactaaatggctacgaaaaattttcaaaaaaattggccagaaaggtccatatataatatatc

SEQ ID NO: 39405 - DNA, 720 bp, Oryza sativa
catagagatcataatttttcctcttctcttcatcagacagaatgtcatatgctgcaaaggaacaccaatacacttttaaaatgagaactccaactgatatgaacaatttgagtttgaagagggacaccagtaccccttattactttgagaggaaacacctaaatactaagaataattgtttattgaagaataattcagctaggaatattctttgttgacaaaataattcaatatcacagaaagaacaataataacaatttatacaattgtacctaccaatgggatgcaacttattaccaagaagagaaaagaaaacttgttgataatagtggtaagtaaattgtaatgaagcagatgcaaattaaacactgaccacaaacatgttggcttacataacttttctggacctaaagatattcaaaaggtaatatgcaacatttataaaagactcaggattaactgtaacaagccagctagcttgttcaaagcaagaattagcacatgtaaacgaacccataacaatgcagaaagcttttgccaacacgtgggtaggttcgttatgatcttgctttgagatttgataacaccattgcctaacatctattagtacagggtggcaatactaaatgcattattatctcattctcaccatcacataactaaaaatgcaaaatgaatatagctgaaatacaggcactgtaatgtacttaagtcgagcgt

SEQ ID NO: 39406 - DNA, 627 bp, Oryza sativa
cccaccgccaaggcgggatggacgaaatggaggcgtgttttgcagcgtgaagggggcggcatggctggagaaggaggagacaagatcatggttggcaagctcgggaaggaactctgcatgcgggacaccgagctccgcgctatgcacacactagaggagcacgtccagccgaggagcactctcgccgcgctcaacggcctccacctagatctctagcactggcgttgacgggctagctccgttggatatggccggagcgtcgtgcctcgtcatgtgcgtgctcggcctgcaactggagaatatggtcttgtgcggcaagctcgacttcgccgtgccatctttcggttcgagaacaagttctccggcaggagacagcaagggattgaggagagagagctgtgagggatgtggacggaggagatcgtcagtgagggacaagcctagagccagcggtggaggtgcgggacaccgagctctgcgctatgcacacactagaagagcacgtccagacgaggagcactctcgccgcgctcaacggcctccacctagatctctagcactggcgctgacgggctaactcccgttgggatatgagcccgagcgtcgtgcctcgtcatgtgcgtgctc

SEQ ID NO: 39407 - DNA, 1882 bp, Oryza sativa
gtagacacctgcgaaaagtttcgaccaagcagccggtcttttggtcacctcggtacgtgttcaatatgttgcgcatatttgatctgttcatgttatactgtgtagtttacatgtgtagatctaatgatgcgttcatgctactttcatctgtaatgtcatgatttatttatggaatagattaaatcattatatgtctataatctcaacaatatcatgcatggtcatatcgatccaaatagtttttgaagagatattccaacttagtggctggtattttttgttttcgtaaaggatgaaagtgacaaccctgctgtctgcactacatacgaatcaaactgaaagttgacgcctgacaagcaactccagatccgacaactcccatttcccataaggccacacttttcttttcagcgagccactattatgacacacacaaaaagtaaaagaacatgtaaaactagtactacacacgcagtcaataaattgaatatccattgttagctctcagtaatttgctgcttaaaatattgtgaaccagaactgatactaagcatcatttaccgggttggcgacgatagtaatgccggtttggacttaggaactgaaagtgatatcaatttgttcggtagtgtaattcttttatggacaagacggtaggcatgaaaaactagggcaatgtttagcaaatggggaagggaaatgatttcccacccatctttaaatcctaaccattcattccctctcttccatttaatcctaacctttcattcatttcccaatcccaatcccaccccccatttcccattatccaaacacatcctagtagtgtcaaattgtgctagaggacaaccatattggatatattttattggagtttaaaaatctcttgcttcttcattagtatcacaatcatccaacacatctattagtttttctacttgaaatactagtaaaagtctaactacaacaatattatattattttttacaacttgtccattaatatatttaaaactaatatttagattatattctgttttgcaagaattatatatttatggcacacagccacatcttttcgcttatgcttatacttatcagccaaaatttgaatttgcatccttaaattttcatctaagtttatttttgagcttttgcttttagatcgctaagaacacgtataaaagttttacgtaaaaaatatttttcttttgcaaatatggtgtgtttgcctattcgccgaaataatgaaacgatgagctggaaaagtgcttaaactattgtaattatgtattatattaacataataaaaaattaatggtgatcaaactaaaaccgcatcttaaattaaaaatggacatactatgatctcgataggcgcgaagagaaggacggtgtagaagcgcttaaggtaggagtcggcgagaaaggcggccggaatggagaacatctgcagcgcggcgaagtagttgctcgccgtcgtcgacgcctgcgccacgcccatgtgcatggtgccccgcaggtagctcaccatgttcatcatgttggcgatgttgggcgcgttggtcaacagcaccatcgctattcagattcatgaaaggggtacgcatgcaatgcatatatctcgttgtcagttaattaagttgaaaaaaaaactgagctttcttgacagtatatacttgcatgcgttgtactgttttaattttgagcactgaaattttctttcagcaccgtgtaattaaaattcgagatgatgcatgacggatagaattgaaacttgggggagtttgtatttaatttgctgttgtaagcaagaaaaggttttggttgcttcgatagagaacatagatattccaagattgatggacccagcaagcaaaaaa

SEQ ID NO: 39408 - DNA, 505 bp, Oryza sativa
gacatgtatggctgtatgccctggaccttcacaccatctttcttctcacaaaaccacatatcctttctctgcttgaaaaggaagtaagggagtgatagacgtactgaggaattctttatctcaccaacaccgctatttcttttcaaataagtatagaataatagaaatacctatatggcaccctttggtaaggattgctgatgccggtggtgatggcgtgatcaagccgctgaagaaaaatgaggaggctgtgtccaatggagaaatagggcaggtgagtaggtggagagacggcgacaaaagaggtggtggtggagcttggaggccaagggaggaagacagtgggaaacgacggcttttagggctggtttgctttgtgacctaaattgaccttagcaattttggttaatgctaaattttggtaagttttgacatggtcaatgttggtaaggaaaagttgtgtttggattgaagccaaaacaacctaatttcactattgaaatga

SEQ ID NO: 39409 - DNA, 611 bp, Oryza sativa
cttccttccctcctctgccgccgtcgcacgccgccgcaccaccatgcccagtcgtcgcccccatcgcactcgcgcgtgtggacctgagaggagtggaaggagagagagcagagaggagaaaccgattgaaagaagggagagagagaagaaaagaaaaggaagtgggacccactagtgggagccaccatctggactattcctccccgtgaccctttggccggctaaaaagtacatatgatctccctctactttattcaccaagctccgaacatcaatccttataaaagtctatgttactttcctttctttcttggccgcgcctatcgtaagatgcaattttttttcacatattttgaaataaagtatggtatactgatttttgttttctccttgataatgatgtctctttattgaatagagtaataaagttccttgcatttctcctgttcctacaaattattgtacaaattattacacccacgtaaatgtaaacacaacatatttcatgattagatcatatcggcaccattcccagtgtcacacatagtccctccttgggtcaccaccttctgctcattcctgtacacgtacctcctcgcgaagaatacgta

SEQ ID NO: 39410 - DNA, 567 bp, Oryza sativa
ttcattttaaagctgaattacagtggatataaaataatccaaacatataagtggatcaaatattagtatataatttagatgttatgttgcttaattgcttaacgcaattccttttgtttttctaactaataaacattaaaatagaagaaaaaataggtgaaaaagaaaggaaagaattgagggaatagggggacgtacgtaacgtacgtatatacttgcctacaggtctaggtgcgcccagtatttgggagatgatatttttagaagataaatctaatggttataaatagtgggtccgcgaaattaaataaaaatcaacggtgagatgttttgcctttttttagaaattttaagaatttttttatttttatgcccatctcgtggttgaacggaagggttacagggcaaacctacaaagggatgatcgcactctcacggcaaaggtggacgttttacaacgcaaatcgacaaatatggatgaaactagggtaacgtaaaagacatggtctaaaaggtaagggaaaagaatgattcaattgtgtagggattgagatattgggggctaga

SEQ ID NO: 39411 - DNA, 648 bp, Oryza sativa
taaattaattgagaggtgtgaagatgatgggttgaccgtgtgttaacagtgaaaatggtaatcgacaaaggcgtcatcggcttagaatcattatcggctgcagcatctcggaatcagccgatgggagttatcaagtcgccaatagtcggattcctgctatattcggttaaggaaatcaatctactaaaggaagcttatccctaagtgaccgagtttaaagaggatgcggcatggcagtttatctattaattaggaatagtttgttagtttccttttatctttagaaaagtgtgtttagtgtccgataaggactttatgttttccttttatctttaggttagtttctttcttgtccgataaggacttgtatcaacccatgggtataaatatgtacacccggggtctatataatctatcttcacgatcaatacaattcggtgcattgccaccttttaccttttctactttattttatcatccggcgggacttggcacctgacgcggggctgcatcgatgttcgatctccggcgaaggggtaagtccaatgttccatcggcctaggcaattgtctcatctacgtcagcgtcgttcaagactgcatcagtacattcgacctcttggattgctctggtttggacatctaccac

SEQ ID NO: 39412 - DNA, 695 bp, Oryza sativa
tcttacatagtataaagtggatatatatatattaaaggatggttcaaataaagctttagtaataaaggcactctctctatcccaaatatagcagaggggcattttagagatattaaggattggaaagaaatgtctaaaatacttattaatgcatggtagagggtaccgatgagaataaaatacttattaatgtatgggaggggttgctggtgttgagggtcggtgaggtgatgggccctatggtagcagtggagtaaaatcaccttttatataccctagatatatatttgagataacatttaaatttcaattagctatattttatgataaagattatcttaaaaaatattttaggatgaagagagtagtagaaactgcaattcacttaaggccatgtttagttcaggggtgaaaagtttctacgtgtcacatcggatatacagacatacatttaaagtttaaacgtagtctaataacaaaacaaattacagattccgcctgtaaaccgcgagacgaatttattaagcctaattaattcgtcattagcaaatgtttactgtagcaccacattgtcaaatcatggcgcaattaggcataatgattcgtctcgcaatttacacgcaatctggataattaaattttttttatattcaatactttatgcatgtgcccaaacatttgatgtgacaagatga

SEQ ID NO: 39413 - DNA, 587 bp, Oryza sativa
atgccataaaaagacagatggtatccaatctatatatcctatatcctatatagttggaaccaaaaaatctagcctttggatcctctcatgctttgatctcaaccatccaatatcatgtgtatttacaacttgcttattttagttatctatcttctatctatctatctatctatctattattatatactaaaagtccatgaaacttcctacaaacgctcctaagccgccacgtgggagtcctacaaacactcctaaaacgccatgtgtcactttaataaacaactggacccactatttttaattaccattagaattgttttttccacctccctctcctatccctacaggcccacattcaagcatccctgcacgtacgtacaaacatacaaacgtacgtaagaatctacctacacactatttgctaaaggaaaacaataaaaaactattcatcagaaaaaataaaaaaagaacatacatgtatgcacatttgtacccacggttggaaaagaagcgatcaattgttacccctttattttcttcggttgttcactacttaaaattttataaagtatatgatgtatcttatc

SEQ ID NO: 39414 - DNA, 534 bp, Oryza sativa
cccactgaatgtctaatttagtcatgtagggttgcaaaataatatatgatggtgcaacttatgttgttgagttatttcatagtttttaatggaaatttgaataaaatgtaaaaaggaagggatgttgtgcatcattaaaaaagattgatgtataattacgaaatatatgtcgataatgttttttatattccatcactatttggataacctgcaaagtgcacggtggaatgtgcccaaatgtcatatttttatataacaaaataaagcataggaagatagaactccataacttgataggcacttttgtactcagattatatcgcaagcaatcaagataaatattatgaaaattgttgaaaaaaatatgatataacatctgtagccccccgactcactagtcaacggcgaaccagttgatgtagtgaggcagagtaaaaggaaaatatcatataaagaataaaataaatgatgacttagcttttagtattcccgttgatgacagcagaggtagcggatgtaggaacaaagtcatcc

SEQ ID NO: 39415 - DNA, 595 bp, Oryza sativa
  unsure (1)..(595): unsure at all n locations
tacgtacgtttgtatgtttgtacgtacgtgcagggatgcttgaatgtgggcctgtagggataggagagggaggtggaaaaaacaattctaatggtaattaaaaatagtgggtccagttgtttattaaagtgacacatggcgttttaggagtgtttgtaggactcccacgtggcggcttaggagcgtttgtaggaagtttcatggacttttagtatataataatagatagatagatagatagatagaagatagataactaaaataagcaagttgtaaatacacatgatattggatggttgagatcaaagcatgagaggatccaaaggctagattttttggttccaactatataggatataggatatatagattggataccatctgtctttttatggcatnnnnnnnnnnnnnnnnnnnnnnntttaacccgaaatattaagatggtgaaagaatgtgcctaattcacttatactatagcattactaacaaattaaaggaatactctgataaactagcaatgttcagagttttggccgacatacccaaatccatctgttctggggagaacttcgagggcattgttatcatcatcctg

SEQ ID NO: 39416 - DNA, 607 bp, Oryza sativa
ttcggaagatccgctcttcgtggaagttgaagccggcgtttgggaaagcgagcaaggcaagtcacatcatccttgaacatattaaatcccagtttataaaattattttgatttaaattattgcattgtcgctttatttaaattcccgcgttatcactgttttatttagccatgcctatttacctttgttatgaccttattattattgttattgttattattaccttgttcaccctagattaaacaaaaccccaactagtggatactctacttacggtaccactagtatgattttaggtagatgcttcgctgtttaattaggtaacattaggtggttttacaactctagactttgggatattctcatcacctggacactttggaattgttggattattgtggaattggattcacaccgccccctctattcaaaacccccaaaatggttttaggctgggctcggggtgcatggtttggatagtagcacctcggccatataaggaccggtcttcgggcctctgttgcaaagcactaccgtactttcacatgtctagtgggtaaggcttagtttgtggctcattctggttataaacaaaagtacacggatg

SEQ ID NO: 39417 - DNA, 795 bp, Oryza sativa
acacaagatggctatgtactgtacaacttattggtaaattcgccataaaggcaacatcatctagagaaagtttgaggagctctttgttgtccaccaaatggaggagttgttctatgtttttttttctctagttgttcagaatgcaattgggaatgggtataatctgtgcaaccaatcatgcagaatgttatccttgagcttggtgttgtggcctgcaacctcctggtccatttccatagctggggttatggtagcctggtttgttgccagagcctgatggaccatttgatcttccaggatgtccgtagtgatggtgatggtgttcttgccctggatgcagaactggacgccaagggccagggggagcaaaattgctaggtggcctcacgtgtcctgaagttgcaggaagattggccattaaatcaaatgttgttcatcaggaaaagtaccatttttgtttccatggtttcacggggaatgaaaattacctggagtaaatggaggacaaggatgtggaggagcatgacgaggaaatgggccttgatttgcatggaacggaggacgccaaggatataagtcttgacctgcaaatggaggacaacgccgaggaaagaagccttgatttggtagtacaggtggaggatgccgaggaacgaagccttgaccagctaatgcaggaggaggacaccgaggagcaaggccttgatcttctagtacaggaggaggaagccgaggaacataaccttgatctgctagtacaggaggatgccgagctgctaaccgttgatccccttg

SEQ ID NO: 39418 - DNA, 656 bp, Oryza sativa
tgtcttcgttggagattttcatgtttcgtgcatgattctcgttggaggcacggatctatgctgcagatttttttcatgccgaatcggcatgacgggagtaacacgatgaggcggcgtacacaatgggttcgtcttatgtcgttagttcttacgtctgacgacagcattcacagatttcctgtatgctatttcttcagaaattttacgatcctaaaagaaagtacatgtagagcggtcttacttatatctgtaaacttagagaatgcatgtttagatccacgatctcgttttaatgtaccatctcaggttcaatccgcgcttgaccaggtctgactgcagtacatttgcattctcccccctcctaaatccctctgtcgcaaacctaaatccccaaaaatccccaaacctaaatgccctctgtccacttcccagggagagagggcgacctcgacgactccgggagaggcggcgcggagctgggctccacgaggggcgtcgacgcggcgggggcggcggggctccgggataggcggcgcgccgcgcgcctccgcgaggggcgtcggcgcggcgggggcggcagggctctggttcgtggcggcgtggcgctgggctccgcgaggcgcgtccacggggctgtgtttgtcatgtactgaatt

SEQ ID NO: 39419 - DNA, 581 bp, Oryza sativa
caaaaggaggtatggcaaatggcataattctggttctcattcgactaacgactgcaaagttttcaagcagcaaatccaggtggccattgagggaggaaagatcaagttcgatgatttgaagaagccgatgaaggtcgatggtaatcctttctttgttaacatggtacacacttctgggaggacagccgataggggaaaaaatctaaatttccggatgaattcggctagagttattaacaaatatcagaggaagcatgataagcagtaggaaaagtattatgaagaagatgatggtggttttgatcatcattgggattgtgaatttttcagattttgctggaatgaaggtatgaggctaccgtcgattgaggattgtcctggatgcagcaatgatgcagggagttctagccgatcctatatagaggcaatcggctgagtcagaaaagggtacctattcatcagaggttgggcccggtaaattaagattatcaccataatgaagatgatgataggaatacacaatggtgtcctacaagtattttcaccaagaatcagaagagaagggttcaaaggatgaggaa

SEQ ID NO: 39420 - DNA, 712 bp, Oryza sativa
aatcgtgtcgttaatgccgaaacaatctgtgagaatgaatcgcgtcattaatgccgaaccaatctccatccgttgcgctgttggtgttgtccgccgacatggtgaggatcgcagccatgcataatccaagaaaagagcagtcgcatggaagaacgctgcccaaaaacatgattgcccgcctacccatgctagcagcgcagtaacagaaggaggtaactagcgacgggaggagaggcatagagaggagacccgagaggactgactggcgaccggagagaggtagagtctctaccgagagtaacgatcgctcgggaattaatcgcgtcgttaatgccgaatcaatcttagggaattaatagcgtcgatgatgccgaatcaatctccgtttgttacagaacatgagagagagagagagagagagcaccaatatgagcagcctgcctcgtcacgggcacgggccgaccggacggtgctcgctcgcatgtggcagtgcgcccactatctgaatccggcaatagggactctcctctagttatctgttgaagttgagatctctccacttgaatttccgacgtggatttattaccctcaacatctaatgccggcctatggaatgcaatagaatcatagtcgtcctagagcattgatgacaacagtccctgtcttgaaggtgtctggagaaggtgatgatgatcaagtaccccgtgcgcaa

SEQ ID NO: 39421 - DNA, 702 bp, Oryza sativa
attaccgcggggccgatgttgacattaggcacttcctttaagagttttaagtggttcgggcactcttaccgtggtggatatcgaggtcaggttcaccccgggtcatcaggtcaatgcaatataagatagtcggattctctatacttcatcaaggtagcttaggttcagggtaaagcttgagagcgtgttggggccagtgagtccagagaactctattagtgcccgttgaaagttgccaataggtgtcggtattctgtctgacaacaattggtcggcacatatgggggttttccgtcagacaccaattgggcggcacttatgcctggggctggcccctataggttacatagtcccggcacttttatgtctgctcgagccaaaaaaaattcccccggctctatccgagctgaatccagaaccatacacatccttacatccaaaagtaggatcctgacgtccaaaatcaagatcctagtcacacatcaataccgttcaccaatgcatggaggagctcccgatttcacccaagaatatcaagatctctatgagcatcaagagctcaagaacatgagcatcatcaaggcatccacacagcctcatacaggtacacgttgacacgctgtggccgccgccgcacgccgctgcctccccgtcccgctgccgcatgccgggcacccgtatctggcagagggtaggtctcga

SEQ ID NO: 39422 - DNA, 669 bp, Oryza sativa
actgaccacaacatgtgtcatatgatcttgatgacatgtccatggacgtttgtagcagcctgtaatgagaaccctggttcccatttatgtgacaggtgggtagggtgttgatgtgaacctttctggagacaaaacgtgagtgagagtatatacaatgagcgtaatcactattcgtcattattatgcaaccccttctgctacatagtagtctaagagggattgcataattctagaaaaagggttgacacaagatgtaggggtgagacttttccattgcatataactagtgtgcaatacatcacctccttccatctattgataggcatagcctcatgaacttttcatatttagggatggcccattagtagataacctaggccatgccttcatgggcctgtcggttttctaacaatccctattgagcttacattgcatgatgcctatgcctcatcaaaacttcacaaaaacccaatgggaaaaactgcacaaatatgcctatgcctcatcttgatggcaatgattttttatatcaagatatttgaatgagtcagtgaaattctccgctcgaattttgcatttctatatgtatcattggtccgaatactccgacacatctattcaagaaaagatgttcaacgatctagtgggcaaatctgcaagattttacat

SEQ ID NO: 39423 - DNA, 2464 bp, Oryza sativa
caatggttaatgtgacaggacaaaacgttatcgagataaaagcgatatgtcattttcagtttttcacagaaaagaaatgcaatatggcttgttgcattacagcggattctgtgtctattggattatcaatctatgaagccaaattagtttgtttctgggcaataatgtgtgagctccacagtacatcacttatgaaacaaagctttacataacaaattagtgtttgtttttttttagctttgatctccccagtggctgggatagttattttattccgtcgtgtagcttcttttaaatgcgatatgccatattcacaaaggaatcatatgccatctcatgtgtcttgtgtcgcagttgcttgataaaatgggttaaaaattaaagatcgtgttatgccgcaacaagcaaacaaatggagaaaaactcgggaacctactgtcagcaggctcacttgataacaagcttgcaacatgtgcagctgaggcatccagcccctcagcgttcatcaggattcaggagcatcttctgaaagatcagtaacatcaaaccctacaaatacagatgtcaaagttatggatgaaataatagtgcatgcataccagacgagagatttgatttttttttaaaaaaatattttttgacacactgtaaattagagttcgattatttgacatcctgacataccatcatagactgagatggtctcacgtatcattgtcataagttttaatacaatcaaagtgacaataaataaagtgccaaattatcaaattttaccataatatatagagcaatccccatagtattgcgagaagtatgaccaatagtaaaggagggaattggtcataatatggaactttaacatgcggttgatgcaaaatacgccatgagaggggaatgggtttactggatttaatggtatatgcacaaacgaaataaatgtttaataatcacaagaagagcaacttggagtagggactgtaggatacacatatttaggctgtgtgttcgacatccattgttcctcactcacctctcttgtttttcatgcgcacgcttcacaagctattaaacggtgcatttttttgtaaaaaaaattatagaaaagttgctttatcaaaatcatattaatcttttttaaaaaatagttaatatttaattaataatgcgctaataaaccgtttcgttttgtgtgcacaagggattaactcccaacctcaacagccgaacacaaccttaataatcccaacttagaatctcccaaattttaacttctaagttgtaactatgcactacagagaaatattatctagtgcatggtttcagagtctactccatgccaacagtattaatcatttttgtgcgcgttaacaagatcattacactacagcaatcagatattcagatactccaagataaacagagcaggatatttatgtactcggtacactacaccaatcagatattcagttttgacagttacttcctggcagttggaaatggtgcgtgggctttttgttcatgcatctagcgagagcatcgatcacaacaagaggatgaccggtggtggaattggcggctagtgaccttttgagctcttcccatctgtagcaagctcacgtcgaaatgtgctgcttaacaaatcacggacattggcacttgctacagccctacacaaattctttctactctctcattccctaaatgtttgacaccgttgacttttttaaatatgtttgaccgttcgtcttattcaaaaacttttgtgaaatgtgtaaaactatatgtatacatgaaagtatatttaacaataaatcaaatgataggaaaagaattaataattacttaaaatttttgaataagacgaatggtcaaacatttttaaaaaagtcaacggtgtcaaacattttgggatagagggagtataaagttcaaactacttcaaacgtccactaagtttcacaagtcgacaaggcccagctaatagcgaaaatgacaagctaaggtacatcacagatcacagcctgagcacgaatgcaaaatatcacacacacacaacgaactatagagaactagagaaaatcagagaccaccaccctaaaacaggagttgaatggttccataatgtgaccaccatgatcaatatcagataatattggttactactaccttgcagcataacgaccaataccaagctcagataaatagagatcccaaaatacaagttcaggcaaggcaaatactgatgatgccaccacacaacagacagtggactcggataacataagccgcacccagcttgcatttgcattaacaccttggcttcagtcctgggggaatagccatgccaccggacgcatctcgtcacagcgctttcaggaggcctttggcagaggggagtcgacctgaccgcctctcatatcacacacacagaaagaagtgatctccgtgctgaaataatact

SEQ ID NO: 39424 - DNA, 600 bp, Oryza sativa
atcctttactttgggtgtgtttagttcacgccaaaattagaagtttggttgaaattggaacgatctgatggaaaagtgggaagtttgaagaaataatgtggaactaaactcgggctttatcagactgttgttttcttaagcttgctgacagttgatcgtgtgcaccattttttttttgctacccacgtgattcgttggagctagctttcttgacattctgtgatggcatcatatttagctggtgcgtgctgggtggtcaatctgcacaacttgcccaaaaactgaacctgtctttgcatgacttggtggtgatctgaaacaagcggtgaggctcattcatactagtacaacacagtgagagtatatgactagacatcattgtttttggcgaaaaacgcgccaacgccatacattctttgtagcttgatggcatagctctggcattgagctacgtaattgtgttttgacttggctgttgatgcggcgttgacccctgttggacatgtgaacttggctgtgcataatgtgcaattaacatgtggtacatgaacaagcccggatgagggagaggcaagctcactaatggtttatatctgtcag

SEQ ID NO: 39425 - DNA, 592 bp, Oryza sativa
gtcttcttattatagtagtaccttaaaaaggagagaaatagagaaagcaaccaaataagaataaaggtgaaaacttgcaacacaacaaaagatactgagcaccaccagaaagttaataacaaaaggtaagtaggtaaaatgattcaacttactttttcccatcagctgaagtgtgctcttgccagtctgaagagctagtttcgctggaattgatctgttcatttgcaaactcaattattgcaaggtaaggatgtcatatttgataaagcacagtagtaaacttaatacagaaaaataaactgattcagaagagatcagtgatatttactgaaggcattgtagcggaagatgacatcggctgatgcccaggctgcacaagaggtacattctgacctggagctgtaccccaagattgcactatgggaggaggaacagatgatggttgatactgcagtgtagcctatactagtatcagtaacttatcggcaaggggtggcattcaagatccggcaatagctttgtgaaattaaatacatatatcaaatgaacaaattgaattcacaaagtgcaaggaaaaataggacttgccgta

SEQ ID NO: 39426 - DNA, 566 bp, Oryza sativa
aatatcagcttcttcaacatgggatgattctaaagcactattcgaagatagccaagagtacaagtaagggcaatcctctgaaaattactgtattgtgacaaatgtttaccatgcctcctggttatactaaactggttggtgtactggctttgccagctggaaggaagttagttccgtaaataggatacttgtgttcaacctggtggtaaataggatacgtgggttcaatcttgcaattttgtggggggaagcaatcagaattggtagatccatgtatttcaaggtgtcgtttagatgacgctgaagccacaaggcaaggcctaagaaacctggtctgcgggacgagcccacattccacgtcgtcgtgacgcatcatagatcgtggatgggtcgttgcctgatcatcgtcccgggcgtcaattggtcgctgcttggtctatgaagtctccatggcgttgcctcagccattagatggggaacaaactgaagaggggagggagtggacaagacagaaatggatgggggcgtcaattggtcgctgcttggtctatgaagtctccatggcg

SEQ ID NO: 39427 - DNA, 541 bp, Oryza sativa
aaaagggggcctaattctgataactgaaatgtctgcagctatttgcaatgagctgcaaagccagttattacttactccacactgcatgctcacaatgagtccgggaaattgagcctttgaaatggaacagtgaacctgagtgaaaagattaatcttgtttttgttctgtgtgtgttcaggggatatctacggaccgtgttctggacgtgaggaagctgctgggctcgaatgtggagacgtgccacctgacaaactactcgctctcgcacgtggtaatgcttgcttcttgtctgctaattcaatcaattgcagtgcttgcagtatctactgataattcaattgcagtgctagtactagcatctatcattccactcttaagtcaaagtgttaattactacttaattatctgccacttctttgctactcttctggaattcacccgggattaatttgaggacagtaacttttaatgtatgtgtgctgcaatgctgttaattctgtaactaattctgtataagctgtgttcggtgaagtctgaatt

SEQ ID NO: 39428 - DNA, 2435 bp, Oryza sativa
tgaccggcgggaggacgcattgaccaaggtgagggagaaagagcccagaggacggtaggggaggagggatagacccatggaagggggtgtataatagagctatatatatatatatatatatatatatatagtgaatctattctacaccccctcccatgggtcaaacccacctcccctaccgtccctagggcacaaacccccccacctcggtcaaagcgtcctcccgccggtcaaacccgcccaccaatccctcccccgcccaccactttactgctctcgtcttgtaggaatcatgcagtaacagaatggtcatcgtgcagtaacaagacaacgttctcgtagtaacaacgtcaaaaagtagccatgatggatctagtttcgttaagcgtttttttatgaatgtcatggtgcaaacggattagaaaaacaagatttgatgtgagagatattgctctctaaagattgagatttacctcgtttttgtcctcgtctaactagaaaggtgtagtaactagacggccaacgtgtttccacagtatcgacgtgaaaaaatagttatgatggttctagttttgttaagcacttttcttacgaacgtcatgatgcaaacgggttataaaaataagacatgacgtgtacgttgctgctatcaaaagattgagatttaaaatattttatctctaacaaacattactacaatagtgtcactgttactgtgcatgttctctgttagtgtaaatttcgtcatgtgttactgccaaaagagtctgtaacaatctataaattttgtagtaacaacctataaattgtgcagtatcgtatcttgttactactcttttgggataatgttactaagaaatcatagtaacaaagtatgattcttacagtaacataactaattttttttcacataattttttacaaacatacaaaacatgcaaacatcatatggtgaattggttaggagagcttgccatgaactatgagattatgggttcaaatcttgatttcatcaatcttttttatcttttctaaaaaaaattgatcgatcgagagagagagatcgaatcgagagatagagagtacatatatatacatatatatatatatatatatacatatatacatatatatatacatatatatatatatatatatatatatatatatatatatatatatcaaaatctccacaaaatttggacgaagctgaacatacatcacgctgatcgggagattatacagatatagagaagggaatggtcaagatatgttgccaacatctagtaacgtgtagagattgaatcaaggcggatgattaataaactcttacaaacaaatatcccaatcgttgaatttaattagtgatgaataattgtcagaaatcaaggctcaatagtaaacaacttttgtgcgtttatcattttcctaattaatttcatttggtagcgtgcgtaggaagaagtcaaataatatatctctgtaccggcatataaagtatgggcaaccaagcgactttagatgacagtatgcatgacatctaagaaacctttattatataccaaaaaatattcttattgcttacctctaagatcagataaagctccccagatccggttaattagtactatagtaatcaacaagcaagtaagtatccattacaggatccatcagctatgtaccgtatattggttccatttttttactggtattataattaataattgtttaattctcttccttgtcaacgcacttgtgcaatgaattagcgactaacctctatttttctaaacatagcgcgctgaccacacacacacttctagcttctagaagctcatctctcgggctggccatgacaagatgccctgccaacaacgaaaacagcgggactttttttattcccccaaaggacctaaacgtggtgacgcctcactgcagacgcaactgcctcattatgcaagcgagttcattaaaagagcctataattgatatgtgcatttttccaatattggtaggaatcttcccctaaaaaaatatagtacaaaagagcatggataattaaacacaacagcaacttacatgatattctaaatacgcgcgggagattgtgagtttatgacaattatttaagggcacacatataaaataaatgttaaaatgttggaaagtcatttaaaaataagagtaaaattcaccaacggttcttaaacttgtcaggagatttcacttaggtccacgaacttgcaaagcgcacatcgagatccctaaacttggtttattttatcatcccggtccaaaaccgcgtttgaccgtggtcttgcctacgtggcacgctacgtgaatgatgacatggatttttttaatttttttttctcccttcttccttcttttttttaccactgcaacaacccttccccccgtgccgcctctcacca

SEQ ID NO: 39429 - DNA, 2862 bp, Oryza sativa
aacgtgttcacgtgctagtcttttcgcccaatgggataatctttatattcggatgagatgggtctagaatgatgtgaataacctagcatagtcttcgtagatttgtgtggtatggttctctgaaaaatttttaacatcagcgccgtcccttttaactctgcttaattacacggacaaacttttgaaaagattggcccacgttggcggaaggaaaggggaaaaaagagtaaaaaggtgaaagaatagttcactttgtgctcacgttgctttggtagtttctgtaaaataaatgttttggtactgcaagaacttgtttggtgggtacaaattagtacacgaaattataaaacgctcgttttgatagatggagttctcatagtacatgctaaccaaaaccgaaatagcatggcaaggctaattttatcaacttggataatgattaggacgtgccgtgcacacttgcttgatattttatgtcttcttttctttgcaattattatacccttattctatcgtttactccttccatgcagaaatatagccacatttacttatctcaactaatcgcaatcatcattatttagtttctccacttattttctcatttcaactaattataaccgttcatcacttcacctacctattttcttaatatccgtgcatagcactgaagttaggacgaatggaatattaaatatactagataatgccctgtactttgctatggaatatttgatgaatatatgtaaaatattgtacaaaagatggatggatttgggttgaaatattgcgaaaataatatgaaaatgatgatttaatatgcttatatgtttagttttagatttacttgctatgtttgcatgttgaactttaaatgcttagcggattgatgtggtatgcttgtatattaggctttaggatatactaataattaaggcatgtttggtagagttccaactcctaaatttatctctaggagttaggtcttgagtggagttgtggagtagcctaaacacaactccacctctctaattcattttgtgagagtgctttacccagctccgctcctattttaggtggagctgaaactgtttagccaggctccagctccaggagagatggagctggagctgtgccaaactggtctttactatgcttgtatgttgagttttaggtgtagtgggttgtaactatatagaagatatgcgaagtgagcatcaactggttaggttccttatggtggaaccaacccacccgggttcaaatcctagatttgacacgggtgctcgcatttatggctaattattctttcagtggtaggcgatgtactcgtcgacagcgaggcgcctatggtgacttcgtcaatttcaagacatgccggcccagtcttccggaggtgttcataggggtagggtatgcgtgtgtgcgttcataggggtgagtgtgcgcacgttgtgagcgcctgcatttgtactgtgtttctaaaaaaaactatatagaagatacaaacatgtctagaagatacaaatatgttttgtttatatatagcatcctaatcaatacttcaatcagcgagattagcaataccatattcttttggtcttggttcatacatactagaaaacctttttgcaccaaaacaaacattttgtaagtttatgtgatagattacattcacttgataagtttgtatatatagcaccaatataatttactcagagagaaaaacatttaaagctagaccaacttcaacgtgcagagttaatatattgatagttgcttacaacgtcgttacaatacgcgtctttatctatcccaatgcatggaggtgctatatacatgtcggtctgcatcataaaccaactctctgcgtgcataggcatgctcggaaattccatagcacctctgaggtaacaacgcccatggcagcccacttaccttttcttttagaaacgaaaaaaattccgagggcgcgtacaggattagcgcctcctcgaaccaagttggaaaaaacgtcagtaagcagttaattaagcacccatcgaagtaccccgggccagttgaaatttttagtaaattcgtcctcaacgtatacagggtgaggttttgtgaaacattgtaataattatatatacttgtagttatatgtcacaagtcataatacctatgattttctgcaacttttattataaaacgtgggattttcaaattttactctatttttaagtaaattttaccacatgttttatgatcagagttttaaaaaaatgatatttattataacttgataagcataaccatatgtatggcttgttcacttgttatatgaaacccttatatatatataccataaatcatgtgctataagtcatgttatatgtggatatacctgtaattttgacttaaaacttgaggttttctgaaactttctcttgttttttaatcccaaaaaatgcgggagaaacttgtcaacggaattaacagttgcgatagtacctatatcatgtattctatatacaaaataaaaaatgtactgctgcatgatattcttaagtattaattgtacttattatatcattttttatgcatttatgaccataaattcccttgttctgactgaatatgcatgatatacgactataaagacacacacgagcatcatatcacgtttctaattgtacatttgtacttgatataaatcgtgcatatatatgactataaagctaaactacaccaccatcctagctatcccatcactaaattgtactccctccatcttataatatagaacttagtaacacaaagtatacaagatttaactgattttatgagagagcatcttgctcaatgtggctgcaggaa

SEQ ID NO: 39430 - DNA, 1062 bp, Oryza sativa
cccaccccctagggccggccttgcaaacgcgtaaaatattaccaaaatagaggagaactagtgatgcttgtaatgcataaatatgttagaataataatattccactagtattaggtatactaaccttttgcagaaaatgacaataaagtggaggagaatcgacatcaactcagacgataaatcaatcggacgatgtctacaatcagacttatgtatgaatgggtcaagaactcagaattggcacgatgaattgggccaaaattcacaagtctgcatatgagagcaaaagaggaggctgcctgtcacgcctggaatttctatccaaaattccaaacgcttacatgtgcgttaaatcctcgtccaggaatcagccgaggcacacaataacaaattgataatagagtactatcaaacagctaattaatattcgcaaaataaataattattacagaggtggatagttcctctcaaaagaataaaactctacgcagcggaaaaaaaacaaaagactaaacaactatggcgactccactccacaagcaacttgacccgcacaaagcataatcctccagatcatcaccttcactgaagtactcctcctttgatgaatgaatattgcaagaatgagcatatgacatactcaacaagccacacagcaaatatgcaagtgcacaggataacaaaggatggcataatacagctcaattgcataaacaacatttaataaacatttgagaaaatagtaaaacagttaagtaattaagcaatattaaatatacactatacaacacacccgtattgcataggcccaaccttatctgaacaaccaacccagttgtataaatcaaacctccataccaagaatataccattccaaaccaggagtcaatttaattatcacaaattatcaccaataatgagtagtgtgagactaatcacgaaaaacattgttagacccactcataaccgcgggcacggctattcgaatagttttactctggccagagatgtaccactgtacccacaagacacgattccacacatgttgccatgccccgaagt

SEQ ID NO: 39431 - DNA, 1087 bp, Oryza sativa
ctaattgttaatgtttatattgctatatctgtctataaatttaatcaaacttaaagcagtttgattttaagtcaaaaaaaaaacatcatgtaactagggagtacgtcgctacatgagcatctatcaaatgttaccgctattgaataactgaaatgttttattcctttcgccccgttgaggcgttgacgttgttggagcatcactgtcaggagctcccgctcatttcattagttaccagggggcgctcgccaatcagagtcgtgattaactttgctaatcataattaaactgcagcgcgatggagagagcgtcgtcgtctccatcggccgtctccccgtaacccgcatttattagtaattttttttggcttggtgcccaagcctgtgactcacaaaccaagcaaccaaccgtactttcttttttatacacgctgccggccgctgcaacgtaatcatatatcgcgtgtagagattctccattctctccacgcgcacatggcgaacgaattgacctgagagaggtgaccgatctatcgatcagagagctagctatggcggcggcggcggcgcgagaggcggcggacggcggcgacattaatgggggtggaggaggaggaggagagaggtcgtcgagccccgcggcggcggcggcggggaatagcgacgtggggcgcgtggcggtgcggcggatgttcgcgttcgccgacggggcggacgcggcgctgatggcggtgggggcggcggcggcggtggcgaacgggatggcgcagccgctcatgacgttcatcttcggcgacgtcatcaacgccttcggctccacctcctcgccggacgtcctcgccaaggtcaccaaggtgcgtgcgtgccttctgcgtgcgttgctgttgctaccccggtgttgccacctaacccatcgatcacctactgccattgctgggtgaaaacgttaccatttaaaaaaaaaagagaaactaatataataataatattttttatcaacggttactgtttctacaatttgttttttccaatttctaagttgatactaaacggttgaattcataaatataaaaatttcatgactgttt

SEQ ID NO: 39432 - DNA, 1477 bp, Oryza sativa
gtgtgtgtgtgaaaatgcagatttgcactcaggttcacatgtacctacaatctgcaccgttgatgtgtttcaagattcgtgctgcaaaatgtacctaaccttaaccaaatgaatgattactgtagggagaaaagattaggattaggttggttcacaatatgtataacatgtatgttgtattttttaccaaataatttttttcaataataattatatatatgacatttatatatctagtgcgctgtatttctctaaccctttttgttacgcggagcacgcggagcaactacaacaatgcgtaagcattcaatatatctagtagatccatgattttttttatccttttctaaatatgtttcatatgcttcatcttaagagaaaaaaaacatcccagaagtcatagagtttgtgtgtgtgtgtatatatatagtgtatctattctacacccctctcctatgggccaaacccacctcccctaccctccctagggcccaaaacccccctcccacctcagtcaaagcgtcctcccgccggtcaaacccgcccatcactccctcccccacccaccactttgctgctctcgtcttgcaggaatcgtggggtaacaggacggtcatcgtgcagtaacaagaccacattatcgcagtaacaacgtcaaaaagtagccatgatggatcttgtttcgttaagcgtttttttatgaacttcatggtgcacacggattggaaatacaagatatgatgtgagagatattgctctctaaagattgagatttacctttttttagtcctcgtctcactggaacagcgtagtaacacgatggccaatatgcagtaacacctctgcttttcgcagtaacaacgttaaaaaatagttatgatggttctagttccgttaagcactttttttacgaacgtcatgatgcaaatgggttagaaaaataagacatgacgtgtacattagtactctctaaagattgagatttaaaatactctagatctaaaaaaacattactactatagggccactgttactatgcatgttctctgttactgcaaatttcgtcatattgttactgccaaaagtgcagtaacaacctataaagtttacagtaacaacttatacatttttgcagtaacatatgatgttactactcttctaggataatgttacttccgaatcatagtaacaaggtatgattgttttaggtacataactgatttgttcacaaatcatcatatggtgatttggttagaagtgcttggcatgaaccatgagatcatgggttcaagtcttgaattcaccaatttatttttaatttttctaaaaaagagagaaggagtgagagaaaaaaaaggagggggacgcgggagagaggagcgatgggagagggagtgctggggggagcgatgggagagagggagggggcgcaggaaggaggggaggtggggatggataggaggtgggaggggggtgt

SEQ ID NO: 39433 - DNA, 612 bp, Oryza sativa
cccatgttatcccttaaaaatttgtccattgcccccatctgagattctattaagtcatccacccttttcctttttttccttttctctctaccaagatgcatactttcttgacgacatggcctgataattgaaaaaaagttaacattattatagtggtttaactcatataaattacactacaaaattacaaatctaaatttaaaatcttaccaattagttgatcgcaagcatccagatgcacatgacaagtgagtcggaaacacacactactgcctttgtcactttgtccaactatcaaaacaactgaattaacctaacataggactatacatcagtacacgagcacatgacaaaaagctaacacatgatattagatattaacagataaaatcacaatgttacaaaatttcaattttccatttggtgatggaaaattagcaatgatgtattgatgtattggtgttgcacttacctcaacagaatcctcctcatctagtactcgagggcagccagcagcaagcaagaaagactgcaagaagcaggcaagcagccactgcagtgccaacacattgtgccgtactacagttgtgcagaacagcggaaaaggaaaaa

SEQ ID NO: 39434 - DNA, 2136 bp, Oryza sativa
atgattagccacatgtaaaactgaaatgtaattaacatataattattaattattaagaggtttaaaatatatttgttttttttcaaattaactgctatctccgttccaaaataattataattctaaattgtagagcatatattaagatattaagatttgagaagaaagattagaattgtgtaaatatatataggtaagaatgaaagattggttgagagtagaatatgaggaaatttgaatgagaaatgattaatgagataattaagcaaatattttataataaattaaaattttataatataattattatgggacggaagtggttctaaaatgattgtttttatactaaacgtattattattcagctgttcaataaacgagacgtcagacgtgcactgatcagtttctcttgcgccgcccgttagttttcccaacggctctgcactcttgcgggtggatggtgcgtgccactgggcttggctgggctggaaagctgacgcgccaccgccacggtggactggaatcgtatactttgggcgttttcgagcaatctccgagcgatcaaaagatctgacacgtcccgtggtccaatgtaatccgattgcagaggtagtagaagtacctactttttcagttcaaatttaaaaaagaaaagagaagggcttttttttttcagttcggtactttggcaaaatattactccctacatctatcctacatctacatatagtcatatttcatcttggcacacagaccaaggataagtaactctacttatcatttatttaaacatgctactagttattcctcgtaaacaagtaatttattaatatttatatttctcgatgcctatgtagccaatcttgtgtgaaagaattgagagtcacgaattaaatccgagaaaatcattaagaggataggttgttggattaaaatatgcctatcaaaaatatttttttcagatttaaaatatgactaccaaaaatagatggaggagtattgtactcacttagctttgcccgatgcttagctttgccatgtccatcatgagtgttgcgttctttatagtttgtacaaaaagcgtttggttgaataatagacctagattgcaaaggtggagcaattcaaaattcgtacaagaacatctggctcttttagcccagaaaaaggtacacgattcagcccaccgtcacctgttataaaatatggttaattggatcatcctattataaatttacccgttttaaaatatatcattactatttgcgaaattggaaccatgccattaaaatttcacatatacttcagatataccactacttacctattcactgcatttttcatatttttaggaccaaattatccattctccatccatccccttcttccttccccctctctcctctcttctagccgatgagctcacatagtggaagggttgcaacaagccaccgtcaccgggggagctagaagagagtggcggttgcagtgtccatgagctacaggcgaccacaatgttagagcctgtgtcgagggcgaggactgcagccagcgctaatctccctgtgcaccgccgcttcttggcttgttgctccagcgacgctgagtcacgtgggtgagtaagctctaggtgtgagatctcggcagcggcaaggtcaagccatcggatctagaggcaccaccggtcctctccagctccaccagtggtgcccctgcaacagctcttccagcactatagctgcttgctccacaagcctgttgtggagtgaaggcatgccccataggggcaacgatcggccgcagctagaggtgagaggttagacagagaggaaaggaagaagttgatggaggaagaagacaagggtattttggtcaaaaaaaatttagaaattgcatcaaagaggtgattagttgcatatctcaaacatctgttaaattataatggtagtttcgattttgcgaattgtagtggcatatttccaaatgtgctaatttataatggcatggatccaattaggaataagttcaccggaggtcccttaacttaacagcgagattttttaggttccttaaccataaaaccagaaatatgtacccctaaactcacgcaaccgtgcaaaaaaggggggatccact

SEQ ID NO: 39435 - DNA, 1140 bp, Oryza sativa
cttaaaatcccttatattgtgggacagagtgagtatttcatttacacaagcggctctgatactcccccactgcgataagggtccagatcacctagagttggctacaactccacctgatggatttgactaaatccgtgtcatcaattgtaattctatggctaagatgaagcccacctattaacttatcctaattaactctctccatcacattggcttgaatgaaaattacttactttcttcttttttatgttcctaatgggtaaatgtttctgccaacaaaattaacaaagtatatatgcacgttctcttctccaaacaagaagctatggtcatgtataaaacaatgttaaccgcatagtacgtgcaaacatacacataccgtatacacacacaaatattgctaaaaacgagccacaagcccagtacgtttttatacagtggatgaaccatggcattttcgagttatgcaagtaaaatcagtttgtatattctctagatatatattatttgttgatttgttacaaaaattaggacaagttagcttatttaaaaaagactagtgggaatttgttatagttcatctcaaccgttgttatatatagacggtagagatttgatcaaattcaccgggtggagttggagtgaactccaggggatccccacccctgcgataagcttaaagcagaggttttgcctttttctccgcccgtgaaattaaggggaagggacgaacgaaaaattgttttctaatgtgtaatgtgtcgttgatggtccttaaatatcaaatttgaccatcaactcctccataaaactatatcaaatgaaacatcagacctagtgataggatttgttactaactattttcataaatgttagcaaatatttgtatggattagattttattcgacaatacacctgccatacaacaaaatatacctccggccaatcaaacacggaacatagattgagagcccacaaaatactgcaaaaccatcatatttgagacctatccgatgtgcattgtcatacgggcccacatgtcatacactgggaggaggtcggcggccataggcggtttgccttgtttggccaagctgagaaaatggacatttagccacgttcaaaaagcggtttcgctag

SEQ ID NO: 39436 - DNA, 712 bp, Oryza sativa
ttcctgcagccctccttggtgacaatgctagcgaccaagtagcctccttcactccttcagcataggcgctggctagtcctcatttcatccccccttttctatttacccaccattgcaccatggaggcgttggcatccattcccctccccatccttgattttgttgttgtcaccgttgaggagcaaggaggtgaacaccaaacgaatgagtgttggagaccaacgatggttggtagtggtcagggtctaggcagtaagcaaggggatgcggcagaatgaggagccagcaagggtgaggtcaaggtcgaggcctaggcaatgatcaatggggctcttcagctcaatttgtttgccttgcttccccgttgtggccttctcccacaagtggttggggatccatggtgaggagggaatcatccaagtcaacaacgcggtcattgctagttaagttgcaactcttttttagctctgtcggccccttgaatctccctctttggcaccatgtccagcctcgcctctcatctacctccaccctccttgtcgccaccagacaccgctttctttcctcccctactcgcttccctcgtccacctcacccctccttcctcggtgttggtagtggcctcctgagcacgatgaggaacacatcagtagccaccttccgatccaactcagcactctacctccatagtagaaccacatcatctctcttt

SEQ ID NO: 39437 - DNA, 626 bp, Oryza sativa
catgtatgaggatacatgttcacttctaaagtaagtcctagactttcttgttacctagattttgagtcttattatctctgtctaaagctgttttttctcttcatgaaaacaggtatacattattctggatactattgctcatatgcaagctcgccttcagtttctatgttgaggttggtataatctgaacattacagttctctgctaatttaagtataggtcagatttgctaccatgtttccatgggtgattatatgatttattattgactaacatgtaacttctttttgccaaaactactgcttcaaagaactcccttttcttgctgtgctttatagtaaaaataaactagaataaaaaataaaataaaaaagagaaaaggattgattttgggtaggttttctaaataaagaggtgactgaaactataggcgagtgcctgttactcatccgaatgaatttctattccaatagtggattttttcagtccaatctttgagaaaatgcacgtgaattcaagagcatggcttgctcaactgaattccccagtttatttatagtttgtttttcactagataacagttacctcttttggtgatttggatgtatcttgtgtgttaaagatat

SEQ ID NO: 39438 - DNA, 508 bp, Oryza sativa
caagctctgtttagtttctatcttgaggttggtataatctgaacattacagttctctgctaatttaagtataggtcagatttgctaccatgtttccatgggtgattatatgatttattattgactaacatgtaacttctttttgccaaaactactgcttcaaagaactcccttttcttgctgtgctttatagtaaaaataaactagaataaaaaataaaataaaaaagagaaaaggattgattttgggtaggttttctaaataaagaggtgactgaaactataggcgagtgcctgttactcatccgaatgaatttctattccaatagtggattttttcagtccaatctttgagaaaatgcacgtgaattcaagagcatggcttgctcaactgaattccccagtttatttatagtttgtttttcactagataacagttacctcttttggtgatttggatgtatcttgtgtgttaaagatatattagagtgccaactctgctgctcagat

SEQ ID NO: 39439 - DNA, 2031 bp, Oryza sativa
agagagagagagagagagagagagagagagagagagagagagagagagagagagagttttctccatttctaggttggattcattttagtcttgacacaaaggcagccggcacagaggcttcgtggttctactccaccgagctgcgcatgcacaccaccatgtcaccatgtttctgactgtactgtagcacctatatactcttgttaaattttagatttacttccatgtaattaaatgcttgaatattgtaagaactcatgaattgatctatgcagaatgaaacaagaaaaaacaatatggctgttctgtttgttaggcacaaaatgcacgatatggcagtatatatagaattttcaaaaccaaacattcacttgtacttatatattcagctaaatttaggttgagaaaaatgggcagatagttgacttaaaatctgcaacaaaatataattcagtgcatattcaacaaaatttctaacatgcaaccaaatatgtcatttctgtttaattgtatagacaaatactagcagtaaaaatttacaacccaactcttatatttacacagtcacaaacagttaactcaatctattaataatcactaactcaatccacactcgtaccataaaagcaaggtctaactcaattcataagcagtgtcaatcaaaatcataataacctggacaggtgaagtgtccacctatgtaggatgctctgttctttgtatgtagtaggtcagaactacacgaataacaaaacttcatgtcaatctccaattaaggctcactaatttcattgtctccaaattctaacccacctatgaatttaaaggttaggttagcaaaacaaataatgaatatagtcagtttgtgcaaaaagcattaaagaatattctcgccaactttatcttcttaatgtaacaagcagaaacatgtcggaaccatagtaccatcttcaggattcaactcagcatagaagagttcaccttcagaatcctcatgcattgcccttgcaataaagttaacatgtccaaatgaaccttcagcatctatgatatagcaactcttcgtagcttgtaccaactcatatttgatctagtttgtaatatgtgataacttgtagtccaattttacaattgaaatgtaaagagaaaacaagagatatggtccaagacaaatatattttattaaaatccagttgagtaataagataaggtgagaagacagtaaaacagtttgggtcaatgggaaaatgtgaaaatatgtgtattccacatattctatgcagtctataatcagtagagagacaaggagatgactaaacactttaaatatactaccttcagtcacaaagaagtgacatatactaccttcagtcacaaagaagtgacattttcaattagttcgattattaatcctcatgcgacatccccacgagggatgaaaatccttatccttgttaaaaggacggaagatttgttgactaatagattttttttagctgagtaatctattcaaaaaaggacgaaggatctttaataatagatataatcagaggctgaatcactattgattatttacccatacgatttttgtaaaatataaatacattataactcgtatgtaactacaatattttacttgtatgtagcttttacataattttacacccttagatttattttaagattcatgcaagttgggaagaaaaattcatagcacgacttatttattttactggtgaggactttcagtgtcactacttccgcttcgagaaaatagcttgttactgtaagattatctttaagttgtagtatagttatatacaagttacaaacttataatacaattacactataattatactatatctacaagttacaaacttttaggattcccaacctatattagattttgatatatctatagcgaaatatttcttttaattgcattgttgtcgaaagacaactgcatcacgtcgaacaatgtggttcactcaatgaattgatggattagtaaaagcaatatattaattg

SEQ ID NO: 39440 - DNA, 2252 bp, Oryza sativa
atctgaaagaaacaaaaggagggcagccagctcggcggcaactaacggttggggtggttgcatcgcatcatcatggctctcccttctgccgcagctgaagaaagcggcatcgatcacgatctgcttccgctggtccccgtacgttttccccaaaatcttgttgcgttccggagcatttaggtaaacctcatgtgtggggcccgctctccctcgacgtgattgccggccacgtgacgagccgagccgagccgaggagtttgggaccgttgctgcggccgccagccttgcaaaatgcaaacaccaagatttgattaataaagaggaggccgtggttaccgttatttgtgcgctactctccacgttttcgtcagctgttaagtttagtaagggtaattgtgttgttgcacctgcttttgaattgtaagggcatccacaatgattatctataggctctctacaagatatccatgtcaacatattttcttacctagaagagattaaatgaagagagagagaacaaagctatctactaatatgaagatagtctatagagaaaaacgagacaatggattagagagctatagatacccatgtagacataccattgaagtgatttactattaatctagtctattactgagatgtacatgttttatagatgacaccttactttattattgcgggtgctctaattgtgattttgtctttttctctttggagtttgtgagtttgtttcggatgaacggcgatgtatgtttggaaaagcgagagtaaaatcgcaaaccataaaaaaagataaaatcacaattgaatacaattattccgtaatagtagtataatctgatgtaacttagtaagcttgagatgttaattacacacaaaaatacaaaatcattggaatatggccattttttctattaattatccaaaaatatatgacctgttaccccaattaattagcagtggcaaatgcaggttgggcttgattagttgattggtacgtgggcaattggacctgaaaagaatccatccctcgccttaatcatggcatccctgtactacgtcgtcgtccccatcttttcgttggcgccaatcgaacgatcgaccagatcgatcgcgatcgacgtgtgccggctcatgaccgagcaccgatggtgacgcgcactgctgctgatacatacattaacatatataatcttgggcaatttgggaggagcgaaaacgaaaggtttggagggagatatcgaaacgagcggcgtatttgtcaaatggaggaaaggtacgcagtgtggctttaatcatacgacaataagatggatattaaattacattattcatcttgctgataaaaaaaatatcagcaagatatattcatgggcgccacttcgttggcagcgtgtatttgcctgtgcggtgattggttggtgaatatgtaagcgttagagcaattaccgtgggcatctaaacataaaccaacataaacctctaagataccacgtatgactaagtggtatgtggacaaacataaggttaaacttttataactttgaggatcaataacatatttagtttataagaactataacaacatgtatggatttgttttttaaagttctataataaaagtaaatatttatttatttattatatatattataatagaaaacaaggttaaaaaaatatattttgaaaatcatgtcattgtttaaaacgtaaccgaaagaagtaagatggaggagagaagagtggagagagaaaaagtgccacccttctagcttaaaatggcaattgctccgcaagcagctgacatggcacactctggtctcgtttggctgtccaaatcccggtcggtccacgtgtggccttatttggatggtgtgttaatcccagcccatcattgtgtactgcatatgtgtagggctatttgggagcgaaaacgcgaaaggtttgtgggctaaatgaaacgagaggcgttttgtcaaaatggagaaaggtacaggcatgtgcctttaattaaaaaattgattaatgcggaagaaacgaacaaacgatcgctagcaagatctttaattacatgcatgttgctataaaaagtctatttcaaagatttttttaggtttttcttgagacatacatattccacaaagttgactagcgtataagttgatgagacatacatatggaaactttgttgctggcatgtaatcctgcggtgatcgtactctttatattcttcaaagggggaataaatc

SEQ ID NO: 39441 - DNA, 1551 bp, Oryza sativa
ggactgataccaatccgtttttccacatgaccttttttttaaccgtcggtgattttttttacggtcggccttttttcttttacccagcattttttgcaaatttttttatccggtaccaatcgtacttctttttttcctctgtttttcttttgcgatttttatggcgtgttttctttttccgtgtgccctttttaagttatggattttgaggagtagagattaaaaccgaaacaataaattgaaaccgactcaaacacggatgacttaaagtatcggcaaaaacatatttaatttttataaaagtagagatatatctctctcggttaacatattttctatcgtagacctagataagtttaggtactaatattaggggcatgttctattattgtggttgggaacttgagattcttagctgagaattaattggagttacgtaccggtgctcaactacatctacgttatattgttctgcatacttcatgttgcagcaatgagcaaatgcatgtgttcgtgcgtaagcactcagctaagctacatggggcgtctcctagatttgtaacgagtcccttcttcatcgcttggctggcaatgtgttcatcgttagttaaccaacaattaatatagtttgtggcttggtaggcttcgagaatttgtgcaagttattttcatcaatggatatacactatgatgaaaggtaattttgtgaggaaaagatcatagactgttctataagtgaatagtctaaggttaatcctacatgaaagaatcacctatgacccaatcgaattatagcaccgtgttaacatgcttggatatatgctaggaagtagaaagcgtggtgaatggcaaaataaatcattagtgtaaatgcaagatgatctgatcgagatccagtttccaccttggagcgccatatataagcctatggtcctctttattaaggttatgtttattggggtagacttttaactgagtttatttcttatatatttgagagagaatctattctatatcactgagtttatcatagctcaacaatttaccactgatttttttctttttctagattacgtcattgggtttggcttatttttcaataaaacctaaaatacccttatggagatataaggttaacagttgatttatatcattagaagtttaaaaaaagaagaaaacttttatgtagcctccttacacaatataaaagtttgaatttttttcatttctattttttaaatataacttatttgttatatgccatataaaatattttttgtgttgttgtttttaatgtaaattatctttcaaatgaaacataagatattttttgctattatattttgtgtaagctatttctctctgatataccacacaaaaatattttttctaaaagaaataccaaaaaaaaattgaacttatgtacatacttctctgttgtgtaaggatgccatataaaaaaattcatattttttttaacttctaacaagataaattaattgttaaccatgtatgtctctaagggtaattttggtattttttttaaaaaaa

SEQ ID NO: 39442 - DNA, 567 bp, Oryza sativa
atccgctgttccttgcgctaatctaacgattgaaaaaatcgacaaatttcaaggacagaaaattggcgatagatctattgcagaaccgatcaaagggagtatcattgtggttgcagataatacacaggtgcactctctacacgctgttgcttcgtcgtatcatataagtagatactccctccgtattttaatatatgacgctattgatttttttatccaacgtttgaccatttatctcattcaaaaaatttatgtaattactatttattttattttgacttaatttatcataaaatattttttaagtatgacataaatatttttttatatatttacacaataattttgaataagataaatggtcaaacgttgattgaaaagtcaacgacgttatacattaaaataaatacggagggagtacatacagtccgtaacatttaactgacaagagtgtgctaagtgggaaacttcagatgagaagtgacaagagtgttcaggcgagatgtatgatgtctatagattcatataagctggcatattaccaatttaccatacaggcatacatgg

SEQ ID NO: 39443 - DNA, 566 bp, Oryza sativa
cgacatagtaacgtgatatttatcgtggtcttacttgcagtaacaatgttgaaatgtagtcataatatagtcatgacggatctacttttgataagcattttttttctaacatcatggtgcaaacggtttttaaaagtagtacatgatgtgagagattttacccttcaagaatgggttttttaaaaattgggttctccacgagcagtaatactatatcataagtattactgctgatctgctatgcgttactgcaatcacatcacatcgttactacatgatgtagtaatgattataagtttcatagtaacatagtgtgttactacgattacttgataacgttactgcaagaatatgtatagtaagaaaaaaatgtgtagtaacatggaaagagagatgaattggctcggttaactcatggggcaagggtagagagaaccttacaagattggtcttttgaaatttaactctccacaagtagtaatactatatcataagtgttattactatctactgtatattactacaatcgcatcatgacgttattatgaaagtgtggtaaatattat

SEQ ID NO: 39444 - DNA, 566 bp, Oryza sativa
gtactagctacttaatttgaggaaacaatttacaaatgacttatcagtgctgtctcaaaactgctaaatgctcataactcaattttagagaggagagatcagggtggtggattctaacaaaaatatacaatagatacttcttctgaaaaaatgaaagatgcatgttaggaggtcccatgatgatgtcgtgttttagtcccatgaaaaagatacggacattttatgttttgccatcaatgagaaatagttccaaaaaaatactatcctatcgtacaagcaaattgtttaaaaaatgtgtcattaccattcatagattcaggttatgttagcccaatccaaattaaatgccctcagcttgaattggtcactcctgcaggaagattctcctcatttcacagtagctgggttgccgaatgctatgtgggaaatgacatccgttgagtctctgcatctcacgccaaatatccaacaactcgcacaaaccgtcatcaccaagggattcagtcttataacctaacaagctgttcttgcgcgtagaaaactccattggcatgggcaacaaaatg

SEQ ID NO: 39445 - DNA, 738 bp, Oryza sativa
tttgttttacctacaaacgattctcctcttctaatccccaagattttcttgcattttcttgactcggtggcgggaggaagaatggctgtggcgggaggggaattttcgtgggcacaatgaggatttctcggtgggattcggcgcgagggcatgtgagggcgaagcaacgccgcccacagcgcacccgactcgcttctccctgtccacttgcgccctcaaactggtgaggttctgcgtcgctttgtttggggacagaaacctacctgagacacggtcctgcactctacgtcgaccaaaatctgagctggcgcaagaaagttccgcgccagctcagtgcactgtgagaggccttagacttcccgacacctgctactcctgaaggtggtgaggtggtcagagagtggcctaaaacataaggtgtgtgtgtgtctctctctctatatatatatatatatatatagggtgagactattctacacccccctatagaataactattctataccccctcccctcaagagcccaccctatctctccctccttttattgggctcaaaacccacctcccaccccagtcaaagcatggtcaaaggacggtcaaatcgctgccacatcagtcaaacccgtgtgctaacttcctcccacgtccacctatttgttgtcctcgtctcgtacgaacggtgcaataacaggacgaacaccatgccgtaacgatgtagcttacttgcaataacacta

SEQ ID NO: 39446 - DNA, 2288 bp, Oryza sativa
aatatgtgacctgtaaaatttttcctctcctctcctctctctccgaactagtgcaaaggagagatgtgcaacttttttatttttattttattttctgatatttttttcacacttagaaactcacaggaatcaaccatgtaaaaaataaactcaaacggacgaaatatgtggcatgtggaattttccaaagttctaccgaaaaacttctctcctcgaaaacacaatcttgcaagcggaatttggaggttttaatatcgccgaacccggcaaagcgagggagaattggatgtaacattttctatagatgtccgtacatatattatttgcctgattccgagttcgtatgagaaagttacgcctattttaatagatgacatattttgtccgtttcggtagagttttggaaaattctacaagtcacatattttgtccgtttgagtttattttttatacgattggttcctatgttctcctaagtgtgaaaaacatatcaaaaaaatgaaataaaaataaaaaaaattacatctctatgtactgtttaacttatatatgtcatttcatgtggttatattttgaattagattaagtaatttcatatagtggtagagtgtattatgtttaacatgctgatcaaagggttttactaaaggaattatggtctaattttagtgaaggtgcaaagtagactaagtggtatgctagctattttcagacttagctaagtggtagttcgagtttaaattttttttgtggttggttgtatcgtgatcctaagtgtgaaaaaacatccgaaaaaataaaataaaaaagacaccgttgcaactccatacagagaaacaggaatggaggcggcggcgccagcatggctggcgccctcctcctgccacgtcagttcgcatgcgccacggtggcaggaggacggcgccagagatggcgccgccccattcgatgacagtgccagccactctggcgccaaaaaggaccatttttgagataaattttttcaggggtctatttgcgaaataagttttttaaaaggaccaaaatgtgaaaaatccagttggatggcatacgtgtgacaaaaaacgcacatgctagctattttttttagctaactaaccatgcctctaaaggtttgttacctatctgactctctcctcacgcttgtgcgatgtttataaacctggctctatgagatggttgtttgtttttggccagtatatatatatatatatatatatatatatatatatattggttgtttcttaaaagagaaaaaaatgccatttaatccacacagttggatcaatttaatttgtctttaacattttcatgtagaaagcaattttatgtaatttatagtaaattcgatacggtggttgttagggccgaattcaccaccaatgaccccagacgcccgtctaagcttatggttgttgtgaaatggaatttaaatgttatttagggattggaaattatattttcatagcaaacgttcaatttgagagtggcccggactctaaaactattgtagatccgattgaggggtgcaaattggacgagagcacaatagttcagagtgattttagacattacacttattaaaacccatgatccaccaactaaacgcgttttgagtttcaaaggtgtacgtcctactttgttttgctactgaaatctttctccattagctaaaatgatattatttccatcggtatagcagggacattattaattaagtccatttcaagaaaggccaggatcaaagcaaagtctaagagttcaagaaattaattcacatagcaccctgggagaagaagatagtgaaatggcttgcgcaggccaacgaggtcacaatgatctccatgggtatcaaaacaatgtgcacagcccatgagacaagagtgcagaatgtgctataaggctgtaagagacaatacgcggtacgtttgtttgccattttcttgactattcctacgttcgatccggacctctcgggttatgtgccacactggcaggatgttctgcacgtactccatacgtgaagatcttcaggcgaggcatccgacttcccgatgccgcccaaacctatgaaataactgagcatagatcgagctggacttctccttgcatgcagttttggagtgtagttcttggtaattcagtaatactctgttgagtacttgagttgctcagctcatctcccttgtgcacacgcataaaatacactggtggagaaaccatctttcgtcggtcggccgatttccccaatagtcccggatgcaata

SEQ ID NO: 39447 - DNA, 594 bp, Oryza sativa
ccgaatcttatcataatttaaataatagatgttacttattactccactgctggccatttaaatataatagttggtataaacatattggagtatgagtcgataatgaccataccaggcagtcgccactgttggccaacagtataaatgcgatgatcaatcgattagcggaaaagtcttcccaacccaaatcccagctaaactcccttctattaatataacgttaatcaatctatttggtcgtttgaaaaatgttatggtctttcattttattcacctttctaactctaatcggctaagtaagtttgataagtagagaactccttagactaagcttaagtgcaaagataaaatcatggtctctcattttagtcacctttctaattagataattaagtttgctaaggcccctttgaatcgcaggattgagaaaacgtaggaataggaaaaacgtaggattttgataggaatgtaagtataaaatagaggattgcaaaacacaggaatgaccgtttaattgaaccataggaaaaacacatgaattggatgagagagatagactcaaaggaaagttagcaagaggtcgaaggtcttgct

SEQ ID NO: 39448 - DNA, 607 bp, Oryza sativa
tgtatatgcatacataccttgcacaggttcgtccatgctagctaaatgtcctttggctaaaccgctaagatcagcagcgccgccgccgcatcgattcagcgttaaaaaaacagccagcactcctacatatataccagccccaacaaaacatatgcaatgacagcacaacacgttgccctaggacatccatccttagctaaaaaaggccttgcatcctgaagcccaccagcagcccactatttatactcttgcacacctttaagagcccaacgtcaaacataagcacaaaagcctatagctccttgatatgttagcccgatcagcccacgataacaacagagagatccaatgcttactgctgcacgacctaaatagccaactaaatacgacctaaacagccaacttaaaaagccgttttccatcaattgttacatcggtactgatcaaataacacgaatcggttataaaccgcgcggcgcagcgcgcgaacccgctctagtatatatagcaatgcaacatataatagcactgacatcgagttggagatgaagatgaacatttttataaaaaaaactcgacacatgacgattgatttagctagttagca

SEQ ID NO: 39449 - DNA, 626 bp, Oryza sativa
taggctaatctaagcatatgcatggacatggacatatgcatattcagatttgtaccaggattggattttttttttacatgttagatggagtcacatgcaaaagagtatatagagttcaagcatgtaaaatttcttgatccgtgctttaacctcatgatactgcgaatcaactactcctatgaagttagcggacgttgacaattgagtgtcccgaggcagtctatgtcagaatgtcagatgattgtagtgtaccgactcaggggctcagggcgatatcactgacagacagcaacaaagcagccactgttttctgctgttaaatcgtaaccaccggctggcgtctgcatttcagatcgatttctgtcatcgcactcaagcaaaagccatttttgcagcgtcggattcgatgttagtgtttcacgggaaggcgtacggtacttctttttgggacagtaaacatcggcatttgcagcagtgttacgggtacgtcctgattcctgatggctaactggcctttttcgtcagtaatcgcaggagtcaccaacataatgatggtgcacaccatacgtaccagtttaccatgggaatgtgggagtcgcatccaaagtatttccccattattttga

SEQ ID NO: 39450 - DNA, 723 bp, Oryza sativa
catttcagtcacgtggagaaaaagaatatagattatgaatcagattaggcatgcaaagggataaagaaaaatcagttatactgctctcccaaactatttcgtcagaaaataccatagtgagattaagtcagtatttttctaaacaataatctgcagcattattagcacctgtaacgatactaaaataaaaacaaaatcagcaaagttgtgaatgggaaatgatcggtgacactaaggctcagttctattcttcaacttccttatttttcgttagcacgattttcaaacggttaaatagtgtattttttttcaaaaaaagtttatatatacaagttgttttaaaaaaagcaaataattcaattttcaaatttatgatcgttaatatttaattaatcatgtgctaatgaggtttctcattttgcgtgcaacaaaaatccaactcccaaaagagagatcaaacggggcctaagttaattaagtagtgtgaattggaaggtgattgagtgaagatcaagagagggtttccctcccgttataattaaggagataggtaggctgtcaaggcaatgagatagtaatggcaacgtccagctctgtaaataaaactaaggaagaaaagtgcgtggtaataaagaagtacagtgagaagaaggcaaagttttcttacgaagcaatgataacctaaattatagtcgttgtagataaaacaggagtatgggctgg

SEQ ID NO: 39451 - DNA, 608 bp, Oryza sativa
tctatatcgttagatctatggtagaaaaccaaaacctcccacacctcccacgttcccatatccgtgcgaccaggctccttgttcctttctcttttttttatccctatcacaatttaaattaaaattatgattatgcaaaacaatctcataaataggtgttaaagtccattaaacattctataaatatttctaaatcgttgtatgacattagagaaacatcgatccattggtttccacttaaatctggacacattaatttacatcgttattggatcttttttttactaaaaaaacacctcaaatcatcttcccttcctctcttcctctccatccctatgggcattttgccaagctgctacttgtctcacttaaattagaaaagattataataaatctgagaaaaaaaataatatccaaccatcgattttggcttaaacttcaacacattattttatgccgtcagatcaatcattttttttctaaaaaaaagaaacataccaaacctccctccatccccgtccccatgcggggtgcagcgttacttttctctgttttttctgtctctatgaaaattaaaattaaaattatttttatgggcaaagaaaaga

SEQ ID NO: 39452 - DNA, 621 bp, Oryza sativa
atgcttggtgtatcaaattattggactaaaattccttctttctagacatatgagaaaattataacacccaactaatatgtctagatgaataccaatttaagtggcttttgaaacaataatcatcaaggtatcaaaacacttagccacttgaagtatgatcaataacgaatcaccaaagtcatatgcctctcacacatgaactctaataaactacaaatgttagtaatcggcttgagcatgttggcaaaatattaaaacaaagccaatgttcgaaacataacaactctagaacaaatcatcacattgaccattgacattagacgaattactaataagcaaaactttcatggtgcaataaatatgaattatatatattatatggtgatccataaaaacacatatgatttggctttaaataaatatcaaagactcatgagccaaattagactttaaacaaatcatatgccaacttaccaattccactacttagaactagcatttgcaacatgtatgtataatatcaatttgataagcaaaaacacacatgtgctagatagcaagcaatgttctaacatggcataggcatataatataatgatgaacacaataaacccatacctt

SEQ ID NO: 39453 - DNA, 613 bp, Oryza sativa
tggattttatgtggctaacccacgtgtctttcttgatcgatggagttatcatactttgacttactggcggcaagaaacctgaatgcgttaatttactgtacatattgcagtatactctaccttggtttagggcttggttagttcccatatttttttttccaaaaaatcacattaaacctttggacacatgtataaagcattaaatatagataaaataaaaaactaattgtacagtttgcatgaaaatcgcgagatgaatcttttaaacctaattagttcatgattagattatccataagtattacagtaacccacatgtgctaatgacggattagttaggcttaataaattcatctcacggtttcaaggcgagttatgaaattagttttttcgttcgtgtccgaaaacccattccgatatccggtcaaacgtccgatgtgacacccaaaaattttcttttcctgaactaaacagctaaaccgggccttaattgattcaccatgttccgagttctctgagtaaactctgtaaaaaaacgtcaacacatcgacggtttcaagctgaaacgaagcaaaataacccacttacctgaagttatgaactcatattctgt

SEQ ID NO: 39454 - DNA, 704 bp, Oryza sativa
agtccctctcaaagaataacatggtacgcagcggaaaataaaactataacaaactacggaacagctatggcgactccactccacaggcatcctaaccagaacaagcctaatcctccagatcatcaccttcactgagatactcctcttctgatgaatgaatattgcaagaatgagcatatgacatactcaacaagtcacacagcaaatatgcaagtgcacaggataacaaaggatggcataatatagctcatttgcagaaacagcatttaacgaatatttaagagaatagtaaaacagttgtaataattaatcaatattaaataaacaccatacaacacacccatgttgcataggcccaaccacatttgaacaaccaaccccagttgaacaaattaaacctccaaaccaggaattatccattccaaaccaggagtcaaattaattaccacattattaccattaatgagtagtgtgagactaatcacgaaaaacattgctcaactcacccataaccgcgggtacggctattcgaatagtttaaactctgatcagaggtgtaccactgtacccacaagacacaaccccacatcatgtcaccatgtgcctcaataccaccacggtacctcggaaaggagttggggacaataccccttgcacaacataacccattacagcgcacctttcctggatcataatcacccccc

SEQ ID NO: 39455 - DNA, 624 bp, Oryza sativa
ttattttttattagaaattttaactaatctcgtattggattcttatatggattcttctttcaatatttcttatttttaatttcgaatttcagctaattttaaattgtattcctacttgaactctttatttattttcttttgctaatttcggggttgtttttatttttattccgaattttaattaatctcggactgggttcttatatggactcttcttttaatattctttatttttaattctgaatttcagctacgttaatcgaagaaaaagaaaaaaaagaagagtccaagtagaagtacaatttaaaaatagctaaaattctgaatttaaaataaacaatattgaaagaagttttcatataagaacccaataagagattaatcaaaattcgaaataaaataaaataaaatctaaaattagaaaaggaaaggagaagtttccatataagaacccaatacgagaaaggggtttctaatcataaattcaaaataaaaataaaataaaattccaaattagaaatcaaaatgagattccaagtagacatacaatttaaaaatagctgcaattcagaattaaaaataaccaatattgaaataagttttcatataacaaccgaatacgag

SEQ ID NO: 39456 - DNA, 643 bp, Oryza sativa
gctcaattctgccaaaccaatttcactcatatgcccaagacgcatatgccaaagattaatagcatcggaattagataatgaatcagaaattgtagcaacattacctaatatagttgtacctcgcaaatggtacaggttggcagatttaatatcagctttcatcacaacaagagagcctttagttaccttcaaaattccatctccaccggaatatttgtaccctttgcgatcaagagtacataaagagatgaggcttctcttcaaatttggaatatgccgcacatatgacaatgttctgatacagccatcaaacatcttgatctgaactattccaatacctgcaacctcgcatggtgtatcatcacccatcaaaacagtatcaccttgcacagcttcataggtggcaaaccaattcctattcgggcacatgtgataggtgcatgcagtatcaagaatccactggtcactagtttgtgcacaaccagcataagcaacaagcaattgtgcatcagacttctcatcaataacaactgcggctttaccttcctcttctttcttaccttttggtacatattttccggttctcttgtctttatcctgtagcttccaacactcagagatatcatgtccatctctcttgcag

SEQ ID NO: 39457 - DNA, 530 bp, Oryza sativa
attcctgcagcccgctccccctcgggctgcgacgtccgcgcggccccctccaggcgccgactgctggcacgcgccgccccgccccctcggggaggagatgggggaggtgttcctccacaactatctcttcccctgcgctgccacaggccggctgataaccaaacccccatacctgcagtgcataaacaacaccccctcttgatgcatacagtgccatctgaaaggcctcctcaacgcccatcacaatcttaacctataactaatctaaacacacatccccaataatcataggcataatggatgcacgcaccaaatactaaattactgaggattgatatactaaagaaagcggcaccccattcctgagataaaagagaataatattctaaatactatgaaaagagagcacaaagctagatatggaattgattcttcattccactatgaacggagaataaagtcatttatactatgactaactataaacacgcgtacaattgccgcatctgcgaaaaatgtatgtgatgaga

SEQ ID NO: 39458 - DNA, 554 bp, Oryza sativa
ctaagtaacaggcctataaaggagtagagtggtgccggttgatacgacatataaaaattgttaataaagcatcaaatagaatcctaatgacgattaaaaaggagggacgtcaggcaggccgtgaagcaaacgagtaaggcggttgccgggacttcttagacagtaaaaaaacaaaccgcattgataatcgtattcgatttttaaaatctcaatgataataaaaaggagaagcagcgggcggagtgtataagagtatagttgcagagccaccgacgtttgacgggacttctagaaaataaaaaatgaattccaacgatagttatgttcgatttttagaatcacaatgacaataaaaaagtaggcggcgaacatgctgtagaggggcatagtggcatcgtttgataggacttctaaaaattttaaaaaatgaaactacaagttatgttcgattttaaaatctcaatgacaataaagaatgaattacaatgatagttatgttcgattttaaaatctcaatgacaataaagaaggtaggcagcgggcgagccgtagag

SEQ ID NO: 39459 - DNA, 607 bp, Oryza sativa
cctgcattgcttcatttttgacgcctagtttcttggcatgtttactgctctaattatactacctctaattcaaaatatggcttacacagttacactacaagcggacatcaaaatggaggatcttttacacggaaaaaagggacttaaaaatatatgggcgtgcaatatgatcacattttttctttctttatactcctaattatagtaatgcagattatttttttaaaatatactttttttaataattcatgtttatatacatgcatggaaaataatagtagaaatatacacttgaagtggagacgctcacaccgcagtgcggatttgtgagcgcaccctcgtgatcgatctatgacacacgtatatttatacaattcctccccatatataagcgtaaattattaaaaaaaagtgtattctaaattttgttcgtttagcttaattgatcctccaatgcgcattattgcacctttgaattatttggtaccttctgctaagaaacatgaggagattttatcatgaaatctacttccttcagaacgcctagcttgggttcaatctattatttatgcaaatcctcaacaaccctgccttgcaataaagccac

SEQ ID NO: 39460 - DNA, 543 bp, Oryza sativa
caatatatattggagtgtttaataaatacccaagctaggaacttaatcatatttactatatacggctatgtatatactttatatagatatgtacttgtctttctctctagactaaaacgaaataattacgaaaatgaagcccactggtggagatttattgagtgcataattatggagaataatgtgatggtctgaaggagggcaacaatatttttcgttgagagcgtgagaatgacattttgacaagtataggtacaactcacctccccggtcgattatattgcacccatgcattatactatatggccccatgcgttgaataattaagctacatgttccccgaaagtgctacacatttgtctgtgtaaagtgaaaacaaccaaatattgacttttagcttagtgctatatatatactatgtgatgttcacattatttcccgatagatagtaaaagtgtgatatatatatatatatatatatatatatatatatatatatatatatatatatatatatatatatatatatatatatatatatat

SEQ ID NO: 39461 - DNA, 612 bp, Oryza sativa
ctggtggtggtggtgctgctccgggtcccgcggctccgggtggtggtcggtggagcgtaggtgggcatcggcggcgcgcgtggccccgaggagcgcgttgatgagatcgtcgcgctcggcggcctcgcgctcgaggcggtcgacgcgggcgcgcagcgcggcggcgtcggcctcggcctcggcgaggcgcgcgcggagggaggcggcctcgtcggtggcggcggtggcgcgggcgaagaggcggcgctcgttgtccatccaggaggcgcggtggccggcgaagatctcggcggcgcgggcattggcgcgggcgtcgtcgcggcggcgcgcgcgcagctggcggagctggtcctcggcggcgaggaggcgcgtggcgaggacgcggccgcgggactggagcgaggcgaggtggcgcgcggcgggggtgccgcccgggagggaggcgaggaagaaggcgaagctgaggccgagataggaggcgagggcgtcgccgccggtagcggggtcctgcggtggcgcggggctggacgctgcaggtggcgtcggcggtggcggagcagccgccgccattttctctaggttctactcctactagtgtagtgtagtagtgtg

SEQ ID NO: 39462 - DNA, 715 bp, Oryza sativa
aagtcattaagatgataggttgttggattgaaatatgcctatcaaaaataaatttttcagatttggaaatatgactatcaaaagtagatggaggggatatatagcaggccagtccatgcattcattaaaattcaattttgtcccttttatgagtttactgtagcactacaaacaggtgcttggtttattttgaaaaatggatttatgttctttcaaatagtctacatttaaccgtacgcacaccacactcgcgcaccagtgtcaaccatctgcaaattcatagtcacaataaaatccaatagaaagcgcactgtgaccaaagtaatgttagtggtggacgtaggattctaaaaatgcttgggggcacaaagttgaaataggtagcatcaatatatgacaaaacctaaagcgtatcaaaggaaacaaaacatttttatgttgaaaataataaattacgtacactaagaaaattacttataattaattgtagttgttttttattgttatttgcaattctgaaagcaaatacagcgtgctgttaaccatatatatatatatatatatatcacacttttaactatctatcaggaaataatgtgaacatcacatagtatatatatagcactaagctaaaagtcaatatttggttgttttcacttttcacagacaaatgtgtagcactttcgtggaacatgtagcttaattattcaacgca

SEQ ID NO: 39463 - DNA, 761 bp, Oryza sativa
gtatgggcctgtcccattcaacgggcaaatgctactccaacttttccatcacattgtttcaatttcaaccaaacttccaattatggcgtaaactaaacacacccctaatatcaatttcgcacatccatatttcttgaaatatttaccaagacttcaccgtacagaagatctacttatgaaacacgagaagaaatcagtaccacccatgctactcaaaatttcaaaatgagtggaaactgatatctcgcaatatgaaacatcagaatacttcatcacaaaaacatcatgactgcacttcgcgctggttcatttcaacatctatagtgcaagtgcggaaccatgtactccagcacccacagaaatttgaactgcgagcagggttgaatgacaagacactagacaacaaaatgaccaacatgatcatcatccagcccctgcccctagacagtagacaacctagtagaacaaatccccaaataacaatagaataattctgacaaacaaccatgacattttaatcatccagtatctagcagacatgaattttccagaaaggacagctacatgattgatcctatccaataatttgtgaatgaataacataattaatcagtgctcacaataggtgtaaaatcggctcctatatatacatcgggaaccaaatgcataaaacgaacctatatacgatatttgttaaaatgaacataaacatacgatattcatagaagggtacagagctcgaattcgccctatagtagtcg

SEQ ID NO: 39464 - DNA, 1383 bp, Oryza sativa
ttcggttacttgcaattttgaagctgtgcattggcagggtagttatcaatttcatacacaaatgaaaacatagggaaaaggccgaaaggctaacgggcgatcgatcgctgccagcgatcgttttttttttcttttcctctttttagtaagtttatacctaaagtttacacatctaaactttatccacctaaagtttgtagagcgaatgtgtataagtcaaaagtttatatacccgattcaaattcgaattcagattcaaatattttatataaaaatatttctatacacaaagtttatacgtgcaaaatttatggtataaagtctatgcacatgaatgagagtattagattctaattgtcttttacttttttttgaaatttatgatgtaatagaaaagtttttgaactcgtcattttgacggtttgaaggatagatatatgaggaaagatgatacaaacaattaaagttctttgattaatataataaagcttttagaatgaccctttttcctaggggctgttagtgggcgggtaatcgtttccctctcctcctagcgatcatacgtccctccctctaatactcctctttcatctctctttttttaacaaacagtgcccctaattgaagtactcagttgacacttgacagtgtacctaccagtgtttaaactaatcaactccttcttaatcacttagacattttctgtcccatatctgctagcacgctcctcctcctcacaggctcacacccgtttgtactcttcgccggctttagcgtacacgccagagtccgtcctcagtatgatcttggcgtcctgcgtgacgtagcacgcccagttgtccacgtaggacagcggcccggccctgatcagcggccgcgtgtcctccacgtcatcgtcctcgtcattgtgctccgtgtcatcctcacactcctccctcgagtaggcgaacctgcttgacacaccacacgcacacacccacgagtcggtaaacttttgttcatattgatataagatgatgggctgtagtaatggtgagcagtagtagcatgtacctcattgaattttgtgagggcgtccataggatgcagatggtgcagaggaggaagaaggagatgagctcccacaccgcggggattacccacgccactcgccaccgctcgttgtgctcatcagtcgtcttaaaatggacctgaattttgattttagaatttttttcatacattattttgaagtgctaaaagtcttcttatgttaattaatttacgagcttgtactaatgtaccacatgaacagttagtgtcatgacgataaaagtcaccagtaatgtggacgaaaacaactaaggttgtgtttagttccacgcaaaattggaagtttaaaga

SEQ ID NO: 39465 - DNA, 1979 bp, Oryza sativa
tgtgggcaaatgtttggtaccttgagcagataaacatcgctcctgggtggagaagacctaggggtttgagaagagcagtgatattgtgacaagtttccttaattcctcttgctttgtttagtggcagttttacttgtggactaagggatgaccgtgagcttgtaatgccagagctgaagttgaggttttagtgacgtgccactggggttttagcggtttgaaagccacgtgtgtgtcctctcctgattacacttacaccatcactttcttggtcatgtcaagtcaacgacgatgttaattaccgcaataagaacaaatctaatactcctccgtcccaaaatataaacattcttagcatagtgacgagtcaaatgtttttaattttaactattaacagcaaaaaaataaaaaaaaatcaatcatgtaaaattgatattagtagatttatcattagaaaaactatcataatatttaactttttttatttaaaacatcttacttttatagatattgttggttaaaatagcatctcagagaccgtgttagagtaaaaaaaaatgcttatattttaggatggagggagtagttatctacattcactctaatagcttagcatataataaatttataaatatatattttactatcaatatttgatcacctcgcatacacacgtaaatacatgatatattgaaatccgtgtgtcacagctgactatatctatagctcgtttttctcctctctacgcttatctcttcttgacatttacttgtagctaacatatagcctgttgtcttaaaaaaaacatatagcctgtatttgctacgcgttgttatatttctaccggtaccactgccctgagttcttgatttgtagcataaggtacaatatttttttcccataaacgtgatcattgaagaagaaaaaaaagggatattgcagatgtgctgactgagctaattaagaataagatattcaggcataaaccaagttagctagtgacttttgcatgcatttgacatgcataagtccactagcaaatatctgcagccaaaaatcatcctaatcctaataatcaaccaaaaaagtccaaaacaaaaggaaaaggtcaaaaggtactcatcgcaagcctgcaacaagtcgcacagcaagacagaaactcacaccagttgggcaggaaaccacatgaccgtgtgtactgcatgccccgtttggctcacaacctaaccaccagcacacgcctaattagtttaatcaataattaccttaccttgtttttgctttcagaattaagtgatcgtctcgtctaagcttcatgacctttacgcatccgatcgagtgacaagagatcaattggagtagttataaataagcgtgagtattataattaggagaagttttactggtgtttttatttcaaaaataaaaaaaaatcaacggtctaaaatagaagtattatataagggtatttaagtatcgatctaacagatgacatggtgaagggtgtcgacaaataaccatattttactgttgattaccctgttgtcattatttactgtaattttattttaaaaatggaggattttcccatataactatataaaccgatgttcaatgaccgaacgaaaatgggaaaagtttcaaaaaggaaaaaaacttttcgccttcaacggggcttaattcaaacagcccaactatttgcctctgttttttacgtgatttttcaaatgttcaatttcaaaaaaaaaaggtcaagttcaagcttgacatgaattttgaccttgtttttacatgcattttaaaatggaaactgaagttcaaaacataggggagaaagcaatagcctagcaaacaaaaccattttccccctccaattggacctaatttgaaacaacacccaattgaaaatggaatatgtctactttgactcccttaactagtgtcttaacctaatttgtatctttaaaccgtaatagcgg

SEQ ID NO: 39466 - DNA, 560 bp, Oryza sativa
catgtgccggctccactcgatgaacagataggtggttttggttcaataacatgtcttgatagtgtggaagagagatcgatccaaaaagatcttggtcataattggaattgggagaggcaacattagcattggaaccatcatcattataatcatcttcagtttcctcaatttgatggggtgttggctcgactcgaggaacaaatatgtgttttttgttcaatagcatatcctcataatgtggaagagagattgatccagaaggaacacaaggcttgggtattggaatttcattgcatttatgtgctatatcaagcatctcctgtccaaagtgaagatatccgtcatgttacgacaattttttcatgtgtatatggacgttatagcaaccaattaaataatgattgaacataggatcttataaaattccttaagaatagacccacaaaaagcccttaatgggctggcttattgggaaaaaaacaacttgtcttaagatgattttgttgcataatataatagaaatgttagggtggctagtttaggtcactttctcgaccttg

SEQ ID NO: 39467 - DNA, 549 bp, Oryza sativa
accgttcccttatttacgaagttaaatgtaagtacattgtgttgctgtctcgttgataactggttgacttgccatcaaaatgccatcgaggtttgggaagttgttagtaccatgatggagctctagtttatttgttgtggcttatatgagagagcaagtatttagcatttaccttcagacttgagtaatgattcaatgggtaattatcatttgtttgtcgtattactaaagcaatggtgtttgttctatggttttattacaaacaaagtaataagatgctgacataattcaggaatttgtaatctgatctcttatctgctgtatcaaatttaaatttttcacttttacttttctccatcacagggaaatgatatcaaggcattcaagtcattttatgaatcacttgtcatgaaaataagacaacagcagaatgggagtcttgtcttcagatagcgtcattcaattattttaaatctgtttgccagtgaaagattcctcagttctacaatttgaatataggtagttatttcattcttttcttggcttatc

SEQ ID NO: 39468 - DNA, 773 bp, Oryza sativa
gccatcgacttgcttatccaatattcacatgcctatcaccaccttgtaactaaccttagaggaactagcctacgctctcaaaagaagagcttcctagtgagtaaagaaacattaaaatttaataaaagggaccaacacggtttacaaaaccaacaaaaactgcttgattttcatgcaattttgaggttttgaactggcttgagttaacaaaacagctttgttaaccagtcaaatagaaaaccaagtgaatttccaattttaaatgaaatatatctgaatttcatcatttctttatcaatttttcacaaaaaccaagaaaactgctaaagagcggtttccaatttggtattgcggctttgtgaattttggagagcactcgacaattaagtagggttagaagctcaagtattttaaagaaaaaatcttgtcagcattaatttagttatatcatcttcttgccaaaaaagtataccatccacacctattaaagctcctttgaaacattggattaaaaaacggagaataggaaaagcacgaaatttgataggaatgaaagtataaagcacaggaaaacagacaggaatagtcatttgatttataaaccacaagaaaaaaatgcatgtatcagaagagagaaatagactcgaagaaaattttccaagagatatgagatcttgctaatttttttcaaaatctatatgtaataagtcattccataggaattttataggatttaaaaagctccaatcctttatatcaaagggccaaatagg

SEQ ID NO: 39469 - DNA, 768 bp, Oryza sativa
cgaaagttgcttaaaatattactccctccattccatcgatctacatatagttttttttgaggttattcctaaatgatctacacatttgtgtttatttattagagtctattcgttatttgtgcattggagtaaatggacattgatgcatgcattccatgcacacaagtatttataacacatatacaataccttgatttattattggctaggaaatattggggatggtgcatgcattgagtttgttgctagagtaaatatagtatgagagagttattagcttttcttggtcttggtatacctatgaaatatgtagattaatttggaatggatggagtatattgatcaatttttttaaaaaaaaaatagctaatacttaattaaccacgcgctaataaatcactccatttttcgtgcgtgggtgatgattcccaacccccaccaccgaacaccgatcaatcatctattggggtcgggagcacttcacagaaatagcagacatcccacaaggattgacagtttaatagatgatcacaaaaaatcgtcacattgacatcccacaaggatcaacaatttaacagatgatcacaagtcagtctcacatcgacagagtagacgtctagacgagcattaacctctgaaatctcaccccaaaaaaaatgcaaacaggaaaaggctaacacaaaaatataaacaggagaaaataaaaaaaggaaaaaaaattaacgacgcctgagagattcgaactctcgcggggagaccccatgtact

SEQ ID NO: 39470 - DNA, 570 bp, Oryza sativa
atatcccgtattgcagttatgggggtaattcaatcgacctccataattgagggggtaattcgttcttttttttttctttcatcaatgtataagcttgatggctgttcggttcatacactgattgtttgatctgcatgcagtaattgctttcacatgcatggtttggtagctctccagtttacatggccaattggttcgtatgcaaaggaacacagggacagtctttgcgccctggagtaaaatgggttacggggttatgcctcttttttttttatcttgttgtcagaactcaaaacaaaaatactgattatcagaagaaaatagagggagtatatagtttgtttttcaccgggacagccaataatacgttgtataatttttattacacatgtacaatgggatgtgaatgggatgtgagtgttgtaaataaaacaagacatgtttaattttcgctaaggtatatgagagagatcgaagagagagaatgaaactacttcctccattttaaaataagtatactcatctatatcatattggttttaaattaagtgtactattttgatacgaata

SEQ ID NO: 39471 - DNA, 537 bp, Oryza sativa
aaaagatcaccaaatggcagtttagaatggtgggtttgttgattggttcataaaaaagtacttctacattagcttcatcagaaaggtttctgctagaggccctcttctaaatataaaagttttgtcaactgcagatatctcactcaaggaagatatgcttaaataaataaaaataaaaactatgggacgaaaccccgcaaaagtaagagcaactaacctttctgttgccacctccaggtaaaagaaatatgcagaacctatctctatcatcataatcacgcaatgtcgatggttgaacaagcacaccaccagataagtcaccagaataaacctataggaatgaacataaatcagacaaatctgaacatatatttagctattgcagttttgaaacagtaaacagttctcgagccagatttcagttacatctgcaactaacatatgctcacaaaaaaagaaaaatttgagaagtcttggaaagtcagattatcacaggaactagtgagctcataactacttaaagaagtgactaccgat

SEQ ID NO: 39472 - DNA, 941 bp, Oryza sativa
attacactgttcttcagttcttgtacttagtacgttttcttttttttttcttcttctgtatgaaatacgctcgtaataacatcgatcttattaaggttgtttaactttttggtgttctgttagatctgcagttccttcttttttttatatatatggacaatttgatggtcagatgaacagaaggcctttaccaagtagtttctgaacttctgatgctagatctatacgaaggttaggatggatgcacagctgctggtttctacaaacatcagtacatcatatcccgttgcgtatgtggttgccatgagtcttttctgttttaaaaaagaggcagattagaatgttcgatacagctatgaatcattgatttgcttctgcattattcatgcatgcagccatacagctcaagtattcgttgttttgtctaatacggtgtactctgtatctgggtttctttcagaccacagtctgcgtcagatatttttcttctctaatccatttgtgtatttgtgttgttcaccagtagtgcacgtctggtatgtacttgctacttccatcttctgaaaacaacgagggaaaaattatctttggcttgtaatactaattaactccttacatattcttgaattcctcttcggtgttccagacactcttgtatgaaagtatagagctattttctcgtagtacaaaatgaggataaaatccctctcattacaaaacaaagagggaggttatgtgtcttatggaagaggccggggatgtaaaacatttctgttgtctttaaaaaaaaagataaaagagggatttgaagaattgtatttgaaattctgaattatacataaccaaaattgatatggattcgggattgagtcggtctggtaattgcagatagtccaacattaccaataaatcatgttggctttcaaagttttaacttaaat

SEQ ID NO: 39473 - DNA, 763 bp, Oryza sativa
caatgcgtgacaaagcaatgcgtcaagccgagttgcagacaaaaagcagctagtcagaaagaaagaaagaggtgatgctgacaagcattttaattgcacttttgttcttcattccttaatgatcacactaatacgattttgcatcgtttacatatcatgtcagcaaaagcatcgcgtctcttgacgccgccgcacccgagcagagcgtattcgatcaccacccgcgccaagagcgcttgtcgatccgatccggtgcaggacaacttcttccatcatcccggctgaggatgcttgctttgctgagctaattgcatgcaagagagcaattgaaacaggccaaggaagtcagagtgttacctagggacagtcggacagacagacaatccagatgtagtgagaatgcttgaggggagggatctcaacagatcagcttatggagccttagcacaagatatcaaagcgaaactcctcttacttcaggaggtaaaggttggctgggtccgacaaatcaggcgtcgcataagttagcgcagaatagaatttttttaccagtgcttggtttaatgtatgtaacccctcattcttagaggcggcttttttccccttattaaatccagggaacttcattttccccccttattttactgtagaaactagcaagtgcagaggattcaacccaattttgtatatgagaagaaaaacaatgcatatactctatatcatatttcccacttttatctcaaaaggtacaagttttaccctg

SEQ ID NO: 39474 - DNA, 727 bp, Oryza sativa
cagataaaaatgctaaaagcgatgttgcaaaacaaaaaagaaaagacagagaaacgatgaatgagatgtttaatcgtgcgctaatgagttacttcggtttacttgcgtgagatgttagatcctactccctttctaggttaggtttttttggatttgggacggagggaatacatcctagccaagtttgtcaggccattttagattaatgccaaaacatactctaccaatatttaaatagttttctagatatattttggtatttggaatagtgcatacggtggtttatatcattggcattaccaatgtccaatttaaaatttctagattccactcaaagctttgctctaagttgacattaaaaaggcaactctacctcagaaaaaaaaattggtggtaccaaaatttatctaagttttggcactagcagggtatacaaactagctcgtcatttgtcaacattgacaatctttcaaataaaatcttagtgccctataaaaaataatcttagggagaagaaaatggagaatttaaaacatttagtatatacgcctaactgcaagtccaaatatactttctctagtcaacattactcgtcgtttccgagaagcaatttgcactgagtgtagtttaattgagttgtctgaaacgacgtatatttctgtccagagggagtatatatttatggcaaaatttgctacgggactcttaaaaaacgtgtaattagctg

SEQ ID NO: 39475 - DNA, 619 bp, Oryza sativa
agcagataagagatcagattacaaattcctgaattatgtcagcatcttttactttgtttgtaataaaaccatagaacaaacaccattgctttagtaatacgacaaacaaatgataattacccattgaatcattactcaagtctgaaggtaaatgctaaatacttgctctctcatataagccacaacaaataaactagagctccatcatggtactaacaacttcccaaacctcgatggcattttgatggcaagtcaaccagttatcaacgagacagcaacacaatgtacttacatttaacttcgtaaattaagggaacggttcaactttttaaaattgcaatgatagctatgttctagcttttgtgcagttagcaacctcaaacacagtggaatcaaaagaacaagcatacctgtaacttttggtagtactgttcagcaaggtctggtgggcagtgtgcttctcgaagttttgttacaaaatttacaacaaagttctcgccaaatctttcatacataaccttttgagccatcatgattcaccaaacagggcaatctaagaaagaagcagattagactaagctcttgaatgtaaagaaatacatccatcaccacgcaaaag

SEQ ID NO: 39476 - DNA, 1368 bp, Oryza sativa
cctgcttcacctagtaaccttcactctttccattaattctttgtcagtctaccctggaaatcctcgactagtgtctactaggcactagctagtcaactgctagttcccagagggatacagcaatatctgagtgattcaccgcagatatgtcacccatcagaagttgaccatcatcagttactaagagcacccgcaatggtaaagtaaggtgctatctataaaacatgtacatctcagcaatagactcgattaatagtaaaccaccttaatagtatgtctacattggtatctatagctctctcatgcattgtctcgtttttctctatagactatctctaagttagtagatagctttgctctctctcttcatttaatacattccaagtaggaaaatatgctgacatgaatctcttatagagagcctatagataaccattgtgggtgccctaacaccatagattagtagtagataatctataggactgcatgcaatgcgatgatatctaagctcggtgtagattcagaaaccgcatgttcagatatatatgcatttcttttctagccgaaaagcgacacgggattcaggaccacatcgcggcagcttctcgctgcttctctagccttcattctagaactccacacacacccagatgtgtactacttttattttgttcatcgatccaacggtgaatgatgatgggtgcctcttttctgtccagacattcttcaagagtcagagattaatgaatgcacattaatctggactattagctcttgataacaaactctaccagcatagtatcatgcatagctcctatttaagtttatctctcatcttgtggatccctaggatccttcctcatctaacaaagaccaaatgtctcatgagagaaaagggcctcttcatcaatcatccaaatcaagtactccatccgtcccataatataagggattttgaggttttgcttataacatttgaccactcatcttattcaatttttttttcaaatataaaaaacaaaaagttgtgcttaaaatactatagataataaagtaagtcacaaataaaataaataataatttaaaaaaatttgaataagacaagtggtcaaacgttataagtaaaaactcaaaatctcttatattattggatagtgggagtaccaatgtattttagcatactagtagtctactagtagagtacatatatggatatattagtacatctgaacataagatacagtacataaatgtacacacacaagtgagtagtgatcacatatatattcaatggcacatcggcatttgccaaaggtgtagaatgttgcttggcagccactcctggccacctttttttcccaaagttgg

SEQ ID NO: 39477 - DNA, 537 bp, Oryza sativa
ggagagatcgctatagcttccacgcgcaaagcgcagggccacacgtgcgtgtcgacgtagacatgacacggcggacaggcgaggcggcgcggcgcggcgcgggcgggggcgacggcgccgaccagcggacggcgtggtgggcggtgggcgcgtcgcgtcgcgtcgtgcgtgggcgaagttggtcggcgtggcagcgcgcgaccgcgtctcggtctcggcctcgttgctcacggcatacgaagccttgggcttttacgcacgggagaagcccacatatactgattcttttgggccgtcaatctgaggcccaatcaggctcgaacatggcatatatgctgcgtggttttatattagtcccacctcgcgccctagacctgattggaagaggagacatgggtatatgagatgacccagggtttgtaaccaaatcatacctttctcggccttttggctaagatcaagtgtagtatctgttcttatcagtttaatatctgatatgtgtaccatgtgttcactttgatattaaatttattttag

SEQ ID NO: 39478 - DNA, 523 bp, Oryza sativa
acagtgtaatctgaaaagtaccttgtacctagcatgttctactatttacaagtcgtatgaacagatctagtgaaaatcaccaagcatcaatcaaggacgcattttgtcgagcacctagctagcacaaagtatcattggcccaaaaacaaaaaaaaagaagaagaagaagaagaagaagaagaagaagaagaaaaaagctagtacaaagcacacctccctcgatggcagagagtgagagaggagaagaagatcagatcactgacgtttcaggacgcagctgcgccttcaccttatgtaggcgaggtggccgaaccttgccgccgggatcgaccggccgaacaccttgccggccttgccgacgagccctcttaccaccaccttcaccccccgcgcaacgccgccgccgccgcccttcgccggaacagccgcacggccggcgactccgccatcacccgccgccgccaccgccgccaccttagcgccatgaaaacaccgcagtgggagctccatctttctcctgcaa

SEQ ID NO: 39479 - DNA, 639 bp, Oryza sativa
aaattatatcaacagctgtaatggaagtctttcctcaaagtcaatttgattatttctaatacactcatatatatacataaacaacaaagcaatcataacaccatgcgtctaccatgtaataatgtatagtatataatacctgtatttgtcattatttagtggactctgcttagttctcctaaaataatatcaaccagtgccgtactctgaacaggcacaaagtatacacacttaatcaacccaataaaaaaaacaaatatattaccgtggttttctcaatcaagcaaacgaaaatactttaccgaccaaacaaccgcagcaagttagcaacagcaagcaagccagccgcccacttggagacagctggcaacgcccgttgccacccgtccgacgtggcgtccccatcccacttacttgtgggcccccacacctccatgattccctcgcgcgtgggccccaccctcctcctccttccgtttataaagcccaaggcccaaaacgatcacgcgcgcacgaagaggagacgagagagagaagacgcgacggccacaaggtgttcgacgccgtctccccggagcagcagacgccggcgaggaggaagagactagtagcttggagtctgaaggttccagccatgga

SEQ ID NO: 39480 - DNA, 643 bp, Oryza sativa
tcagttgaagatttattcaacatttattgtgatataaaattattctctctcattttttttccaagccgaacaagaccttagtttgatgttggtacggaaaagcctactccataatccacagtttggtgacaccttaatctgagagagtagttatctaggttatgcgtgcttcaggtccttacgctctcagggcaaataataatgaaattcacattacccacataactgtcttttagtgtgagcgtcttcatggcttaataagcccttgtgcaggcgaactatattttcgctttccacaatttataaaatttttaataaacaactaaacaaaatcattttagtattgattaaactacatgcggctcataactaatcatttaactatttgtcacttttaagatgtaatgataataaatttaccactcattttctatggcatatggtgcctatgacatgtgagtccagtgataaatatgttatcatcacttgtaatagtggcaaatataattattcctttatttttagccttccacaatttatagaatttttaataaacaactaaacaaaattattttagtattgattaaactacatgccgctagtaatctataggtgggtcccgccccgcgccccctatatgact

SEQ ID NO: 39481 - DNA, 1174 bp, Oryza sativa
agatgctggctgggcatgcctgtatctgcatttcggtagtactctgcgttgtttgttgcattcataagagtattatttagcagctagtgctacatatattgcccttgtctgaagtgtttccactctcaactagtactggttattgccttttgtcttgttttacatcttctattttcttttgtactcagccactattgtttataaattactatacctccgtttttaaacgtacaacaatgtttaacttttggacattcatcttattaattaaaatgtgagcatcatttattttgttgggactttaagcgtgacttatatttgtgcatatttgcactaacttttcgaatagggcaaatgatgaaaccaaacattatatccaaaaatcaacatcgtcgttcgttttagaaacggagggagtataagggtggggcactgtaaagtagaaaatcttgtttggcttacagtacatccgatgcaaatagcagtatagagaaaatatttatacattcccgttatctcctgcagcgtttctaagttgagactgcctgttaagagttaaagactgacatctttgtgtcgtgctcacctcatctgggcatgcctgttagttgagactgacatagtgacatcttgtatttctctctttttctagcaaaacagtcaattgtttcattgctcatctgaggcaatttgtcaactaccaacaccttgagagaattcaacctaaggtcaagaaggcaaatgtacatacgaatagacaagtgcctaaaatttgtcgattgactgatcacatcgggtaaaagccaccaccctaccaatgagccaggtttaacatggttgggagtatatgtgatgattctgtgcatgctaacatctttgcccgagggaatagcgaaggttaatctctgggcagtatcaagctgtacatcaaaatcgggaggctacttcctgatcttcatcagagtatcagaccttaagtttaaacgttcttcttctcgttgttaaagcaagtatgataagtgcgatggttattgtgaccccaagaccaaatagtacaaccttccaaggagagcaactccaggaactgcagaccatttctatccagccctgaaagagaaaaccaaaaaaattataagattagataaaccttgagaaatattacatcacggacatt

SEQ ID NO: 39482 - DNA, 663 bp, Oryza sativa
tttttttatgggagggaggagtagatgttaatcgtgcgtgcatatttattcatataatacacatgcacaatctacatccctataatcatctcatctcagatgattaggtcattatatcttcatatcgatgaaatcaccataggtttctcgctctcaatggtctacggtttatcacagaaaaaataattagtataaatacgaatatccttatcaagcctagaacttaaactcgaatggacatgtttcactatgagagacctaaccagttgaggtacgtttactttgttcatctcacacatttttgtgcttgagaaaaacacacactagtacatactacatactacagttctcatcccctgaagcaatatttatatacacatcacggtcgttttctggagtcgtcatcgaagaaacacggcgcaacgatctgatcctgacagtgaacggaagaggtaaaggaaagagcaaagggaaattagccaagccaggccaaagccgcccgtttcatctccggcttctgctgatgcttttgccgaaccggcaagcaacacctcgtccgcacgcacaagcaaccgagacgacgccgtccgtctctagtccgtccgtttcccccggcgaaacggccgccgtcctctttcctcctatcggtccatgatgcgcggg

SEQ ID NO: 39483 - DNA, 1001 bp, Oryza sativa
cttttcttttaatataggcattttaaccagccttgctccaatagcaacatcaatcagctatatgtagtcattactttaactagcattgttaactttctaagtaagtggtttgtcttcacacattttcaatggacattagaccagcagcaggcatgtgtgctgatcaacaaactctcatggtaggtgtgattaaaacagggtttgaaggcatagacaaattaaactactgtccaaatagacaagaaagttaatctgtcttcaaatatctagtcttctcaaactgattagctggccatattttactactcttgggtgagagcacttggttccaacctccaagtgccccctccaagaaaaacagctaaagtggtatgaaaaagttgatgagcatggttagctcatcttggtgagtgcttcttttgtctcttgtgtattttggatgatgcagggttttttttttttgtcaactcttttggcatttgtgttctttgttttgctacattctctattggactttgcaactgtcccattcttttgtgtggcattttcctttgtcaggatccctttctagctgtgcagtgcagatgaacaatccaattccagtgcttcaattcccttcccttttttgggaggtcttcactccctttcactaccaagttagtgcttcaatgtgtagaagctccagaaattatcaaaaaattgtgagaacagtgaaatcacttttcatgctctttgctgcacctccaaattagtatacgagtattttagaacttctgtaatgtggggattcttgatgaaaggaagcagaccatggtttagattagagtcaacttttgctcacccaaattttttggtaactaaaataatatcacaaaaaatatttagtttgataacaatgtttgccaatactgttacactaccaaatatgggcagggcgaaaattggctccaaagttccaaattaaaaccccatatttcctcgtgcggtgcggaatgtgcatg

SEQ ID NO: 39484 - DNA, 538 bp, Oryza sativa
cacatgtatctttcgtgttatcgggcaaaaaaaaaacaatggtttagaatgtactaccaccatcctagaaagatcgcagttttgtacagtatatgtataatatttggccgttcatcttatttaattttttttataattagtaattttattgttattagatgataagatataaatagtattttatgtatgactaattttttcaaaaagaaatatatataatttttttaaataagatggacggtcaaacattagacacgaaaactcacaactggatttaaaatgggacgtagcaacaaggcagaggctgtactggccgagagtagccattgtttagttcatagtgggtgagtaaataaaaaaatgtaagtcgcaactgcaagttttaagatcattaagtcataaattaatatacattgttttccctcattaagactgagacaggaaaaaatcgatatataaccacatgttggccaatttggatggactctgattggccgtactagcgaactcactagttcctttgtggggaaatacgtta

SEQ ID NO: 39485 - DNA, 790 bp, Oryza sativa
tttctcgtcgagtaatatcactactattagtttatcttttcaacacatgtgtttgatgagaacaataagataatatggtaataccgttacctataataaagaataactgttagggatactggtaggtcgaccccaaggcttgacccaccatcagggtttcttaaaccgccggggccggggttaccgcgccccggcggtaagcacggttaccgcggtaaccgtgaaaaaccatgaaaaaccgtgcaaaatttatcaaaaattcaaattattttttaaatttatttgaatttaaggaggttaccgcggtatttatattaccgtaccccgcgataagtccggtaaccgccggtaagggaaaccctgcccaccacgccccccgtgctagattatgggtcatgggtcatcttgcccccgcaacgttcctaggcagttgacccatgggtcgacccataacccaaaagttgaataagcatatgcatgagtactggcactgcaaaaggttcgatctcgtctagttacatggctttcatagtggcgatattgtccaacttgtcgcccacaacgccgatgcccctgatcctctggagcaacatcttgattttgtcatagtctatgccttgttggatctctagcagaaagacgatgctagcaatgaggaacacgatgaggacactgggccgtcaagcaagcactactaagagcctctagcctcagcctcccgtgatcttctctatggtgaaattcacaaacatggtgaccggagctccaagagacacatgttgaattggat

SEQ ID NO: 39486 - DNA, 616 bp, Oryza sativa
tatagggcgaattcgagctcggtacccgtgtgtgagatggaggagtttggaacggtacatgcgaatggcatgcgatgtactggatactggtatctgtccgcctcctgcatcggccaaccgtgtgcacagtatagcagcagcatgattgcgaatggttgtgattcagtgtcggcggcaatgatggccggccgggccctgcgcgccgacggaggaggatgccccggtgaggccggccagcgatccagcggcgctcggttgcaacctctccaacgctttcaaccaaacgtgcaggcgcatctcttgcgagcagaagcatcaacggatcaaaaccaccacgcactgacgttctcgattctgcaactctcccccagggagtttgtaaggccccctttgattcaaaggaaattcatagaaattttagggcccctttgatttggagaaaaaatataggaattttagaggattttaatcctataggaaaatttcctataaagccctttgaaacaaatgattgaatcctatccaattctttgaaattcctatggaatggataatcctatagagattttggagaaaatttagcaagagcttctaacttttctttgagtctatctct

SEQ ID NO: 39487 - DNA, 1239 bp, Oryza sativa
ataaataagtagtacatgactccactaaagcaatgacgtaaaaaaaggcaaacaagagaacacatcactatatatacatcaaaagcaatattttctgtggatatgctctgaataaactatgaactgagaactcattagccctaacagccacccttttatacggggaagaatatagccaaaaagaaaagaaatattgatgtcaaaagaatggtcctgcatgtttgtgtgctctgttctttttgggatgatttgctgatgtgatgcaaggttccatgatatgactttgcaattttgtacctttcttccctggccgctagttgccatttcaatgctgagaggtcatttccaagaaagaaatattaataatatcctatagcttatataattatcgttttgaacgagaacatggtattgaaaaataacttcgaccactattcccagttataatgtatatagaaatatcaataaatatattattttatttaaatagtttttaagattaatttatacatataatcttcatacttctaagatatatattttaaaatttatttttcttggtttttttctttttccagcggcaaaatttctcaaaagtgaaggaatctcgaataggcaaatataacttatggcccaagataataaaattgccaacaaagcataattcacaaaatatcctatacttgttccttttcttggagcaaccatcaacctttgtcacacataatttggaactatctccatatatatagttcttcatcgttattgtaattcttgaaaaagacataaaatctataatatatatattccttcaacttgtgcttcgagtattttttttccttggagtgatgctataaatcgaaaataataatgtaatactacaaaccgcaatttagatgtaccaagaattttctatggtgaggctcgctttgccaaaaacgagtgaccatgtggggtagcctctgcctccaaacatgctgaactagcagtgtaacttcaagaagatccccaaggaatcatatccctttcatctgatgctctacaaaacctagaagcagtgtgggagcaaaagtcactagccacccatggttttggctatacgcctagaatatgcttcttgtatgcttagaattttagtcaccactcttcgtctatccgtgctctagggaccccccatgtcacaccttttaccaaaaatcactaaatccacactagccatcctgcctatagcgacattct

SEQ ID NO: 39488 - DNA, 511 bp, Oryza sativa
tcctcttgttttcgaatgttattgggttaggggcagtttgacagagttaggcgtcaaagagagaaaaaaaagaaatacaaaaaaaaaagaagaaaaccacatggacgatgtcgctgcggcggcgaagcgttgaacaaaaaatcatttgtgatttgatacgctcgagtggccgtgatatatactcctatttcataatcttcagatcatgcaacgagtcaacctcaactgttcgcagcgatcctcacctgcaaattagtgctcggtgacacaacgcagcgtagaaattcttcatgttaaaaacggttacaataataggcaggcatgccaattgtcaaaattcaaatcgaaagctatgcaggatgattctcttggcccggacggatatacctcacatgtactacaggagttactcactccgtcaaaaaaaaaaaatctaaactggatgtgatatattataatataacgaatgtcatatccaatactaaattaatttttattgaacaaaatgagt

SEQ ID NO: 39489 - DNA, 688 bp, Oryza sativa
cgccgccgtggatctcccggcgtcgcacgccaccgggtcgcgcgggaggcacaaggtgatgccttcgtcgggatcttcaccgggttcggctccgtcgggcggcgacgcgcgctgcggcacgtcctccatttgcgcatgtcgtcctctatagaattataatagatgaatactccctcccatcccaacatatagctatttggatggagccatgttcaaattcgtagttagaaatagttacattttgaaacgaaggaagtatcaagtatgcattatattactatataaacatgcaaatttaaatctgacttacacaggtagaaacagagacaataaatttaactacgaataatgatttataactttttttctacttttgaatttaaacttgcatatttatagtgtgatataaacatatcgatataccttgccaacaaaattcagaattttttttctgacttcttaggcggcatggaaaaaacaaaaaggatgtccccttgagagataaatagaaaacagagtactttcccattgtgtgcattcatcattcttccttgcgccgcatgcagcaaaccgtggctgctcgtcgccctcagggtcgtcgtcgtcgacgagcttaaagcctccaatggcaggtgaagttcgtggccacagagccatggggtcctcctgggcccggccgcattggagc

SEQ ID NO: 39490 - DNA, 662 bp, Oryza sativa
ttgacagtgtcctttctctcatgctgtcacgttcgatggccatgcgatgcagccccgtctgtagacacatcttcataaaattgaggtgtctgtttgctctcctcgtaccatgcatgtcgtgtacgcttcttggccttgctgaatgcgatgtttttcttctctccttgatctgttgcctgttgctggactcccaagccaccaagtggcaaaaaggatttgcaatctcagctcctatttttacacgatcttggctggcagaaaggatgatatgataatatgatatgctcactctgaatattcagtgcatcttactactatctcatttctgcagttacagctttgctacgttatggcctctgaagagggttgcgtgtgcagtgtgctacaacaaactgaactgtctgaactacgatgttataatcaagagtgtgactgaggctgtgtttagttcagcgcaaagtttagattttggttgaaattgaagatgatgtgactgaaaagttgtgtgtatatgacaggttgatgtgatggaaaagaactgaagtttggatctaaattttagatctaaacacagcctgaatcttttctcttctttggaagctgtctgaatcttgaattgcacgtgaacattattagctgtaaggctcctttcgtttcaccca

SEQ ID NO: 39491 - DNA, 831 bp, Oryza sativa
ataaaaaagatggccaaccttagaccacacgcatcccatccccatcccttttcttgttatcatcaaccagaaaggttacaaaccaacaagtaacccagacacaagagcatcttggcagatcagttgagattttagccacaaacgagcgaacaactaaccacttaacccgaaccaaccccaacaactgtcatcatcgaccaaatcccccaattagcgtccatcccgattgcttctccaaactctatttcttaattctatcgagtatcaaccaccccgttttatattataagtcgtttgatttttttccctagccaactttttttaagttagactaaacttatagaaaaaatatattaacatttttaatataaaaacagacagattattaaaatatatttaatattaaatttaacgaaactaattttatgctataaaaattgttatttttttcaataaactgggagaaagaagtttaaaatacactcgcttgcaagcttgccccaaccgagtcagcgcctccttaccgtgggccccacctgtcagcgacccgtatacgaggggttagcgaagtttgacgcgataaaccgacagcgacgacgccgcgcggaagcaagacggattggttttatgccgtaatcaaaccggattagtttctcgccggagagagcgagcgagagcgagagagagagagagagagagagagagagaggagaagaggagaggagagcggccgcgtggggggaatctgctcgtcgtcctcatcggcggcggcggcgttgaggcggttgcggtggttgggtggtggtgggggatggggaatcaggtgggagg

SEQ ID NO: 39492 - DNA, 611 bp, Oryza sativa
tgtgtatttcttaaattataattcatatactactactcctgcttcgtgctggcctgtcactgctgctgtggtcatcagttttttctgacgataaagaatctctttcgagtatgtaatctccgttcctttcgtagcggctgtgttgtcgccatgattggtggcaggcaacagctacgtcctaattaatctccaaaaaaaattttccagctgacgaactaatgcatccattgttgcatttaaaattttaatcaattaatttaggcgccagtaagacaaaccgcagtcggttataccaatccaatcatcgaaatctcagcatttattcgacatcttattgttattgtacttaaatattatacattctaatcatcgtagttagatagtgataactgaaatactgaattagacatgtggttgggcaacatggcatttccaattccaagcttcaattcaaattcaccgatgcttaaagtacatttcttctcttctttatcaacggaatgaggcccttttatatataaaaaaaagaagtacatttcctaaatttggaattttggttgtattgcaaaattttgattgatttttctgaacttccttttatattaaaaaaa

SEQ ID NO: 39493 - DNA, 565 bp, Oryza sativa
ccatggatggatgcatgaaccaaaccaagaaaacactaggcttaattaataatcaatcaattaatcatcatctcttgatccaagtcaagtgtagccgcagaacgaactgcaaatttgcaaaatcgatatggaagaaatgattttaattagtccgtactaattggacacttaatttgcttaatgcgggccgtgttcgtgaaggagtccgagtccgagtccgagtccgacgcgaactgggaagagctcccgatataagcacgcgcggcgccgcctcgacgatgcatctctctctcgatcaatcgtttcgcattcgccgatcgattcgccgccgggagcagaagcaagaaagcaagggcatcgtcggcgtcggagtcggagatggggaagaggaagtctcgggtgtcgaagatgctggcgacggcgaagaaggcggcgccgaagctggagacggcgttcagctgcccgttctgcgaccacggcggcgcggtggagtgcagcatcgacatcaagcacatgatcgccgaggcctcctgcttcgtctgccaggcgcgctacttcaccaccg

SEQ ID NO: 39494 - DNA, 549 bp, Oryza sativa
ctatagggcgaattcgagctcggtaccccaatgtatgaatgtatttggttgagaggttgcacacatctgatgagagtggctttgattaggactaggattcattgttgtgctgttgtaatatgacttgtgatgtgcctgcctatatgtttgaattgaagggaagggttttgttggaacaacagttaaaagttccttcttttgttaatgacttcacaacgaatggtaaaattaggtgagctttacctgggtagttagcctcatattggccatgttggcttattattattattattattttgattaaacttttctttggatctattaatctattcagttataaacataagtatgctgccatcccttcatgtctttgcagccgcggctgcaggtccatatatcaaataaaaagatgagtgttaacgactccgccattcttccctgacattgttcttccacatatttacagtaattgtttatgacaagaacataaaatataatcctcactttatctgtactaatacaagctagaccaggttaccgtcacagaca

SEQ ID NO: 39495 - DNA, 921 bp, Oryza sativa
tccaaagcatcactgcatataactaattgccattattatccatagtagatgggtacattattgtattaaccatgtcatatctatttactaatccaagttagatttcatacttcctaccaaaatgaatgccattatttcaaacacagagcaggctggaccgtatgctatatgtaggacttacagaagaacatgaagaatctgcgaggttgtttgctcatatggtaggagcacaggtgctttcacaatctggagcactgaacttagatatcaaggacaatcagcccactggaaatggtaagagacctcacaagcttgcagccttacccctttatgtaacatactttcaggaagcatacttatgtagtatttatctacctttttaagactgagggacaaagcccagctagttttatctatagaatcagaaagacaagagaataaaactgaaggatcagattgtctgggttccagcctatcctgcaagacaaaaacagtgcaatacagttacaaagaagttaaatgtcagtacataacaaaacaacatagaagctagaactcaacaaagctcaaacaaatggaaataagttacttgttaactactcagtgcataagtagcagatgcaagccacgtcgtgtggactctggaaaacaatgttttgttaaagctgcaactcaatagaataatgaataaataaaacaacagcactcatggaattgtggtacgcgttatgtctattcttggcgtatggtaatccgtttgtgggatatcattgtgcaaaagcaaattacttagtctatcttacttgttctcacagactctcactcatccacgctggacccagaggacgaagaaacaaatgaacatctggtaatagggtgattaagctttaatctttactttgcgtgttaattggttttgca

SEQ ID NO: 39496 - DNA, 601 bp, Oryza sativa
ttgagccctctgcgtctcataaaatgatgatacttttagccgcacactgctgggtggtatggtatgtatacattgtcatgccatggccatgcctaaaagccatgaaatggcccctttggccacgtcactcttggtatggagtgtatacatacccaaagggattgcttcatggaaaataagtttcagaagggtttcttttgaatatttttaaatgggacctggtttctcctagctagcactcttgtttttctctcttaagctaattgtacttgcttgcttcataaacgtcagtatggaaatattttggtatttgtgctcatttttcacaagcatttattcagattttgtctttcatctcgtatattattttctgtaatgtaacaatgtccgtgatgtaatatttctcaaggtttatctaatcttataatttttttggttttctctttcagggctggatagaaatggtctgcagttcctggagttgctctccttggaaggttgtactatttggtcttggggtcacaataaccatcgcacttatcatacttgctttaacaacgagaagaagaacgtttaaacttaaggtctgatactctgatga

SEQ ID NO: 39497 - DNA, 697 bp, Oryza sativa
tcttcacgggaaagctttggtatttttcatatttggtttgaacttgctataaatctaaactagtgccaaatttaagcgttaacaatttcattgggttatgagttattaactgcatagattggaccgacacggagcacggcgaaccaggatggtggctgcataagttcataagcgcggatagagatcatagcggcgccatggacttcatagagctcaacgagtaccacactcatttctgaacctttttttagattgttgagtacatcggaaattcaatagattaaactctcctaacccttggtctatgtgtgttgcatatatactatagcttcttgcatccagaagatagcagccaggagaaagtgaaattatggctgttgaaggataaattaaggcaagcagtgtccaaacacttgcatatacttataatgttgctaattacggtccactaatatgataaattgatgtatttgatttatctttttcatctgcatggatgcatggaatacagtggaatggatcacgatagagacgggaaattaagtttggatgagtttatcagtcagtttcacatgatcgaccacaactccattgtagagcatagtgctgatgatgatactagttgtgctgaagctgagaagaagtttcgagagctcgattctaacaatgacgggtaatacttgaaacagaagaaaat

SEQ ID NO: 39498 - DNA, 675 bp, Oryza sativa
gcatagccatgataccctgcttgaaccaaaaagaaaaaaagaaattggaacttactaaactacatatggagacccaatcataaggtgcgatgacagtgagttcagaagaacttaacggtacctcaatcccacgaggattattgttctcctcgttcatctccatcaaatgtctgccattctcaacagttggagcatcaaccccagacttctcaaacaaagagagcagttcagctaaagcaccaccctcactaaaacaaagacgcgaggtgcgctcaacccggacattagaggtaggcccggcatatgccaccatcagctggacaacatgtagaacagaacaaatcaaacagaggggtctcaagcacatcaaaacaggaaggaactttcacacagattgtaagaactttaaacaattctggggggaactcattaaactgtaaggcaaataacccttccaaagttcactataggaataatttgctagaacttaatttggcagagtcaacaagcaatcattctttttttgctgagaaattttaaaatgccgaactattgctgccaaactacccagatgactgtgagtctttccaccaacaatcctaaataagtttccatttagaacaactacaatagctgagaaaacagaccaggtaagttacaacctggaattacttg

SEQ ID NO: 39499 - DNA, 699 bp, Oryza sativa
attcgagctcggtacccgataataatagcattatctatggctaactgtacctaagaagttacagcaaaaatagcacaatttttatatatatatatatatatatatatatatatatatatatatatatatatatatatatatatatgaatgaaagattacgatatatatattagacaacggaatagtttttagggacttaaaaatgcatatataatgagttattgtttttttaaaaaataactgtctattacaccgtacgaatattttgctagtccggacaactctaccctgaattttctgaatatatggatttagcattttcaggtgccggtaagtcttctcgctgaagattccattgccaacctgatggtacgaccgcacgcgcaaaatcttagccatttccttgcaaatgggcttggattggaaacctcccaatttccaagcaattcagagcattcaaccaacagctacgcttaaggaaagtaatttgaaatgttttttcatacttttttatgataaaaggaaatggtttgcattcccgccctggcctttggcttaagtaggcagaccgtcaatagatttttctacttatacatacttgtctggcgaaatttaaattttcaactttcaaatttagagttgattttagatttttttcatcaaagtttattttccagtctttgcttttaaatacataag

SEQ ID NO: 39500 - DNA, 631 bp, Oryza sativa
atttgtacatcaagtccaattctacttttaaaatatagcttgcacaaaaaatggctattttgcattattacataaaacattacttccaaattggcgatcctgtattctgaaagatgtattggaactttttttttgtcatgtgcacgtgctgcaggttggctgcagacagaaggcagcagcccgagtagcgatttctggctgcagtatattacttcaataccaagttatcatttaattatgaagtgcactaagctgttgctttctatgtacatgtaagcttatctatgagataaaaaaacaaacaaacaaaaaaagcccgtggttaggatggcttgcggcattcagctaagtcgagaaaaatgcccctgaacgtggcacgtcactgggcatgcttaacctcacgcggggagcactcttctaccagcattaacgaggggggattttttttgtgcaaaacctgggcttgagccttggtcggtgtcccctctaccagagactctaccactgtgctacacacacgtttgttcagcttatctatgagataaattattagaatcctctacataagttattagaattatgcaaagttcctccattgcttccttctattgatctattatatgtccatctt

SEQ ID NO: 39501 - DNA, 605 bp, Oryza sativa
tgatagtgaggtatgaactcatattctaagtcttgggcaacttgtaagttactgcgtcaatcgttttgactgtgactagggaaacaggtaaatataccatggtctctactggttagtattaggccgtgtttagatacttttcaaaaaaaaaattaacatatacgaacctatatgaagtattaaacgtagattaataacaaaacaaattacagatttcgccagtaaactgcgaggcaaatctattaagcctaattaatccatcattagcaaatatttactgtagcactacattgtcaaatcatggcacaattaggctcaaaagattcgtcttgcaatttacatgtaaactatgcaattggttttttcatccacatttaatgttccatgcatgtgtccaaacatttgatatgacagaaaagttggaagtttgaaggtaacatagccttagagcaagtataatagtaggctataagctgactaaatgctgaagtgtaggagagaagagaggagagagaggagaagcgggctgtaaacttaaagccggcttggacgcaagaaccaagccatattcgtggacactagaatctactccctccttccaaaaa

SEQ ID NO: 39502 - DNA, 670 bp, Oryza sativa
actgtatatactttgataatatgtttgttttctatttaaaatattactatatttatctttaaacttgatcaagtttaaagataaatatagtaatattttaaacttcacccctaaactatacaaaaccatccaatttggatcctatagcagtatatacatctgattttgttgacgtaacaatttgacccgatccactcgtgctgactagacactgatgtagcaaaaaatgaaagtgggccccacatgttatccttagtctccaccttatctcttcctcagttccactgctctctctccctcggattgggattgggtgacataaggtaggcatgtcacaatgtgacatagcgtgaatctcggccctccaaaacaaatccaactgctgagatccatccacgtcatcatgagttaaaattttactcgcagatttatttaggagtaaaaattttactaggagtaaattttcaggtattgggagcaaaattttaactcgtgagtatgtggacgaatcttagccattggatttactttctagggctgagattcaccctatgtcacctttgtgaggctggggcctgttgcagctgggggtggcttcggcctccaccaggaagctacccgacgcggttcttgcccgcccacccgctaagcagcgtcggccgcggaggaa

SEQ ID NO: 39503 - DNA, 596 bp, Oryza sativa
taagatggccggtaatccttctttagaatctatccagattcatgctgaccatggacaattttcagtacaaaacaatagcactgaaaaagacttgttgtattactgaaagatccttcgtgcgtaagaattgatctgcaatcagggctgcccctccttaaaataaactgtacaccccactgccagttgtatccaccacaggttttgatgattacattgcacggcattacaatcaactcatccagataaccaaaaaatgtagccgcaaagttttgaatggaagttgccaacctgacaaatcatcacctgcacattggatcccattcattgttgataatccacaacctgtagtaccctgtaaaataatagatcggagaaacagcgaccctgtgagaaatattggaacctgacaagccaagcagatcatttatatgttgtacttcctccgtttcacaatgtaagccattctagcattttccacatttatattgatgttaatgaatctagatagatatatatgtctagattcattaacaccaatatgaatgtgggaaatgctagaatgacttacattgtgaaacagagggagtagttaattc

SEQ ID NO: 39504 - DNA, 1654 bp, Oryza sativa
  unsure (1)..(1654): unsure at all n locations
acacaaacgcaatgacctggcacggcatggtgccatggtctgatggtcattgaaaaaatgaggttatattccaacttaataatggattatagatatcncaaaatgagagagaagcaaagccattattcagaagtctacttcaaatgggtagctttgctactcaaaaaacttggttgcgtctttgaggctttcagcttggatgatggatatgttttccttcgtttggctagccaacttctttagcttattagagttcagagttctgaccaaactgaatttgactggccttctctgctcacttatgagcttgcaaaacccatggaaaatagtatttcattaggtaagggtcaattatacattcactcacccttgcgagacaagctatagattatgctactagacgttttctaatgctagattacagacgtcagatgaaagtgaggtcacctgtagttgttggatcaatttcaggttgacatagtaatctaatgtgctgcaatcttcccagctgcctcactggctcaagctgattgatttgttcttggtcatgacgaaatctcctaactcgttgactggatatcgaatccctccaaattacaataataacatttcttgaaaattcagaaggcagaaagaacaagaaaccaaaattccacaaaggcgacaacacgcatgggcggctatccagtactgatcatcgtcttttttttctcctctgatgcaacaatacgcataaactgctttgtttttccttttccagctttcttattcgattgatgtgtatacataacatggctatcagctatcgattaattaattataatgatgacatgcgcggctttagctgacgttgatcctgctgagatttctgaagatattttcttttcttttcttctttttctgcagagattcctgcagtgctgccgtggtcgacccgattaaacatcgcggttggcgccgcgaagggtttggcgttcctccacacgcagagaagccggtcatctaccgtgacttcaaggcctccaacatcctgctcgattcggtgagtgccctgtagcttttcctaggtagattgacacctctcatatgcatgcatctcagttagctaggagtttttgatgcacacatcacatatgatatactatatatatagtatcatcctaatgaccttttcatcatcatcagtgaaaaggtagagtaatgactaggaaattgtacttggcacagtttggattttgaagcattttatgacatgattatgtcagagaaacttagtatcatactgtacttatgctgttatagtgttatgcatcacttcatacttaactagtactagttaatggttattatcatattgtacttctctaccaaagaaaaggaaaggaaagcttagtgatgtgggctatggttcataggttgggccgtaagtgagttctgctcaagattgggctaaaaggaggcccaaattttagtttcaccactgaaaagcgtcactgaaaataattttatcgggtcatataatcaaatctttattatctaaaaaatataatcaaatctttacatttttttccatgaccgtgtcaatgttcttttttttgaaagaaaaagcaaatgttaagtttgggcctttaatgggttactactcaagatgggc

SEQ ID NO: 39505 - DNA, 646 bp, Oryza sativa
  unsure (1)..(646): unsure at all n locations
ggcgacttcgagctcggtacccaaaatgtaactatttctaactacgaatttgaacatggctccatccaaatagctatatgttgggattttatggagtattcatctattataattctataggaggacgacatgcgcaaatggaggacgtctcctggagggggaaaaaccatccacataattctttggtcccaactcacaatgggagatgatagtaagaatgtgtagtacaccgagctagttacatgcatgcatccgggagacatgatggtataaagaaacccggcagccaaatgtgtttaatttcacactgaaactcagcagccaaatgtgtttaattccacaccgatataagattgggccagtagcatgtgtcggcaaacattttaattgcatttacaaactcgcagcttgagctgtataataatcccaggagggaatgtgcctaacaactaatgacagtatttatcaaccccccccccccccaaaggggccccttttttcaaaaacaaaagttgcaaaatgatcctgtgagtcatctgaaagccgtcaggttttatttctgacttctgagtcggaaccgattcttgacttctgtatgcctaatgctgcactatctnatgcaactttgtaaattacagccactttc

SEQ ID NO: 39506 - DNA, 1181 bp, Oryza sativa
atacaggatcgccaatttggaagtaatgttttatgtaataatgcaaaatagccattttttgtgcaagctatattttaaaagtagaattggacttgatgtacaaatcttagctcatgtttccaactttccgtacatacaattgaatttatagccagatttgaaaagtagaatttgacttgatacacaatcttagctgatggcaataaagcaggtgcattatctaaggacttctactccaaaatttgcctaatccgatcgttttctacaaacacccgtaactggtataactcccaaaagcctcccctgcataattggagcactaaaacctgaaattaaacacttctctttctgcagtaggatacaaacaaaatggatcagttttagtttgaaaaaacttccaaaaaaaggcatgagcatgcatttgtgtatgcctgtgtcaaccagtctatggttcagcaaaagcagtatctgagcaactttttgtatgaaccttttttagggaagtatcaattgatctattatgttataataaagagggtgcaaaagggtgccaccacgttcaatctagaagcctagaataacgacattaatcggggaaaaaagataaatatatgcccgtttattatagtggtgggtctagattacaacggtccaggttgaccagtaaattctatacaaaatataactctaattttaaatctagctcctctcatatttgcatgggaaaatccactagtttaattataacggaatatttatgaccatccaaatttaattcacctcttcagaagaagctgagtttttctagggctggctatgaagatatggcctattctctaattcacttcccctgtggctgtctttctaccactaaccatagaaaaaatatgttgcctctggtaagctgaaaatgatacttcaggcctacgcaggaaatacaacagtgggctactcctattagtcagtctttaaattggtaaatttcaaaggtccaagtccaacatgcacacacaaagtcaatctcaaaactttccaacaataacacaattcctagtactcctatcccctaattccctccccactggcagtcactcccactgcattcagactggatttgactgacttaggaaaaaggtgtaacaccagattggtcctcctcctcctcctactactactgctca

SEQ ID NO: 39507 - DNA, 1657 bp, Oryza sativa
gtattcgggaccaatatatattcttaagatcattgatttagactctatacatgggaaatggtagcgaccattgaataaaaatgtgttttggttccagtaactggatgggatagatttgttgtctacgtttggacgatatcttactgatttccagtaagatctaagcgtcggtcaatttttcatttcattccagcctccgacgataggtactgtgccgttaaagatacatgtttctattcaagttaaatcacacttatgcaattattcatggctatcatttgagattgtactaatggtttgtattatattaagggatccatatgcttacaaaattgttctggattattttttttctatatggttcatccatacaacttaaatggataatgcaccgcagacagcccacaccactgccatcgccatccaccgcatacagctcgcaccactgccatcgccaccgcctccgcttgctctcctgtttttttgggccaccgcctccgcttgctctcctgtttttttttgggaaaaagacagagagggagaatagggctgacaagtgggccctacgtttttttagtatttctcctatcacttacatgtgggtctcatcttgtaacgttcctatgataggactacactttacatgaaatatattttatgtacgatatgaattgaattaaagttcaaatgcatagatcatataaaaatatttttttgctaacatgaaaatttaaaaattattaaaaacagatagaattgcaccgtaacgtttagtacggacatattactagtaacttataatacaaaatgtattttaatgttgaactagcacttatcagtgtcccacgtacgtatgaccatttccatagttccaagttccaacatcatcttacacggaagaaaacgaaagaaaagggcagacgacttcttcatccatattgctagtagatacttatattaagacttgtatccataatcccgtcagttctctcagctcaggtccacctcaaaccgtttgtcgttgattcgctcacaactttaagccgcttttttcttttagaaagaaccaccacaaaatcgccttggaactctaatgttccaaacaaaccgtccaaaattcaccaatatcatgcttgaacacacaaacaaaactcacttgcaaaaactcctctttgccttgaccaatcacgtgtacaaaaccaaagataaaaaagatggccaaccttagaccacacgcatcccatccccatcccttttcttgttatcatcaaccagaaaggttacaaaccaacaagtaacccagacacaagagcatcttggcagatcagttgagattttagccacaaacgagcgaacaactaaccacttaacccgaaccaaccccaacaactgtcatcatcgaccaaatcccccaattagcgtccatcccgattgcttctccaaactctatttcttaattctatcgagtatcaaccaccccgttttatattataagtcgtttgatttttttccctagccaactttttttaagttagactaaacttatagaaaaaatatattaacatttttaatataaaaacagacagattattaaaatatatttaatattaaatttaacgaaactaattttatgctataaaaattgttatttttttca

SEQ ID NO: 39508 - DNA, 655 bp, Oryza sativa
acatattaatctttcttgttaaaattttttataattatttagataacatataaataataagcggatttttcctcgagagtttggaatccacttctgaatactgcagtactgcaccatacaaagcttttttttttcctatgtactccactgtgcatgcagtagctacctgattaatgacctgtgtcgttcatggttgattcctcgctggctatgaggatatcagcatggtggcgtcatacatggtggtgggacgcactaaacgcagcccacactccagtagtagtaaagcgctcatgctatcttaatccttcctagcttagctagctagctgcaatttgcaaagatgctttatttgtaatcgatcacctgtgtacatactgtaccgtcatttcgatgcgttgaaaaggaaccacatgggtgtatataatcgtacgtaattagcaatatttgccattccttttttttgcttttctagtatattttccgagtttcctggcttcccaaaacaaggttactgatcaacaccgtatatgctaatattccccacttagatcagagtactactatttaagggcaaagagcgtacatgaaaacgaaacagtacttcctctatttaagattcatgggggcatttagaaaaatgctatgcatacca

SEQ ID NO: 39509 - DNA, 629 bp, Oryza sativa
aataaataaacaaaaataaaaaagttcagatcagcagcatgtgatttttttaaccatttaatttctaaattttaaattgaatattctcaaaacttatttacaatgctgaacattttgtcacgcgtggcgaaataacaccgctagctaatactctaacccctcgtgatgtggcgcaccgtacgtgttagcaacaactacgggtgacattgtgacgttgttttagcacgtcaggcgggataccatggtctaaaggttcagatttaaaagtaaattttaaaacagcttatttttaaaataaaaaaataaaatggttcaataataataataataataataataataataataataataataataataataataataataataataataataataataataataataataataataataataattcggatgaagtagtgagcaatcagcagctgcagtacgtcgtagctaattggtgtgatgagtgatgagtgatcactctcgtcgatcggaagctccagctccaatcattcacgttttgatgatgcaagatgagtggccgggcggtcgctgtcggggaaatttaagaaacgggagccgtcggcgaactcaatcgatcgatcgaagtgccgtgt

SEQ ID NO: 39510 - DNA, 604 bp, Oryza sativa
gcttcgggtctcggcgtcgcgcgcggcgggtgaggtgcgagacagctagtggtagtcctagtcctacgcggttgtgctttgtgcacgcacgtgggtgaaactgtgtgttgactgttgaggctgtactactactcctgttaggtatggtgtgcctgtctgtccctgctaattaagcggaacgtttgccgctaattatctccgttgtcgttaatttttaaacatgtgttccaattatgaaaattgctatacgtaggacccaactgtttaactcacgtacaactgaatttgattaacggttgcaaataattacaacgcaaatgaacatgttttcctttgattgatctatagttgcatgtctctagttgtatatgagttatacaactaggtcgtatgtatagcagtattatttgattattcgtcttttaaaaagattttattcgtcttttagaaaagattacgtaagcatcatgtacctttttgttggttgttttatcactaaaaatattttaaatatggtttatatcttacgcattcacacaaaatttttaaacaagacaaatggtcaaacatgcgccaaaaatcgataacgtcatttatcaaacaa

SEQ ID NO: 39511 - DNA, 564 bp, Oryza sativa
ttaggagtataaaagaaattctcttactgaaaaccagagggagtactacatataacatcatttttttacgggttgataagttgcggaaaaaccaacaaattagcaacaaatatgagtaaaacttgtatacatgtgtcttcttagcgatttaaaaatcaatgctgaaaataaattccaataaaattaaaaatctcaagataatctgtaaaatgtagttttaaaatttaaattttgattgcgactgataagaaaaaaaaacaaatgatgggaggctatatcaactgtcaaactggctaatttagaaagacgacatcgaattcctacagattggaggcagcaaaagagagcccgtctctgccgggtgcgtgcatgatgctcgatcatatcccatctctcctcacttcatcatcaacaagaacaagaggaactatataggcaagatctagactgaaactactatagcaactaactgtactgtagctagattacgcttagctatagctgctgctgcatctatctgtaaattccaactacgacgtcgactgctccaagctagcttggccg

SEQ ID NO: 39512 - DNA, 644 bp, Oryza sativa
  unsure (1)..(644): unsure at all n locations
gtttgcccgttggtcttatttaaaatttaggtaattattatttctttttctatcatttgatttattgttaaatatacttttatgtatacatatagttttacacatatcccaaaagtttttaataagacgaacggtcaaacatgtttaaaanagtcaatggtgtcaaacatttagaaaaggagggagtatgtaataagagatagttggtgaattatagtgtagatataattttttctgagtttgtttgaccgagtttatagaattttgattaataaaaaaattcaaacggcttataatattaaaacgagggagtactagataagtgctttcttcatttttttttatttttttctggaacacaacaaacaatataaatatgatttttgttggttatttttaattcctggtggtagaacttgcccacccaaatttaagtcattgacttaatatatgtgtgcacatttatattattcttctaatgatagacggcgacccgtcaacaccgaggagcacgtggtaacttcgtgagtctcaatatataccggtctatgctcatagaaataaagtgtgtgtttataagagcatctataggtgtttttcatgagtctcatgatatactagtctaatgctcatagaggtaaagt

SEQ ID NO: 39513 - DNA, 687 bp, Oryza sativa
caaccaaaatccaaactttagatccaactaaacacagccgatggattggacggcgaaacacatgtacacgcagtacatgtactgcgtgagagcgacgtcgttctagccatggtatagctacttttctttcttcgttgtggttttaacttattagctacacgtaaaatgagaaatatattattagcataaaattagttaagtattaattattaaaaatttaaaataaattttatttgaaatttgaaaatcatatcctgtatataaagttttttatacgaaacacaaccacttatccgtttgaaaaacatattaacgaagcttatttaggccgggcgctagctacaatggtgagctttaatttgtcagcctcttgctgcatatatgttctttttagagaaggatattttctatccggcctctatattcaatcggatatatctatgcagtctttttaaattaaaaacttagcctataaaacagagaatttactcatcaaataatccaatctgaaattcgtttctatagatatttgaactcacgacttaaagtgttactcgagttactgtaactaatatgctacatgaggaactaggcactgcgatcgcgatcacacgtttatgcgatcgatcgaccgggcacgaactgacagctccagcatgttgaatgcatatatttacctttactttt

SEQ ID NO: 39514 - DNA, 625 bp, Oryza sativa
caattctaaatgcattagaaatatatacaaaatagtatgtggtatttttagggggatgttatacatacgatttttttttacgattgttgtacggtaaaatgattttttctagcggttgttaacgatgaaatggattctttttttagtattgagttcatattcaaagctcaagttcatgatgatgttttggtttgctatatcataaccttttttttttgataaatttgttttttttaaaaacttattttgaaagtagtttaataaaaaagtttaattaaaaataagttattggcttagtgttagagaagttggtacagagttcctatatgattgtgttataagtgttggtgctgaactcctgttaatgtggtggttgagttaatcccttttgatgtggtagggttcttagtgccaaggtggttggcatgagacggctaacctcgccaaacgcatttgcgttgagcctgcagcctatagatcgcggccgagccgcccaggcccggcactcccttctttttatcctcgcggctagggttcatccacgtcgccctctctgctcccctccgaatatctcctcaaatatccctcaaatcgaaggctattttgtacgcattgcgttggagat

SEQ ID NO: 39515 - DNA, 582 bp, Oryza sativa
ttaagtcttaacgcattcttaattctaaatcccaagttttagagtttacaaaaaacaacatacaaaaataatcatataaccaatatatatctctaccccatccaattctcaatacattacacatatatacaaaatagtatatggtattttacaacactactatacatacaattcttttttacaattattatacaacaaaacccttctttccaccatttattaacaataaaataaattcctcttccactattaaccccatatccaaaactcaaattcataataatatcttaacctactatatcataaccctttttttttaataaatttatccttttcaaaaacttatttcaaaaataatcccaacaaaaaacttcaaccaaaaataacccatcaactcaacaccacacaacttaacaccaacttcctacataaccataccacacttgttaacactaaacccctactaacattaccaccaacccaatccccttcaacctaacaaaattctcaccaccaaaacaattaacactaaaacaactaacctctcaaacacatttacattaaccctacaacctatagatc

SEQ ID NO: 39516 - DNA, 690 bp, Oryza sativa
ctatagggcgaattcgagctcggtacccctttgcaacgggcttcacgaggtgtttctacattaagcgttggtgttcgtgaaggaaaacggaaggaaaactgttgaggattatatggtttctacagtgcttgatgtactgtagcgatggtactgtatcatgcagcatatgcatagaggattatctgcagctgcggtatatggaagagatatttacaatttggaaattgtagattggtttggaaattcagcaatagagtcctattgggaatatgagttgtatttctactttgagtaggaggttttcggtataaatagagaggaaggctatgccttgagggtaagccaagtttgagagattagatagggtttcgtgaaaacttgcgaggggtgctgtggctgcactttataaacaatacttgagcaataaagatcatatttaatcatcaaggcatcgacgatctattctagtttcgtaagttttgcgtttatgtttgattttggcatcatagttgactagggactcgtacgtatctatgggtacaaagatttaaaggtgaacaataatcaaggcatggtataatcacaagtaggatgttcatcattgcatgcattttattggtaaacaaaataatttcgcattgggatcaacatgttcaaagaataatgatgacttgcttgctcaggataatc

SEQ ID NO: 39517 - DNA, 546 bp, Oryza sativa
agtgaatgtgtgaaatatgtgaataatggaaggcgtatgtgaatgcatgtgttaaatatgtaaatgggacatgtgtatgtgaatgattgtatatggaaggggatgatggcatattgtcgaatatattggtttcagtaattttgaagcgggaatagatagacaaggactagggttagtcaaaaagatacaatgaatttttttgggggaaatagtgattagtggggggttttaacttaagataatgggaatgatgtcatcggtgacgggtttaagttaaagtttgattgggttgagttatttatcatgggctttagtttaggttgaattgggattgtatttattggtatatgacgggtagtaattgtggtgtgattaagattaggttatcggtgatgggttttgtttgactagttatgtgggtgaaacctataggtgacgggcttcagtttaggtcggacccacataagttcatccttgacggccttatgaatgatagagatgaattcccccccagtgacctttacaccgtgatgggtcccatatctg

SEQ ID NO: 39518 - DNA, 609 bp, Oryza sativa
agaaaactaattagcatatgattgattaagaattaatcattataaactcgataaattggtttatatatttttttaaacatcttctatataaaatgatttcgaaaaaaacaccatttaacaatttgaaatatgtgttaatggaaagcgagtaagttgaagtttagctgctaatctgctgaaatgaagtttagctgctgctgctgtccccacatgggtgtaacgcccccacggatatagcctgactaggtgggacagaagcaaacttaccagattaaagatttactcttttttttggatgtacacatagttggacagctagctatcatacgcatcagctattagagatttagagctatctcttgctgacatgtgggactaccttttttacagatatcagctggtgatattattaaatttgttatgttatggccctattggataaccccacgaaagtggcagctgccgagtacaaatattgagtctagcatagtttaaactacgcgagtaggaaacaaagagctaaactctcctcagttccaagcgcagccaaatcacctcgtcaattattctcgtactggatgacaagtctgcactgtgctgattgcaaaa

SEQ ID NO: 39519 - DNA, 617 bp, Oryza sativa
attcctgcagcccgcctaggcctgtctaccgtcaactttatgggctctttccatagcccatatgttcttatctctagtcaattgtatccgggagaggcagggggcgacacgcgccagctggcagcctggcaccctctcctaagcatgatttttttcgttttctttttttcgcggtttttttttttcatttttcattttgcgctttttctaatttttttaatcttcagcacacatgttttcaaatgtttgagttaaaagtttttaaattttaatttgaaagtttttaaatctcaacgtaaaaattttcaaatatggacttaaaaattttcaaatctcgagttgaaatttcttaaatctccagttggaagtttctaatctgagtcgaaagttttcaaatctgagttaaatttgaattcaagtttgaatttgaatttgaatttgaatttaaatttaaatttgaattcaaattttttatatatagtatttctatatataaatttttccaactatttgattttttaaaacttttttgtggtttactgtaataggaagagaagaaggggaggaggaagggaagaagtgggagaactgcgtataggagggaggcggggggatgc

SEQ ID NO: 39520 - DNA, 600 bp, Oryza sativa
tgttagaccagtgaatgcataatgcatagttccatccccatccaccaaaacttaaggcacttagctcatataataatttttaggttgatataataaattgctagcatggactacagctcccctagtttataaaatatgaaccatggtaataaagaccataagcctatgaactaaggttagattagttaactaaaatactcattttatacatcactagctagatgaggcaagttctggacctaaacctctaaagctatgaacctatagaacactatacacctataacacgttataacttgtaaaatacataaagaattcatattaactctaaaaattatgaaaccaaatgtgttggtcttagaaaacacatatcttcaccccagcaaacataaacttaacaagaatcaccttacaacagcatttcacaatagtacctaagtaaatcctacactataccgacgaaacttctaaaattcataattctcaaatgaaatgagataaaatataaattctttcacctaaattcattttagaccagtacctattcactgtgcacaaatcatccattttagagcattttggatttttcgcatatttcgg

SEQ ID NO: 39521 - DNA, 613 bp, Oryza sativa
gatgaatcttttcccatgatatatgttgtcctaacgaggcagacacgtttttcatatctttttttgcatcgagctggttttaggtgaccaaccacatgtaagctatatttggaatgcaaccacccatagcagacctgattaaagcatttatgtggtgcaagtgattcatattgccgatacatttttgtgtttttaatgaaagaacatacagtttgttgggacaaaatattatcttagcgaacatgggacaaaatattatcttaacaaggagagagctcatccttgaagacctgtagggagaaggcgggagcttgagtaaggaagaggatgagaatgggtccgcaccaccttttgcctacttgggagtttaggctatgaattttccattagttgaccgttaaattcttatgagaaaagcccattttgccctttgctttgaagaagcatataaattaatagagtgtattatcggagggtaaaaatttgttaaatgggactattatatttatgagttagttatgccccatattatttgcgataaatatacatttagagatgacataaaaaataatacttaattattacttattgaaagttgtgtatgttgcatata

SEQ ID NO: 39522 - DNA, 645 bp, Oryza sativa
taatcatgttgtgctcgcggtcatgagcggcgtgtggatatctattgagtatagacttgtgtttattctcctaaatgctgaaatttacctttaaatcaatttaaagagatttgagaatgatctccttgctccttgctgccatggaaggcaatgaggtgcatatttatacatgattaatgcctattttgatgcccaatatgacaagtactagcttgttgaaatttatttgaaagtaaacctgatttggaaatgttttatgcaaataaaacttgctttatgctaaaaagaaccatattatgtcttccttgattatatgccttgcaagtagggtgttaggcttgtcttggtgcttgccctaataatgtactgactcttgctattgaattaatcttttgcttgcaggttttagacttagtctttgagtgatgcgggtaatcgactgcttcttctagtacttgaacttaatggggtaaacccctagtcggtgtgcttgtggattgggtagacaagcttccgctgttctatatatttatttggcccgtcggccaatgtaactaaaagagatgtagtttataatcgctttcatcttatttggggttgctatgtataatcatgcctgagatgaaagtgtgaatctagtgcaca

SEQ ID NO: 39523 - DNA, 645 bp, Oryza sativa
cagacgtattatacggttcgcctgcgaagatagttttcgtaggtggcaccttatgtggtctgcctgcaataagtttttttttaggtggacggctagcatgatcttggttgctattatcgtaggcggccctttttctccgagggcaatgcccgcttgggaaaaaaatccccacgttgggaagaacgatttttctagtagtgctggtggtagcttaactgattaggctgcaatttctagtttataatagtcacgttgtcacatgtagcatatgctcttgcaagtgctttcatatgctgtgcgtctgtaccctctcatatcgtatatgtcattcacagacatggccagaagccctgtactattgtcacctcacccatcgcgcttagggttgggaagcattggaaatattattgtgttcgtttcggaccatttgattcgaatccttagatcattttgatcataacccagaccagtcgaacttaggggtgagaagcatctggaatattattgtgtctgtttcggaccatttgattcgaatcctaaaataatttttccagaacacatagtatgggggagaaaatgttttttcatcctttcgtatggtgaaaatccaagattggcaaacaacgtttcttctgttatatacgc

SEQ ID NO: 39524 - DNA, 556 bp, Oryza sativa
aattgatgtgatatactttaatgaaaaaaaagaaaaaaattgaactaaatgaagatgacctataaccgtatatatgatattataaaaattgatagagagatacattgaaatattatgtgaatggtgggatgatttaacatgcttacattttaaatctctaaaatttaataaattattaaattatatataatatagcatgcttgcatgatgcttaaatgtaataattgttagatgataatgatggaacaccattgcttgttaagctttaggaattagtgggctataactttatagcaagagagaattaattatgataaacaaatttctttagcaatccgcagttgtctgtgtcaaatcctatgttactaaggcttaacatgcaaacatgccaaatcatcatgtactaacaagatgtcccatcatcatgtattaacaagatgcaccatcatcatccactaacaaccattaaatttaaacatcatgtaaacatgctatattatctataattttataatttattaaattttagagcttttaaaatgcaagcatgttaaat

SEQ ID NO: 39525 - DNA, 633 bp, Oryza sativa
acatgtccatcccatacatcaagcagtttgtttgtttgttggccttttttttctttgcttcagtctatcataggtagaatttttctttcaacttttcacctcaactgttattcgtacgttgtagataggtattgaactcaaactgaatatcagctattcatggtgttaatttgaaattgagtttcaaggacacaaactatatgaagcaatttgctcctaattacagttggaaacaaggaaaaacagaggaaacagaggagtgtctttttttttttatgtgtgcactttgttatgcagagatcgggagtgttctcagattttcgagttcaataaaacttccatcttctattatatactaaaagtccattaaactttctacaaacgctctcaagccgccacgtggcgctcctacaaacgctcctagatcggcacgtggcgctttaacatccaaccatcggttttcatttaatctggtggacccattatttttaaccactagatctttattttaagaaaaaaacaaatcaatctatctaaaaaaatcccacgttactcggccgtgtcccctggacctgtacgtccttatgtccgatgtacgtacatatcccctctatgtccttttcttttttcctt

SEQ ID NO: 39526 - DNA, 552 bp, Oryza sativa
aaaaaattgatattaagaggacattcctcatatatacacggtgaattcaacagactttctagggccaaatacaccacggatcatcaagataactctagggccaaaatatgctaccaaattgaggctatcattccacagaacgaaacaaaaattggaaaaaaatagcacaatttcttgagtaatgtaaccactgaaaagtactagcttgctgcaacaatggggggagtgcagtaaggttttgttctccgatgcttcctgccgatttcccttcaaaatcagacccaaatagcatttatgaatcaagatatattcgtgaatgagcacaaatgaaagaaattgaaattagaatgcaattgtttgactaaaagaacattacgagctaagttcaattaacagttacctggatctgtcatatatacaaccatgtgtttgttctgcatcaaaattaccagacaacatgcatgctgcggcgcatacattggaggtgtaggggatgcgaccatttgctgttcgccagctgccggagcttgcacttgggacacaagctaagaa

SEQ ID NO: 39527 - DNA, 555 bp, Oryza sativa
cagttgaggtgaaaagtggaaaaaaaaattctacttaggatagactgaagcaaagaaaaaaaaaggcaaacattcaaacaacctgctggatgtatgggatggacatgttttaatgcaaccatattcaaaatcgaaccacaatgttgtgtacatccatgcctattaaatgtgatcaaatgtgtggctaccacggttcttgcacttgaggtgtttgtttcatcagtacatcctactgtgaagtatacatgtatcaaagttgtctaaccttatagttttggattggaatgtttcaggagatctagccctacatagcagataatgcatactagggtaatatttgtagtcctagatgggcacatttgcataggtactggcaaaagatggtgattatctgtcaattactccgtagctttcaagtacagagtcagcatatgttcttgtgtgaagtgtagaaggagctgatgtcctaattgatgtatacagaacacatgtgaatctacgtatctgaagaggatgctatcagcgtcgaacatttgtgtcattcttcatagatca

SEQ ID NO: 39528 - DNA, 587 bp, Oryza sativa
tacccactagccaacttgacataaatcttggtgaattttaattgttggaggctcttttaggctttttaaatttctagaaatgcattaaagcacaatttaaacttagagcgattttcagggcgttacacaggcccaggaagccaatcccggagcccacgagtcaccctcagcctggcctctcctttcatccgcgtcgctggcccacgctgccgtcgatggggaccgactcagcccacgccctacgctgaggcatagccgccgctgaacttccacaagccgcgcaaggagaaccggtgtcgtccttccttaaattggtgttatgcatcgccctaacactaacctctccctctatagataccgccggtcgtcgccccttttcctccccttttttcctgctatttccactgtcgccgtgccaccgacttcgcctctgcctcctcctaccgacaccgcagctagccagtgcctcggtgcgccgtcgccacagaacgatgttgtcaatgccgttgtgcccgagcgtgcccatggagccatggctgctctttctcctccgttgtgtagctgatctgggggtcccgcgacaaaaa

SEQ ID NO: 39529 - DNA, 722 bp, Oryza sativa
gctcaacaaagaaacatcaaggtaaaatatgtacccttggccacttttaatcaaatttacatattatattgttgaatttttttttttgtgtgcatggacaagagtaacccctgtctagtccaagctccagccaacattagtactacaccatcttgtccccatctcatcctctaacctagcccctccagcagtgcctcctttcttcacaatgcattggcatccataggaattgagagcgactctactgcccacacctttgcacagggcaggctttcgctgcatcaagtgggatgaagacacattcagggtggcttgttcaagtccataaaaaaactgagcacagctagaagctgatgaagcagttcactgtctttattggaagggtcaagtccgatttacccccctcaacactattgcaaaagtacaatttacccccttcaactataaaaccacaagatacacccctcatctattcaatccagacacttaaccccctcataccctgttttaggtggtttagggctgagttgtcttgacattacttgttctcatacaaaccttgcttctgacacattttgtgttctcataaagaacaaatccctgtttgtcattacaatgtcaacctggtgctattaagacttatattacttgttccttgtccttgcttctgtttctttttttttttttttggcacagacctcattgcacaaacaatatatatg

SEQ ID NO: 39530 - DNA, 517 bp, Oryza sativa
cttcgcaggcgacgcttatatggtctgcctgcaaagatcaatcttcacaggtggactgccccctccaccccgggtactttttttgccggcggggttttggctccgaattacatgcccgcctgcgaaaatcgatcccctacgacgccgaaaatgagttttctagtagggtcagctagaatatgattcaagcatctctaatttggttcaaggagcccttgattttgagacaacatgtttcacaaaaccaagacttaattatgcaaaacacacgttaatattgtactatggaaaatgctacacgtacgactttcgcttacgatcttgatacgagcaaacgtaaatgacggagaaggcactgggtacctaacgggagcacacactaatagaaaaaagatttttcatggcgttgccctatgatttttactggcggaaaaatacgaaaactgtcagcaaaaatgtaacgaggggtggagggctacggattgccagcgaaaacaaatcttcgctggcagccgag

SEQ ID NO: 39531 - DNA, 677 bp, Oryza sativa
actactatagggcgaattcgagctcggtaccccagataaaggtattcagaaacagtatccgggtaagcagaattcattgttcatgtaataataaccaatatttatatttttaatacaaattgctttcacatacattacctttgctttcaaaaagtttccacctgacaaagcataaaatttcctatttctcctctatggacattgctctcttaaccgttttcacatccataatgtgaaaacctacaaaacctactcaaacctacaaaacctgtgtacccaagttttatggttcatcctaaaattgaaaagagtatgaatgctcttcagagtatatgctgctaaaccattgttttcctagaaaattcagtgactataataaacatggggttgtggggttagagcttatgtctgacccaaataagataaggtttctggtttgtagccattctcttggtggatattcccatgacaaaaatgtttgtccttagggaaccacacacgtgtatctcccattggggaatcgatgtaattttgtggtcaggattatattatcataatggtgacaccatctagcttcttaaaacgaaaacctggaagtcttttggtattaatttcatttttttattataaaatatttaattgaatatctgtatgtagtatatacataaggtttaaaa

SEQ ID NO: 39532 - DNA, 529 bp, Oryza sativa
gtttgccagacatacctatgactttctatggtagtctgtataaatgcctgcagttgatcaaacttcacacaaccaagagtgaacatgtttggtagtctgtgccttgaggaaagaaattcagttccagtttaactggacagcacaagataatcaactttgttttcagtggtttgcgagtggataggtcgtgcgtgatcaggatcaaatgatcaaatctcacttttatatcacagcaaatttgcaaccagtggcatcacctcatgcatatgcctccagacatggacgtttattagagccagagaaacagctaacatgtaacagacaattcagataatatatgctggctatcaagttctcttacaaaaaagatgtagctaaataataatcaacatgcagcagacgatgaagctacatgcactaagatcagtttttgttttcaccataagaaaagcataactgcaaagatgctctgcgttcttgcaaaacacaaacaatgcctagagcatccataagatcacttcttgttttc

SEQ ID NO: 39533 - DNA, 649 bp, Oryza sativa
ccaaaaaaataggaaatatggaaggggagggttagagggggagagagggagtacgtacatacatgtgcacattttttttcgttttaaaacgtattaagtgaacttgtgattggagtgggggaacgtacagattttttttttggaagataagatttagtggtgaaaattaataatctaatgatttaaaatgttgggtccaccggtttataggaaagtgccacgtggcggtataggagcatttgtaggaataccatatggcggtttaggagcatttataggaaatttattagacttttagtatataatgataatgatgctcaaatttctaagaatttttttctaatttttaaatgtgataagttcgatgaatctttattgcgtagaatgatttaagatgacactaatattttaatgtttcgtggttgtttggttgttgccagtatgttcaaatgatgtatttaaatttttatagagcaaaatagtaatatagatgttgatttacttaattaattacaaataaaattactgtttaaataaattaaaaaccggattctgttttgatgcgatatgatcaaataatgtattttagtttttgtacatagtaaaatatgggtgatatggattttaaaatattagttattttctattg

SEQ ID NO: 39534 - DNA, 562 bp, Oryza sativa
tctgattcctataaaggtgagaaaatctgaaaaaacatctaaaaaatttcgtccaattccctaagaaagtggcgaaaaaaagggttcgtaaaaaataaaaagctagttcatacaaaataaaaaatacgcgcgagaaaaaaatagaaagggcaaaacaaattccgatttctaatcagtatatatctcttctctatctctaatctaatctaactatttaaaaagagaaaatacacgagaaaaataaaaacagttcaaaaaaatgcgtgagaaaaaagtcagaaaaagcgcaaaaaaatgctaaaaaggttttccatcttccataaaaaaacgtgcgagaaatattatttccatcgtcggttatttttttaaaaaaaacatacgaggaaaaaactggtagaaaaaatgcgccatttctaaaaaatgatttgaaaaaacacgcaagaaaaaaacaccgtctattaaaaaaacaaatcgctccgaaaaacctgtcagaaaaaaaaaacgctaaattgatggacgcttgagtcggataggatccatcgattttttgccatctactaca

SEQ ID NO: 39535 - DNA, 529 bp, Oryza sativa
cttatttttaacctattgtctatattgctagatgaatacctattatgattagtgacttcatagatcatatgtgtaattgggatgctatgatcatctttcttatgaatatttatttatctcctaataagatcgttttaaaagtatcaagatcaatttgtataggtacatagccttcataggcatgttaagagaaattaattaagttagtagaaagtcgttagaagcctgacaggatataagtaatagatgggtgaatggtgagagtgcttaacattgtatgacttgttagatcgcagatcaatactcccttcatttcaaaatgtttaacggccttaactttttagcacgtatttaaccattcgtcttattaaaaaaattatgaaatatgtaaaactatatgtgtacatgaaaatatatttaataatgaatcaaatgatatgaaaagaataaataattacttaaatttttttgaataagacgaatggtcaaatacgtactaaaaaagtcaacggtgtcaaacattttgaaa

SEQ ID NO: 39536 - DNA, 533 bp, Oryza sativa
tgtgatatgtcttaacgagagaagtgagaaatagcattaactagctaagactactaagtgaggatgaactaggtacatagcatattataaaaataatgaagatatatattgaaatattttgtgaattatgtgggatgatgatttaacatgcttgcattttaaaagctctaaaatttaataaattataaaattatagataatatagcatgtttacatgatgtttaaatttaatggttgttagtggatgatgatggtgcatcttgttaatacatgatgatgggacatcttgttagtacatgatgatttggcatgtttgcatgttaagccttagtaacataggatttgacacagacaactgcggattgctaaagaaatttgtttatcataattaattctctcttgctataaagttatagcccactaattcctaaagcttaacaagcaatggtgttccatcattatcatctaacaattattacatttaagcatcatgcaagcatgctatattatatataatttaataatttattaaa

SEQ ID NO: 39537 - DNA, 591 bp, Oryza sativa
  unsure (1)..(591): unsure at all n locations
atggtatccgacggatatagagtgtccggtaaattatacgggtattacccggtaaactacccgtacattacccagattgctggcaccaccactccatcatgttaacaaccaaaagcagccagggagggggcaagcagtcaccgtctcatcgagggtgccgcacgccggcacgccgcgcgcgtgcacaaccactcgccactcacgagcngccgccagcaccggccgtgacggtacgatgccgatggcgccgcacatatgctagccgctagtggctacgctgncgcgcacccgcgttcggcgggcactgtctcgcacatcgccgcgtggatgcgcgacggccgtcgtacccgcgccgaccaccgncggactactttgatactgctgtaatagcactggtacttatggtgatgtacagtagtagtttactactgatatgcagctatggtgaacaacagtctacagcattgagtctctaagagcccactactagctncaattcatctatagccgatctaatagctaaattatataaatagtgcttactatactattaatatatactcccacatatcatacacacgttgtgtctta

SEQ ID NO: 39538 - DNA, 2648 bp, Oryza sativa
ctcgaacagcggcacaagcaagcgagactagaaggaaggagaggtgttaacgccaaaattttttaagcccgaagtcatcatcggcttagagtcgatctctggcaaaggggtaagtcatacgttccgttggccctggtaattgtgtcggctacattggtgttgttcaaggctacatcgcttcgacctctttgatcactctggttcggttgatatattttcctacctatttatcatatatcttggttaatctaagtcgattattcaatttacttctattggtcagatcttttctagggtgtggtgggtatcggctaaattgttttgtcgatctagattagctaaggtattcaccaccctgaaaatcagtcaaatgcttattgtctagatattatgtttcttttcatacttagtgctgcatcaattgggtttgacgtactaagtcgtgcttagagctatagtctctagcctgctttttgattgccaataaggatttcatcggggtttcagccgatgagttatatggacgttgtatcgacttataaggattacatacgaattggatttagccgattgcaacaaaggtttaattgattaactaatcatttggattttacgacattggacctccagccgatgtattctttaaccttcggattagcgcttattctatcatatcattgatagccgattggtttccactgaattatattagttatgttacattatcatcagtcaactgtctttatatcattatctacattggacatataatcgattattcaaaaccctgtccacattggttggaattactccatcggcttgtcagccgatcggctctttgatcttcaatttatatatcttgtcagttgtaggatcaaactgactggcacgcccgcatctcataaatattctggaccagcgctggagctaagtagatctcccaggccattgtgttcatcgacttagttcgggccaacacagatctagcaccatcgaccaagcacggattttttttgtcaacaagagggaaagtgatatcaccaaagttcttgcaaaataagttgtttcccaaagttcgaatccttgaggggattctacgctccgttgaggagctcacaaagagccgggtcttagctaactctttcctcaagaggttgcacaaagcactactccttccacccactagtggttttcttttctttcggaggctagatctggcattcacaaacttctcctggctaaccacaagtacattggtggctcaagattggcacttagccgcttaggagtacacaattcccaagattaaaagatggaacaaggatcccttggagatgaaactagtactcaacgaatcttcacgaagttaacaccaagcactcacacaaactcaaaaccacaactctcacacacacaaggtccgagctcaaagatcggtggagaggggaaattagaaagcaaggcttaaagtggtctcaaagcaaagcaagccaagggcgaaaatatttgcattagcaccagcaaccttgacttggagtaggtgggggggggggtatttattgccacgcccacaaatccaccgagggagtcaaattgcaactgttttgttttaatagtttgtggggaaggggaggggggtcgagatattcggtattgtggttcaaggattcgaataagattcggtcactagttaagagagtcaaagtgagcttattgcaatctacattatgcttctagtaagttggcttttctccccctgggctatacttgttgcccttccctcgaatttcttgtatatatatatatatatatgcataacatacctatatataattttaaaattctatgggtattcagctgatatccatgaatcacattggatccggccgccacccggggcttcatcgtgaggaatgtttttctagacaaatccaagggtggtaatacggagttatatccatcctaactaactgccaaatacttctctcaagggtggaaattaaaactatttgtctcatgccatattatgtcacgccacttcaaataaatcaagccattagatggtagttagataccacatatttctcttttactaggctcccaagtcccacattacatgggttgtccatagatagctaattaatgacatcacaaatgattcaccttcgaaaccattttctaatgggaatcctaaaagatacctaattaattatttggacgtccctaagtaaccatcatcgcttgatctcacctttgtcgatcaggcaccaagatttcttccacgtactaaacatgtctcaactctcgatttttgatggacaaacaacttcttcattgatgaccatatgtaacgtcgtggcctaattagaatttgacatctgtgatccatgagagctgtgtgcacatatctgttaccacattgctaatttagtaagagtgaaaccaacttataaggcatcttccctctaaccatatcgctcctgagttaactattttacacgaagtgaggatgaaagtttaagtggagtggtgtatgtaagtgggcccacttgtcgattgggctggctacgtggttcttgagggaaggctcacacaacatcatgttttccacatggaataagttcacttgacgtccctcaattatacac

SEQ ID NO: 39539 - DNA, 710 bp, Oryza sativa
taatgtagctctactggaagtctggaactcaactgtattattatcatttttttgtattgttatcttatgtttattgcatgtgaactagaaaagcatgtctaaattttatagagcttcacattgaagcttatctagtgttgcaatgccactgatatctcaagttaacccctctggtttttatataatgtctgaaccatagtgtatttgcatctatgaaatccttatcgcaacaagcaagccacctgattcttttttttttaatgtagcctagtggaagccagtttgtcgttgttatttcatggaaggtagaaaatcatgtctaaatatttagaggtcaactatgaaactaatctactgtgggcgtgttgactgatgataaatctaatgcaatggtgctgataacatattgtcaagttaatgtggtttgttaatttaaggttaacttgttggttcagaaagtacaggataatctgttcaaacaaagcttgttattccaaagtttacttttgcttgagtctagttctgtccaaattaatacagtgaagtactgcatatatatgcttgttgtaatagcttgtaatttctagtcttgttaacttaacatgtttcattttctaggtgctggagaagataaacaacccgcattatctctaccgcatgaccatcctgccagctatttcattgctggcccctgtcatgggtgccgaaat

SEQ ID NO: 39540 - DNA, 581 bp, Oryza sativa
tgaggatgctacgcttgaggaagtggaggaagcagaggcagctgcgtggtgtgcagccaatgaccatcccaacagacccgcccttgaatcataagacgtatgaagataagatgatgctgtttgacatacatcaagaggtatatctcttctctgcgaagtctgatacaaagccattcggtgaatttaagcctcttcttagcgcaagtttaataatatagtcaaccactaacgtcaaatcacttgtaatcaatttaagttttaatagcatagccgactactagctttaaatcatctatattcaatctaatagccaatcttggaatctgcgttaccattgactatatggatctatagcccacttcttctctctctaggcactagccggacggttacccccggtctagagtctagccagtctatacgatacgccatacttatactaccggcatattttttttacatatatgtaaatacacttagcaagtcaaaagttctagagaatatttgagagcaacaaaagatggtatttaatgtttaccttattttgcaagaatgaatcttcaattagcttcaaattcaaa

SEQ ID NO: 39541 - DNA, 642 bp, Oryza sativa
cttgctgctgacagtaaactctgcaataatctggctgacccccttattctcgaccaaacatagaattaacagcctgaaatggggggaaataatgacacaccaagctcaaaacatagttatcgggtgagaaaaaaggaagataccagataggaacagacccatgaattttcagatgaagtgtgcatgctagattgtttgatttcctaatgactcgagcataaaatagacttaagaatacaaagcagacgattggacaaatacatgatattagtacagacccatgtagtcgaagtgttgaaacttgaaattttgtcctacaaggtttgggtgtaatatttgaagttttgaactcacagggaattgtcaaaaagaaggatgtgctatagacttatagtaaaagcaaacaaagttggaccaataaaagattcaggtgtaaacttaatagaattgatagattgttcatgaataacctttcaatatttgaacacataatgttatgatcttccttagagcctcctttgtgagacaaagcaggaacaagagcttgaatgacttcagttggaggtcctttgacaaaaaacgaatcatatatttccttccttgcagaggcacggatctgacgtaaccacttcaaggcaacat

SEQ ID NO: 39542 - DNA, 675 bp, Oryza sativa
ttaaatcattgtaagtctctccttgaaaattgaagttgaagcgtcttaaagacaagattacttgtagcttgtagcaattctgttcgatagatcagttggcatgccacttatttagtattcgttgccaagcatataatatccattaatacaataaaagaagatttttgtgcaaatcattataatattgcactggagcaataaattcgttcactatattctagtgttttcatgctcatttttcctgtagcaccatgacatcctgccatgatgatccatgaaatgctccttatgctgcatacctcaaaatggcagccaaaattaggataaggagattgtgccataacttcctgttcctgggattgactagtttggatgggattttgcctagatccagggaaaggaatcttgcgtattactaattaaatttgtaccaattctcttaaggagatctgaactacatgaaagttcattttcttcagctctgcattcctttcccaccataaccaaggtttatccagattttttttaacagggaagctaatcgttagattatgttttaatagtttgctcagtgtacttcttaatttccttattctggaatactacctccgtcccagaatataagaatttttagggttgaacacggttattaagaaagtaggtagaattaaatgg

SEQ ID NO: 39543 - DNA, 600 bp, Oryza sativa
tcctcaatcatgtcggagaagatagacatcatacacctttgaaaagatgcaggagcgttgcacaatccgaaggacattctctggtcctccgtatgaatgggatttgatgatacccggaatacccatcaaggaaacagaaaaacgaatgatttgccagccgttacaacctctcgcatcgcattattgagccgtcattgaggttccctagagggagtactctcagggtcaatagggatacgatgggtgcaaagtgcgggattgatccctctgagatcttgaagggaatagccaagaatagaacgatgcttttccaacactgttagaggacgttgaatctcgtcttcggagagcttgtcactgattatgacaggagcttctctatcattatgtaggaaagtatagcgtaggccttgaggtagaggtttaagctcaagcggaggtcgaggtggcggttccatgattggcagatcgagagtctcaccgggttccgcttcttccttgatgaagtcagggacttgatcttccaggagggcttcaggagactcgtgagggggaactgctgtaacctcctccgctcactcaatttctgtgagagggtcg

SEQ ID NO: 39544 - DNA, 573 bp, Oryza sativa
gaagcaaaatggagttaccttttttctcagatgcaaggtttacaaattccactgcaaagcttggatgggaacatgtatcctgtggttttctaacatgtgatttgttttcagtaaaattggtctaaactattttgtatttgttttctgctttccagttggtttccccgtctttaccctcatccattttaaaaattacaaatacaaaaagtttatatatgtttaaatttgtcgacattattttgacatccagaccctatggtgatgcaactaatgtttggttccaaatttcccatagcataaacgttgtactttgtagtcgtaagattcactttgatgttagattgtgagttgtgactagtagatggctgtgttctttcgagggtgttgggaacccttctctcctagcacacaaaatgaagcggcggattaacacataattaattaaatattagcttaaaaaaattgaaatagattaatatgatttttttaaaataaattttctctatttaaaaaaatatattatttattagtttggaaaggaaagcgagagagtagaagctaggaaagtgtccc

SEQ ID NO: 39545 - DNA, 599 bp, Oryza sativa
ttccctaaatgtttgacaccgttgacttttttaaacatgtttggccattcgttttattcaaaaacttttgtgatatgtgtaaaactatatgtatacataaaaatatatttaacaataaatcaaatgatagaaaaagaattaacaattacttaaattttttaaataaaacgaacggtcaaatattttttaaaaagtcaacggcgtcaacattttaggatggaggtagtatatcttctccactatcttaatatatacaagagcatcacgtatgtactgcagaatgctcgatcatatgcatgcccttcagaaaatatacgtgcaaggattgggtggtcaaagcgcacatttatctgttgacacctaattagctatattgctagctatacgtacctgtcaagcggcatgtgtactcacgtaatcatctggatcagaaagacactttcttttccttgcggtgcaagctctgggtttgactattgaccagtcgtataaaatctactcccattttggttggatgcgagtacaacgaatttatatataaaatatgtccagatttattgtactaggataaatcacatctaaccaaaataccttatata

SEQ ID NO: 39546 - DNA, 718 bp, Oryza sativa
atgaaccagaggaagatctgaccacacatattcccttggattcgatacccttggaatactccgtaggggaagtgctacatcggtatatccgtgcgtttgcggatttcatctatgatcgttaagaaataccaaagcatttctggcaccgttgccggggaacggttgctgatcatttccgaacctagttaatcctcgtatctctgttccattttttttgttctacctttacccctgctacccagagaagtgctcctgtaaaaccctcctcgaccatggagcaacctcttttcgagctatctgctcctaggggcgaattctatgagccacctccttcatcggagcccatttatacaattggctatgaaattcgccccgaactaatcagcatgtttagggaaaatcctttttctggcttcgatctagaaaatccctatcatcatctgtgaaactttgagcaagtctgctcatgccttaagattcgtggcatgagaagaaactgtgcagtggaaattgtttccgttctctcttcaagagagagcgaagcaatggtacacctctaccgttggatgtgtaaacggtagcttggaaaagttgcaagacagattctgtcttgctttcttcccagttactagtattactgccctttgagtagaaattctcagttttcagcagatcaaaaacaaatcaatcggtgcagcgtggtccacattcactaatt

SEQ ID NO: 39547 - DNA, 658 bp, Oryza sativa
aaaaattataatgctgtcatagcttttttggactccattgaaaatcttgagagatctcactgttcttgaatggaactttagaattcttatcagaaacaagctactgttatacctaaagtataaacaaatttattggcaaaagaagtgtattatcagatgggccaagtttggggggtgagaatacaaaatttttccatgctatggctactgagtcttatagaagaaatgcaataccctctttagtagattcttctggtttagtctgtacaagacatgaggaaaaggctcacatagcgtggagtgctttctcttcaagaataggttgttctcagtttgagtttatgccttttcagcggcaagaacttttccatgcaaatcaatctcttgctactttggatcaaccctttggtatttctgagttggacaaaattatacagaatctgcctatagacagagcccctgggcctgatgggtttaatgggatgtttgtgaagaaatgttggccaatcttttgtcaggattattatagacttgcagctgagttctactctggtacactggacctggatcctttaaaccattcttttatcatcttggttccaaagaaatctgtgcccgaaggtataaatgactataggccaataccactcttgggaat

SEQ ID NO: 39548 - DNA, 776 bp, Oryza sativa
taagataatcagcatgcgcaccaatttaatggtcactggcgtatatctaaacaacttgcttcaacctaccctgcataactgcactgatacggttttgtatgcactgataattctttgattatcattcctgtacttgcttcacatgtttcttttctgaatccaatatcaacattaacctttgcgtagccttctgtcgggtcttgccatttattatttgcatagcaacattatattcttcaaatttcactatttttgtccacatacagaggccccatactgttaacatcatcagtccattgtcggacaggcaatatgttaccttcaaattgactgaatctgaaattgtggcccttccatactatagtagaattcttgcttcactgcaagattcagattatgaaatcctggtctggttatgcttcaccgcaataattcttttgcctactttgggaccaccattttcagttacttcaattaaggcgtgttcggttagttcctccacaagaggattgaagaggaatcggagacgatttatttcacaccttttgaggggatttatttctcgatggggaattgcatgttgtcatctctaattaagctcacagtagcagtggcacaatgcaaaagattagtaccaccatcgccagcttgtttgcggtttaaaaggatgaaaagcccaattacagtacaaagtattgcagtcttaacaacttgatttgtatctgaaccctttttaaaccttgaacattacaattaaggctgaaaaagaactgggc

SEQ ID NO: 39549 - DNA, 500 bp, Oryza sativa
gaaacggatgaagtacaattttgttttacagctcatgtatgatatagtttttgctgcctacttggtgataattatataagcatgaatcattctctcgttggttaattttgatgtcaaattgtatgtgctcgccttatgtactcagaccttgctgatagtcacatcgtttatattccttgtgaaacaatgtactccatctctctaaattatttgcttgaggccaactcttttttgtcgtgctgctagttatgactttgcgaggttattgtaattgagcaatttgaattgggtcatcaatagtgttgaaatcaatatgctagctagatatgtgtctcataatacttgtcgttttgatttttttttaacatttgaccattcggtttattcaaaaattataaaattattatttattttgtttgtgacttattttattatcaaatgtattttaagtatgacttatcttttttatatttggacaaatttttaaataagacgaatgg

SEQ ID NO: 39550 - DNA, 1705 bp, Oryza sativa
tcccactccatcatcaacccagcggtggcatcctcaagaggtgtggctcctccgccgtcggactcggaagcagtcgaactctcttgcctcttcctccccgtcgtcaatccggcagcagtgggggcggccttgagaggagaggatccacaaccaccagactcaggagtggctggcctctcttgcctttccttctttatcgtcgatttggcggcaatagcagtagaagggctagatccaccgtcgcgggactcgggagcggcaacgggggctcaggctgggcgtgatgaggacatcactagctcggatatgaccatggttatcttatgtattcatcaagcaaaggtgcatgctttctaggtgggatttacgtgttatatattggaacaaacattattgtattatgagttccgtgtgttctcatttgtagaggtgcttgcttggtgaaagggaaagataccgagaacaaggaatacatggatgatctaagaagttgattgaggaagaaaccaaaaccttcctcaagtctactccaacattaccatgttatttttggttcataaaaggcaagagatgaagttctgcacgttttggattcaaattcgggcctcctgacaatattaactttaaacaaacctagccactgatccagaaggaccctaggggtccatgagttctttttggaaagattatagagtctgctttcagatggttttagtcccacatcaaaattcctattgagctatagggaatatgcaaaacaagtcatgtacctcatacaatcttagtctgatttgggcgttgggacttgtacttgtcgtgggctaagcccaaggggtggaaaaaccctaggatgtctctaatcatatttattccatagccgtcataatttagagtcgggttttgcttgaattatttctggtactatagtttcgatgttcattggtttgtggaacccaaatttcgagttcttaatcattcatctgcatttctattgcaatattttttgttcttgcttgtgtctttgattcacacaccgtgattagccttctcgatgaagtcaattgggtttcggcatggttgataaccagaggaggcgtggtgctaaaattgcatggttcagatcgtattgattggaagccaaatcgtgtgtgtcaagtttccgccaaattaagagttatcaatacctatcagaagattgagacctaattagttaacgggaatccactgccagcgcccacaggagcgacagatccggcccagtcccattggggacaccgggaaaggtggtggcaattttgactgcgacgatgacggccaacaacacgttattgggcagcaaagactagtccctccactccgacgagggaggcagaggagcttgcttgagtctatggcaatattcatggtgacgacgacggcaagagtacagcggcggcatggttggattgggtaggctttctggattttggtttttttgaaattcttattttagttttgccatttttttccatgcagttggcataaggagccacattttcacatgtggttcagctggccgcctggaaaattactctctttcgcagactcctactggtaggcgtgcactttgtcacaccctgaagttcttctcccaagcctaaatcatatttataaatgacctcgagaatttatctgtgtaacagcaaaagagaaaccctaatttaat

SEQ ID NO: 39551 - DNA, 610 bp, Oryza sativa
tgctgtttttctttttatgcacctttctgcttttgttctctcttttattattatttttatcaaaaacgacctcaagtactttattataagattatagggactccaatgtaaatataaaaattacagggactcaaatacaaaagtacaaacccaaaaattaaaataatataaaaatggaatgctttcgacatgtaggttctgtttttgtaaacagatcttcaatccggcacatcattttgtttcaccaagatgtgtgatatattatggtacagattgaaaccgagaggagtatggtatctcggactcaaaaggagtggcgccttttatttttcgggggaattgtttatcggatttttttcgccctttttttatcggacaattacggttttttcgcccgttttcttctcgctcgcctggttatttggccagttttgttgacagacgatggaagcatctcttattttcagtagttgagatttgttttggagcctgtgttgttacctctccattccacataaaacattattcattttttgttacctcttccgtccacatataagatccttttactggaaataaaatgtcatatcctataaatagtttgttacct

SEQ ID NO: 39552 - DNA, 563 bp, Oryza sativa
ttattttcccattttatattttctacacagttttaaattgatagcctcaagtcaaaactaaattggtctgatagatcactccatgtagaagtcctctagggagaggagatctgttttgcagcgtatcccctgattatgcttgatcactccataaaaatgaaattacctgtagccttcaaatgtgatgaagccatgtaattttctggtgccatagaattaataactgatatacatggttcagaaacgagcttatatttgaagcatgatgcagagagtatcaagacaaaacatgtaaaatgtgaaaggaaaattagcatccggttgaaatatgaatcaggctgaacatttccaatgaatagcacaaatagaatcgataatacaaacctgaagaagaaatgcctggctgggtgatggcggcgatgtggtcaggcaggcagcgctggcttcggctcggctgtaccggtcggtagtgacgcggggcgacgatgcaggagtcggcgccggtcaacagcggccgcggaggacatcggcgaggcgggagtcggtgccggtcggcagtggcc

SEQ ID NO: 39553 - DNA, 722 bp, Oryza sativa
tttcagttatatgtttgctccctcagttttgctagatagcttataggcaattgcatgtaagattatcagtccgagctatttatttttgttcaagggagccctcatatgttgttttaggatctcataggctcaacctctgaagtatcctattttttccaccaagtcctgctagtgctgcactgaatctatactggttgataggaagcatgggtgtgtgctcatgttaggctcaacctcatcgtttgccactagtttgcctcattttctaagctagggtctaaatggtgattttcatggtccccaaaaggttttagcataacaatacgctgatttaacatatgctggagtagtggaggttagcgttggacctccaaaattgcaataggctgtgatttgaaatgctgttctagatatgcatgcttatgcattaaatgggaccgtaggagagcattgtgtgtggccttgaagcctcaattatttgtagcctatggggccacatgcgtatgcacacatgtgtgttgtaactgaacaccaactgaatttcactgtgaacttaaaactattataggcacatagaagcccaccaccacatacgtacctcacatctgcattacttcgttcaaatcttcctcatcattaagtaagatgtggagatactacaaaaaaaatgtggattgggtgatgactccaatatagggcaatttgtatgttgggatgccatt

SEQ ID NO: 39554 - DNA, 954 bp, Oryza sativa
cttttaaaaatccggcggatccggatgcggatgcggttagtatgaggcggatgcggatatggtatctctaaaatccgacggatgcggattatccgatatttttgtcggattatctgataagccgtttgtcggataatccgaaattatcaacatatataaccactctatctattgcatataatataagttggtacatccaattccctaattcatcaattaacatagattttttagtctaaggcttttatcgtctcatgtcacactcacgtaactatatttttcatactatggacatcatgtattcatattgtttagcgcttaatcatgtaattattacgataggtcatttactgattattgtattatttttccttggattgctaactcgatgttgcattgattgcatatacacgtaacatccgataaatttaatccgcttccgaaccgattccgcaccgactccgcaccatttccgacatccgaaacaatccgctctgtatccgcatccgtacactatccacacccgttctgaatccgcttaaaaaatatggtttaggatatggtataaccactatccgtccgaatccgcttcgttttcatccctagtttcactcgtgttcctgctaatttattactatatgaaattttataggtaaatcaattttaaagaatctgtgcgattgattttattattatttttacatttaaacctttaaatatattagatatattgggctcattttttatcatcgctaaaaatacagaaaagaagatgaattactctcactgtatatgctttatttgctacatgcaaacattctaatttatcatgtaattttctgaagacgttaaatatgcaattgaaaagaagccaagggattattttgtgaaattgtactgtttggacagggtatggacgataagtagcagttttttttttctcacacgcacttt

SEQ ID NO: 39555 - DNA, 601 bp, Oryza sativa
cctctttccatttttccaagaatcggagcaaatcttaaggggtttctatcctcgtcgcctctttccattttcccaagaatcggagcatatccgctttgtatagagcttggaattgagccctatcatcgcctctttccgtttccccaagaatcggagcaaatccgcttcgtattgagcttggaatcgagccctatcatagacaagcgaacctagctagaaacatagggtttcgtccgtttcgcttggaaaaaaaatcgtgtagcggatgttgacaatgacggagaaaaaatcatccggaaaccatacgtattttttaattaggtatagataggcttgtttaaaggaaaaactattcagcctagctcggtccaaaaaaggactgcaccaggcccatcctgaccattttcatttcattgatcgatgaattttctttttttaccaaaacattcatgaaataaaggagcaatgctgcaatatggttcacatgtatgctgatacatgttaccaaacaaacaaaatgtagcttactttatttggctttagagatattctacgtatttctagtaaacactgaaatatcactatgtttatctacttcatt

SEQ ID NO: 39556 - DNA, 662 bp, Oryza sativa
acgtattatttacagtgaaattgggtaatatagatcttgaattatttaaaagatgttttaaagaacattgattggatatttatcatatatagatcttaattttactaaatatatttatatttgtgaagtaatatattttacttttatattgttgaacataaaaaccatatataacttaagaattataatcatttagctttctaattattttttgtttttatattaagttgctaattagttaaaaattagaagaatgaagaattgaatgagaaaggagaggaggaggagagagtacgtatgtagttaattagttactattgccttattgtatcataattgatccaccgatttgaataaaaaattagacttgatattgaaggaaattcttagggtttccttcaattttggggaggactcatgaaaatgatacgtgcatgtgataaattgaaaaagaccaacatgtaataattctttaccaccaaaatatagctaactaatatgagtcttaaaccgttgatttgattaaaaaacagtagttcaagtgtataataaactgaatgtgtagttcaagtgtatcactgtgatcactcctataatttaggtagcatgcatggtgcacagcgagctcctgcaggctccatatctctaacttattgtaacaa

SEQ ID NO: 39557 - DNA, 512 bp, Oryza sativa
  unsure (1)..(512): unsure at all n locations
caaaaaatacccacggcaccgtcgctccttgcgcagatggatgggcactggatgagataagaaatcggcagcggtgggggggcgtgaatgaagccgctggtgaaggagcgctggttcccccgccgcgggcggcaaatgcggggcgagcaagcgagcgcacaggcgggggcgtggatgcggggcgggcagatttggggcgagcctgcgcgcggctcaggcgggcttcgcacgggcggggctgcgctcgccgaggggaggaaagaaaagagattaggtgagaaagcggcgccgcacggagggaggaaacgagaaagagcgaagaggagaagagggggcgcgactaccttttncttcctttggnntnttttnnttnccnccaaaaaaatttctacccttctaacatggacggatggatttatctctgtacctcccagtaccagtacctaccggtacaagttgctggatgggagcaacgctcaagcagtcgaatacatgaatcatccaacttggac

SEQ ID NO: 39558 - DNA, 613 bp, Oryza sativa
tttttatgaaaaatcgcaaaagtagtggtcaaccggggaaaatcgcgaaaataggtccctgtcgaacgggtgcagttcgatagggcgcctatcgaacggccagagcgcgactggcgacgagatcggaaggctgccgttcgacaggacctgtcgaacagcccccgttcgacaggcagggctgtcgaacagcccccgttcgacaggctgggctgtcgaactgccgcagttcgacaggatgtccgtcgaactgccacagttcgacagggtcgcgttctccatttatttgtaataagttattttttttaataatatgtaatttattttagtgtgtaagaaaggaaaatatttttgtaatgttatatgtatgtgatttagggttttgataatgtttggtcagaaattgtagtatttatttgttggttaaaatatttgaattatttagtttcattatttgtatatttgaatgataatttgtcatgattcattcgaagggtatgctactgagtaattatccgaagaagtttatgaaatagtactgatagtactaagttaatcgtaaagtgtttctcaaatagtacggacagaacataaatgactaaaagtttaatacaaa

SEQ ID NO: 39559 - DNA, 716 bp, Oryza sativa
tgtgtactagttgaactaagcatggctaagcattttcctaaaccaacatctagtcattttgatacccaagttatcaatggcataaggtaaacaataaatggctgagtaataggacccatcccacatgacattgtaaaaggatgcaacatttaatagaaatgcgggatatttgtaaattgggtacaatatgatcaattgtaatgcatgacttgccttgctctcgcactgatgagacctcagcaacgtcttcgagaaaccgcggatcgacgaaacggccagtctacgcgacaaacaaagcacacaagcaaaacatgctataagactactgaaacaggaaacaaaaccatttttaatggattctagggatttttataaatttactgagacttgaatggatttaaacagagctcggatgaattagttatgattttcagaagataaactgtgtttttactataaaaagaaaagccttattggtttattgcgcaatatatattcccagatgatgtcagcaggggggcgccgacatgcgggcctcactggcagcggctcaaagggggtggtccaccgtggaccaggtccacggggccggggtggtggtgtatcacgtggcgtcgacgtggcaccacgtggctggccacgcgggccatgggatggacggccacgatcgggcgagggccgatcgggcggttggggacgggcggcaccgaggccag

SEQ ID NO: 39560 - DNA, 582 bp, Oryza sativa
aggcggccgggctggacgagaaccacaacggcgacggccaccgccgccgtggacgaggtccgcagccgaggcggtcgcggtgggcaagggccactgccaaggcgagcagaggcgatggagacgacggccatggcggacgagggtggcgacaacggtagacgagggcgatggagacgccggccatggtgcacgaggtggcggcccggtggagcgcgacgacggcagatgagggcgacggagacgctggccatggtcgatgaggcggcggcccggtggagcgcgacgacggcagatgagcgtgacggcaacaacggggaacacaagcggagcgaacgcgctggtggtgataccggcggacgcgggccgagtggatggcgatgcagacgcgctggtgggccccgctgcctcgggcgagcgtgcagtcaagcgactaattaggccatccccaaccaataaactattagtttccatacttgtcatgtcatatagacactatatgtagacactatgtattcaatggatggtgtatctatctatcttctatctatctatcttctatctatctattatctattatatact

SEQ ID NO: 39561 - DNA, 6330 bp, Oryza sativa
tatttgtacttacatccaaacaaaacaaaattgtaaatgtatcgaacccttttctcctatttcctcaaaaaattgaccattgagtagggaaacactgcatttaaagcagtttttttagggaggggggggggtgggctggctaaaagggtggttaaaagaattcgttgttggttggacaccggataaatttagtctttttgacaacaaaccgagtgaaatggaggaggaagcaataagcaaactgatctttgtgaggagtgattttagaaaataaagacccaactacaattctaagacataatagcaggtgtggaaacaatatgcatattactcatttactcccctggatcaaattaaagagctaccttagtctgtgctgaggagtgaagtttgtactatagtcgttaatccccttaactcgaactgtacgtttgtacttagttttagataacgacgtgcgttcgtacctgaatctgaatgagaggggtgaagtgtcgtccgggcgtaggaattcattggccgggtggatcggcaccaaatttgaagactttcttcagatctgcacagctagcttatatctatatttattaaggagacagcttatgcatacagatagatttatttatgaatgcaaagaatatacataatagcatatagcatgaatgattgattgattaattaattcgtaagcaatcatatgacagaacaagaagaatttttggcagccaggatatatatatatatatatatatatatatatatatatatgtgtgtgtgtgtctagattcattagcatctatatgaacatggacaatgttaaaaaatcttacattgtgaaacggggggagtatatatctagcattctagctagctagatgatgtgaagaattgaggcttttgtcttctcgctcacatggaactttagctagctatcgaaattgaagaatcatatggatgcagatgcagaaacaaagtagccagaggaagagagatctgcagttagctagcgcacgaatgatcgatggatagatcggtgacatgtagtagtacgcacgatacgagtgaatgaacaatctgtgagtgagttagggcatgtttggctcagctaggagctggagcttagccaaacagtttcagtttcaactgaaatatataagggcagagctgggtggagcactctcacaaaatgaactagagatgtgaagctgggtttaggctgcttcacaactccactccaaacccaactactgaagctaaatttaggagttggaactctatcaaacaggctcttagagtatatagatgagtaatctttgataaagaaagtggtacttgctatacatgcatactcccttcatcccaaaataattttatttctatcctcttacctccactcgattagtaagtcgataagctttattgtttcaataccttttaactatattttaaagataatgggataaaatccggcctttgctaaaaaagctacggccaattattacacatattcgtctctaagagatttaacaaaccataaactcaaacaaataagcaccaacacaagataaagaaaccccacaattattgtatcctactcgcacattaatattactttcccattaacatgttataatttagtttttttctctctaatttgttttgcacacacaagttctaaagataaagttattttaggtctgttgtttttgttcatgttgattgtctgtcctgtgatatgcgttttgattcacagaggggctcagtcataatattggacccaatgcaaatggacattgccgctgatcttttatgttgaacggttgaatggtttaatagctgatgtcatggttatggagggggtacaaatgattaaattactattataaaatagaaaaaatgatttaaaaaattctctgagaaattcatatatagaaaaaaaattaaaagttataaagacgtgaaagcgtgaacatttgtccattcatccgttaaggagcaatataccgaattacatagaattatttcaactcctagctactccgattatctgacatatataggcatgtccttttgtcttaattaatggaatggaatataagaatacatacacttgttaggctcctaaacggtataaattttgcaaaatctctctacaaacaattttttgaaacacaatttaaaatctacttaaatttatgatagttataattaattttattagtccgtattctcgaaacatttgtctatttagctaagtagtattcagcagtccgttctattccatttaggccaaaataacacccaggcaggagggcatgcacacctaattaattaatcagataatatagtagctagccagggagtagtttgattaattaatctcctgtcacatcttgctacgctgatggttaaccaaattgctaaatcccctataaatatatataattttatactacgaatctgcccatttacactcaataaattatatgggcgacgatcatatccattaataatcaagtagaaaagcagatcgcaaataaaggcgacctaaatgctaaacgtgacaaattgtcgcaagtatctttcacgtacagttttttttaaatgtctcattattttctaatatgcccttgttaattaattccttggtattatatatttttttgatgaggaaattccttggtattattgcactcaagaaatcagatactcaaaattaacaagagaagcaaagcttataacttataagttacatatttataacggcggtaaaaaaaatattaatcgtgccgacagataattactcgcggttaaaaagaaatcagaaattaaagcggaggtactttgccacgtccgcaagtaaagcaaaaggcaagcaagcagctgatcagaacttcatggatgctcatgagaatcagatcgataaatagaataaaaaagagagagaaaagagacaaaagaaaattaaaaagaaaagcgtaggctatcagtgatcagtcagaaggtgccatgaccaaattttgtcacttcctcctttccagctcccacgctcttcctccatacgaattcattaccgccactgaattaatcaatcaattaagtagtagtatttacataatggagtatttgtgtaatatacttccttcgtcccctaatataaagtattttgacattttacttgtactatttgaccattcgtcttattaaaaaaaaattagaattattattttttacttgctttactatccaaagctttaagcacaacttttcgttttttatatttgcacaactttttgaataaaaagagtgatcaaacagtacaagcaaaatattaaaatcccttatattaagagacggagggagtaatctagaggagaacttatgtaatattaccatcattttttagaaaaactttggcaatacacattcggttagacatagatgttatgtttttttaaaaaaagatatttttaatttagactattcgttatttctaaatttttttataaaaatagacaaacataatgtgcttttaaaagtactctttttctataacatatttagggtgcgttcggcactgcctttttttatcttcttctatttctcgttttatacgtgcatatttttcaaatggttaaaaagtgtattttgttaaaataattatagaaaaattgcttgaaaaattatattaatctattttttaagttttgttagtcaatacttaattaattatacaccacaccaatgagttacctcgtatttcataggtggagaagttcccaactcttctcgtggagacgtggacacagccttggggatactcttttcagtttaagtagttgaataaataaacgttggtaaaaattcgaggaaataaaaatcaaatgtgacatatattaagaaacagtggtaataaaatattttatctaatgatttgagtggatctgccgttacatggtgcggcgcccaacgtgtagatcacaatgcaagtagatttagtgggttttatttggtcaaatttggtttatctgcctcactctagcatgcatgcatacgagtgatgattcctctaaaatacgtactttacatgattaccgcgaattgagagctacgtgttaaccacaaggaccaagagatcgatcgaccaattagcttagcttggctagcagatactctcgtgcgccataacattagtccattaattagaaagttaatgatcctattagggtaaatttggaaaataccactgcaaagatacgtgagttgcaaaataccatcgtacgtgagaatgacatgtggggcctggacccacatgtcaatgacacatacgatggtatttttcaactccgtgatttttgtaatggtactagccaaattggcccattgtattatggatcacactttgttaattaacacacattccccatatgcatgtgtatgtatgcatgtatgcatcgatcgatgtggggcccgaggacagggacagcacggctaccgggcccacccgcagcttcgattctccctctgtcctcaaaggcatgatgcgatgtgccatcggttcatatctctcttttttggtcactaataaccctcctcctaatcaccttgtcaccgacatcgatcaccttgatcgatgagaaataagcacccctgcaactaatcaatttatatttttgatgactcaactaatcaaattgaaacttacacgccacaaaaatataatcaattggagcttgaaagtagaatgcacgatttgggaaatattctgcaacttcaattcattgatcatgaattgtgagaacttgttgcgacctgcaaattttgttgtatgggggaaataagatgatctggttgaactttggcattaatttgatgttcgcatgcgtacctgtatgggataaatttgacagatgtaattatagtacaatcgtagtgtaattacactgtaacttatatgtaattgcactgtaacttgcatgtaactacagtgtaacttgtatataagtttcacgtaatttgaagaaaaaaaatcacagcacacacatatgtgtaaggatttgttcccacaaccttaataacatattacagagagatttttaaaagttacatacaagttacactatagttacagtgtaattacatgcaagtttcagtgtaattacactacgattatactgtaattacatctgtcaaatttttgggagaaaatttatcgacaaatatatagcaaaatcgtacctgcattgctttttgtttagactctattggattttcgcatgggcgtatatacctgttctgtaatttatcataaaattctttactagttaccaacttactattgacaagcgattgatttctactataggaattatcatcaataaacatgagttataccgaatagtattgctgtattgcacgttgaacagacaatctttccttcgcctcaagtgcacttagcttcacactgtacacgtcataaaagccctgagcttaggcagttcttcagacatttaagaagtaaaacagacataattttatatggtttagcgaaatgcaattgatgaaggctaacagctatagctaaaaaaaacacatgttggcgggtacagtactcctcggtttttaatatttaacgtagttaattttttaagcacgtgtttaatcatttatcttatttaaaatgtatatgtaaatatggaaaatataagtcatatacttataacgataaaacaaacaaaaaatgataattatgtattgttttaacaagataaatgattaaacgcgtgttaaaaatgaactgcatcggacatttaaaaattagatagggtatttcgtaaaacttatgtttatcgaaaaaacattgtattatactaaatctgcactatatatcgtgcgatggaggaaatataataaattgtcgtgttgcaagtcaatgcattgaatcacatatcaatacagtatactagtactccactctgtattaccttgatgatgatgatgaagaacgttactctaattagtaaaactaccgtccacgtcaccacccaaccccaacgtacccagcgcccaaagtcagactcagacagcccagaccagacatggcgccgcgcgcatgcagaaccgtgactctctgcccacctggccccacctgtcatctcccccacaccgacgctccccccctctcccgcttccgctccgttaaactctcctggccccacctgtcaggcggacttatattagtactactagtaccagtcctctcctcctgacagctaagcaccaaaccatcacttcactcccctgagctcaccttgatcaccctcctcgcca

SEQ ID NO: 39562 - DNA, 852 bp, Oryza sativa
ctcgttaagatcgcgaacccgttaaccacggggaggagctcgacggtggagggggagaactcacctccgtagctccgctggcacttgaacggttcactgttggaccatgaggaaacgagcttgagcttgccagcggcgtcgggcgcttgaggtggccgacggcggcgggcgctgggggagaggcggagaccagcggcggcgggagctggatttcccagcggcggaggacgctgggggagaggtggagactggtggcggcgggcgctgggggagagtcggagaccggtggcgtcggccgctgggggagaggcggagcagcatcgtgtctcgggtggccaggtggggaattgaggagtgagtctcgagaggactagggtttgcagttgcacagtatctacttgtggcttaggcctttttattgtattgggcttttgggttgtctgatggagtcctggctcgttaagacttgcgagcagctcgcgagccagctagctggctcgttatatctaacgagctaaaatgccagctcggctcgttaggaaattcaaacgagccgagccgagccagtcacaagcggagcgaactaacgagccacgagcttcctgtccacccacgatgcgatctgcgccaaaccccccgcaaggccgcaaccccgtcccctcgcatcgcgttccatctctcgccaaatcgtcgtcgcctcgccctcacggtcgcgcttgaagtctgcaatggccgccggaccaggtcaccatcacctcgccctcaccgtcgcaccgctgccaccgcatcccccggttcaactccactgagatcgacttctccctcgtctgcgccgccaccaacccgtcgagg

SEQ ID NO: 39563 - DNA, 608 bp, Oryza sativa
agagtgaatggtccaacagttatgttatattgtccatttgcaagttaaatgtttttttaaaaaaaagagatatagcgggttgattctgaagtattatcgtactattcaagagtagagaaagtagtaatcgtatccaaaatacatacaaagaaccatcatacataattttagcattcagagaaatagagatgcacgcgcaacgcgcgggctatcttcctagttgtcctaatttctcttcgttgctgcggccatcctcggagtgctctgtctctcatatacaagacataaaccccacatggtttcccaacttgtgtgatcttgacattcggagttgccccaagttgtccctgccccccatgcctcatacttccacgctgacacgtgttagtgtgagaaaaggtgatgaaacactcttgtattttcgggaagaagagctgacagcataccattatgatggtgctttggcactccacaacctgggtaaagtaaaagctatggaaattgtagatatgctgcattttccattggctgacctccaaaatctaaactgcctaacacgacattctttcgaggattgcgataacattgacaatactgttgttctccat

SEQ ID NO: 39564 - DNA, 521 bp, Oryza sativa
attaagagcggcgggctgggcggccgctcgcgtgccacgtcggataggtacagtgcgcgggtagaagttttgcgaaaaaatccttctattttttgtaattatatatatgtccttataaacagtacttgaaggggaaaaatcgcggaaagggactgctctgtaaaataaggaaagaatagggtttttttttcaaaaatgacgcccactaatctaaccccccagaccttatccgccgccgcccgcaccctctccctctgcccgctccctctccctctccgcggccgccgcctcggccacctggatttttcacattttgatccttttaaaaaacttatttcgcaaatagacccctgaaaaaacttatcccagaaatggtcttttttggggcgccagagtggctggcgccgtcatccaacgggacagcgccagcctctctggcgccgtcttcctgccaccgtggcgcacgcgaaccgacgtggcaggaggagcatgctagcgccgccgcctccattcctatttct

SEQ ID NO: 39565 - DNA, 2463 bp, Oryza sativa
  unsure (1)..(2463): unsure at all n locations
ttgtccaaaaattttaaattgtactataccttttatgatttcctatacttttgggatttcggtatttattcgttttcaccatgtattggtttaacataattattatataacttgtaggcttggacatttattaattagaatatactaatatcaccttattaatacaatggcacattggtcgagttaatttggataacaatgtatttacacatggataggtttaatctatttatttcacaaaagtaaattgagacttggtaccatattgatttaaatgtttaattagacattcacattaacatattatatatataaagctcaatttatttgcattaccatttactttatgtgagtgaattctattccatgagagactcaatgaacattataaatattaatgtaaatattctagtggaacgctccttttatatatagaatcatcgtagtggcgattatttcatgtgtagcatttaatatttgacttataaattgatttagtaattaaccttctctttgtattgctttgttgtgttgtgcataaatatttgtagggttcataataaatatcataactttataatttttacgtagttatatagctttagcttaattttcatttgtgatattttatagtttggcaagcaataacaaccataacatccaccatgatgcacaacaaaagaaccaataacatcggcatgatgcaatttatttaaaagtttttgaaagtactttaatttcaggtttcgttttatttgtcgaattttcagggtgttacaaggcggtccaagtcatcatccggaggcagcggtggctgcgcccttccgcggtgggacccacaagtggtgaggctggccatggcgccgtcgccgcgcctctcccctcccctctaccccttcccctcctgtcgcgaggcgctcaaagcggcggagcttggcggccacctgtctgtcacactcggattttcccttcccttaagtttcaaatcactaataaatggcttcaagaatttggtttaattaaccaaaagaaaaccccagttagcaatgcatttaataatcggaattgttaggaagaatttttttcgaattctctttgctctgaaaatcactaacagaacttaaaggataaacatcttcctcatttgcctttggtcgtgaattatgcccaattcactctcttctcagtccgcggtttcgttttgcatgacgaaccgtatctgttcgcgggaccgttttctttccttttctaaaacggcaccgcattgtttttccttgttgggaaagtctcccctctctgccaacattgttgaagaaaagcgaagagaagaagaaaagagaagagaagataggagagaagaaggaagagacttacatgtgggtcccacaattttttatttttttattttgctgagtaggatgccacgtcagcaaaccagatatccatactgccatgggaccgaaattgcatggttttgtaaagtttaagggtgaacatttctggttttggggtttagggatgtcatacaaactcaacgtaaagttaagggaaggatggtgaacttattccaatttgttgagacggctgagcagctacgcttatggcccagcttcaggccgaaactctaccccaggccagcccaacaggaaggattcatgtagccattagctagcccatcaccgactggaggtttttttttttaacacattatagatttggtttcgactatttgatatctggttcattttatcataggcattgtcatgaagtgctaacacaatcaaaatgacaacgaatgtatggctcattttatcataggcattggtgtaaaactggatgtcccatttcgaatttgatttctcagcttcattgtagttagacattattaggcatgtaaaaaaaattgtgactgaaatctagcctttgccaaatgttctgttttgtcttttgatgttcaacatggccatatgtaatagagaagtgaagccataaaatatgtntgtttaggaggcaaggcataaaagattgtattaatcagatgacctatattgccctcgaaaactgcatgccaacccaggaaaactgtagcctatattctgatgattcttgatctgaattgtgcatatacaaatttgtggatctgtagctatgtcatcatggattgatgctttctgactatctgttcaagctagaattctggttatcaatctttctacgtttttcattgaagatgtgtattggttcatgcatatacataaaaaaatctgcacgatatgcatgtctcaggtggttaatattcctgtttactaaaacccatttcataacgtaccgttctcttgcattaatcatgaactggagaaaccttttccgctcgaacaattatcactcaaacaattttttttttatgctgtgaacctccaaaaactagatatgtgagcaagtcatgtttgattcgtttaaaaa

SEQ ID NO: 39566 - DNA, 728 bp, Oryza sativa
tcagttctgtccctttcccatctttcaattcaatgggtgattgccgggagcatcaatttcgtgtctgagaagaaatacccaggaacccatccggggctactgactttgtcgttgagatttacaataattacagataattaaacgagtcccacagtatgttgagatcactaacactattaaatggattgcctttagtttacgttggttgggaaccttctccttcagcacacggcaaacagagaaactcattcgcacatgattaattaagtataagctaaaactagcaccggtggagaaatgctttttagtcacggttcgcaaccccctatagtcccggtttttaaactggaactaccaatccgggacgtcccggttcaaatacccgggactaaaaatagatatttagtcctggttagtaacaccaaccagaactaaaaagaggggatctttagtaccggttggtgttaccaaccggggctaaagagagggtggcggaagtgaaatgatcccctttttcttttttctttttttttcttttttattttctcccaaatcaagtgggatacatatcccaaatcaaacccccaatccacaaatcgaagtaacatctcaaatctacatcacaaatcaaagtttacttatacacacaaataaatacatcataaatcaaatacatcacaatatcctaagaaattactcaaatacatcacagatccaaacaatgaatc

SEQ ID NO: 39567 - DNA, 623 bp, Oryza sativa
aaaccgtatacccctaaagtgcatgaggactcaagttcatggagcgggtactgccaaagtgaggttgttgaaaggctttgccgtggcaagtctcattcgttgggacgtaggctcatgtgttaggcaagtcgcggagtacgggtaaagtgtacatccactgaagtatgagtaaaccaatctattcgaatagccgtgctcgcggttattgagcaccgggacatgtattacacttggctagactctaatttcttaatatgatagggaagggatatgcatgatgattttgtaattgtggatcaacttctcaagaggcgagaaggggtagaccccagaaaaccattacgaccagtggcgggaagctatccttgggacacaatggatggtagacagaaccgtcgctgtttaatgaacaatggagttaaaacttgatcagtttatgctaggtcttaggcttatgaaaagaattgcaaaattggctttatgcaaataaaccattagcctttcattgaatatcctctatcatatgcatcgttgttatggtggcttgctgagtacggttggtactcactcttgctatttacaaattccatcagaagccggtgatgaagtctcggatgacccat

SEQ ID NO: 39568 - DNA, 595 bp, Oryza sativa
caggaagacgcagccggcatggtaccaattcccgccaggccgaagcagctccctcgcagtggcagctgccccagcatcgggccgagcaagctctcgctgtcgtcgtgagccccagccaaggtggtggtcgcggcgccgctggacgagctcacggcgttctgcgggggctttaataggacgagtgttgcagcatgaggatgtccagcattagtgtgaccgacatggatgtggacaaccccgttgagctccgcctttgtcccattgagcaccgcttgcctgcgcgccgacgacgcccaaccgagccggcaccacctcccgtcctactctagcaccacctccgccgcgttgagccagccccgacccttgcgcacgaccgcgtagcgcttccccagccgaggtgccgcaccggactgcgcctcgccgtgctgccgctctcggttgaagaaagaggagagaaagagagagaagataaggaagaataaagaataaagaaaaaaaatgaaaggtaaaaccgtacttacatgggtgtttctctctcaaattccatcagatataataaaataatccgacgggtgtccaagcagctaattactgg

SEQ ID NO: 39569 - DNA, 786 bp, Oryza sativa
ttcctgcagcccaggtttaataaattcgtctcacagttttcaggcagaatctgtaatttgttttgttattagacaacatttaatacttcagatgtatatccgtatatccgatgtgacatcctaaaacaaaatttttttgccaacaaaaccgggcctaagtcaaacattttgaatgaggttcttctcccattttacagtacttgtcgtttataattttgtagtaagtcagacatttgtttgaccattaatttttaaaaatttgtatagtttaataatacaagtcatatatttttaagatttaccatgacaaataattttataataatataattcacatgttatttaactatacgagtttccaaagatcaataatcaaagttacacatgtttagcttaggaaaaaataaagcgatgaacatttgaaatggtaaaaactcatatagtccaacgaaccccccccccccccccttcttttattatttctgtgtagatttcatttccttggttttgcacggcaggaaattaaggtgtgacaaaaaaaaaacatggtatcctggcccaaattgattaagcacattttgagaggtatcacaattccattaatcatcctatttcgtggctagttgacgatattttataatccattctttattctccgtggccagctgttgtttgcaagcttatcctttccttttaagaaaagtatactactaattagcgtggctgcttggcacaatactgatcaaatgcaactgcaagacctactccgtttggggctgcaggaat

SEQ ID NO: 39570 - DNA, 723 bp, Oryza sativa
cttataaattattttctagtagctaataagccgtttgaataagcatataataaatataagagtaagagatacaatgatattgtaagagataagggagataattccaagcctggatcacgatgaaaagtgcagggcaacaacacatacatttggatgaaaaaaactgggaaaaaatgttttgtgatattgaaataattctattaaaatttggatatagacttgcccaagtaaaagaagtggagcagattctagaaatcaaatctgtatcaatagaattataatgtgttcaaatctaacagaaattaaagcatgggaagtttgttaggaaggttacaagttacagttggttacacctctaaaaagttactcccttcaatttttaatacatagcgtctctaatttttaatagatattgccttattaaaatgtaattataatgtattttattatgatttatttattattaaaagtactttaaacctgatttatatatttgcacaattatttgaataaatcgaaatgttaaacgtttggctaagagacgacaacgacattattattttttttagggaaaacctcagaagagaacagggagagcctattttcatttaagaagaagaggttcactagcaccaatcggcaccgccacccctagcgcccttatattatagctaagtcgctgacgtgaaggggttagcgcaaaaaacttgggctgcaggaatt

SEQ ID NO: 39571 - DNA, 635 bp, Oryza sativa
aattgaaacaatttgactttgaccaaagtcaaaaatatcttataacgtaaaatgatggagtatttctttttcttttatataaaatccaccgtttagcggttaagaaaacgtgataatagaaaaatgagaaggttgtagtatggagcgaaagtttagaactaaatcaattgggtcgcatgaacgattaattggaactgtcaactagcgtttgtattacgtccgtccgtgcatctacctaatacgagtatagtgcaatcccacttccactatacgcggaccatttcaattcgattgactttgtctcttaggttgctcgatcatttgcgagaaatttgataatatgtcatccattccaatgccgtgtacttttgcccttcgccacgtacacatgtcagatcttaggtcccgcccaacgccgttgccgctacgcccttccagttgatctatccactcaagatcgatccaagccaagcttgcccgcccctatctatgtgcctcgccgcctcggccacacctttgctgctgtcgtcaagaggaggagctggtaattaaactagcacctgttttcttttcaattaagtaataatataattttcaaatagtaattaagcttatttacacctgcttgcctgctt

SEQ ID NO: 39572 - DNA, 2242 bp, Oryza sativa
accaaatattgacttttctctgaaaattaattcacctgtgacagatctagtgtgacagatctagcatgggggctccggtacccttgcccgctggatcttgaggtaagggggaagaagagggatttgaggaagaaggcaatgaccctcctccattctcaagctgcatcaacccctgtaatttacaataaatatgattcattttatctgtatatagcaaattaatttataaaaagggtaaaaaaaaaggaaatatttttttcttaaaaatagatccttcacaccaaaagaggctggcgccaagggcctacttataagaaaaggtacttgcgtttggaacatgtttagaaatttttttcttacaaataagtccttggtgtcaattttttttgcgctaaccctatcacgtcagcgacttagctataatataagggcgctatgggtggcagtgccagttggcgctagtgaatctcttcttcttaaatgaaacaaggctctttctgtacttttcttaggtttttcctaaaaaaaataacgtcgttgtcgtctcttatccaaacgtttaacatttcaatttatttaaataattgtgcaaatatatgaatcaggtttaaagtacttttaataataaataaatcgtaataaaataaattataattatatttttaataagacaatatctattaaaaattagagacgctatgtattaaaaattgaagggagtaactttttagaggtgtaaccaactgtaaccttcctaacaaactttccatgctttaatttatgttggatttgaacacattataattctattgatacagatttggtttctagaatctgctccacatcttttacttgggcaagtctatatccaaattttcataggattctttcaataccacaaaacatttttttcccatttttttcatccaaatgtatgtgttgttgccctgcacttttcatcatgatgcaggcttggaattatctccattatctcttaccgtctcattgtttctcatactcttacgtttattatgcttattccaacggcttattagtgattagaaaataatttataagtaaaattttatatatgttcttagtgactcaaaagaaaatcttgtaaaacaaactacgatgaaaaaacccacaaaatcacctccaaaattaagttttaaaaattgaaatttagcttctaaacatgagcaaaacaattatgcttttattatccctaccgatcgagctgttttagggtagatctagtttattatttttttacaatgggccatatattttaaccaaggtttcataatggactagggttaaatcaatgttttcacttaacaccatacatctttacataagttgggtgagcaaaacaagggaatatgtgagagagcttcatatgatttacacagggataattataaaaggcaaaacattttatgttttcttccttcttttcagtgtgtggtagttaactgttctatttcctattttattttattcatttaccccaatgtatagatcattttgtgtcacttttaaacatgttcacgtcattattttagtgtgatttgctgaaaaaaattgttttcagatttgctattttttttctaaagatatttatcttaatactgtggcactaaaattgatgattttaactatcttttctctgacaagttccttcgatgtgctcaaccatagtccaaagtgccaactagtgtaaacatatatggtgtttagtgaaaaggttggtgtggaccttgcccattgtgaaactttggtcaaaatatatggtgcaatgtgaaatttactctattttttattataacagtgtaacacgtgaccttgaccccccccccccaccaaaaaaatagagagaattgggaaaaagaataggaccccttatggatgggttcacaggccacgtggtggaccatctccacctcccccacctgccccctatctctctagtgagaaattttcatatctcctacgcatagaaactagtttcaccgaaattttcatggccttttacatttgcaaattattttttctcaatttcaatttctttttcgcgcagaacgattgagccaggggtaaatacgtttgagaaaagaaattgtgaaaaaacaatttgcaaatgcaagaaaccataaaaaggtattgcagcgaatactcgcggtttaagagtaatattgtattgaatcccattttaataatggtattatagcaaaatccg

SEQ ID NO: 39573 - DNA, 569 bp, Oryza sativa
ttgatatttttatcatacacgggaagtatatattttacttatttatcccgtgaggggagggcgcataggggccgcgtgagacagtgagacatggataatatttttatcccttagcccccccccccccccccccaaaaaaaaaagtggaagtggaactgagcgagaaactaaaaaaagggaaactcagcgagctgtttggcgtgacgaatatttgtgttagggataaaattgcaactgaaattttgaagggtttacatgtaattagagaacttgttagggacaccattgcaacccgattattactcctatataacaacaacgcagccgcgggccgccgccttctcctcacgtaaacgccgcgtcctcctcctctcacgagtaacatggacagccgcgacgacgacgccaggtggcggcagctcggccctctcctccacgccagggacctcgccccggccgacctcgacgccgccctcgcgctcgccagggcgtacgccgccatggagcggttcgatctcgcggcgcgggagtgcgagcgcgcgctcgccctcgccctcgccgacgacacg

SEQ ID NO: 39574 - DNA, 1528 bp, Oryza sativa
gtgtccgaaaaccccttccgatattcggttaaacgtctgatgtgacacctaaaaatttttatttcgtgaactaaacagaccctatgtagtttctactcataaattgctactcctacgctcatgaatcactgaagcgtcatgtttcgaatgtttcgacgtgacgcactgtgatgcttcagtgacttttcgaagcgtcatgattcgacgtgacgcagttggtttggaaaagtaacggtgatggcatgtctcgaattttaaaaaatttcaatggcacacagtagttttcacaaatagtagtggtattttttcaaaccagaaatttgtaatggcacgagtccaattaacccaatataatataagggtcacatcctccaaaatctcttatattatacgatggagggagcagtagtctactaatactgtctattccctccttttcaggttataatgtaatttgactttggtcaaagtcaaattgttttaaaattgactaagtttatagacaaatatagtaatatttataatactaaattatcttcatcaaattaataattgaatatattttcataataaatttgtcttgggttgaaaattgttgtcgaaccgacaactgcgtcacgtcgaaaagtgtggttctctcaatagtagttggaagtaaaaacaattgtattgcttagtaaatattttttgaaaccccctgttacatggccacaagaggctacttataaccctattataggttcccctttagggtttatgttttacaaggaaatttacatggctacccttatgatagggacattattgggagcacacagtgtcttttacatgtatggcccccaatgggctttaaatggctcggcccgtttatttgtcgaaatcccccccctcgaaggcatagcggcccgctgggcctcctggcggtgaggttcggtacttggcgaaacccgtgcctccgtgctaaggctttcaccttaccgccttcgcccgtacggccctctgacgaggtcttcgtttggcggagccggcgtatttcgagccacggctttcgccgtgtagccttcgcccatatggttgctttctcgaccttcgccgcttgcctccggcctgagcctgtcacctaagttcttggtttcggtaggtccgaccgaaagccctcgtggtgtacctccaacaaaaatattactatttttttctacttggtcaaacttaaaacagtttgattgaccaaagtcaaaacgtcttataacctgaaacagagggagtatatcggacttacctccgctaatcttttgtttttgtttatggggtacgtaagtatatatttttcttagactccgtaaatccgatatagctacttacattctcactccgtccctaaatatttgacgccgttgactgtgtaaaacatgtttgaccattcgtcttattaaaatttttttgtgaaatatgtaaaactatatgtatatgcaaaagtatatttcacaatgaataaaatgataggaaaagaattaataattacttaaat

SEQ ID NO: 39575 - DNA, 586 bp, Oryza sativa
cgtaagagaaaaaaccatgggagtgattcagccagtcctctaccagaccagcagtggcacaatccgcatgctgctgcgcccgtccgatgaagtaggtcgcatctgcgttgcggagtccaaggattctggtgtcaactggagctatgcgcaaccaaccgagctcccaaaccccaattctggttagtatcaccgatcattctgccacagtcagttctgaattgcagtacatcttcatctgcagcttgtatgatgctatctatgtggtgggtggaaagcaggtatcgatggcgttaagctcaaggatgggagggtggtgctggtatacaacagcacctcaagaggggtgctcaaggttgctgtttctcaggatgacggcgacaaatgggaggatgtgctgacactggaggagacccatggtgtggagttctcataccctgctgtaattcagacttctgatgggctggttcatgtgacatacacatacaaaaggactcaaatcaaggtagttttacccatgttgtttggtcttcttatggtaattaccagtttcatcatcttccatgttaagaatgaatttcttttggtc

SEQ ID NO: 39576 - DNA, 707 bp, Oryza sativa
cccttgacctcaagtttgtccaaaatatcaagaattatagaaatgggggaagtgtctagattactcggcaaaacgatcgagatttttgggtaaatcaaacgcacctatatataagtttactaattagcaagagctggtattataagtcactaagcactttccaaacatgtcatataggctcatatgataagaaagagataagagaagaaagaggacgaggcaccctacatactactcacgtgtaatttactttaatatttacatactactgtatttgagtccttgtaatttttatatttacatttaagtccctataatcttgcaataagatacttgaggttgtttttgttaaaaaaataataaaagggagataacaaaggcagaaaagtgcataaaaagaaaaagaaaatccgcaaaaaaaaagaaagaaaaacaacaacaacaacaacaacaacaaaagtctgtttctcctaagtgacaaaaaaaaaacccgaagatccgaacggaaaaaaatcctattcttataaaaggcaaaaataaaatggtgaaaaaaaccgctagatttgatccctttaaaaaggggggaaaagaaaaaaatgcgattcctttaaaagtgaaaaaaataaaaaaaaacatttaaaaaagttcgtccgattcctaagaaagtggtgaaaaaaaggttcgtaaaaaataagaagctggttcgt

SEQ ID NO: 39577 - DNA, 590 bp, Oryza sativa
ataggattctggggaggatcagcagaagcagctgctgctgctgtttcttcttcaatcgtccatctgttggtgaattcgaccaggttatccaagagatcgacggacagtgccttgcgatccttgatgcgctggagcgtgctcttgatcttgctcaagaacctctcgctctcatcatcatcatcgtcatcggatggcgctaatttaaccgcgcaagatccgatcagctctgcctcttgttcttcagatattctctccggcacgagcagcggcgatcgttggagatccgggaagaactcgtctgcgacgtgcgactggaagcactccgcggtgaggaaaaccatcatgcattgcggatcggggcacatccagcagatccaatctccggtgtccttggccaagtccaccgcgcaggcgagggcgctcatctgagcgtccgatagtggctctcctgtgtagtgcgctttcagatcctcgacgctcaccgtcaggaagccgcggcggcgctcgtcgtcgtcggcggcggcggcggcggccatggcgaccgccttctactaggcctggaggaggaggaaccggatcccctccttggc

SEQ ID NO: 39578 - DNA, 967 bp, Oryza sativa
agagggcactcattgattgcatggggctgcttgttgatgcaatttcccatgctggtgaacctctttctgcatacattcaggctcattcagaggtacgcgtttttggtatgttgcagctgtggtgcctctaatgcatttataaattaaatatacatagataatatttggaatttgaataactgaaggactgtaaagtttagttaaacatacagaattgcgatgcaggtcttgattggtacttttgaagcgtctggataacctctgattacaataaccaagatgaatcaatctaaatgaattcgaatatgtatgttatgtcgtttataaaaccaagtagaaaatttaatgtgcttgtatgttgcaactgtttttgcacactattctattgcattccaattcatataatcgcaaattttctccttctgattatttgtgatctagcttatacaacatattgtcgcaggcgccacatgtggaggtcttggaacatgtttcaactatcctcaaggagtatggattttgccctactgaagaagtcatggacaccataaacctgtactactttttgttttgcttcacacaacaattttctatgtgaatacatgttaattttgctgattattttgctttgttcttccactttttccttgaagccaaccttatgactgcaaaatgtcagaaacaaaatcatgtagcaaaggtgtgttgggctcaagtgattctttttacatttaacaaaaatgagccctaatcctcctttttttttttcatggagaacagggtttacagatgcaaacacggcagttgcggaaatggctaatctgcatgctgcacacaaaaaggtaaagataatcaaatattactgtatcggagcatctctacctttgccttcttgtgagatgtagtacgtaaggtgtcattcacacaaatagtagtgtggtattgcagtgtgcaccagccaggtaag

SEQ ID NO: 39579 - DNA, 1277 bp, Oryza sativa
acaaacccggtggcggtggaggacgagggagctcgcccgagggttgtagtcctcgcctgcttcgcgcaccatcgtcatcgtcgtcgtcaccttctgtgttggggatgttcaccggagggaagaggggaccatcactgttgtcgtcgctcgctcgatggagacgcgaagacgaagagaaagacgtatgggataaggtagagagaggaagaagagaggtaggctgcacataggcctcgcgcacgacttcctccgtcagcatgtgtgcgctaggtgcccatgttgctataaaagttgcgaactgagctcaggcctcctttctcgcgcgtatgcacccgcagcgcacattttggcccatctagcccataatgctgccatctaaaggagaaaagacagtcaacaagaccactgctttttctctcatctccctgcctcttttcccattgaaatccgtcaaatccagatacggaaggggaaggggaaagaagatgaatatggaccaaggtaaaataaaggggcaatttggtactaaaaattttacaactgcatcaataggttaaatagtggcatatctcaaatacatgtaaaattgtaatgacatgtttaaaaatagctgaatagtaccatccgtttcataatgtaagactttctagcattgcccacattcatatagatgttaatgaatctagacatatatatgaatgtggactatgctagaaaatcttacattgtgaaacagatgaagtaatggtatattttacaacttacgatttttttttttgaggttcatccgcacattcttattactggggagattcagtacgatcacgaatcaccagagtacgtacaaaatacgggagggggtcaacccagaccacagactgatccgggtcccaactcacaccaatcttggctagattatgagcaacattattacaggatcgaggggcaaaggaaaccttcgaattagcaaaatgaagttgcagcagcatcttgatttcagcgaaaattgtagccccaacagcttggctatgggaggatgacgttactgctgagaccagaatagctgagtcagactcgatctccacctcagtcacaccttgcaccgagatggccaggagggcagataagcatgcccttgctttcgccgaaacaacatcatgaacgaattccagccgtccagctcctgccagtaatgcatgcccttcttcatcccgcagcacaaacccccaaccacccgtcttgcgatttgcttggtatgcagcatcacattgagttta

SEQ ID NO: 39580 - DNA, 777 bp, Oryza sativa
ccatcacaagatgtcctccttcaagaagggcgacgaggtgcgcgtccgcacgcccgtgggaggctaggcaccacggcgctgcgcctcgtcatgtggctcggcgcggtcgtcgtctccgacgctgatgccgacgacgcccacctcgaggtcatctacacggcaacttcccgcgcgacgaccccttccggaccgtgcgcgtcgctgtcaaggacgtcaagctgcccgcgccgcgcctggccccgaccccggcaaacatggcggccccacggccgaccacggccggcaagaagctgccgcggctgaagatgtttatgctggagaaggagcagctgcgtgccaactccgaggccttcttggcattgtgatcagcgctgttcagtagtagcagtaggtggaatcagaacatgtcttcctctgttcttggtttgcatggaaggcgatgtgatcttttaaattctcgtagataggatggtctattcgcatgagaagaagaacatgcaatctgtcaactgtaatttgtcattgattatgaatgaaagatcgaggtttctcttctttattttttttaccaatatatgcatgatgaatgttttccttaatcctttggttttgttgatattcaagtgttcagatcagaatcacaatccagctgccctctgattacatatgtatgattacaatccacctgctgacaactttgaacttgtagctaggattcagcttccaattctttgcacgcctttggctttcctttccttcgtttagatcaagagcctg

SEQ ID NO: 39581 - DNA, 5753 bp, Oryza sativa
catattaacaaataataactccactagaaaataaaatcatccatataaatatatgatggcctaggctcacgagccaaatcgagcggctcgcgagccagctcaggcttggctcgtttcagaaacgagctgaaaatgaggcttgggcttggctcgtttggcattcaagccgagccgagctaagcgagctcgaaccaagcccgagctgagctcacgagcctaagcttttttttcacccctaccgccaatgcccaatgctacgtccttgaacgatagatagacgacgtcctgcatgagcgcttaggtacacatcaatcataatgccctatcacctaccgtctctgttgggggaactaattaaaattctaataactagctggttagtaaaccgcttatgagaatccagagaagctgaaaaatctagtttctgatgtagttcattttctaacatctatacctacatattctcagaatttggataagagggagctagatcttctagaagaagttgcaatagttagaagttctcctaaatagggctatagatgcgtactgagacaacttcatttcctaaatttagattcatccctctgtcttacaaaaaaaataaaggaaaaatgttgagttaattccccggactatcacgacagtacgaattacccccctgaaccacaaaaccagacattttaaacctcaaactatttatactgaacacattacacctggtccaatccggagcggttttggtcctatgtggtgtacatgtaatgccaacatggcaatgcaatcaagaaaaaaaaaacatggacccatatatggagtacctctctatctccctttttccccctccccccccggcctgtcagttgtcagcattggggggtgtggcggggagggtggtcggcggtcgggaggagaccacgggcgcaattggaagggcacggtaggcggcgggcaccgacaagttggtgttgaggggacgttgcgggcacattcaagagggcgggtggcgaacgatggccaggaaggaactgctggcgtggcaggcactagcgaggaggatgttggagacgatgggtagtggcgaggtgggctgaggtggcggctcatcgatcccaccagcaagagctcgagcttgcttagaggacgtcccccgaggcggaggtggcggcttggcgatacgctcgatggggaatgggtaggtgagctcgaggggatggcgcatgggttcgtctgacagggaataggtggatgcaacaccacggaagcccgagtctggcaaagccctaaaggtttgtggcatgctccgaaggctaccgcattgcccaaacgcccacggtctcctctaaatctgcccatcgtggtgtctcctaggcctccccattgcggcgaggagatgcctggctgagctcaccgcagcgccgaagttcccccttccagtgccggtgtgaggcgaactccaatggggaggtgaggaggaggtgggaggtggtggagagtttaccagctgatagacgccgataacaacataggaaggagttggtgtggggcaaactccggtggagagacgaggaagaggtaggttgtgatggagagaccaccggctgactggcactgatagcaccagaggaaggaggcatggagaggagggaagaagaagaggaaggactaataggtgggcccattgaatttttttcctgattagattgccacatgtacgccacataggaccaaagtcgctccgggttgagttagggggtagtgtgttcggtataaatagttcaaggtttcaaatatcccttttgtggttaagggggtaattagtattgtcacgatagttcagggggtaattcggactttttttaaaaacaaacctaggacgggatatgatatattccaaaatgacgactctagacggtaggcttgtccagagtggtgtcaaaaacatatctggcacctatctgaggttacctaccagcactaattaggtttattgtactagtatttctactatctccttccgtcacataaaaaagaaacctagtacaggataacatattctaatactatgattcactacttaaaaaacaatttttcatggcacttctcttttatttttctcaggcggactaaaaatagtgccgctaatgaaaatcacatttatttttactagcggatgacataagcatccaccagtgaaaatcacgttatctttactggtggacgacataagcatccgcaggagaaaatcaattttacaaaatatatgtatttatatctaactttttcataaaaaagttggatgaaaataaaatttataccaaactaatgagatctacaactttttagtaaaaacatttccatttgagatcatttagggttcaaaatattcgttataagattgaagatgtattttacaaaatttcagatacatgattcaaataacctccaatatacacatcatctatgtcaaagttgtagagctttgcgagatcttacaacttcgtagttcatgactttttttatttgaaatcatttagaaaggcaaataagtattttaagtttcaaataatgaaaatcaaaccaatagcattctgaatatacacaacaagtgcttcatagtgagatggtaatataatacatgtgtggagagagatcttgtgttcgaatcctacaattcacatacatgtgattttaatccaaaaaaattgcctaaattgtcaattaggattcatagttgtgttatagatgccgataaaaatcaaaatatgtttttgattttatttttgcacctaaaaaattaaaatgaaaatgtacataaaaaatcaaaataaaaatgtggaaatcgattttcattggcgactgcattatgtggcccgccagcaaaaatcgattttcaccggtggtcggatgccgctagtaaagatcgttgattttcactaacctttaatcgttggcagaacgtccggctgccaggaaaaatatgttttagccactagaaaagtgtgttttgtagtagtgtctagataggcctaccgtcacatcctagtactacgattgtggcaattgttctatgttagcattatatctctaattcctctatgttagcattatatctctaattcctatctaaggggctatttagattgatgccattttcaatcataccatttttttggcaaagttgtcaaaaaagtgcatacgtttagtttgttaccaaactttggtaaatacataagaaatcctgctaaaattttggcaatattatcaacttgccaaaattttggcattagcaaaatttggtaaggtttattttggctacaatctaaacatgccctaacaagtatccaaatagacgaatagtaatggtatttttcaaaatgaaagaagttgtaatggcatgtatccaattagcctaagaacatttcatgtaaaatgttattgaaagtaactcttttattaaaaaaattactggtatttgaagactatgtacaaactttaccataccaagagaagaactgcacaagaaaccaagggacacatccaattgaggcctccatgcatgagaggttgagaccacctcatgagaagaacccgatctaggtgttcgatgggggcatttgtgaccctctccccctttgggtctagcgataatcagtcatgtatagcgatggctggctcagtgctaacttagttgtgtgaggaggtgctagcagatggtagtggtgtgtttgtttgcttttttctgattaacctttcagagctataatcttgtaattttttttcttctacgtatcagtatgaaactttcctgtgctggtttgttgtttcgaaaaagaaattaatgtcttactataccgtcttatttatttactagaaaaaaataccagtgcgttgcaacggggtaaaaatgttttttttatcctatacattaatactctcttggttttggaccgaaagctcattcattcatttccagctccagtcctagcccactccactaccttgctctgctcggcctacctctgctcgtaccataacagagccgatcttcccatcaaatctgataatccggtcaaactcgcatagtaaatctggtaatccggtcaagctcgcatagtcccgtgaccgtacgatgacggaaccgatcatctccatcaaatccggtcgaatctttctcgatctccaaaattgttgaggaattttgatccactcgatcttctttttcctttttttctatcaaaatcccaaaaattgttgaggggaaatgataagagagtagtgggaaatcttctcgatctccaaaatttactccggtcggccccgtgtacatacgatgacagattagatgagatcggaaaaaaaaaaggtgcgggaaacaccggaaaaaaagaaactgaaaaaaaacggtgaaaagaaaaaaaaaggaaaaaacgaaacggaaacggaaaaaaaaggaaacggactgggggaaaagaaaaaaaaaggaaaaaaaagaaatggacgaaaatattggcggaagccttatgtattttttaattatatatatatatatatatgtatatatgtatatatgtatatatatatatatatatgtatatatgtatatatgtatatatatatatatatacatatatatatatagattgtgttattacgtggaattttttttatttatacttttttttattaaaatatttacaaaaataattttttgtttcgaaaatttacaaatctaattgcctgccgccctcaagaagggcgatttttaaaaatcgccctctcaaagggcggcaagggacctaaatacaaaatttttatttgtgttcaaacccttcccaccggttttaattacttaaaaactaataatgcttattcgatactccaaatgattttaaatggaaaagtgataaactacaaagttatagatctcatcaagatctacaacttttatataaagtttatctccatccaatatcgtttgaaatatagatctgagattttttaaaatgtgttttatattttgtaacgaatatttggatatctaaaacatcttaaatgaaaaagttactaactacaaagttgtagatctccttgagctctacaattttgatataaagttttatttcatctgactttatataatataattttaaattgtaaaattatagagctaacaagttatgctggaaaatttacatttaggtcccttgccgccctgtggaagggcgatttttaaaaatcgcccttcttgagcgcggcaggcgattagatttgtaaattttcgaaacaaaaattatttttgtaaatattttaataaaaaaaagtataaataaaaaaaattcttattacgtgggcggtgggctaacatgctttaatgggcctcagggctcctctttgcgctggcgggccttgttagtcgtaccccatcggcactcgacacccatccatccgcctcctgcctgcgccgtcggccgactcctcgctacttcgcccgccacgccgcctccccctgcgccgatttccatccgtatccctcgaggttgggtgcccgtcgtcctgctgctttccgcctccggtgagcatccatatcccatcgcttgcctttgtagcagtaatctttgtttggagcgtgattcgagatcgaacttccttgttccagaaaaaaaaaagaacgaaaaatgtcaaaaagaagaaaaaagaacgaaagggtggagttgagatttaaggcacccgattatgctacgtggaaaaag

SEQ ID NO: 39582 - DNA, 759 bp, Oryza sativa
ttcctgcagcccttgatgagttgctctcaaaggcacggatctgttcaagatcacgcccggacctagcatctgctcgtgcataggttggatacaccttcacagggcaccgggttcgtaaaattgatctccaatatgggaaaaaatttctccttgtatatgtgggatcccatcctctgcctacttcctttctcccagcctgttacatagtatttcaataaaagtacagcattggaaaaacaaacagacataatatattcatattggtcagccacaatctctcacttgagaggttctatgttaattaacacaaagtattggtgttttgttggatatgaatggttttactacagtgcagtactgcttaagcaacatgataagctgttgaagcagcagaaggcatgctacaaacatagcaagcgaaatatttgcttttgttgttgcctctaacaacttaataatattacactgcatcttccttcatcagaatcttcctcagagagaagatgcaagccccctttgtcaagtctcagtgttgatattacttgggaattgaaacaattcagctatgttattgagctaattatgcccaacggggttttagccaggcgctagtttaatttcattatttgtattatttcctttattattttttattgcatttaccccttatctttggtaaagaacctgatgagaaacacagtagtctcgatcacattagcgtggcagagatgaatcataattggaatgtgtggcattgca

SEQ ID NO: 39583 - DNA, 1110 bp, Oryza sativa
aaaacatcacatcgtatctttcgacacatgcatggagcattaaatgtagattaaaagaaaaactaattgtaaagttatggggaaatcacgagacgaatcttttgagcctaattagtccatgattagccataagtgctacagtaacccacatgtgctaatggcggattaattaggctcaaaagattcgtctcgcggtttccaggcgagttttgaaattagttttttcattcgtgtccgaaaaccccttccgatattcggttaaacgtctgatgtgacacctaaaaatttttatttcgtgaactaaacagaccctatgtagtttctactcataaattgctactcctacgctcatgaatcactgaagcgtcatgtttcgaatgtttcgacgtgacgactgtgatgcttcagtgacttttcgaagcgtcatgattcgacgtgacgcagttggtttggaaaagtaacggtgatggcatgtctcgaattttaaaaaatttcaatggcacacagtagttttcacaaatagtagtggtattttttcaaaccagaaatttgtaatggcacgagtccattaacccaatataatataagggtcacatcctccaaaatctcttatattatacgatggagggagcacggtctactaatactgtctattccctccttttcaggttataatgtaatttgactttggtcaaagtcaaattgttttaaaattgactaagtttatagacaaatatagtaatatttataatactaaattatcttcatcaaatcaataatcgaatatattttcataataagtttgttttgggttgaaaatgttatcgttttttctgcaaacttgatcaaacttaaagcagtttgactttgaccaaagtcaaaaggtcttataacctaaaacgaatggagtattaaagaaattaatattcagatttattaatatgtaaaaacgacgctaatatatttgtcaataaaaacacattcatatggttatatctttagttaatgtttttataaatatattaaaaatattaaaacatgaatattgcagacaccgaatgttctgaacgatgagtataaaacagagatagtaatagtacattgacggag

SEQ ID NO: 39584 - DNA, 978 bp, Oryza sativa
  unsure (1)..(978): unsure at all n locations
gggcactgcgggggtggtgtgatggtggttaaggggccctgctgcggcggtccagcgccaaaggggcgttgaggtggcacggccgcgaagggcgccgcaggggacgcagcagcctgcgcggggctgaagcggcgccgaacgacggggacggcggggcagcggcggcgccgggcatgaaggcggagacgggcctcccgggtaccccctgcggcggcctatcgttccccatcggcggctgcatcgtcgggcactccgctgctgtcacgcattgcttggcgcagcttcccccactccgccgcctccgcgtaacccgttgccgccgccgctccatggcccccgccttccgcccgtagataggctcagcaatacccctgtctgattcccgttccgcacttacgtttctccgccggaatccacagtagcacccgtcgccatgtccggctgcaaccgccgcccgtcgccccagccaaccctatcccggcccctcgtcactctaccttggccaccgacggccgtaggtctgcgcctctgccgcaccaaccctcaaccccacttcccttcggaaactgatctcctcctcctccctggccgccgcggtgccgtccacctccaaaatccctgatgccggagttacatttggtagggggaatagccaaataggagaagcacacaacctctttgggagccagtgggctgggaatgtnngttctcgaaattggaaatgtcgaanccgnaaaccccaaaggggggccccccgccaccgactccctgacagcctccaccccgcggcctgagagagagaaagagtgagagagaagagagagaggaagagtatgacatgtgggtctcacattttgagatnaacanaatgctgactggactggcacgcgtaccccacgtacaccaaaaccaccgtggattaggtcgaggagggaaattcatccgatttatatagttggggatgaagaatatccggtt

SEQ ID NO: 39585 - DNA, 536 bp, Oryza sativa
tcacgggccgggcttgagccaacagataaattgatttagggttttactgttaaagaatacattgggtctttttggaacttagggcctgtttgtcacagctccagctccaactccacccctcctggagctggagctcagccaatcaatttcagctctaccaaaactggaagtggagttaggtgaagctctctcacaaaatatattagagttgtggagctgggtttaggcagctccacaactccactccagactcaactcctggagttatatttaggagttggagctgtactaaacaggccattaagattatgagaaacagcttgtgaaaatctagaaaaaaactcagcttatatcctatagttcattttctccattatacaactatggattctcagaatttagataaaaatctggactgtttggggctgctagaaactcccccaaacaggcccattatctggttttgatttagggagaaaatcgggttatagttgagacggtaatatatgagttttctagaattaactagaacaact

SEQ ID NO: 39586 - DNA, 568 bp, Oryza sativa
ggattaaatttagattttctataatccccatctagtcaaatcaaacaattgataatttgttggtaagaattttataagtatgttgttaaagtgaaggtgcacataagacttgtttacgtgaatcgtaaaacactccctcgcgtcgctctcatgcgggcggcccgggggaaaaaccctagccacccaccccgacacctccctcccccctcccttctaaccgctggaagcaagcggtcggccgggaaggtggcggcggagcttctcctcagcgtgggaggtggagcggcgcgtttctgacaggaggcggcagccggagtgggcatcgggcagaaatgctccccctacggccaaattaggagagggcaagctcgcggtggcgtggtggcgcgattcgggaggcacggtccggtggaggcttgcggcagcgcgacagctgtggccaatggtcctcgctgcgaggacgtgcagctccgacacctggtggcgcttgcgtatcgctgtgttccttgaccgacattgcggcgaaagccaataggcgcgcgcgtggaggcacgatcgacggcggtgg

SEQ ID NO: 39587 - DNA, 563 bp, Oryza sativa
tggttgtgagataccagggattgggtcgccaggacgtatgtatgcgcccctctcgggtcgaaaaccagggcagtcttcgtccatatgggagggatctgttaacggagagctaagatccgacgtcttttttaaagagataaatgattatttttagtagcagcaagagtatcactaaacagaatacaaaaggtcgaatattatggatgtgtaaataaaaccacctaccttgcaatagaggtcaaaaacagggcgttcatcacctggtttgacctacgaggatagttaaacgatcaactagaaactgatgctatgatctttaagagaaaaatagggacaagaactaagaaaccttccctccaaccaatctgaaatacttctaaactggatgctggggcatcaccattatcagttatgatccaaactgaaccataactgaccaattggcctggggttaacgagaagccataaacatccatcgttgctataaatccatagcgcacttcatatgtgtttgttatgtacccagtcctctgggaaataaacaacaagttagttacataaat

SEQ ID NO: 39588 - DNA, 699 bp, Oryza sativa
  unsure (1)..(699): unsure at all n locations
acccaatgtattctttaacagtaaaaccttaaatcaatttatctgttggctcaagcccggcccgtgagcccccgaacccattcatcatcccactagcgttagcgtaggcggaatagcatcctagggcgcacgcgtcacgccccgtccctcctcccccatctctcctcttttgaggaactcaatcacgcacaaaaattaccagattacccccaaccccatcatcttcgatctctctctccaccgcggcggctctctctctcttttctcccccacccccaaccaccactttcttcatcaccaaagcgccggtccctcgccgtgggcgncaccttcggcgnccgcggcggtgccggtcgtcgaggcgggaggacttcttcccgcgcgccgcgcttgatccgtnccgttcccagtacgcccgaggtgaggcccgtccccttcgattgggtcctttcttcgctctcactttttccttccccccagtctggaattccggcgactgaccccccctgtttcgatcttcgtgcgcggnggagcggtcgatcccgtcggtgaatgcgggcggggttagctttgggtcgccccgctgctggtggcttgtcagaggggataggccctaagggtcatgtgtgactttttgggcgcgccatccgtagtaggatgaacacactgataagttcttttttttttttttgcgaagtt

SEQ ID NO: 39589 - DNA, 741 bp, Oryza sativa
tatcattttgtagtttttaagaagtcacaccaaccattgctactccactgcttgcctggctcgccaccatttatatttattgatcttgtgaccttaaaaatcaaacattttctctctcttgtttcggcttatagattctggagattccgtcactcgacactgccctactactttacaatccgcttgccgactctcctctttattatcattccgaataattgaacctgattctcgttagggtttaccgatgttatagtttttataagctgcgtcaaccaccgccgtccatggtccatatcttcattttcattggaatctaaaaaatcgcacctaatcatcattggagttcgcttttacagtttttcgaagtcacctttacttatgctccactattcctttacagtccacctgtcacccctactctctattatcattagaagttttaaaatcaaacattattatcgatgtagttctgttttcatagggttggatttgatgcccgccgattgagcttcgttctggcgaggatgagttgtgaccatgctgttagctttactttcttcacctaacgcggttacttcgttggctctgtttgacttctcagatagtcatggttgcatatataaaaattacatccccatgcatgacccctagttaaattttcgataaatctcaataactctatatatcgtccccaaaaattaatggtgaattatttcttttggagactaaagccttcta

SEQ ID NO: 39590 - DNA, 617 bp, Oryza sativa
aatcgactagctatgttacttatgtccctacctgaactttatgtttaccatgtttaattcccctagctcagttattggaatattacagtattagccctttttagttcaagattaagttgcgtcttcaagcctcggcccctggtttcatggtggtaattatccaattaaaatgcgactgaatggtggtttgtgggtgcatggtttaatggtcgcgccatgccagttaagcccggtttcgcggaacaccctggaagttttcctcgtcttttccacaagccagggtgggcaccggctgggcttgtagtgtagctttcctctagctgacgcatccaggcaagggtgggcgttatgtaccggggcggcccttgcgcgggcctctgtcgcttccgaattcacttaggcacgagagggtactgcccgttgcccgttggggacaggggtacaccttgaggtgtggtgtgcttggctagagggggttatgcgaagggtcttgtcacggcctctttccggtatgtcgtggtggcatgtcggcgcacggtaacgtgtcgtgaggctgtgtcttgtgggtacagttgtacacctctgatcagagtaaaactatttgatatagccgttac

SEQ ID NO: 39591 - DNA, 6271 bp, Oryza sativa
aagaggagggaatttagacatctaagcgggcctttaagaggcccgcttgcgaaaatatattttcacgtacggccgcttaagaggttcgtttgtgaaaataactagatgaatctcttaaggggttacatgcgaaaatgcattatctcgcatgcggcccctgaactatttcttggtggagcgattcttcatgcgcaaatagtagtgatatataagcgtccagatggtccgcatggaacctaaaagggttctcgtacagaaaaaacgtttgctatgaatctggataaccgtgtgtccagattcatagctaaaagttgttatattttgggacggatgtagtaatcaatatggacggaaggagtacttcatccgtcccaggatatagcaacctatgattggatgaaacgtatcctaatatgatgaatctggatatagacctatctagatttgtagtaatataatacgtcttattctattatagtttgttatattatggggcgtactcactccaccaaaaaacgaatctagaacggaatgtgacacattttactataatgaatctggacgatcaattgtactggaatttgtaacatctagttttatgttcgtcttttataagatctagttttatattcgtcttttacaagacggagagaatgaggggagtaaaaaaaaaaagcattaacgggtcgggtcttgttccattagaaacaacaattcagcccagtaatcggatggaccggaactcatcccgtgccccgggattttgtcccgtgcgggtacagtcagaaaaagtataaaaacaaccttaaaaaatgtcacttccaaataaaatatttctctcagatgccagacacgccgggctacgagctaggtcctgtccagaaattagtttctttcaacgtccattcgatctaaattattttacccttccctatttttcccccatcatgttcttttctgggagtacatgtcctccatcttatggacattattgtgtttgctgaaactaccgctatcagtagtaccaccatttgatttgattaaggcccacatgtcatattcaatatatacttatcggcccatcgattcgtttattcggggaataagcgaaacgctatatttgcaaatgaaaaatagtttatgattaaaacttttatatacgtgttattagcgatctgaaaacaaaaactgaaaaataaacttcgatgaaaaaccctaaaatcaactctaaatttaaagttgaaaatttaaattttagctaataagtataagcataaacgaaaagatgataccatatgtttgacacgaagtttggtaataaaattgcaaaaaaaggcaaactctgggttttcgtgtccaactttgactgtccgtcttatatgaaatttttttataattcgtattttcattgttgttagatgataaaacatgattaatattttatgcgtgacttgtctttttaaatttttttcataatttttgcaaataagacgaacggtcaaacgttggacacagaaatcagggtttgtctttttttggacggagggagtagtttgtaacaaaataattcattatgtggttcttaccatgttaaatattgttccactagtcaataacactcttgatattcatccaagtttttcacattttgcagttttatgttttggtgactaaatattcgtaaattaagttgaattattagtttagtcaattaatcagataagtattttgcagatcattttttttcataaattagcaccaacttcacacacaaagcatcacacaagaggcaacatgatgcaagtacaaattgctgcatttttttcttttctttaacccaattccccaaacccacccacctccaccctcttggaaagctcacccagtttttttttacccccatagtctcctgtgcacaattatcactcctcttctcctttcacccctcttcacacacaccacggtaaaaaaaaaagaaaagagaaagaacagagtaaaaaaaaggaaagcacagtaaataaaaacaaaggcatccaccacagccccatgtgtgactttagaccaaattaaaccagtggtgctgtgcctgataacccatgagagagggaggggtgtattaggaaaattttaatcaccgtttaagaatcccaaaacttagaaatgggcgctttgcttgcctcccatctctctctcattaacctcttttactttaaacacactcccccatgagatgagcaggcagcagccagcagccagcagcctgcttgcttgcctagctcccaatatcatcaaatttttgcccttcccaaggaatcttacccaagatgctctggattggctacaatgccccagggcttgggtggagaggttgtgaacatgacctagggtttggagggtaaatatggtaactagtgggtatttagggatttgcaaggttgggattagcaataagcggttttaggttattggttgggggggtatgggctgtttgctgtcaatcccaacgggtatccatgggcttttgcttggtccttgggtccattaacccaaaagcccaatgccacttcgttttttctctttcatcctttaaaaagaaactggcgggtttttccacgttcagaattagattttatatacaatcgacatatttttctttttcataaatatgattgtattttctatccaatagattttaaaagtatgattagatttgatatatttctcttagcttatgttccatacctacaactgtgttttatatataatagaattttgaagtggtgttagatttgatacctctgttttaaattgcacgtcgttttaggtttatcctaaatcaaatattttagtctttgaccatcgatttgtataaactcatatagtttaacataatacaatttatattttagatttattataataataattttataatatataattgttgttaaactatacggaggtttaaaaattaattatcaaagatagatgtgtttgacataggaactaataaaacgataagtaatttcaaatggtcagagtacaattcttgccttctgttttaaatatacaattatattatatacaactacatcgattaatctatatcattaaaacatgtagttaccatgtgtaacgatcaaaatatttctctttttcttataatccaagaatttatatcccatacatatatgtgaagttggtccctccttttcgagctatcgttataatatataatagatagattataaagaaattcaattggtgtttaagtatattgttcaatcatgtgcattgcgtgagaatgatcattgtttcttgctgacaataacggcatcttttaagatcatttctccatgttatattaaataataacataattgtcttttaaactcgagagctgtaatccttacttcctacatttaattctatggggggtattttaatgcaatgtggtcttcaaaattactcccactatctaaaataagttattttctagatacaaatctaaacaagtgcgtcaagattggaaataagaaattaacttattttaggacgcgatacgtagaacatactccatccgttacaaaattagttcgttttccagttttccctattccacacatatcaataaagaaaactaacatacccctaatttatcaaatcacaatacaattattcctcactttatatacttctttcatactttcataaacttcgatgtaataattacttaaaaataaatttgttttggaataaattaagtgagcgaaaaataaacttattacaagaagtttaatagtatagccaactaccagctccaaatcatatatagtcaatccaatatctaattcatataatagttatttataaatatatattacaccattaatatttggtatacctctaagatatacaaaacatcttagaatcagtgttgtaactgactacaaatatatagcgtgcttctcttctctctcctttcttatcttctccatatgtttttatagtcggcttgtagtccactattatacttgctcttattaaatggagtagctaatttctcttgcaaatcttcgtcgaatatgcctggacaactaacaaagagtaaaccatccttccaaatatacttatactctctccgtcccaaaaaagcttaccctaagagtggatgtgaccaatgtgtccccttctagtacaatgaatctaaacacattctcttctaaggccgagtttagttccaaactttttcttcaaacttccaacttttccatcacatcaaaactttcctacacacacaaactttcaacttttccatcacatcgttcaaatttcaaccaaactttcaattttgtcgtgaactaaacacaccctaagttgagttttttttggacggagggaatatattgtctagctagtgtgcctaggttcgtactagtggtatgtcgtttatagccattggaggacacatttattactttggaggatatatcaaccgtcctaatttacaatttcgtaggataccactatgcaactccgtactctctctgttccattaagaatctaattttaaagaaaaatttggactactccctccgtcccatcaaaaaccaaccttgtactggatgtgacatatcctattactacggatttagacatattggtgtccagattcattgtaatatgatatgtcacatccagttctagatttgatttttttgggacggagggagtattctttaggattaggttttttttttggacggagagaatactccatactactgccttgggtgcatttacaattttgctagttgatcgaattttgcaaactttgatctttttatatatgatcacaccttacaaaatttggctaaccgaatatctttttagcctacaaacaaatgcagtttgtaatgataattattaaaagcaatctagagaaagcgtgctgcttaattagcagatgcaacccctattttccggggctttctcggctacaatactacccgtaaaaggtgaacgtttttttaagatgaatagagtttagaagacagtattagtaggaccccatgttttctacttttctttcatcaaacaatcgccaataatcactcattcactcgtgatatctaagcaacgtaccccagtttgacctatgctcgctagtgattggccggccatgaatagaatggggaggagtctagtatgaccaaacaagaagcttttctcttctttttattatgcgaaactgaaactttcctcaatgcctaaacagaacaggaaagacattttttttttcgattagggagattatcgtagagacgctgacttgtgggccctactgttggagaatggacaagggagtgcggctaacccccagtcacatggcacggctgacggctctcctaggtttgctcgagtaagattttatcccggatacaatcccccaatgccttttgtcagtggtgcggttttcacatgcttgtcgagttgtcgtgatgatctcactattctttcgtgtaaactacaattacaaggtctatatcatatttacgggataattctctccgatatatgtaattcattattgctagttttaggaaaggtttagtaagaagaaaggaaaaaaaatgagaatgaactagaggtatctttgatacctcttcaagcctaagtgtttatattgaaacaagatgaacatttcaaacatgcgggaaacgatacgtaggtctatcggcttgtctaggttaatagggccatccatgagacctattgagtttctgtaagacaagaagttccgtcataagcacctatcgaccttgccatatgttaacaaggctctcaataggcaccgcggatgcaagcgggccaacccgcggggtaacccgtagattgactcacgggttacctactaattcaacctgtaaatgagtttatgggtcgacccgcttgcatctctaggtgcggtaaatagggccacgacgcgaaaacccatgggttaccacttatttgacatataagaagctagatttgtaagtcagtccgtttgcatccccgcagtgatcatcctgtcgtagattggcacggctcgtcacatcattactagctagatgctctgaaatcatgcttcgttatgatggtttatcgttattgttacgatgcattgttatgaagaaaaatataagataattttgggagaatttttaaacagaagtctccattatccatctcataaatcttctcgatggtatttctcctacatacacca

SEQ ID NO: 39592 - DNA, 1195 bp, Oryza sativa
tgcttatatacataggctacccattgtgtatcaagctacagtctttttatccgtagtcaataacttgcacctttatggacttttgtctttacaaaacatattcgatgacctaaaaaacttttgtcttcacaaaacctaaggatactttaagcattacgaaaacctgaaattttgtgtaatcctcattccaagatgtatcttgtgctatattttctcataacatgaataccgcattctcccaaaaataccaaccgtggtcatattgctcgagggaaactccgtgatcaccacattttattctagcgagcatgtgacttctaaatgataaaatccactcttcgttatgaacatgaaaaaaaccctctcaactgcatgcatatcctttttcctgaatttttattacctttaaactctttttattcaaattttaaaaaaaatcgcaactgctaaggaaaaacactggcagtaaaaaaaaaaccacaaccttcatctgaagtttttcatcctcattttgctgacgcctttataaatccatccaaaccacactcacgagggtggcttggcttacttgttctcgcaagaaaagaaaagaaaactcacacagtggcagtaaaagtccaagcagcaagtgaccaagaccccaactattaaacaacaagtgaacactaaacacactcatcccatcagcagcagtagcaaattagcaatagccccccgacctagcttgagacgacctctcatatcataagttcataggctccattaaatatactcctcctccaacccccgagacgcgcagataagaccaaatcgaccgaggttttaaccctaatcaaccggggttttagccaaaaacacattaataccactactaccggagagtgagcgagtgtgtagcagcggcgacagtagcagcagcaacgcctccgctcgctcgatcgatcgatcgatccatctcctcgtctagctccatatgcgagctggggtgcggcttaagcaactccagctcaaagtaatcttctcactagcaagcaagctctctctcatgtcgtgaggtgtagattaggggggagatttgttcttcttttttggtctggttttttttgtggtttcttgatcgttttggggggtaatggcgcaccggggcgaccggttcttggtggtggtggtggtggtggtggtgttgggggtggtg

SEQ ID NO: 39593 - DNA, 592 bp, Oryza sativa
aactttttacccattggcatggtatgacctttttactcctcacccacttggctgcagctatttcagaatcgtcctcgtcatcatccgacccatacatgtacggacaaacatgattaaccttcttagagtttttcctaacttccgcagacctatgctcatgcaaggttactttctgtatcagatgtgacaagctatcaaagtcttcatacgagaatttctccctaatcggagcaatcatatcctaaaaagccagatcggctaactgggcatcagttaaactcaaactaaagcatttgttcctcatctccctgaatctctgaatatactcgtgcacaggttcatcatgccgctgcttaatcgctgtcaagtcggataatttcatctcatgaaccccactgtagaaatagctgtggaattgattctccaaatcggcccagctattgatcgaccaatacggcaaagaggaaaaccaagtaaaagccgatccagacaaagataaccgaaataacctaaccttcagagcgtccacagccgatgcttcaccacactgagctaagaatcggctcatgtactcataagttgacacaccatc

SEQ ID NO: 39594 - DNA, 602 bp, Oryza sativa
tgcttgtcacagtggaatgcaacaaaatgcagacgtacaacactgtacaattagctaaacggcaaaagctatcaaagagtgaatcaaactacactatggccagttcaaagtacagctgcttctgcttgacatggatgaacaaggagaggagattttaacgacgccatagatgatccatagcttggaagactagctagcataagataccaagatgaactaggccgcactccaatctccaattcctgattcttccatctggagcttcaagaacacgagacacggacatagaacgagaaaggtatatatactttgagatcaatttaagaaaggcatgaatatacgcagagaaaaatgccaaaaagagaggaggattcaaggaaaaggaagttgcgcttctaggactgcatgtttgttctttcaaggaccatgggaagtactactactattgctacatataagacatggtgattttgtttacgataaggcatatggatgtggattttcatccctcgaggggacatcccctgttgtttgtatgtcatctaaatagttatcattttttttaaaaacaattgacaacatagattaatatgaaatatatc

SEQ ID NO: 39595 - DNA, 680 bp, Oryza sativa
gtatcccttctcttcttcctcttctccgagcgctcgcatcgcaccgcaattcaatgcccgcgcttcggtgtgagatcgacctagccggcctccctgacgacgattgaagatcgaacctaccgtgtaagctcgttgattctgttgacgccttgtttttcttttttttttagggttgttgacgccttgttgattgattcatggtaaatgttgctgttagtttgattggtgtactcccttgcagcattgccttgatcgatgagttttaactgcattattaatagttaattcttttcctaatttgttctcggagatgaattgacaaattcaatcacaagctaatgcgggttgttcccatgcaagttcaacataacatatcctgaatatatttttgttgaaaaaatatcatacggagtattccgaatcatatacatgtacttgtatgtttttttccgtataacacattatccaaacaattttactacagaatatttttcttaatatatctctcgttaactaactcttgtcttaatcttacatatacagtgcaagatcttgtatagtttgcaaaatccagctgtctaacgaagaacatgtaaaagatcttgtatctgcatggatttcgatgcgactacctaaagtgccaggtaaataactgaaataagctatccagggctgcagga

SEQ ID NO: 39596 - DNA, 614 bp, Oryza sativa
tcggagaaaaagaaaagtcagagtccatatagaaatacaatttagaaatagctgaaattcggaattaaaaaataaggaatattagaagaggagactagagtcaatatagaaatacaatttagaaatagttaaaattcggaattaaaaaataaggaatattagaagaggagactagagtccatatagaaatacaattagaagaaatagttaaaattcggaattaaaaaaataaggaatattagaagagaagactagagtccatatagaaatacaacttagaaatagttgaaattcggaattaaaaaataaggaatattagaagaggagactagagtccatatagaaatacaattaggaaataactaaaatttggaattaaaaaaattaggaatattagaagtagagtatagattacttatagaaatacaattaggaaataatagaaattcggaatgaaaaataaggaatattataagtagagtatagaaatacaattaagaaaaaaaaatagaaattcggaattaaaaaataatgaatattagaagtagagtatagagtctatataggaatttaaaactaactaaaattcggaataaacataataaaatgaaaag

SEQ ID NO: 39597 - DNA, 616 bp, Oryza sativa
atgcctattggatggatagtttactcgaaaagtgagtaccatcacatactaacacttgataattgtgtgtaccttcattttcattgtggttattgccttggcataatggaggagaatttttgccataggacatccaactgacttgctgacttgcacatggcaacaacctttttgctgtaatttaattaatttgttccatgcaataattgttgaaaatattgttttttaatctagaattctttcctatcctactacacgtaatgtgcaatgagggttggcttgttgtttatgtttagtttcatttgttcttccatattttgtatgtggtgcttcatccttgtgcaattgtgtatgtaccggcattctaatgttggtgcttgatttcaggtatccaactgacagcgataagcagatgcttgctaaacagacaggattaactaggaaccaggtaaacaaccatttcaagtttttcttttcccaaatttatatcgatgtaactagctagtccgctacagttgtccactagcaatatctttgggtccataatgttactagcgttgtaaaacattttgatatctcaattcttgagcaggtatcgaactggtttatcaatgca

SEQ ID NO: 39598 - DNA, 1118 bp, Oryza sativa
gagtgaaggacgaaaggaaacaatgacttggttgttgatcaggagttgctactatgctgcatatctcaaagatacaggtgcaaggtatatgtactctctcttagattaaataatttttggcacggtgggcttacccttacccctgattcccacgagacactgcttctccttgccttgagcggttgaaagacagaacagcaattaaagcaccaatcacccgatctttattcaactcttgttccggaagttttcaaatgattttgaaaaacaaaaccaagttcctcaagtgattcactcagtctctctaagtgtatcaaaatgaattcctcaccaaatgttgccttgttgattcctactctaaggttttgatatgtggcgctcggtagggatcaatcatggtatacttgcattcacatttattactaagtcaaaaacttagactaaagcagataactaaacatactcaagatcaagatcgtgcataaagtgtgtgatatatggtgtaaatggtgcatgaagaaaataaagaaaatgcttctcctttttgatttactttcttaatgcttctcctttttgatttactttctttctcccaaaaatccttcttttattggaagtgggcatggctacaaaaatttcttttaacatcatgctcatgcttgatggagtataactttatttatttttttttcatttcataaccatgcctttccctcccctttctttttttttcaaaaggagctttttttctgagaagaaagcacatggaagcatggaaaatttatttttgtggtgttaacgaccgaatttggtaatatcaccatcagaaaagaggattagatcgaagcggagtcaaaggcaaagatcaattcgggaacagagtaagaatcggctgaagtccgagtcggctacggctaagatcggcagagttcgagtcggacgaggttagccgattgagttgaatccgtcaatacaactcggtgtacgtcatcgggttgagttgatatgcttcaagatgattgccacacgtgggtagagtcttgagaaggcaattgtatctattaattaggatattttatgtaatttccttagagatatgtttgggcaaatgtctgccg

SEQ ID NO: 39599 - DNA, 579 bp, Oryza sativa
gaactggcgataatgattgattaaaacgcagctggtgactacccaaagaatttctggagttagaattatttgcgcaattggtgtggataacgatgtgcatgcgatttttgggtaagaccagagacgatcccaaagaatttggggatctccaggtgtcccgcagtcggaatcttttgatgacggagagctcggcccctttttaaagcgttgatataaagcatcatataacgttttactcaagcggatgccaaagataatactactaatattaagcaaaggctagtggtaactaaagtattaacaatgtcataagcactggagaaagcattattcaccatttggcgttcatgctgcatagagaagaaaaacaaattgctaaaaaacaccaaggcaagaagggcaggaatctcaatccaagcacaccttagcgtaagcatcatattgacggtcatctcgaccagaatactggtgatgagttagttagtgagtagtgacagcagttgagcacagctcacaccaggagctttgcaaaccatgattagtccatggcccatttgcctttgtaacacatctgggggc

SEQ ID NO: 39600 - DNA, 645 bp, Oryza sativa
cacgtatataaaatacaatatgaatattacacattagttgtttcgtaaagttattgcaaaatttaaaattatgttgtcattgtaatatattttaataatataatgagaaaacatatatgttattatatgagagaaaatataatgatgctaaccgcgcaatttgcgcgagccaccatgctagttatattatcaaaggaatagaaaaaggagcctccacgttcgctttcatggcctagaaattctcacattaatcggagaaaaataaaaagcagaatccatatagaaatacaatttaaaaatagctgaaattcggaattaaaaaaaataaggaatattagaagaggagactagagtccatatagaaatacaatttagaaatacctgaaattcggaattaaaaaaaggaatattagaagaggagaatagagttcatatagaaatacaattaggaaataactgaaattcggaattaaaaataaggaatattagaagtagagtatagaatccatatagaaatataattaggaaataactgaaattcggaattaaaaataaggaatattagaaatagagtatagagtcccatatagaaatccaattaggaaataactgaaattcagaattaaaaataaggaatattagaat

SEQ ID NO: 39601 - DNA, 583 bp, Oryza sativa
aattcacacagttgcacccttgaacatcgaacacacagacaaatgcaacaatggaatctggggtcaaatttctgttggtgtcatcagagggccaagaaactgcaggagcaccaaaaagtctcactttcttcttcttcttccattgtctccctacaaaaagggctgcaagaacacaaggagaaaaaaaaaaaactgcaccaagaacaaattgcaaagtaagtttgtactttgtactttctttgcagcaagaagagcaagaagggagatgtccatgaacgcggacctcggcaagccgagggagctcaccgggttgcagcagaggagggctctgtatcagccggagctgcctccatgccttgaggtttgcaagctctccttcatcctcaccacttgcaagctgcatcaagctactttttttcatcactaattatgaaaagttgcaagttttgaacacagtatgttcactttgtatttaggtccttgtatttgtattctctcaaagtttttcaaccaacatgttcagggaaaggccatcagagtggagtttggcgattcgacgacgaccatcgacccgacatgcgca

SEQ ID NO: 39602 - DNA, 653 bp, Oryza sativa
cactgggtttttaaacatattcctcacctatgcgaggcctacatcgaggtagtgcctttcttagatcttattattgctccttctatgaactccggtggatggaagccaatcgggtttcaagatgttgtatggtttcgccttcgtgatggcatgaaggcaagatacatctctttccaatgccacacatcccggagccaatggaggtcgagatggttctatctagagctcaaagaacttgaaccggttcttgtcatacccgaggttcagccggagcattccgagaactggacttctaaacctccgttgacaccctctctccaagcctttgtcaacgctgtgagcgaccttcgagagcaaggattgaccggctatgaagtcattaaggactttgtcagcggtcggatccaaccgctacaagcccgtgctcaccccgtgttcgactacacgggagcagcaggatataactcgaatctcttcgcggggtatttgaccttatgttgtaatcttcttcctgctttcgacgatgattgcgaggccaagccctaactcatcctctcatatcttcatttatctcagatctccccgccaacatcgtggcgcagcgggtcaaggaagtctcgatcagtccttcctctacggtcgatgaaacaccg

SEQ ID NO: 39603 - DNA, 646 bp, Oryza sativa
atatttgtactggttttacaagttaagagatgtgttatatttggtattacatattgaggatgtaattcgaactcgacgctaagttgaggtactataagtgaacttattccactcctgaattcccaagccctgcagagtttcagtcttgcacttgcacttgcagcaaaggaagctaggcctagctgtgtgggttggtcagaacgtggtgcggcccacaaaagttggttagaaccggattcggaaaaagtacatcgaaggtccctgaacttgtcatcgagttataaaaacgtccccaatctgcaaaaccatatatcacacgtctcttaactaatcaaaaccggtcacaataaatcccttggcggttttgatcccggtcttgtcctacgtggcggctgaatcagcgtagaacctatgtgagccccacatgttagcatgccacgtcagcctcttctctatttcccctcttctctccattcctcctctctctctctcactcctctgtggggctctggacggccggcggtggggaggaggtcgtcggggcatggaggtccgacggccggccggcgatgaggcggcggcgacccaaaaaggaaagcccgcggccgcggcgggagcacggaaagcaacaccagcgtcttgtgcc

SEQ ID NO: 39604 - DNA, 807 bp, Oryza sativa
gggtgttttctagaccagtggatcccccaaaaggttccggattggctgcggattcggagaggaagaggggctcggtcggccgactcgggctcggcctgaggccggccggaggttgaagaaacctccgacatgtgggccccacatgtcggcggctggaggaggaggggcggcggctgagctgggccggcttgggccgcgcgggagagagagagagagtattgggccgaattcggcccaacggcttagggaggggttttttgaacttttttaaataaaacaatttgtgaaatgttgtttcaattattaaaaatacttcccttgctcaaataattcccagaaaattctagaaaatagaggaacaagcaaagtatttaataaaattttatctagctcatttttatattgagatttagcaaattaaaattagatcttctctttgaagcttttaaaatcatttctaataattccttttaaacaacaatttataatttaaggattataaacaacaattataattagatcattattgatcaaataattactgaactgttctttgtatgattaaaattaataattgagctccgaaaaatccgagaaaattccagagagtataattaaccatggagaatttaataaaaattaaatccatccatgctttatatttaggaaatcctatttcccacatttaacttcacttgtaaatcaaagaacatttaatataaaattctattaataatgtattaaataaccataaatcctaggacaaaatcaggatgtgacaaatgtacccccttacaagaatctggc

SEQ ID NO: 39605 - DNA, 800 bp, Oryza sativa
ttaactctcaaaactctcaaaaccattgtcattaatttcatcctttgactcaaacaaacaaatatcggttttgatgatgtggcatcacatcaagtctatatagacacacaaagaaattatcgtaccaatcaacaataaataacaacagcatatctttactaattaaaatattcacaattttccttttgtcacacaaaaattttgcccgtaaatccgaccgagcggcgccctccatccacacacgagcgacacgcaagccggctaaagcaaaaaggaaaaaaaagacagatcagagatcgaatcaaactcttgatagtgtatggtggggaaatcacaaatcaaagatagattgaaaagccagtcgcggcaaatatcatccagaattctagagtctgaatcaaatctatccctacttaaaactttggatttttcccatcatcacaatgtgttttcatccgtcgttgagcaccttctctgcctcgcgcggttagcgccttctcaagattccaaatttcccaactcaaacacaaaaacaaaactaaaaggaatcagactctaatccacccaaataaaattagaagagggatccacgtttgaattctaatccatcgcaacatgaaacaataaaaaaatattccaccttgacttcccttaggcctgacggctgcatgcatcgatgcaatcgctttttccccccccctttctcccccggggggccccctaaggacagatcgtcgaatcgctcgcaccgaactgacatgaatccgtgatgatctcgtcggtggaaaggatgcaaaaat

SEQ ID NO: 39606 - DNA, 1776 bp, Oryza sativa
tcctgcagcccaactaataccaaatagtaccagctgatacctatgtggtatcatgcccggaggccgtagtacgtaggtatcagacctcctacctaccaagtatcataccgttttaatggaatctcgtacaatagcatcctcctaatcagtagcagtaccagaaaatcccatgtgggacactacacataacgatacaagacaaccaccccttggggaaaacttttatattttagacctttttaataaataatctatctatctatctatctatctatctatttctattatatactaaaagtccatgaaacttcctacaaacgctctcaagccgccacgtgggactcctacaaacgctcctaggccgccacgtggcactatctaatctcatcgtcgattttcacttaaattggtggacccgtttatttagaccattagattagatctattattaaaaaaggtgatagtttttccttaaaaaaacatatgcaaccggtggctgggaaaaggaaagaaaaataaatgtccctacgttaaacggtattgctaaatttgtgtacagtcggatgttttaaccgtgagatcgtccggtaagattcgtttcaagcacttgcaggctgcatcccatcttacagcttatgcgaaagaaccaaatgcacctaatcaagctctaaactcattagcacttcacctccgtcgtaaaattaataattatttatatatttatacgaatttacaccgtagttacaccccatttatatatataattagtatataaatttaagatttacatatctaattttgagacttacattataaatacactaaaattacatatataatttagggaattacaatgtaaatacataccgactattttattttactatttttttggtgaaaaatatggcgctataaatatagctactaccttttaaaaaaacatataaagctacctactgttagctggaagaaaaaaatagacatctatctacgataaaataaagcaaaaaaaaaagcgtacttagtatccgtgaaaaaaactacggtctaaaaataggattttgtataatataaaaaagataaaatacaatactacataatatacggaagtatatatatgcatgtaaatctagatctataataaaccaatagattagatcttgtaattaaattataagaaaaatcaatttaatttgatgtatccattatttttaaccattaaatctattttttagaaaaaatcttaagtcaccgtgtgtcacgtcctataaaaacggaaaaaccttagaaattcttagaaaaaaatgaaacacctcgtcattggctttcacttaaattatttaaaaaagttaaaaaaatataatctccaccgcctcaccctcacatgtacacaacactgtcatcccctccctattattttatctattaaataaaagagaaataataagtaatgtttgatattttttttgaaacaaagtacaaacgcgggcgctcacaacgcgcacaattacttctgtgaacgcacacatgcaaatacccctttgagtactttcaagagactagcctgatatattttgagattgacgaagtcaccacgtacgtctcgctatcgacgggtacgttgcctaccactaaaagaatttgtgaagtctgaactcgggcaagttccatcacaaggaacctaaccggttgagctacgttcacttcgtaataatattggatattaaaacaaccataatttttaagctacattcttggagtactcctatatctttt

SEQ ID NO: 39607 - DNA, 776 bp, Oryza sativa
ggtggtaccactgctccgtccattaggtaccaggcatccgagtccgagtaccctaaaaagggcataatggtcttatcgtgtcaaaaagcttaacgcgtgagcaggtcttgcaccgacctcttcagcctttcttcttccttcccagtgcggccgcactcactagaagagctgtcgccgacagcaaggacaattggacaaggtaaagcaatgtgggagcaagaagaccagatctactcccctcaaaactagaggcactagatcaggtcgctccaacctcggggggaccagctttgccccccagtgatggaaggagctcgacctgccaatgaaatccttgccgaccactgccttccctgcactaggccaagctctttcttctcatcgtggttgtatggtcaccgcatcaccaagccactcttcctatggccagaggctggtggtgttgctcgtctggagacttgagtttgagggccttggcctcttctaccctgacggcgatagcctcagcctcagccacagcgagtaacgagcatagctagaggggcggtccagcaacggcaaatccccttcttcaccggtgacaagaagaccctcggcggctgtgcatatccatggcttcaccagcagcagctccaaagtccagcgttgtccctgtcctcaagatcagaggtcactaaacttcttgcaaagttctccagtttataaaacttcactgaatttctatgcatatgcagttatcttgtttatgtttagcgaagtttagagaatttaatggc

SEQ ID NO: 39608 - DNA, 1640 bp, Oryza sativa
aattgagtctggtcgaaatttatctatttcgtttttaactaattgactgtgtaatcagagcagtttgcaatggtttgacagccccacggtcaatggatacagttggcatctcaactaatgaatttaaatgcaatagtttgacagccctacggtcaatgatacagttggcatctcaactaacgaatttaagaaacgttgaatgaaactattaaaaaaaatcaagaaacataagctgtgcacatctacctatcaaaccatacagggaagcaccattcgtgtcgttagagttgtgagtgtacgactccattattacggtttaaatcctaattaatgttcagagactatggttgtgcataccattagttggtgtagaaattgcaagttatactttgtaaaaaaaaaacatcaaaccatatgcacagcttccgagtcttaactcctttgcctcaacctcaaagcaatagcagatttgattctagtgcattctatttttttttcttggagaggtagtgtagtgcatttgtttattgttttgtacatcaaaacatgtcctttttgaaacaagagttaaacttttaaaacttgaacattagtatcttctgaaacatttaagattagactagatacgcgctgcaaatctcctaatcctgctccatatccgctaatcacgctccaaatccccaatctcgctttccaaaaaccacgctttctttctcctctgaaatgtatctctatatatacacgaatcgagttggtgtgcaactgtacatactcgagcaggcagagcaaccaggccatcagatatctccacggtatgcaagattattcagacatgttatctcagtcttgctttatctttctcattagtatttggaatatagtgttatccagtttttgtgatatatatatatatatatatatatatatatatatatatatatatatatatatatatatatatatatatatatatatatatatatatatatatatatatatatatatatatatatattgtgccaagatcattggcatattggattgtgcggctgtctcggttggatgactatgctctctttctaaaataagagttgaaacttatcggatgcgtgtttatattcttgatgagggaatgaacaggggtgataacatttaggtcttaatcaaactattcagtaaaatatttattaaaattatggcagtcattgttcttgctacttctgaaattgtcttcgcatagaaatggccccaacgaatctaaaccgaaagagaacgtatgcacagtttgggcgccgtgcaagacctgttgcgcatgcaagacctgttgtgcatatgtaagttagttgatgaattggttagacttagtaaggaatttatattgttgtgttattgactgcttgtttgtttcagaaggttcaagtacttcgacgatgttgagtttgatgattgcagggtaaactgaacatttagtgttattgtcatggtagaatggtagatgcctagttccttgccgaggttgatggtgacagacaacccttcatattgatggatgctactgtaagtttcattatttcaatatgaaaaaatataaacaaaattaaattaaatatgattggtacaattgtagggcttgaaatatg

SEQ ID NO: 39609 - DNA, 706 bp, Oryza sativa
acttcacagaccatgggtgagtgccagaattcactattcttgtccctatgtatatcatgcacatctgaataatcacatggcaatatataccgcaaaggtctgaacttggaggatgaatggtgaccggccttattaatgacgatataactaccacgaaaaaaatcgtagcatcaatgctaaaattgtggcaatagatacatgttgttacaatcttaaaatcgttgctagccgtggtaataggttattgcaataatttttatttagttgtaacaaattttgatattgccataaaatggatgtggcaaaagaatatattgcaacacttcacatcgttgcaatagataactattaccaccactccatgtatggcattagttctacataccaaactaaatatttcaatattaatttatcattctaaatattttcttttgatatcttgtcatggctaggatttgaacccaatatctctccctcacgcgcgctatctattaccaactcacctacgcatcacttttgtttaaaaatacatatcattccatttgagcctgtctatctgagatttgaatcatgaatttgagtatttaaaatatttcaaatgaaaaagtcaagttgtagagctctaaatttcatacaaaatttatcctaatccgtgtccatatgaaaagaataagtcaaattatgagatgataatttttttatttca

SEQ ID NO: 39610 - DNA, 1363 bp, Oryza sativa
gagacatggatatgctatagaaattatattcaattagatttcggatggtatcttaccataaattttgaaaagtgtgttccccgcaaaaaaaaattgaaaagtgtggtgcgttcccctagtactgaataacaaagcaccggtagtcactcccataatgcaactatacttacatatggaaacaacatattagtatctaccacataaccgaaaggtaattccagttgttggtaattcataattgtcgatagcaaaaatcacttcatgatctgtatgtttatatgatccagattattgatgaaatactcgatttcagattattgacaaactagttaggcgcacgctcaaaactcgatcagcaacacaaacaagtaattcacctcaaatccagcgttcatacaactaaaagccaggagatagatcatctgatatcatctactgctgattcatgatcatctatggcgttcgatacggtcactgtagaagctttcatgtactgcttctattttttccactactcttgtcattgccgatagtgatgccctattgtggacaaagcgagtgagcaggaatcttcacaccagctgagcaaatgatgcagctgaaatcttcgcagcagctaagcaagaaatgcaagatagtagcacctcacttccccaagcctcccaaacccaaaaagggttttatgaatggttgctccgttttcagttcgatatataggttttcgaggacaaacccatggattttaatttactgcagaaatcagcatcccttgcctaaggctgtgaactctctataaaaccaaagacatttgtaacacataaaagatccatgcagatgagccttggtcgctggcatggtgatttgatctctgttctgtggcaatggcatcaacatcaaaagaatgctgcccaaagattgaacatcgaactcaacagtactagtagccacaattcttgtccttgtggttcattcagattaaatgtatatgtgatgaagcatgttttaatcattcttcggtcttttgacttattaatgatacaatgaatacccttgaactgtacattcaaatgtgccccagggagaagtactgaaccactagacttgtatcatatgtagcagtaggacactggcattgtctcttggaaatttcaaggagatcataacattcaaagatttggggctgatggaagtgaaggagctagttgagaaggcctcaatcattttgaaacagtcactcacggaggagattgaggcaattattgagaagataaaggtagcattaatttggaagtcatttctttgcaagtgacaataaagcctcttaccaaagtatttagtatcaaatttggtggttagtgggcta

SEQ ID NO: 39611 - DNA, 800 bp, Oryza sativa
tttacggttgatatttcgctcttataactgtctcaaacatagtgtataaaacgcatgcccacgcattcgcgcgggctaccttcctagttttaataatagacctcccaggaacttatttctaaaatgaaccctttcgccacaccatggtaaccggcgtggccaatctgagctaccgcgccattggtcatggtgtcgcaaattaaagggtgccccgtggcagtcgttgccattgacaaggttaattagtccctgacgtggcacaactacctgttccggccggctccttagcgtggtagctggtgtttgccacgcctggctttttggtgtggcatgcagtgcaactagctcaactatttcatatttgtgaagaaatatcatatgataagaaatttttatgtgttaggaatttttttattaatttcatgaccactgtgataggtttcatggtttatgatgaacatgcgaagtttgtatttagaaagttgatactaaacaggtaaagatgggataaagtatcagcggtatttgtgaggtgttattagaaaacttcgtacggttttgacggacttgaattatgtgttaagcatatgaatggttcaagcattggtgattccttattctctgttttcactgcaatttggaaggatggaaatgactaaatatgtcgtaagcaatcacctgaatgctagttggagccagatcgtgataggatggaggaataagaatgcaagtagaagcaggggcggacacaggataaaaaaatgactggggacatgcatctatataacttatagaatagt

SEQ ID NO: 39612 - DNA, 510 bp, Oryza sativa
gtatttttgtggtcaaaataatgtcatagaaaccatgtcaatatctcaatccaaaatttaagttttgtattgtaggactaataatagatggtctcattaagacaactgtaatataatttgtttcagacaatttagttgcaactgccatatactatgtttttccattctagaccacgtttcccatattttggccgttaatatatattgcaatatagtttgcttatagcttttgaaccttctgttcaacaggtcaggcacatgtttgatgagattgattatgttttagagggaaggaatgctgaaagatttgcgagactttattctcatggtgagttcttaatttttattcaatttttgatttttgctacctgctagtgtgggttcctctaaatctatctgacaagcttgctctcctgtttcccatttatctcgaccatcatatccaaaccttttacattcacatttcctagtgctctttcagctcagattgatctctggctctctgctatt

SEQ ID NO: 39613 - DNA, 1946 bp, Oryza sativa
ccattagttttcgattcatgaatcatacaatagcatgaaccattaggatcatatgataacaaaggtaaaaagtcccataggtgagaaataaaaggaggagcggacgtgagaaggtaaggataaggaagtgaggaggtgagggagaaggtgccttggaaaagtttgaagatgttgagagggaaaagaggtggacggttagacatacttgtaggcaggcctttaagaggcccacatgcgaaaatgcattatcacatgcagtcgcttaagaggcgctcctgcgaaaataaatctattttcacaggcgggtctcttaagcggctacccgcgatgccttgaatcgatcccgtgaagagcgatttttatatgtgggagcagttatggtccatgtgcaacctataggaagtctcgtccaaaaaattgatttggtagtggtgccatacggtaggggtgctatgtacctagcctttgggaggaactggcggcctaccctagaagttatagtaattgtaagtatattttgccaatgcacggtgtgacatttaaaaatatctattatcctctcttctctctcccctacccccacacacaaagaaagaaacaaaaaggaaaattgaatatccgtctagcaatcttcttaatttcacttagcttttttatggtctttcaaaacatatagaaaaactaatttttgatacggatgaacaaagattttgggatctccatttttttcttgaaatagtagtaccggtgtgcggtgtgctcttccttaactagttaattactacccaacactgctcactatgtactggaattccaaatggacctgatgagggcaaatcccaagtcaaaaactatcaaaagtagtttatattcttgccatgttatataaacactatatgaagaaactatatactcaatgaatggtttcttcatagtaaattcccatccaataacctctcttctgtctcattttgttcagctatcctcttttttattttttttgcaaggaagctatcctcttgtttttattcttggtttatgtgtagaactagcttcttacatgagaaatagttacctcatcttttctctcacttcattaactctctatccacctcaatcttttgcttaattatgtgataatatgcttaaaatgctatgaaaaaccagatgagatggatggttgggagtgacctgcggcttgtcatgcttcacaaggtcagtcgttattcgtcacacacatgtttgtgccatgtgtgtgtgaccatgcgtgatacagtatatacatagtgacaaagcatcgtgaatactggtagttacccatggtcattggggttaacagaaaaaatctgcaaaacttctatgtgaacgccaactctataaatgagatataaatagttttattagtttaaggtttgaatatagggcaattttgaaatatagcattattttccaaacttctctaaaagataggagtcgtaaaatgagtctctttcctttgggcctatttgatgaaatttcagctttagctccatctctcttgaagctgaagtgtaactaaacggttttagcataaaaaagaatagcgtaacaagctaggatgatagatcttacaaaataaactagaaaggtagagcagggttcaggctattttacaaattaattacaaatcaactttggacttagctcttgaaattaaatttagaacttgaagctctccaaaaggaccctttataacttagggcatcaacaacgtacattacgtacattgtcgacatgggtagtaggaatagacacactccacattgcttacttctgcaagatgccaataagttgaggcccatagaagcaacaatcacttgccttatttactttttctgtcagagaactaccacttgctttatttactttttgtgtgagagactgtacatacataatttatctccttg

SEQ ID NO: 39614 - DNA, 1035 bp, Oryza sativa
ttctcataagttcatcgatagtctgatgtattaagttctattattgtagtgcaaactcagcatacgcatgctcatttctgaagtgctacagtttccttaacccatccccaagaaaggtcgtttcttaatagtccttagtgatcaccagagtcaagacattatacatcagattaaggtagattatttttcattagcaattaataatagtaatagaaaatcacatgtgggacaactaatacaagtcaactgaattgagatcctataacttatttccctctgatgtcagtcattgacatgtgaaccctccaccaagtgggctggtatatcagagactcaaagttatagggatataagttagaggatttgcttcccaagtcaacggcacctttggaggcctcagttcatatgttatggcccttgtaacttagacttcgtttgaaaaggcttcttaccttagattttgagtggcacgtaaaacgagataagccattaccacttaattaattaagtaatacgaatcaaaaaataatattgtttgaattttttaacacatagtttaacaattagggaaacatgatcacaaaaaatgagggagaaacaaatctaagaagcagtttagaactcaacgttactctctgtttttatttaattgtgttgacagtgaaatttggtaatcggcaaagacgtcatcggcttagaatcattatcggctgcagcatctcggaatcagccgatgggagttatcaagtcgccaatagtccgattcctgctatattcggctaaggaaatcaatctactaaaggaagcttatccctaagtgaccgagtttaaagaggatgcgacatggcagtttatctattaattacgaatagtttgttagtttccttttatctttaggaaagtgtgtttagtgtccgataaggactttatattttccttttatctttaggttagtttctttcttatctaaaaaggactagtatctacccatgggtataaatatgtacacctggggtctatgtaatctatcgctac

SEQ ID NO: 39615 - DNA, 690 bp, Oryza sativa
cgctccactggttcatgtctcttgcaggttcctatcctaaaagaattccatgtatgcaaccaaaaaccaatcattcattaacccctttaggtttgggaggcttgaggaattgaactgctactgtattgcatcttttggcttagcggctgctaagtttggtgcatttttggctgacttgcttcatccacaatagggtgtcgctttttagctttggccaaggatcaaattcacgtgagcagcacactcacggagcaacaaacacacacaatagctctctggggatgaacacacagaagtgcacaagcacacacacaagttttttcttggcaacaaatgccttttcttttcttcactcacttacaaactgatgattacacggcttatgtagcctcgcgtacatgcacatatagctacttcctccgtttcacaatataagtcattctagcattttccacatttatatttagattcattaatatcaatatgaatatgagaaatgctagaatgacttacattatgaaacggagggagtagctaacagcccgaccgggtcgcccgcacgaccatgagccactcactcacacgatctatgcgtctcacgcgcaagaatcgctcctccgagctgactaaaccacgccacaaacatgctccactaatcttgcatgcagctaactaattcgccactaatcc

SEQ ID NO: 39616 - DNA, 1040 bp, Oryza sativa
agtggcagagctagaattttttgaaggggtgggcaaattgtaaatgaaaagataaaactgctacccgcttatataatgtttatgtgctcattttactaccaatcgaaggcagaacaattttctaataaaagcatagtttagtttaatatgcatataatttttcactagttgaaaaactacgttgattttaatataaattaaaacggacgtatgccatattatacttgaatggatcattgtcatccattgtgaagcagtcaagtctggctaggcctaattgcatcgtgcaacagtactgcttgcatggctagctgccagtaccgatgcttctaattatgtctacgaagtaaaaaaatcgttggattttaatgcaaagcaatcactcgatcaccattggtggcacacgcagagcccgagcagctgcccgcgctggccgggcagtgaatatgtcgctcctcacaagttctatcaatagtctcatatattaagttctagtactctaatgcaaaatcagcatgctcatttctgaagtgctacagattccttatccgattctcaagtggggatatttcttattagttttaagttgtccttagtgacctactggagccgattgcccgttctaagcgctgacagaaggcaggttaatttttttaattaaaaatctataatttaataggaaaaaagctattggtctattggacgggatcccatcttcactatcggtgttgcgcacggtatgcgctcgcgcgactcgacgcgtgctgaaccgctgcaaactgttgattaccgcatgcattcactattcatgcgccatgtggtggaggggcttgtccagcaggtcattgactcggcggtggaggagcagctctaggaggttgtcggcctctgttttccgaaggagctcgtagcaggtctagcgctcgattttcgccaacaactggttgatacagaggagcgcggcagcgagttcctgcaaacaagctagcggcactgaagcacaaggcgtcatatagccagtgttgccagagctttgtcct

SEQ ID NO: 39617 - DNA, 504 bp, Oryza sativa
  unsure (1)..(504): unsure at all n locations
aacagtgtgaaactgcagtctttctgggatagaggtagtagtagctaatgttgagctttgttaacctagatgggaagactatcttgcgcaaggcgccaaacaaaagctctaattattttggatacacccgcatttcagatcgtagaccaacaaatgctttaccaatttaatcatacgatgtttatcctaattttaatttttctcagagcaacacacatcatttttttctatccaatattaatgatcaaaattagcaaaagtggataccaattttatcagataaggttatccaccatcttcattgaatactccttatctggccactccattcacccttatccatcaatcaaacatacttaaaatttggataaccatcttctattgctganggatatccctctaaatcacacacatgaatccccatcatttggcttatccattttattttgtaaacaaaaataatttatgaataaaacttttatatacgtgttcttaacgatataa

SEQ ID NO: 39618 - DNA, 509 bp, Oryza sativa
  unsure (1)..(509): unsure at all n locations
atggggacttgtacaagaagctgttggttgttctgagtaacattggatattgtaaagctgaactttcagatgaactgtataccaaatacaggcacatttggtccccagtcaggtacccgatcatctagcttatgttccactaacattgtcttactgtcctttataatttttggtgcgagtcgttatccctgaatagattgattgaaagcttgttatttcatctanagcaatgctttgatacatttgcttcactcagttagtgttcctctctcagggataatgatgagcgtagtgctgacatgcgagatctgatgacttctttctcagcacttgaggagaaagtcctggaacagtatacatttgcaaaggtatggtagaaaatccagaattgttgattaatcattattggccaaaagattagttataaccatgttagctttaatcctttcgtgtcttggtgtgcaaagttacaagtttgaaacacctgaattagcccactatttgttctt

SEQ ID NO: 39619 - DNA, 533 bp, Oryza sativa
tagtagaagcaaatcttggaataagccaagacggaaaggctagtgaattaggccaaagctagtgcttttttgttaagtacaagctagtagctgctatacatgcaaaagctaaaatcctagcccacacccccacaaatccactcaattcagcacactgtagcacacccccaacgatttcaaagcagataaataaacttgtaattgaagaatttcaacagactaacacactctcacatcacatgcataatctgaaattctgaatacagttaagatactgcaattaattaacgaagaagatagacatgcatcatatgatgcatgtagctagagatatatgcagtgtatcgaggacatgcatggcatggcaattgggtcgccggcgccggcgccggcgacgaagacggcggattgattacctggaggagagggtggtggcggtgggagggggcgcagtgggggcagatgctggcgcagcagccgaggcagaagatgttcttctcgttcttcttgcggctctcgtgggcgggacaccc

SEQ ID NO: 39620 - DNA, 547 bp, Oryza sativa
ttcaagtaattatttattcttttcatatcatttgattcattgttaaatatattttcatatacacatatagttttacatttgaataagacgaatggtcaaacatgtgctaaaaagtcaacggtgtcaaacattttgaaacggagggagtatttgtgttccccttcagtgctctgatttctaccggaatcttcagcttttgcggcgaaagggagatcaggagatctattcgacgagatgttatccccccaccacaaaacgtagaagagcagagacaaaaaggagtaggaagtcgagaccttaccacggggagagagagagagagagagagatcccccgccgccgcgcgtgtgaccatctccgtcgagaatggcggcgccgccggcggccgctcgccgccccgaggttccgtcgtcatctcgcccacgacgccaacgaacggtgcggcccaaatgaaacgcggaaaataggccatcggcgccgacccgacccggcctggcccggcccatctttccttccaggcgaattttcttgcgctcgcggcccatgc

SEQ ID NO: 39621 - DNA, 631 bp, Oryza sativa
  unsure (1)..(631): unsure at all n locations
gcaaacattcaaatattacaccatgatcctgtagttagaaaggttcttgaagcttcattttcagaacntaagagccatattgtcagcaatgttgggatttgtataggagtacatgtcttcaattcacatttgccaaaacaggacataccatctctacaatctccgagtttcacattgaccaattcagtcaaactgtaattaagttgtcaaaatactactttctatccaaaaacaagttagatcatcccaacagccttactctgagcaatcaaggtgaactagaagcagtaaaagaattgtcctccgacaactatcacaaccaaaatttaggagagagatcagtccttctcagaaaatgatgatgaatacaccttttgttctgagaaggagtattcatcatcatcaaggccatgacgcaaggtacttcacgccagtctgaaaatagtcagttcagggaaatgactcgtgagctactatagcagtcaggtgcggatccaagaacaaaaaattagggggctcaattacacaatttcttcaacctacagcaatctagagatctttagtttatcattcatggtgaaaaaattgaaggggtgctccagggggtattcatgagtcttgtgggtgtagg

SEQ ID NO: 39622 - DNA, 657 bp, Oryza sativa
atatccctcaccattaaaaaatgcttatccaaattttaagtatgtttgattgatggataagggtgaatggagtgccagataaggagtattcaatgaagatggtggataaccttatctgataaaattggtatccacttttgctaattttgatcattaatattggatagaaaaaaatgatgtgtgttgctctgagaaaaattaaaattaggataaacatcgtatgattaaattggtaaagcatttgttggtctacgatctgaaatgcgggtgtatccaaaataattagagcttttgtttggcgccttgcgcaagatagtcttcccatctaggttaacaaagctcaacattagctactactacctctatcccagaaagactgcagtttcacactgtttgtgtccagtgtataaccgtctgtcttatttgaaaaagttttatgattattatttttgttgttattagatgataaaacatgaatagtattttatgtgtgactagcatttttaattttttttcataaatttttcaaataagatgcacggtcaaacgttggacacagaaatccacagctgcacttaaatggaatgggggtagtaatatatagcatttgtgttgttttgtatgtttagctgcacttaaatgggatggggtagtaat

SEQ ID NO: 39623 - DNA, 1108 bp, Oryza sativa
gacattccttttgggcccatcaaggcttacatttatagtattaaatagctcaattgtgccattcatgcaaagagtcgatatgtccgagtggttaaggagacagacttgaaatctgttgggcttcgcccgcgcaggttcgaaccctgctgtcgacgcatttttttccccttcccgtagtagggtcttgtgctgttgtgccatatttatcccactttattatcttttttttcctttaactagacatgaattccagtcttcgtgtcatttatccttttgttaatattttttccctttaactacacagtaattctactcttgtgccatttatccatgcaatttattttgcttggactatatctccttgtattcttttttttttctatttcacttgcgatagatgtttagagtcttatttttagattttcttttcattcatagaatcttgcatcaaagattcgtgtacgcatagatctaacttgcaattacaatcagttacacaacacttgtacagagtgttagcacttatactcagttacatgtagttacactcagttatacatttacagtgcaccgatattaaatttttacaactatatttttttctagatttacaattttggatatgtttgtctctttttttatttcattcgaaacgggttgtatatattggttgaaattctgtaaaatttaaagctccaaatatgtcgaaagatcaatgggtagacctttttgcccttaaataattttaacatatttctatttattttttgagaaaaaagtatgctgtaccaaaggaataggagtactcctttttggcacgtataaacccgcggaacaaaatcatacaaaccagcatcttttggtcgaaattgaataatcacaaatctagccacgacagtgactttgcacttctattaggaaggaactgaagtgtttacaacaacctgttgtgtgaatcttttatctgatttttctttttcttatctcttcatcataactccaaaatcgaataaaaaccaaaaactaacttaggaagaggcaaacataattctgtctaaaattttgggggacaaaaaaaaactatctcctttctttttgaaaaaaaaaa

SEQ ID NO: 39624 - DNA, 1091 bp, Oryza sativa
cgactctagaggatccccataaaagtatacatatatcacttttcaataaatacttttataaaaacaagaagtcaaagttgtgttttagagaccgtgtcgctgtccaaaacgacttcctttacgagaaaggagggagtatagtttaacaacatgtgaattatatattataaaaatatttataatcactactacacaaatggttttttttttggcggccaaaacacatttttgctggctagtgaagataaagcatcttcactggcggtgaccaaccgccagagaagagatgttttcactggcagacggcttaaggctgccgtcagagaaaattatctttgctggcggcacccatacgaggaccgctgttggtgatatgggcccgggggtacgcaagatggagagaaagagcccttccgtccggccacgtagccgcacggccttcccccccccccccctcgggggggaaaacaagcggtcatgaagcggccaaggggcctcgggatgccctgccgcacccctcggggccctcgggcaagctgccccaaggcccccgctcggctgccacatggtggccgagtgggcggagagaggggtgctctcaagcgccttaaataagcatcgccccaaccgtcccccgccgcatttaatgtggcgtgggcggacgtgaggcgccgtccgattgatgtgcgtcaatcgggcttgatcggtctgtgaccggccaacaggcggacgggacggatagcagcgtacccacgtcccgcccggtgtcaggcggagtgggggcagataagacctgtcccatcggcacgtcggtgagcgtgctgctcctgtatggagtccaccaaagtcgccaacgaattaagggcgaatgacgggcgtgtcccccgtgtcaggcgggggacggcgctgggcccacctgaggatgagcaaccaccttgtttctggttgaaggcaaggacaacggcttgacccaagacatgtgggcccccacccaatgatggattgtgtaaggcggtgcatgtggtatccccttgaactataaaaggaggaccttacccaccgagaaaaaaaacgccacttgagaagcttgc

SEQ ID NO: 39625 - DNA, 600 bp, Oryza sativa
ataagatttttccaaaaagaagtaaggatagactaactgtgctgatacgtcgagaacacactccgctggagacttgtatatgtcatgaagccagagttatgtgataccctgaatatgaattgaaaaaacaaaatcatttctaccaataatattttcctgcgtgctgtaaggttaaatcaaccatatatttcgccatcaaaaacaaaaataagccaaacattaattccaagacagaaattcatatttcagtgatgtaccgtggtttgaatagaatgagtctacaatctataaagcttgcattcagtccatagaaccaccacacctgcgaccaattaggcaaaagtcataaagaaaaaagattgatcaatctctccattagagcaagtttaatagtatagccaactacaggctccaattcatctatagccaatctaatagctcattcatacaatagttacatactacactattaatatctggttccacctatcatacacacacttcgtcttggaatccgtgctacagctggctacaaatatatagcctgctgcccttctctctcctcatttatctgcttaagatatgtttgcaggtggctta

SEQ ID NO: 39626 - DNA, 3608 bp, Oryza sativa
tattaaaaaacggaggaagtatttgtttttttttgcacggagagagtatttcaaagagtccaagggatgcaaatgattttgtaccgtagcagtacaatctctgcttcaaggtcttgaataaacaagcggtaccacgctgtatcgcaattgaatgctactcatctgcattgcatccacgtacgtggagatgagcaaaaaataaataaataaatatagtaaaccgctccatccatggatggcaccacccacaacaagctagcccattaatttcccctgtttttctgtttggtccacaagtagatagggcacactcttgatctggacattcggtagtactaccgtttaattgcctgaattgaattttgcttaattgcctgaattcaattttgcaaatggttggatgtagtagctgtgttattgggcttcttttactctagctatgagcagtagtgtacatctctatgcaaggcattattttatatttcctgaaaaagatttatgcatattacataagtagtatctggacctatatatacatattgcagaggtccctgcaaggagtaattaatcaaggctgttttactcctatcacaattattaaagaatcatcatgaagtgcaagtctgcaggaactaaaaaaaaaggagaaaataaattgatatgtcctcaagatgatcatgtaatggcagtggcaggtatgaccattgaccaactgccttgatagttgataatgatcacacatacacagagggcacaaggagtaaatcataagataatgatctcaccactttctaatctttctaggaaccatgcattaaaaagagccaagcagaagtggggtttaggcattctgtacatgaacattgcacatgtgggttgatccattccatgcattttgattgatgaatcgtgttaattaaccccacaagacaaggcaattaagatcagtgtgtgagccatgaaggtcttaacaaaacacggcttttgtttggttttggggtagctggagtgctggacctctcaccaaacggcctgcacgctttcaatgtctcagggtcagggcgctcttggacagtagagaagaagaggctgtcagtttcagagttaattaattgcaaaattaagtactctacgttgtttgcctaaatctttgatgtatttggcattagctagattgttaattgtcgttttcattctgaaagggttggcaagtgacagcaaatgttgatcaactgaatatgtacttgtagtagctcggcttatacatatcaaaaagaaaaatggaaatcagaaaggaccaagatcctggacatgcattgggttcttgtctagctgctgcttcctacctacgcaagatttgcgtactgttgtgttgtggagtttggacaaaccatgcaaatattattctaacgctgaaactctgcaagtgtgccttgatatgtttgtaattctttaatttctagtggtaggatttggacgaagaagatggcgtagaatcaggagctatacatctactgtagaatctttggtttgagtgattcgtgactatcgatgcaagctaaggtaggtcgtccatctatggtgcgttcatctatatactcctatagtgtagtggtagcagatttccttagcctgcggataactgaatattaattgtgttcgttcagaaattggagagttccttcaggcttcaactgacctaggtaggattcatgcatcgagacgatcaccaaaccgatcgaccaatgatctctgtcaattgcccatccaaacaatgaacggacaacaagttaatttactgtaccttgcatttgcactgcacgtctgcacctagctgaagtctgaattctttcagatatactagctgggttgttctttgcacgatcagtcgggtagcacataagatagctggggttcactcaatggctctcattgcatgcacgccacggcagagcaactgctggctacgagctatcactatcatatgttgtcagtatcccgattcgtattctagtatcttacgatactacgatgttaccaagctgaaacgataccgatcccatctagcatcctaattttcatagtatctcgatcctactattcattactacacgatcctacgaaatcttaggtggtatcccgattctacgatccctacgatactacaaaatactacctacaaaatacgatccctacgatccctacaaagtattatttaaaataacatggtttgaatataatgtaactaaatatgctcaaatttatatgaaaatcagttaaatatatcaaaactaacgtgatttctcttgataaatgtctctatttgcatgacatatatcattactatatttttttatatagaatggctatatataatcaatataaatattaattaaacttaaaaaaaagaaaatctcatagtatcccgatcctacgatacgatattactttgagcaaaacgatactagctaatatcccaatcctaacaaacttacatcataccatcagtgcaagtgttctgaacttctcggcgagttcttgcggccattgccatgaaatgaattcgcagctagctgctatcgcattgggaagagggagcaagatagcagttgcagtttgggcggttgattggttaccttacctatgcatcaccaattcgccatggtcggcaattgggacttgggcggttcatcgatcaatactgctcgaccaccggccggctgctcccgtcacttcaaaatcccttatattagctagctctgctgctagtatttcttttgtcttgaaaaaaaacttttaaagatgatctgaacatatgcatacctttcatattatcatcagaacttgacttttttggacaaatgcaagttcagatttattcccagaagttatactccttgttgctactgctgtcacctcgtgtttctctcgtcttgtcatggcaacaaccaacgctaagtgcaggtgcagcaagcaggaatgggggagactggtttgccggttggtgtcgccgtgtctgcggtgatcggtgaggcgcagtaattggatactaccaaacttgatgggccgagcccgtgtcagcctgtcaggtcttggcctttttacaggcccgcttgcttgcgtgccctgacattcctttcggcccatcaaggcttacatttatagtattaaatagctcaattgtgccattcatgcaaagagtcgatatgtccgagtggttaaggagacagacttgaaatctgttgggcttcgcccgcgcaggttcgaaccctgctgtcgacgcatttttttccccttcccgtagtagggtcttgtgctgttgtccatatttatcccactttattatcttttttttcctttaactagacatgaattccagtcttcgtgtcatttatccttttgttaatattttttccctttaactacacagtaattctactcttgtgccatttatccatgcaatttattttgcttggactatatctccttgtattcttttttttttctatttcacttgcgatagatgtttagagtcttatttttagattttcttttcattcatagaatcttgcatcaaagattcgtgtacgcatagatctaacttgcaa

SEQ ID NO: 39627 - DNA, 1182 bp, Oryza sativa
ctgcggtagccgcctccgccccctcgcttctgtagcgccgtctcgactgatatgcatatttacaaatttatccctcaactcaaaactgcaaagtgtccatgagagtagcatcattcagatttcagagacactgaattaagcacaccaagtccggcatgtgtgtaaatggttttgaatcatgttcaaaaggtatatactactactatcaaatatgtcaaaaacaactacaaaattgtaccgaaaaatcaattatgtttctaggaacctagctactctctgtcattgtgcgcgtctctgttcatgatcagattcagaatcaatcatcactgcggccatccgcattgatttctcaacgacacaagtagctagggggaaaccactgttctagaataagtgcatgcacaataacacgtagctggtcctcttcgtaggcatcccataaaatcgaaacatgtcctagcaaataaatgtaacgatattagaaatatatagaagcagaaaaacatcgatataaataaagagtaattttacgatccttaagagttatttaaatatatcactttatagtgtaaaagttagtaccttttgataccttatactagagctactgaatttttagtgtaaaaaatagtaccttttgatacctcatatatactagagctaccgaattttacaataaaatgaggtaccttctcctataaaatttctcataaatataaagaactgcgaaatttctcataaatatagtggaagaatcttccagcctctgtgccgtgtatacataaacatacaaggcgtgcaaaggaaaaattacaaattttgcaaacatgaaaataatataacaccatgcatgaatatgtagaatttacagattcaaaatcagttccaaggagatgccatgatctgcaatgcaaggggcatcaatttatatagattctaccattctagcacacccatgcatgctcatatattattctccatatatacttcatacaagcttaattaattaagcatataacactttggtgatagtaattaaactcttccataaatatcactccatgaaaaagccacatatatatgcatatggtaaatagaacactgttaaaacctgcaaattacaccccaagttgaaacagcagccgagtaacagtgacagacagcgtgaactacgaggcaaga

SEQ ID NO: 39628 - DNA, 550 bp, Oryza sativa
aaatcgacagctgcggcaaccatcaacacggggggggatcagacttcttaccttgtcaagcccgccttgctcgaagagaaaggagcggaacacctcggtggcgccccagtctttcccccggaacgccgccaccggctcgtgcccaccggactccgccgccgccctctcgaaggtggagcgcaccgcccccagggggttcccgacgaggtcgtactgcggccccaccatcctccctctccctctcctcgctctctctctctctcgttggggagattggggagcggagcaatggcgggagaagtggtgaggtgaggagggagaggagttatagcgggtggggttttcgcgccactgacgggggcgcatcccgtcgttttctccccctcttcccgccaatgcgcgcctctcctggtacttggaccttggtgcgtctattgggcctaatgggccggtctagcattcggcacgggagtgccgcccgtctgcgggtgcgcgctgctgccgggccgagatgcctccggcccatatgacggctgcttattgggtagcg

SEQ ID NO: 39629 - DNA, 587 bp, Oryza sativa
ccgggtgcaggaggtagccgacgagcggcggtgtgcggggacggcgagggccgccgcgcgccgccagctcttgtggcaagggccgcgcggaccacatccctcggacacagacacttcaggatggatcggagcaggaaatcgtccgtcagcacggccgccatcgccgccgccgccggtggctcttcgtcgccttccattgccgagatttagggtttttcttctctctctctctgttttttttttttgaaactaatggagtgagtggtggattggatttctaacgcgacttttttttttaaactaatggagtgagtggtagattggatttctaacgcggcttttttttttaaactaatggagtgagtggtggattggatttctaacgcggcggaccacgccttccaggcttccagttccagccaaggtggggacatggtggtgtatcggatgagtgggttgcacttgcactgtgatttttactacattttatttgttcttttgtttaacaatgttttttttaaatgagtctttacgaaaattgatttcgccaatgctccttttttttctctatgccacgatcatcgact

SEQ ID NO: 39630 - DNA, 531 bp, Oryza sativa
tggtggtggattgttcgctggaatggcggggaatgctgtgccgtttgggggattgatgccatggtgatgggtcgaaatgctggatggggttgagtttgttcaagtggttttgaattggaatctgtggagtttggggggaaatggggaatggggcttcgagtgcgcaaaggttttgcatgtgcggaattgcagctcgaggttttcgctggatttaggcgtagcttctgtgcgcgtgtttgtttagcgattttagcagttcgtgggctggtgccgccgcgtgtttgaatggtttagcgctttatttaccgttacagttgatgtctgcggtttttctggtgatttatgccagtttttagaggtgaatcgctgtgttttgggggaattctagagcccagggttgggtttatgggggcgagattttagctgttggattttaatcctatattgcgagaagcatgggagaactgcgatccgtcgtcagaggtgaacgctttcgaactctgatggttttaatgtggcagatattgtgaa

SEQ ID NO: 39631 - DNA, 1044 bp, Oryza sativa
aatgtagatcaacacataaatgtattcctttatattttagaactgtagagagtgttatattgcttgccattgcggcgcttgatctacttagaattatcatcagaaacaccaattgatatgaaaataagaatggagaaaatattagtaacattattcattctcataatgaattcatgacttacccaatacattaaatgaatctctgctctccgcgactgcaactgaaaatgctaataccagcacaaaagcaaagctccttatggaacacattttgcctgcttgcagaattgcagattagagaaacagaagctggaaagttaaaactccaaagtatccaactgaaagttgaagctgtgtgcatcagacgaccagaatgcatctcagaggtcaatcatgcagaagttttccccaaaatggttgactagacagatttaccctccggttgcttaactaaaatttctccatatggccaaaagaaagcctcaaatagatcccttcctcctctctcacattccaaatctagtgttagatcttacaggaacgcttcagaatcccaatacagtggatttcagcccatctcaagaccaatttttgcacaaaaaaaatcaacaaactcggtaacgctggattagatttctagattagatctcacacttccacaaacaatgcatacacgagttgcgcaccaaatcagccagattcagcttccccaccgaaacaaacgctagaaagatccaaaatttacttccttttcatcactacagacgctcgaattcgtaaagcataaaactttctcttccgctactaacctaccttggttcgtgggagatgaaatcaacagctcatgatactcaaatcgaaccccccatggttacggaatcgaatcgggcagagaaaatcaagaaacagcgagtggttgctaagaataagctaatatggatcaaggaatcaagcatgggctcaccttgttgcttcttcgctctctgtctgctttgttcttggaacggggtggagaagtcaggagagcaagggaatcttcttgaa

SEQ ID NO: 39632 - DNA, 871 bp, Oryza sativa
tgcctgcaggtcgactctagaggatcccccgtgtatacataaacatacaaggcgtgcaaaggaaaaattacaaattttgcaaacatgaaaataatataacaccatgcatgaatatgtagaatttacagattcaaaatcagttccaaggagatgccatgatctgcaatgcaaggggcatcaatttatatagattctaccattctagcacacccatgcatgctcatatattattctccatatatacttcatacaagcttaattaattaagcatataacactttggtgatagtaattaaactcttccataaatatcactccatgaaaaagccacatatatatgcatatggtaaatagaacactgttaaaacctgcaaattacaccccaagttgaaacagcagccgagtaacagtgacagacagcgtgaactacgaggcaagaagaggagaggctacgccgccttctgcgccacggcggcgctagagccgtggcgccgggcgccggcgccggcggccaccgacgagatggcgctcctcaccgtcatggcgacgcggcagttcttgatggccctgaagctctcgtgccgcaccctgaagcacgccgtcgacgccgccatgtcgtcgtcgccgccgtcgtcgtcatcgtcgtcgtcgtccccgaacgcgcggccgccgccgccgtgcccctgcaggctcctcatcgacgagcacgtcggcgactgcgtgctcctgaacgacagcgagtacgacgagtagaacgaggccgacgacgacgacgacgaggtggaggaggcgcaggacgacgtcggcgagcccgacaccggccggccgcctctccgcagcctgatcttgggcagcacgaacaacctgagga

SEQ ID NO: 39633 - DNA, 620 bp, Oryza sativa
tctctatttcatgttctgtttacaatgagtaaacaatatacatatttaggaatgtgctagcaaatcatgcattaggatatatttcctcaatatgcatcaatacaatatcctgctaagttatatacaaatctcctttggatacttaagcacatacaggagcacactataaagtgctccatccaaggtaaaatattagaatttgatcgaacttcggaaatagttacataatatattattttattatgtttatagtactatagtatgttaaaaggaagtgtcaaaattcttgcactggggaccagaaaaatcaaagctaacttcagaaaaatcaaagttaagaaagtgtttcgttataggatgaataaataagaaatttttggggaaaaagacgtgctcagatgcttgtttttctgatatactgcatttttatttaaggtatctatcacaagggaatcttagggatgcaaatttgctcatggacgagctgaaggatcaactaaaatctgctgacttggaaatccccaaaacagatttaattcagttcatcaagtatctcttaccgacgtaagtctttcctgtctttcagtttgcattatttttatgtttcttttccacatttt

SEQ ID NO: 39634 - DNA, 1074 bp, Oryza sativa
gtcccaaattataaagactatacttttttacacggtcttcaataacatacttttaccaatattttatttcattctataatcccaacaaatatgaaattagcaacttcaaaatatgaatctaccgatttaaattttcttaaaaaggggatgccctataatttgggacggagggagtactctgtccattccaaaatatacaacattgttgattttttatataattttttaccattcgtcttatttaaagaatttaatataaatacgtaaaattataagataacattatagtttcttttgataataagacatgtcaaaacaaaacaaaacaatgaaatttttatatatattttttataaaatgaactgtcaaatattatgttaaaagtggacggcgtcgtacattttgggacatagcgagtatcagtactactgtttgtgtgtgtacaattgtcaataatttaattgaaattaatctatatagttctctgttctgtcttctgtggcctaattacataatttacaaattaatcagtgcacaaaggacatcaacatgctacatgttcttgagccattttgtgaagacgtcgggagccccgggatccataacaatgaagcgacagatggaatgattaggctcatgctggagtctgcttctgctgctaatgatgacattattgaattcaagtgtagagttgagtgcataaaaacaatacaacattactgcatcccattgaattccaatttatctgttttcccattttccttggatagcacttgacctaagaaagtctaattttgcttatttactgcagaaagcttcttatgtggttttacaaatatgggcaaatgataaaactgtaagggagagtcttggtgtgcacaaggtatttctactatggtactacgtatacatatatttggatttccatccaccagtagcaaagtgcatatattttgtggttacagtaaatttgggtggctttccgcatgaaattaggccgattatcatattacaaattctgcattgtccttacaaaaggctagtcattctttgaatccttttatatcagaataa

SEQ ID NO: 39635 - DNA, 546 bp, Oryza sativa
  unsure (1)..(546): unsure at all n locations
tacaaatattgagtaaaatacatatatgtaaaattaggaattgtagaatcaaattcatatggaaaataaactaaaatcgggataaatagaaaaatacactgttcattatggcgtaggtgttcgatgtggtccctagccttccccctcctctcccacctctgtcctagcacgccccgagccnccgtcccgcgcgccgtcatcacgtcgccaccgtcaccgcgcgtagccacctcgcgccgttcgcccgccgcgccgccgtcgccatcgtcgccgtcggcctcgcgccccgtgccgccgcctcgagccccgcgccgccgcctcgcgctccgcgccgccgctgccacgctgtcgccgcgccacgcgcccgtcccgtcgccgcgccatcatcctgtcaccgtcgcatcgccgtcccgcgccgngcccgccgccatcgccatcgccgccttgcgccccgcgctcgcacgtcgcgtcgccgcgtcgagccccgcgccacctgtcacaccgncgttccgagccccacgccgctatcgtgtcgccgcccgcgcg

SEQ ID NO: 39636 - DNA, 1187 bp, Oryza sativa
aagtttagggaccggtgatgaactttactctttttctatttcgaatagtgacccaactgtagcacacagcaccttgcatgtttgcctctggaagcgtgacgcctgaccggccaaactaccagccacaggtccattattactactttgtacgcctttgtttgtcttgacaataatccaaaaatgcatgcttgcaatcatcctttcgcttatctacatgcttttttaaatcgctcattactatatatatcagtaaagaatgtggtcaaaagcaaatactataaaacatttgtacagatccttctatctataacggcctctaacatacctagaaatagcgggccattacagggaagtcatctcaatcaagccgaaaaagtgcccgattgagatatggtcgcacagacatattagatgggcatgaaacttaagcccgtcacggatgacacctatcagtgacgggccgtagtttaggcccgattgagatacattccatatctcaaacgggcttgaagttggggcccgtcacagatgaccatcatccgtgacgggcaccaactttaggcccgactgagataacattccatatctcaaacgggtcttgagttggggcctgtcacagatgacaatcatctgtgacgtgcaccaacttgaggcccatcacagatgactcatcagtgacgggctatatactaatccccggttgacatgacttaatctctatcgggcattaattaaagcccgtcaccaatgagtatttttccattttttatatgaaatgtttatatttgtaagttgaactatagcaaaataattaacttggagtataataatgtattttatgagtcaaaataattttacgggtagtaaatgatatcaaatggaaaagtcatcaacaacaaagttgtataactcatcaagatctataacttctattttggtcatttttctatataacattttttgaatagtttgacttttgaacttgaaaatatgacaacttcaaacaacaatttcaaatactaaatgatttcaactgaaaaaattatcaacaacaaacttaaataactcatccagatctataacttttattttggtcatttttctatataacatttttttgaaccgtttgaattttgaatttaaaaataagataacttcaaacaacattttcaaatgctaaatgattt

SEQ ID NO: 39637 - DNA, 1714 bp, Oryza sativa
taattgatgattggcgaccatggtatgctgctggacaagttgccgggtaagaagtaaatatttccgttgacagtcaatttcaagagtgattataatttcagtggatatattgcactttctagtgtgagctactgcattttgtagcatgagatatgtttggagtaaattttggtgtattcagtgccttcataaaaatcatgtgatggaatcccaaattaacgtcaaaaattatgataaccccattaccaagcaaatatcatgcaaaacacgaatatttctagtattaatttggtgtctactggtacctccgaaacagaacacaatgccacaaattagacgattttggttagccgttaaggaaataccattgtttctacagttaacctaccatgaggtgcaaatatattagcactagaaataattatactccatcgcattataaatttgaacaagcttgatgaagtttgactcccaaaataacttacaatatgaaacaaagggagtatctttcaatagcttcttaacaatcgtaaaaattaataaatgtgaagattatcatacttataactaataagttctgacatatcatgaaggccagttgggaaagtggctgatgagtggaatatgtatttacagttattttttaatacaatagaatttattctgttctttattacaatgaagctacaaccaactattatagaattcaaaccggacgaattactgcgaattagaaaattatggtttgactaaaaacaagaaaactactaacaatatcacctcaaaagacgaaatttctctcccaacggctcacaagttgtagatagtccttgtcttcctcagaccacaaaagcatctttgaattagcgtccaatatttcactcccaacatcgctggcaatatatatatgcttttcctatatttggcgcatgttgatattgctatctcttattttatgcaacataaatattccaattcactacatccgagctgcttgggacatctgccgatatgcattgcggccattgcctatatcttcgcctaatatggttactttgttttatagattcacgagaagctatgcgaataataacctgatatatgcaactgtgaaggtgtgtttttcatacatgcaagttattagtatttttacatttttgtaatattgtacttattgagcttttgcaaaaaaaattgacaagttgctttttcaagattatctccatgtccaaaatatttacacttgtgactgctggtaataataagagatttataaccttcacttatgtgtacaccaatacttcagggtgctgggcacactgctccagagtataaacctaaggagtgtctcgagatgtttgctagatggatttcaggcaatactctctgatgtatattcctcaatcagatcaagtcaactatgaaaacatgagtaaatgataacatcagagatatgaagaaaaacatttgctgcatgtaatattttggaaaaccttaagaactctcactagtacatagatatctatgacggagaccagtggtccataaaaggggcattcatctgtgttgggccgaaaataatcccgttgaagattgggcttcacggccatgcccgtcaccgttgtcccctcatcggtgatgggattcagttgtggcccgacacaggtcatctatgatgggcttcacgcatgcaatccagcatacatgaagatat

SEQ ID NO: 39638 - DNA, 666 bp, Oryza sativa
  unsure (1)..(666): unsure at all n locations
gcacatcggctgctgtgtggggcccatcagatcatgcggggcgcccttgtcattcgttgtttaatcgttgaggacttccgggttcccgttcacatcaggaaaatggtacccgggtcagttcagagtggttggaccagctttgaccgggataagaggctatgaagcccttcatcattatgatgggacgggatggagcatgccgcacaccgcttgacacactgacaaggcgagggtacacaatcgttgtcccatcggtcattcgaccggtcagatgcgcagcatgccgcattaaatacggcatggggtggntgcatagnccgctttaaatgtggttaggtgggcgttaggtgtgcccacctaaccctttacacgtgggctgatacgtagagggggtcgggaaagctcgactccacgctcggacggggcagccgccgcttcaccctaggctcgacccccctcggggggagccacgtgggtttgtgggcggcctcctccctctagctgggagggggcagctgtcacaccccgaagttctcctccaagccaaatttaatttgtaaacaaccccaagaaaatgcaggtgcaaatcaagagaaaaccctaagaaagtaatgcaaataataatcggattgggcatgtggaatttttcttgagttctacatgtca

SEQ ID NO: 39639 - DNA, 1727 bp, Oryza sativa
ccactctgtattaagatatcaaaacaggcaaaatatattaaacaacaagtataatatactctaatgcaataagatcctaacataaagggcagatttagcataacaatcaaacatataaggtaaaatagctaaatcagataagatcggctgaaactccgatgctatctccttcaataattataaaacaagctagatattataattatagatcggatgcagcattaagcataaagataaatataagatctagacaaggtgatcaaaacctctaagagatggtagatatgctatataatctagattaatgatcttcgaatccaattctttgtcgaatccacttcgattcaaatgccgaacctggttcataacttaccaaatttggtcgttaacaattagatgaaccatactgtcaaactcgtgacataataatatgaccttgataggtgccaacaatccttgaaatacaagatttgctaacttctcatcacttaggctcaaactaagataaaatgagtttaaataactgttatctatgatcattgaactacaaaaacgacttttctgtacgaagacccctataggttacacatggatcttaattggtcacatctgcaaaaattcgatctctattttcgcatacggctctttaagagacactaataccaaaatctatttttgcaagtgggcctcttaatgggccacatgccaaaatgaatctattttcgccggcctcttaagtgatccctgtgcgaaaatacccctctccttcacatattttttttctcccctcctttctcttttccctctaggccacttcattttttttcacctcccatcctctctctcttccactgctctcacctcttctctctttgtttctcctctctctctccctctcctctcctctcctctgctccaagcagccaggagtaggtggcggctcgggaccactaacgacgattggcagatcatatcctatgataaatctattatataattaaagcaatagaaaaatgtgtctccacgttcgctctcatggcctagaaattctcacattaatcggagaaaaagaaaaggcagagtccatatagaaatacaatttagaaatagctgaaattcgaaattaaaaaataagaaatattagaagagtagactagagttcatatagaaatacaatttagaaatagtttgaaattcggaattaaaaaataagcaatattagaagaggagactagagtccatatagaaaatacaattaggaaataactgaaattcggaattaaaaaataaggaatattagaagaggagactagagtccatatagaaatacaattaggaaataactgaaattcgtaattaaaaataaggaatattagaagtagagtatagagtccatatagaaatacaattaggaaataactgaaatttggaattgaaaaaaaggaatattataagtagagtatagagtccatatagaaatacaattaagaaaaaaaatagaaattcggaattaaaaaataaggaatattaaaagtagagtatagagtctatataggaatttaaaactaactaaaatttagaataaacataataaaattaaaagtagagtttagagtacgtataaaaatacaatttacaaataactaaaatttgaaattaagaaaaacatgggaagaagagtttaaggtcaatataggaatacaatttagaagtaactgaaattcgaa

SEQ ID NO: 39640 - DNA, 2743 bp, Oryza sativa
aatattgtttttcataattaacatgatgcataccaacaaaaataatttatgaaaaaaatattgtaactgctagtatgcatttatctggcatgtgtagcgtcctccaaccggatgggagtagaaaggcaataatgaaaagagtgttaaaaattcttaagaatataataactgtatgatgcatcattactgatttacttactatatacacataatatcaaacttaatattgtatttggaaactcttttatatggtacgacacaataagcaagaaaacttgaaaatggccatatagtcagctacaatgggcaaataaagaatttactcattttaattcagagcttcttagattacaggattaacttaattcacaggttggtctgtatagcttgagagaaattgttgcacatatatataggtttggaaactagaattgcaaaatctaaattttgtctacaagcgccaaatctagaatagcaaattctgcaaacaaacccaattaaggtgaacaaaggataaattttcattggaagaaagtctaacaataaattttaatggacatggcagtaaagcacgagctacatgcaaaaacaacttgtctcaagcagtcgatatagcgctgctataaagcctctatttccacagatggttgcatgtagctggccgcgtgtgaatgcctttttcgtaggtgtacacctgtgatagaccttttgcacatgccttcttatattgttatgttgtgccttgtgcgggtattgtgtttgctatcgaaggaaagtaacatgactttctcactggaaaattcagcatttgaatagaattatacattggggataatttgacacgaaggactactatgtctgatgtatacacgaacttttgttcccctagagaacataaatcacacttttattttattataaaacttttttttctttttatgatgtttatatttatgaaaaagtcaagtttactccctcggactatttcgtgaaagtagtaaacaccctaaactatctgcagctcatttcacactcctaacgagtgaaattagttcagtttacttcgtaacgatatttctcttttttccctcttctctctacataccgaaatagatgcagtacagcttatgtcttaacattttttttatacttttctatcactgtttacatatgttggaaccacctaatactgaactaaacacagagattttaaagatcacgcaaacattcatgaaaagattttgaaaataattttaacttttgataatggtttcatatgcagcttataacttttcagattaaaatacatcttgtataaagaggaaccaaaacataaattaatcttattaagaagtaaagtgaaacattttcaattgtattaaagtgaggcaaaaaatagtttagatgattaagtgatccattgaagtagattaggggagtaaattggacaattttcattatttgttacatctatataaaatttgcagcatttcaaacagtaccagaatatttttgttgcagaattcgctacctcctattagctgctagttactaaatggtaaatgtggtacctcctgatacatccaatagggtgaaatctatctatctatacctatactaatcgggcactttttagaagctctcacgttaatcagaaagatctaaccgttgatttgatggattgtaagatcataaccgtagattaattaatataacaaccgtggattattaatcgtagtttaggccaccacctaatctatcttgatgtcgaaccaatatctaacatgatctcaggtgatgtagttagcaccttggcctagcttgcatatagctgacggctgcaccagttagttatacaattaatcaattgattgccacgccgtaccatcaatctagcgtttgtatttttagggctgtggcaacagcaatattgacgctacctaccacgccgtagtcatccgagaacatacggaacttcagcgagcaatccaatgacgacatcgattcccatcggcaaaggcaacagcatgcgtgtgaacggatcgagtctgatggccggcgacagcgattgcagaagccacgttttcttttttaggtaaagatcagtcgaatcccatctagcttgagcaatccagctaaaccgtgtgattgtgtgtatatgcatgtatctaggcaacggaccgagagtcatcggagatataagtagcagttaacaagctatcaagcaaatttgatcaaatcatactcatgcatatgatgcatgccgcgaagaacagggattaaactcacgtatttgacaatgccaatttgattcaaaactgagatttaacgagagattatatcttcagtacacatgatttgatggatgcagggagtttgtacaccaatttgcagagataagaaggaaaggctggtatcagattaattccatggagcaaatcaacgactgaagaaagaaagggaaatagcagcttagtgtatatcgatctcccaagaaagcagatgggcaaaagcaatggccggccacaactcgatatgggaatgactgaagaaagggaaatagcatgctttcaggtttgcactgaacttgattgttattatttgttaaatttttgtgcaaaataaatacatttagaaatatgtagtcaaattatataaaaattaattagatgccgataaatgtctttcctaagtacacaatatagttaaatcatgcgtattgcgtgctataatatatgatgca

SEQ ID NO: 39641 - DNA, 676 bp, Oryza sativa
aatccaagaggtctaatgtcctgatgcagccttgaacgacgccgacgtagacgatacaattgcctggaccggcggaacattggacttatcccttcgccggagatcgaacaccgatgcagctccacgtcatgtgccaagtcccgccggacgataaaacaaagtacaaacgtaaagtggcaatgcgccgaattgtattgatcatgaagatagattacatagaccccgggtgtacatatttatacccatgagttgatacaagtccttgtcggacaagaaaaaaacttttctaaagataaaaggaaactaacaaactattcctaattaatagataacttgccatgccgcattctctttgaactggtctcttttggataagcttactttagtagatcaatttccttaaccgaatatagcatgaatccaacaactgacgacttggcaactctcatcggctaatctcaggacttcaaagccgatgctgactctaagccgatgactactccgagcttaccaaatttcaccattaacacatccccccctagttctggagtacgagaattcatgcttcaaaatttcttgtcttgataactccaaaaccaatcttcctttgcttcttgtaatcggctgtcatgagccgatactgatgtgctccaccatgttgaaactgatgcgcttg

SEQ ID NO: 39642 - DNA, 695 bp, Oryza sativa
gaaggtagatgaaagtagctagtttctattttcttgggttgcacttaaaaattataaatagattgctcacagaaaataggagaagatgggctcgataggacattgtttgaatttagaagacctaaactgagaggataaattctggaaaaattatatttattcatgattttcccctatacacttccatgcagttaaatgcacattttagttatgtatggttttagctgattaagaattatatttagtctattatttgacaagtttgacttgtttatttaaggtatcaaatttagttattaaattgtaccaaaattacagtgagttgtatatattaagtagagcttacataaattttcccatcattttatcttgcacgaattattttagataattagcgatgcttatctcttttatgtgtttcccttttcctaaatgcatgtaaatgcttataaaagttttatttggactcttcttaacctgaggtgatgttgatatggtagaattacagtttaccttacataggtcgtaagctccttacctataagcataagtttactttaatattaaattaagaggatgcttatagagatgattaagatagaatataccctatatgagttaatttatttgttcactttcatgttcatgacatgtcttcagatggatgaccaaattagttttgtgaggcttgacat

SEQ ID NO: 39643 - DNA, 614 bp, Oryza sativa
tttgtttataaccagactgagccacaaactaaaccttacccactagacatgtggaagtacggtagtgctttgcaacagaggcccgaagaccggcccttatatggccgaggtgctactatcaaaaccatgcaccccgagcccagcctaaaaccattttggggattttgaatgagggggaggtgtgaatccaattccacaataatccaacaattccatagtgtccaggtgataagagtattcccaaggtctagagttgtaaaaccacctaatgttgcctaattaaccagcgaagcagctacctaaaatcatactagtggtaccatgagtggagtgtccactagttggggttttgtttaatctagggtgaacaaggtaataataacaataacaataataaggtcataacaaaggtaactaggcatggctagataaaaacagtgataacgcgggaatttaagaaaagcgataatgcaataatttaaatcaaaataattttataaactgggattcaatatgctcaaggataatgtgacttgccttgctcgctttcccaaacgtcggcttcaacctccacgaagagcggatcttccgaagctgcagcgtctacacgacca

SEQ ID NO: 39644 - DNA, 745 bp, Oryza sativa
agagatagttttcccgctaggcgccacgacggaacgggcctacaatgtggtagggaaaaatcaagaaacatgcacactttagctccttctgggccccatacataagaaacgatagctttattacctcaaattcgtacaacatgcatgcaaactcaattttcatgcttaaatgcaataatattacaagtaaacgaagggtctatgattacgtgatgatcaatttgaaaattttaatttgtgttaaacgatgatccatataaaacgaatggagtattttatactagttggtccattatgcggcaaagccgcgtctattttctagtgttgacctatcttcaggggagtcctagagaagcgtcagaattgtcggtgctctctcctcgcttgtactccgcggatgcttcttttaataaagtaagtgttcgggattttcttttttatttaatttactacttaagtgagatatatattcctatcgttgcgtgtttgtcgcttagtatttatgttgagtgctttagtactaggactttgtaggaaaaaggaagttcctatacgaggctagagtaatcaataacttaggtgtgttgtctaggttagcgattacctttgtttgttgtgtgctctctgaaaagtgaggtaggtagtaggtgatgatagcgctgttcatcctttgtatccctccatatttggacacatcatagagctacatgccggactcagcttggtagactggggggagtcggtg

SEQ ID NO: 39645 - DNA, 998 bp, Oryza sativa
atccgaattctttttgctatttgaaatattggaactttgaaatttgataagaccatttataacactaactaaatacccatgcgttgcaatggaatttaagaaggatgtttttattctaacaagaaaggtagcccacgcgaatgagtgggcatgtatcgtaagttgtatttgagaaacttattgaagcggaatttaactgagtaacatttgcatgccatgcttcaaaagaactatttgtttcataaattttctttttggcattgcttagataatttttcaaacctattagagttgttccaattatctaaggtaattattatgcaatggttattgcaatacaataattgtcaggcttagataatttttcaaacctattagagttgttccaattatctaaagtaattattatgcagtggttattgcaatacaataaatgtcagtaaagtagagctcatacaataaattcatgtttctatattgttctatgctgatacaattagtatggtgttcaactgatcatgtttatatattcaacatgttgtctatatgaaatttaggcaagatggggtacacattatgacgtaaaaaaatgatatcatttaaagattttttctttaatttattagtgtcttcatagatcatatatatactttagatgctatgatcattttaagattatttatttatctccaaaaagatcatttattgataaatgcatgaagatcaaattgtataggtaaatagcccccatatacatgttgagagaaattaattaacttgacaggaagtcgttatatgtctatcaggatatataagtataggtctaccagctttattaaaaaataggatttttttaaaaaaatataataacaacctgttgacgaaaaaatcgaacacaccggcctgggagatctgcttggctccaatgcaggtccaaaggttgttgagatgcgggcgagccagtcagtttgatcctgcaactgacaagatatgcaaat

SEQ ID NO: 39646 - DNA, 638 bp, Oryza sativa
caaataagacaggcaattaaagttgggcacggaaacttatggttacgcttattttgggacggaggtagtattatctgccagagaaaggatcgataatgatgtatgtgggtttttttttcacatcaatcaagtaatttatggatgataatgatgtatgtggatttatttttttaattttcacatcaatcagtaatttatggatgactactgactctttcatcgcaattgtttggtagtccattgtcccatatcagtttgtaagctagtaacgccaagcactctgtgctagtgcttaatgctagcatcttccaatcgacagaccaatctcagaaaggtccaaatgaatgcaacctggttcattatttctgcaaatgtaatgttttgaacacaaagtaacaacctaactaaattccacctcactgctgtttaatttttaacacacatatatatccatcatttttataatatttaacatatacttatctatgtgcgggatatattaatatttcatctacaatctcatacatagtctactaactatatgtctcttttaacatagtttgacaaaccaattttatttaattcaatttggtgttaataactaatatattttttatttttagcttgattattaaaaa

SEQ ID NO: 39647 - DNA, 752 bp, Oryza sativa
ctaataaattccagcaagctagtccttaagtcctaaccatatgggcatcaaagtaggcattaatcatgtataaataggcacctcattggcttccatggcagccaggagatcattctcaaatctcatcataatttgaggtaaattttagcatttagaagaataaacacaagcctatactcaatacatatccacacgccgctcatgaccgtgagcacggctaattgattagtttttactctgcagagtttgtacactttacccacatgatgcaaaataataatcatacaagagcatggcacgcgatacataagtacccaatttattacccacaacaaagcttttccaaaatttatgatttagccttacaccagcacgatacgtgttactccatcctaagccatacacgttatatgacctagaaccgttaagtttaagtggtgggcccacgccttaaacttaacgccatggtggcgaacacaacgggaccccacccacgtggcacaataccattgtattagatagagttagtcacctaaactaccacgtcgaggtaaataggaagttcctctgagttatccgaactcatacacaccggcctaccagaatgtaaggctgaaccataaataatttactaagcttgggctatcccatactagcacatgtggttgtactgtatacgaaatgaactgactcaacgaaatgaactgacattgagtgaaagtccttaggtcggtttgggcgcactctccccc

SEQ ID NO: 39648 - DNA, 789 bp, Oryza sativa
caagcaactagtactcgttgtacaacaaatttcaaacagcgcgtgaactctgaaaaaaatacattaagcggtagcgttaattcacgtgttgcgcgcggaatattagttcgagcgccgcacaacgcactctccttccgattttcctcttttttaccaccccacctttactccgcatcccaccttttctcagttcgcgcgttttttcatttttttaccaccccgcctttcgtgttttttttctctttaacatctcttatccatgcttcatcataggacccaataaaatattaaccatccagattttttttccttctctctaggttttttgttttcacgttttagtaaaatatttaccatttagtttttcattttcagtttttctagtgtatccccacgtttcaaaaataacgaatttattgtgttgagttttccatttattcctagagtaacaaatttactcgaatgaataccctcttctaaagtaacaaatttacttgcacgaatacccccatataatacgtgcaccattcctaaatgattataaaagaattactaccagcttataacgctagttattcatttaccagtgttataaatattatttaaactagcatggtggcccgcgcagattacgcggctagcatcattatattttctctcatataatagcatatatgttttctcattatattatttaaatatattaaaatgacagcataattttaaattttgcaataactttacaaaactactcatgtgtaatatccatattgtattttatatacgtgt

SEQ ID NO: 39649 - DNA, 2058 bp, Oryza sativa
  unsure (1)..(2058): unsure at all n locations
ttaggctccgggggtgggggggcggcaccatatactaagttttatgcggagtcatgtctcatatacagaaggtattccggataaggaagaagaggcagagttctatatgaaaactacaaggactactcatatcatatccatacttgtctctctcgttctacttagacaaagagatatctgtgaatataaatacaagaccccctaggagaaaaggggacacagtcagtcataatagacaccaatacccattgccaaacattaacatcaaaagataagcctaaacatacccaatctaatattacaaaggccgacaagagggatctagcgttatctctaatctcgccaagttcatattcagaaggaagactaccccatcatcgactacgcgtgggttccataccgccaagtggacgatgactagataggttatcctaaattgtacttgtgtgatcctgatgaataagaggaacaccggcttcggccaacaggagtagagccattaccttacaaataaggggcccgaacttatataaaaatccctattcccatcttttttacctcaatctcacgcataccccggtaccaacaatcctcatactctgcaaataccgtagtcgtcatctacttagtcaacagaaatacataaatttcttagaaattttcaaattgatttggtgctcacccaaggaatattgcatatctgcaacaaaaagggtgaactttagcgtgtttcaaactttcaatcacaatattttagctgtttataactcaccaaagcaatcactatattttagttgattatagtgaacaataatcccgtatactatttaggaactaaccaagagataattctcacaagataaatctgaattactcaggaagaatattatactgaaatcagagtataaacagaataaaagaactgagagaagattaccgacaactccggaattcttccgacttcttctactctactctcttcctattctattacacaatatagtataatagagcctcttataattcagctcaagcttggaagtgtgtgtagtgagggagtgaggtccatttatagggcagttatgacggttgtgagaaggggaaatgtccgaactaccccgcaaccgtcatcagggagtgatctggagcgtccatgccaaaacctgngatcaacggcgatcaccagtgttcggacgaactgtcacgcccggaatttctatccaaaattccaaacgcttacatgtgcgtgaaccctcgtccaggaatcagccgaggcacacaataacaaattgataatagagtaccattattactctaattaaataagcgaataaaatgtcattacagaggtagatagttcctctcaatcaatagagatctaagcagcggaaaaataagataaacggcgcagacgactccactccacaggcagcttgaccagggctacacctaatcctccacaccatcagcatcattgtagaactctttctctgatgaatgattgcaagggggagttttttgacctacctcagccaagccaccccaacaaaatatgccaggtgcacaaggataacaaaaggatggccatagtaggggtttcattttgcataaaccagcatttaataaaacatttcagaatttaataaaacagttaagtaatagacaatattaatccaacgctatacaacataccctgttgtataggccaaccattctgaacaaccatcccggctgcacagttctatctccaaaccaggaatataccattccaaaccaggagctaatcaaattattaccaattaaagcaccttttattatgatgagaagggtgagactaatcacgaaagacattgttagacccgcccataaccgcgggcacggatattcgaatagttttactctgatcaggagtgtaccactgtacccacaagacacagccccacatcatgtcaccatgtgctcaatacctccacggtacctcggaaaggagctgttacattacccctcgtacaacacaacccactacagtgcacctttcctggatcataatcaccccct

SEQ ID NO: 39650 - DNA, 611 bp, Oryza sativa
aagatttggcagataaaagttcctatgaagatcaggatcttcctttggcttttgttgaaagatagtgttctaaccaaagacaatttaaagaaaaggggttggaaaaaaggaaatgaaacatgtcagttctgtgataaaaaatagtcaattcaacacttatttttttattgccccatgacaaggcttacttggaatgtggtggcatgtacttttggtttgcaacctgtgaaaaacattcaatatgctttgggttgggggtttggatccagaaatgggataaagtaacaaaatacttaatgttggtggggatagcagctgtgcggtggtctgtttggaagacaagaaataaagcttgtttgagcggttgttgccataggaccccactgaaattttatatcaagcgtgctcatggatgcatgattgggttattctgcagagacaggtgggaaatcaagaaaagctgcgatggggaatccaattgctaaagcaggtcacaaatgaagtgttcaattcaagacatggatggcgcgcccttcagaaagattacaagcagctgagcggattagaagagaggagagaaatatccaagttttgaacaaggacacatttgt

SEQ ID NO: 39651 - DNA, 786 bp, Oryza sativa
atataaatatataaattagtttatctatacatgtaggggactccatgtaagtttttgccctcggccttaaaccccaggaccggtcctgttcaccggcgccatattctccgcgcgcgatccgagttcatggcggcctcggcgtgtgcaaacagaggatcctttggagctagctgggccctgctggtagctttagcgtgcgatttctggagagaaatagatggattggttggactagttggtgtggtgtgtggacagtgtggtgtactgttcttgtgggacaaaagaagcagaaagaagagcaaaaatgttatcgcttgatactttgatgactcgtctagggtgaggtgagtgtcggtaattacagtgccttctacaaacaatattatccttttggatttggaggattctgaaggtcaaggtgctggtgcttgagacgtcagctccatccgaactgggataaaggcccttcaaactttcaacttttccattacatcgaacttctacacacgtaaacttctaacttttccatcacatcattccaatttcttcaaacttccaatttagagcgtggaactaaacacattctcaagggtatatccgcttgtttttgcatgtcacttaaaaaatcatcaaaagatttaaaaaagatttatatgatagatcaatatgtgatagtgtcactttatagattggcatattcaaattccacttatacaagtagaagcgaaaataataaatctgactatgaaaagaccgagtaattcacaatcaattttttaagtgtat

SEQ ID NO: 39652 - DNA, 932 bp, Oryza sativa
  unsure (1)..(932): unsure at all n locations
ccgtagtgtgggggatttggtgatataagcgttgtttcttttgtgatttatatattggctgcggaactgtgggtctgtggctgctatgccttgcgtcattgcttacgcgagggccatttgtttgttctttccacgcaggcacgtgcacctctggttctatggaagtgtgaattcaccattcttgagagctacaggggagctacttttttccaaagaaaaaaaatggtatatctcggcatctttttaaggcctataaattttctctcatcagtggtagttgcaaagtttgaatgttatatttacgtgtttctccttacatttttatacattttaactgaagttgacagaagcctagctaacggtaataacataaaggaagaaaaatagttgtgtgatgcaactcacgtaatctatggcaattcttaggatcaatcgttggtcattggcaaaagatagaatatctgtgagaatgttattgtttcattacatatttgaccgttttgactgatttaattagtaccaaaatatgaaacanaattatgaaaaaatatttcatagaaagctatttcatagaatgtgagaaactctgtagaaatttatttgagcataagtgatttgtcatttttaattatatgcatgcaaatacaatgcataaaaaaaaaccaagaataagccacagataatctgtcaaggttatggataccatataccctatagtagttgactaaatcttggcagaacccaccacataccatgtcttatacggatactgacctctgatatgganggagttccggatagaagaaagacacccataactctgcatggaaacgacaatgactactcggattgtatccatattggtttccctagttctacttagacaagggaacacctatgggtataaatacaagaccccataggaggagagg

SEQ ID NO: 39653 - DNA, 573 bp, Oryza sativa
attgctacatagatgtcctcacatagcaagaagctcctaacctgcttggtatgtcttctattgagctcacccatgctattcatgttttctgtgtctttttgatacaagctattttggtggaaaccaagatggaagggttagctactactgtacaactgttttgaaagacactgactttgagttgattctatgtcagcagcacccccattcaattccctgctaatcccttcaaaacattcagaggactgctgaaaattgcgcacgcaattgaattgataagacttgaagatcctcaagttattcttcagccattattatgttatgatgctttttttgccgcataagtatgatgaaatgagaatcttatagaggcgacctccttgctcccggtttcttggatgattggggaggcgatccatggagtcctctgagtgcatccatggtgacgcccccacccccagggggttgggaattctcctctggtgaccgttttcgtgatgaaatcttctccacgttctctttcccggtgcacttttctcggttttttctctcggcggccttttcgtcttgtgg

SEQ ID NO: 39654 - DNA, 574 bp, Oryza sativa
tgatcagcagaaagtgctgtggcccctatggacaggagtgaaaacggccagaaataaccggaaacgatatttttctatgactttacataaacggttgaaaacagttgagaaatttttatatttatggatattatttagtgtcaacttcaatacatagaaattagaaaaattaaattttggataccgtaatatcggtaaaaatattattattatattagttttatggagtggtacgttcggaaatttccaaaccgatttttgtcggggaaaaagtaaatagagagagcatagggctcatcgatgagctctgctgtattaggcccatgagaaagcccattcaacacacaccgcaggagcaacagcgcatggcaggcaccatcctaggcccagctaatctctcgtcatcttttctggggtggaataagttaatctcaggtcctttaactgggcaacaaatccgattttagtccttcacccggaaaaccagatccaccggtcccttcactatcaaacccgagaaaatataggcccaatggaagttgggataaccgtttaacctgactgggcccctact

SEQ ID NO: 39655 - DNA, 662 bp, Oryza sativa
agtcgtgaatagaatatccatctttagcctgcttaatgggtgctgaatagggtaggatcagggtttccaccgatcttacctgaattaactaaacctgccttatatgctttaatgacatgttaaatttgccctttaaggtaagatcctaatgcatttaagtaaaataggccttcgtttgaaaaaatctgcttaccttaatatcttaaaaaaaagttgtatttgagtactagccgatacatgctagatctatttgatcagctatgctataaacaaaaaagtcttgttggtggtatatattcaatttaagtgatttatactgtcttggcatggcgactgatctatcccaatcacttgatttaagtatatatcgacataaggattatatattgttaatatctacagccgatcgagtagatttagtcctttattatctaattataactgccgatcgatgtatatatgacatcggctcaaagataaatgatatgtcatcggcacttagccgatcggctatcgtttatggatttaaccccgttttctttgtttctatttcttgttgattgcaggatcaaatcaactggtacgtagcatacccgaaggtgagttttggacctgcactggagttaagcagatctctcaggcctcgtgtttttcatcaacac

SEQ ID NO: 39656 - DNA, 647 bp, Oryza sativa
ttaatccaaactgagcaccaattgggaatggttatttttaattctcaaaaaaactaattttcaaaaaattgattgagattacattccaatgcattaataaataagttataatttttggtaattttcaactttaagatttatcacatcatcaaataaccaataatccaatatctaaactatgtaatttttatataaattaatttcgtattttaaattattgaataattccaacttttagaattatcacatattccgaaagctataaattagaattcgagcacaactctatattttttaattctgaattatttaaattattaaacaacaaaaactgtaattgagagtccaactgaatacaacgatgtatttattaattctgaatttgaaaacgtaacaatggatttgagagaggactttatatgagtttaccttttttatactagcaatttcatgctatttttatctcacctggttaacattgacgctcctatgaagccactaaatgggtgacctatggagtgacatcatcgaaatcttattatctaaagctggcggttatcgccgcaagctgattggttcgttttacccctatttagttttacgccacgtctccatgaagcattcggcaaacgatcgcgtgtctcgcg

SEQ ID NO: 39657 - DNA, 633 bp, Oryza sativa
cgtgcacgtcgtcgagcgcgtcggccggcaccaggatctcgtgcagctcgttcgtgtccaggttgaacacgacgatgccgtgcgagatgaggtgccagtagaggatttggccgatgaggacattctgccggccatcgatcaccgatggcatctcggtcgttgccaccttgatcctctggaacgtcgccgagttgtagatgaaggcagtggagcgcttggtggtggcgttgcttgagacgaacaccacgcggaacaggtgcgggtggagctcgtcgtggccccccatggtggagaccacggcggtgttgctgaagtatgacggcctgtactccagatgacgatctttacaaaggcatgatgggcccaaccatcaaggtgataataacgcaaagtgataattttctacaaaaaatctaatatggttccttattagtagtaaagaacatactcccaatcttgttacttccaaaagaaactcatgtagaggcacttttgtagaggtccctctaaaatcaagagtttgaaaagtagagacacattttagagacattttaaaaatgcctagaacacttttactctagagaaacttttgagacatttttagcatattttttaaaattctttctcgtagtg

SEQ ID NO: 39658 - DNA, 522 bp, Oryza sativa
aaaagtgatttttttaatataagaaacattcttttcggttatggtaaagtattaaagtctacaatatatttcacaacatagatttttgttattatgaggtaaaatatacaatttcttatacgcgtatggtgagatatgacttaattctcgtacttatttatataaacataataaataagatgcctgcgcattcgcgtggactaacttcctaattcctataaacctgatcaaactaaaataaatttatatagaaaataatctaaacgatttataatatgaaacataggaactagacgtatagagctcaatctcccgtttcttgtatctatgctctccgatccttgagcgttaaactagcgttaaatttcgatgagaactcgtccttctctaccgtgccaagaacggataccaatagtaccagtacaacacctgataggaaatttcccagcaccatgtcaagcacgtgctaaccccgctgctagtatttcgccagggaatttccgcgttataaataaaaacgga

SEQ ID NO: 39659 - DNA, 668 bp, Oryza sativa
gggaaaaaatcacatgataaattatccagcgcgccaatgggcacgccaataggcgcgccgattttctaatgaatactactactgtccttcagttgggcacaagaaaaagtttacttctcgttttcgctatcaacggtgtgtttcatattcttctcattttcgctatcaacggtgtgtttcataaattgtgtactgtttgcaggccaggaaggacctcgtaccacgtgcagtacagtcatactcctaaggccttgtttagttcctaaaaactttttccaaaaacataatatcgaatctttgggcatatatatgaagcattaaatatatatattagattatgctaaaaacttgaaaaaaatactttgcatttttgaacaactttcaggactgaaaatcaattttaataaaagtgaggttatttgtttgggagaagcaaaaaaacaaagaggagtacagtaagatcttcactttcaatataggtaatttgcctataaagtatttgggtataccgattaataaaaaatgaatcatgaataaagactggaaacagactgaggagaaaatggaaaaaagggtaggatgttggcagggaatttgcaatatataggaggaagagtaactttgataaactcttgttgagcagaacacctctatacatggtggctttt

SEQ ID NO: 39660 - DNA, 766 bp, Oryza sativa
ccggttcttatctaccctattttcccaccaaaatgactgtagcaccatggtacatggagtaaaagtgtttgcattgtccactatggtgaaatcctttcatgccattatttttttcttttaacaaacgatatacggcattattggttaccagcatggcaatcttaccctggcaaataggttcatatttgaaaatatgtttatagagcatttatttttaaaattatagtctgtttgtcctaaaaatttatgccgtgaatttatttgtaacgccccgattttagaattttagaattaaaattccaataagtttatcagtatacaattgtttgtagatgctcttattaatttgtgatttctagaataaactgtatgtttggatgcacttgttgctgacaagtgggagaaattttattaggatcaatgacagctagcagtggacgtggtacaaacgtcccagcgggccgcgagcaggacacacatctatgaaacgcactgttgatagtaaagagtaaattacgtctacagtacacaaacttggtaagtgggtgcgatctagtgcaagaatttaaaaaatgattatatagatgtaacaacttggttagtacgtgcattttggttaaaatatctctcttccacaccatactttttcagctatgtaaagaaaaagcagacagttaggtcatcttgagttccgaataaagttttagatgtattgcatttgcttggttataatactaaaataacctattatttaaaattagaaaaa

SEQ ID NO: 39661 - DNA, 781 bp, Oryza sativa
  unsure (1)..(781): unsure at all n locations
ttatatttcatctttcagtcttgtacatacatgttactaaaagcacttttgccaaaacttgcaagggaacttcagaattaatgcataagtacataccaattcatgctacacagcaaatggctataattaaatctatgcaaattgatctcactatgtgtgtggggtcctcctgattggcatttcatcaagcaggatgccggagagggtacctgcataccagggcgtgctggaagtgggtggttgtgttgtcccatagtggacttggaactggaggggggcgcaggtgatggtccccagattcctgggttggcgacgtgtttttctctctcagtttgcagttgttcttcagtaacagagtgggagaatggagtggtcgagctgtgaattccacgaaaccagaagttcaagatttggcctgcacagaaggattcatctcatcacaatgcanattgagagaaaaagaaacatcacaacagattacctgttcacgcaaagatctgatgtttgccatgtttaggcggaaggcataactggcttcgtcaacagaatggacacggtgggcttggagtgcggctgtggaggtctcgacgcttccacctgtgtggaggtggtccgcaacagtttcaggcgatcgatcttattattttatctgccgatgcaactggagagaaagtgatacagcttcagctcgccgatctccttatcccttctatatgagagacagctaacgagcgaggagatatcaaacatatatagaagtgaaaatcacaattagctttca

SEQ ID NO: 39662 - DNA, 581 bp, Oryza sativa
cgcccgaatagcgtgggacgggtgggaacttgactgggatgggattggacggatcttgattctcccgctcaatggtagcctcttttcaccaccccccttgttcgcggcaccttgctgcggctatggcgtggcgaagggcgaagtcatggcttgcgcgtgaggttgggccacagtgttcggcggcccgtctccgaacggggacgcttggtgcgccgccatggatgggtcgaacgacggctgggtccatgccatggcgacctggtttggcgcttggtttgctccgaagcctgatgtcggttcctgtggtcgaatggttggtgcttgagcagtgttgatgaagtcgaactgcggtccttgactccaaggcgaaaccctcgaaccaggctggctcgacggcaaccaactgggtgcactttggccggccaggtggtggcgggtgtacttggatagtgaccggctgagcctgcggctgcacataaggggtcgggtgtattgttgcggcgaaggctgcccggcgaagtacactggcgctggcatggcttgtgccggaaggggctgaattaatgcttgtgggtggactt

SEQ ID NO: 39663 - DNA, 514 bp, Oryza sativa
aagcccaactgcccaagtagtcatcttcaagtcttcgttgaaattgtaaaaatcactcgacaattttcgtgcaaagagggaaaaaatgtcagtggcgtgcatggaggagggaaaaaaagagggaaaattttgggacaaatttatatgcaatttatataagatcaatgtgtgttttgattcttattctgtgatgaacaattggcatttgtgattattggttttgatatttgaagattatcgtcgaagtggttttgtagataatcaattttcaggtgatgatcggattcactgttattttatgtggaccggtccgaccgggcggaggttgccggtcagaccggtgctatgtgtgcggtcagaccggccaggcccgcggtctgaccggccgacgctgtgtcggtttcggtttcgggttgtttctttggatatccgtgattatttcatggttatggcttctagatggatactatacgtatgtaatactgatgtttgctaacaatcagtcaagttgggg

SEQ ID NO: 39664 - DNA, 612 bp, Oryza sativa
aaaaccgtgaagtcacaatgtcctgtagcaaaatttcccttttctaaagcacttggaatggtgtggtgtgatgaaggtagggtgctacagtaatttaattagattaatgggagagatagttttgattggaatcatgctatacgtacgacccatcattcaaccggcgtaccactgaaacggagagcaacacattgcgagacggcgtgatgattcgtactgcatgctgctgacgccgcgtacatcgacattgtagtcatctgagagtcggatgttgggtcgtgtgtgtagcattttccttttgattgtaagcactggtatcaaataaatgtcactccaagaaagattggaaaataaattttggtaggttctatttatgtagatggaaaaaaaatctaaattactcctaacctattgcgaagggctgaaattgccaacttaaacaacaaaacaggatatttgatatcccaaactctctaaaccaacgagtaacccctaactcaatctgaagcggttgtgtggcgcatacgtgctaacctagtcaacactaaaaaggtaaaataattaacgacccccctataatataggctttcttccctggtcttccaccctacc

SEQ ID NO: 39665 - DNA, 527 bp, Oryza sativa
ctatcatatttgactattctttttctgtggggagatttaccaggggccatatgttgtgcatacaacatttctttgtatgtagaccaactaataaatatcactgaaaattctagaaacaactatacatattcttccaataatattacatatatttctaaagccctcacctcaaattcattatattttagccctaaaaaaatctaatagtttaaagagtataaaattgtcggaattttttctttcttgctccctatgtacgatgaatttgaatatgagacactcacatatatgggtgtaatcgtcagggttttggtcatcgaatacatctatgaagatggttacaacacaaggacacaagttataaccctccaccttgacgctatgcgcacatatgattcctatcaccaagttcctaattgagacatggactccgactcaggtcatgagatgaaggctgttttttttcctggagtgcaagtcttgtgtggagaagaaggataagactgataacgatcagtataaacatg

SEQ ID NO: 39666 - DNA, 510 bp, Oryza sativa
tgttattcatatattaatttaaagcagccaaacattggattcatcgacataagttggaagtcaaatatatgcgcccaaattcccaattccaatgaaccaaagtgatgacccacttattcccattttatctctcctcacagtggcagagctagaaaaatttttgagcctgagccagcttcacttctagtaattgttatataaatttctcctcaattcattcaatcacatataaatttaatggagtttttgtcggtgagcatgcgcacccgcttggctggctccgcccttgcctccgtatgtcatataaaaattgagaaaatccattttttaataacacaattcgaatgcatctgtctaaatgctgtgcaattcaaatgtattctgggagtatttttttcttctataagaaaataatgtattaagttttaatgcaggtgtatactatggtgcagttcaaatgaattttggtagtagcatttttttatggtgagaaataatgcattacatttt

SEQ ID NO: 39667 - DNA, 602 bp, Oryza sativa
  unsure (1)..(602): unsure at all n locations
ttcctgcagccactcccggttatttcacccgggactaaagatagcgatctttagtcccggattggtactcccggtttggaaaccgggactaaagggggttacgaaccgggactacaaagggttctccaccagtgtcagtatcaggtttatgacagcttggttaactatgcaaaattgcacataattaaacatcaccatatcagtctcaaaggtatgcatgacagctattttaactcttatcactgaactatacgccagaatgcacgtgtacaaaagccaataggcttgtttggtcgtggactcgtggtcagcttaaaaattaacagtgggataattttgtaagcctagctatgcccaaaacgaagggttcgaaaagacagtaattagttataatctctccgtctctacctcaaaaattaanctaaaagagtgtaattaatttgtctgtcaaaacatttcattctcacatggttccatcaggctctttcaacatcacatcatttttttcgtttttcgatcttgtcagaccatgtaaaccagtnaggtattatttgtaacacctagtttttttttcagtctttttgtttcaaatggtgaatgtg

SEQ ID NO: 39668 - DNA, 544 bp, Oryza sativa
ccgtacacaaataattattcttacaataatgacagtcatacaataattataagatatctttattcatacaaaaatcataaaatattacaccaaataattcttaaaaactatttgtaaagttttaaactaattttaatgtgttttacttcttttaattttcattttagtttgttttctattatttaagattaactttcactagagttttccttctcaactattttataaaaccttgtttagcaaatgaactaaatttctatatattctttcttccccacacacattttctctctcatcaacttacaactaaattttggagaaaaaaaagtgtgcaaaacataggtgcaaatgtagtatgacaaaaaaaaacattggaggatgaagttgcaaaccttttaggcacctctgatttgtatgtaatcaccaaaataaattcaatagaaattttggcatgacctcccctcttttttgaagaaattttgaagcttgctcgggcagctggaggaggaagaagacatatgtataggggtgggactttagtccc

SEQ ID NO: 39669 - DNA, 739 bp, Oryza sativa
caaataattcatcctaataatccgttgaataatctgaaaaaaaaagttcacatgtttgatagagagcatgactcgatttggtttccatgagagcaaatggggtattgcttggaagattttatccgtagttaaagaggataagtggggagctagtaggtatatataggaatgaaaacggttcggatagtttatgaccatccagatgtacttttataacgaatggtgtcggacaaataatttattggaaatgaaaacgaatttagaaatttttttcaaaaatagaaacgagtacattaagtcaagtgtctgtagggaaaaaaagggcaacccatatttccaccaactttaggcccatatctctaccttaactcatttgtcacatattttaagtttcgaaatatgttgtatttgatactattattgatattattgatactgttatttcagtgacaaaacttacattccaattctgaaaactttcaattcaagtataaaaaatttcatctcaaaatcacaaaacctccaactgatgatttgaaactttcatctcaaatcacaaatatttcaattcaaaaaccgaaaagtttcatctcaagacccccaaaacttttaataccaaacatcaactagatattcaaatccatcttcttctttgacttcaacaattgttaccttattgctcatcccaattctgaaaactttcaattcaagtataaaaaatttcgtctcaagtatcaaa

SEQ ID NO: 39670 - DNA, 3081 bp, Oryza sativa
cggctcggggcacgaggcgcgtgcggcagaggacgaggcaagggctagggacgctctcgaacacctagcgcgcaatgaatagtgccagattccaattaaccctattttagcctatttcctatataaattttattctataaatcctaatttttgcataaatgaagtttactcagtatttgtgttattctaaccaatagattcaccctagattaatattacccatattatatttctatataatttatttgaatccttaattagggctaactcttattccaacgcacttaaatttaattgatactaatatggtcgcgataatatttttatttatttctatcctcacctaatatttattttaaattgtattccaattatttatttagccaaattaattttagggtttattcctaattagttattcttttattcgcgattaatgaactccaaaatcaaaatccaatgaaataggcgaataaaaccggcatgatgcaatttatttaaaaagtttttgaagatccgtatttttagagttttgattttgttggtcgcattttcagggtgttacaagttttacccgtaatgattatcgttaacaattaattgcagctggcaaagtagtactcagtgatccaacactccatgatcagttgaacagaagcacgtcaggttaaaaactcttacagtcatttaatttacttattgtaatattcgtattcaattagattcatacaaaattaattggtatcatctcttctaatgtttctttgaatttttgttcgctgatcttgttatttcttgcacaggaggaggaattgatgctgcagatgatgatggacagcacacagatggtaagtggtgacattcttaggtttagctagctgaagggttttcatttttttacatggttataagtcttctgttatagctagctagcatccaaaaaatgtattcagaatataattttgctgcaagctagtaaaccttcttctccacaatcctactacagtttgttttatttctagagctttcattccaagctttactttgattattttcgaatatgttagaaattataggttaattacttgaataattttttctcatgtcattcaccactaggccattctatggatttaactgaacaagatgataccaaagcagtattaatacttatcttcatcaacttttacattattttttatatgtaatcgtactgtcattccaagacagagctcctaccatttactgaataactgatcttcaattcagtgtatatagctagcatagtagcatacccaatatatacattattgcattcagaattttttttgtgcaagtaactttttcatgcatgcatggtgtgtcatatatatgcaaacttcgatattttgttatgctgctagatatctttaaccagaatgtaatgacaagagttcctttttgatttgacaggtaacaagagtcattagtatgatggaatggaagattgagcttcaatattctgcttgtgaacaatttaatcaatcgatttccgaaataatttgtgaacatcaagattttgcttgaaattaaacaatgtttattgaactattgtgtttgccatcatctgcacctgatatgtgcttaagctttgtgatggacactgcttttctgaaatattaggtatgccatagtcatatgcctgaggtagtgtaaagcatctgtacactagttaagaaacgggatagagacggtcattagagaaccattttaaataataatactggatctaccaaattttgcacatactgctctcagcaagctcatcccattccttgacaattcaaatgagtttgcgtggattgtaacaaagtcatggtttcacccacaaactgcaagtgtgcaacaaggtcacactcgctcggatatcaaaatatatcccccgaataagcaaatatacatatcacacttaagcttccaattatgaggacccaccatcaaattgatcagggcagtccacccaaagaggattcccatgaggaagaaaaaaaaacccggatgacacatagagcttgggttacatgatacacaaaattatgggtgaagaaggagcggaagagcacatatccttgaccgggagagatgcctagggaattccttccccaattctttccccttgtggcgtgatgcgtcgtggtggatatagcccgcgaccttcatcacaatagttgacattgtggtcatccatcactcacgaccttgctagttgctagtgaggcataaggagagggaggtcaatcatacactttgagagagagcacagtgattatgggcgagttggctaaaatgaagccccagatcccaccacttcctctcatgcagattaattcgcaaccgacttcttaatggttagcttccatccaaccaattcagtgaccatcagcttgattttatccttggggcctatgcctggatggttgaatcgttgaattcttagcttggattttctccacgattgacttctctcatatcaaattgttacatttcactaagcgaaggagtttaaaattcaaatatacggtgttttgtgccattttgtaggaacatattggttttataaatattcgtgtaaatatgtatgaatcgccatgtgacaagcatacataatgaagcatcatattgtgattggctgtaagagtgtaattaagtggctaacttgtgaacccacttgtaagtcaaataaataggtaacccatacccatgccggtatgttgtatgaagagaccaacatattatgacatgcacgcattgcgctgaccaagctcctgattcgcttcacttgattaatttgttgattgatttgattccagtgactcgtttgtattttagatattttcatgaaaaggcggaggttggatggatgcgttatcatgtagcagcgtggcgagagcgtccaggactcgtggtattgctcggctgttcagagaaccacatagtgttgctctgccagggcgatttggaaatattattcgcaaatatttttaaagctgctatattacattactgtaataaattgtgaaaaaataatatattcagcggggc

SEQ ID NO: 39671 - DNA, 4573 bp, Oryza sativa
cgagaatggtgaagctttattatgacactgggtgattatattttgccaagtttgtctgctttgcgcgattcttgacttgtattttttccttccccttttccctattgctttagcgggggtttcgccgaaagtcatgcgttcagcccccttttgaggattggcgaaaagatttgttgacttttcagctttcgacttccgtttttgactcgtagcattttgcgctaggaaaaacgcttgtgttttgcgtaagtcaaatgtaacggcgttcggtatctttattccaacgttcgtgatttcaacgttcggcgagcgatgccttggccgattcgttttcgcctttttatggcgaagctgtagctccttttcttctttttttttaaagtatgtgctttcgcctgatggagcttatgtgtgtttcaaatttctttttgctaatgttcgcatagtcactttcgtgctttcgttaggtcgaaacatgtcggcccctttgcgtaatttagcgaaaagatttgtcgacttttcagccctcatcattcgctctcgacttttggcatacgcgtccagaaacgcttaagtatttgcataagtcgagtataacgacgatcggtatgttttccgaaaacgagctgtcgcggtttcaacgttcggcgagcagtgcttcggccggttcgtatcgcccccccggcgttttcgttgatcaaacgattgccttggggtttttccacgaaatatcatacacaaaaaaggcgaagacacctatgaatttttatatgtccgagcgccagtttgccattgcccagcatcgatacagcatagtccccgtttttccttcttcaccgcttaaaaatttttgttgatctaacaactagcgatgaagaagatgctcaaggggtagtccttcgccattaaggacagcttttgctgatgaatcggatctaaagtccgaatgtttttggcgggcaatggaattaatctgtaacttgtgcttttttggcaaataaatggggtgtggtgcgtgttacggctgttcggctcgtacttttcccttttttcctttggcaaaggtatttttaggtactttgatcgttttgaccgttgccggctttcggtctttttgcacttcgacctttttaaccgttaccggccttcggtccttttaggtacttcgacctttttaaccgttgctggctttcttcatttgcctgcagcgaagattacccttggcgaattagccctgagcccttggcgccgtacctcattggtactgtggcgaagggtgtgggtgtggcgaaaggtgtccagaggctaggttggcttcgcggcccctattttcgcctctggtcctaactcattttcacccctagcccttggcgccgtacctcattggtactatggcgaagggtgtgggtgtggcgaaaggtgcccagaggctaggttggctttgtagcccccccagcttagacttaagtcattttcgcccccatcccttgacgccataccttattggtattgtggcgaagggcctgggtgtggcgaaacctattcgcccccagcccttgacgccgtaccttattggtattgtggcgaagggtgtgggtgtggcgaaaggtctcttcccccacagcccttgacgccgtagcttattggtactatggcgaagggcgtgggtgggcaaaacctgtacgctcgcagcccttgacgccgtaccttattagtactatggcgaaaggcgtgggcgtgtggcgaaacctagtcgcccgcagcccttgacgccgtaccttattggtactatggcgaagggcgtgggtgggcgaaacctattcgcccgcagcccttgacaccgtgccttattggcactatggcgaagggcgtgggcgggcgaaacctatcacccgcagcccttgacgcggtgccttattggccctatggcgaagggcgtcggcgggcgaaaccggttcgcccgcagcccttgacgctgtgccttattggtactatggcgaagggcgtggcgtgcggcgaaacctcttcgcccgcagccttgacgccgtaccttattggtactgtggcgaagggtgtgggtgtggcgaaaggtgtccagaggctaggttggcttcgcggcctatggacccccgtttttataacaggaatcaagcatgtaaacggtactatttccctggatcaattagtctggtacacacgagttcggagctgaaataccaagtgcacatacacgagagtctagtgcgaattattacatcataggcccgcaggcatagtcttagaacataggaccgaacggtccggaatacatcccaaaagcaaaagtagataagacagcggagttaaggcagcggcacgccattgccacaggcaacgaccgtaactaagacctactgagcgccatcgtcttcatcaccctcttggtaataggcatagggatcctccgaagcttcatctccggcctctgattaagttatatattgcaagggtgagtaccaacagtactcagcaagccgccacagcaacaatgcacatgataggggtattcgaaggatggctatggttcttttacgtaaagcaagttttgtaattcttttcacaagcctaagacctaacatagactaatcaaattttagtactagtgttcacattaaacaacgacggttctgtccaccatccattgtgatcccaaggatagcttcccgccattgagtcgtcatggttttctgaggatgtccatcttcccgcctcttaggaagtggctccaacagcataaaatcatcatgcaatatcccatcctacacaagttaagaattttgagtctagccaagtgtaatacatgtcccggtgctcaataaccgcgagcacggctattcgaatagatttggtttactcacactgtagtgaatatacactttacccgcactccgcaactgcccaacacatgagcctcgtcctagcacatgagacgcgtcatggcaaagctttttgataacctcgcattggcagtacctgctccatgaactttacatcctcatgcactctaggcgtacacggtttctagcagtgagaggagttctggcgcacccgggagggaaagactcacacatgcattaagttataattatgtttagattctcacatggcagtcctaccgatggcgacaccactgtagacacccgcctcacggtcctaccaatggctgccccaccgtagagcccctgcctcacacatcaagaaaccactatgcatggatactgcctccgctcagctatctactccgctaggtctatacccatacgagaagtgcggttgtacgggggtcgtttcatgcttaacttcatggctcggtccttaattgaccggggacggcactagccttttccggacaccacccaaattctccgtccgccccagtcgaaaacagttgtttaattttatttctcctttcacaaatcatgtcatcaacatcatggcaatgtggcgctcatgtctccacatgccgcatcccaattaccttcccaagggtaattgcccaagcatataacatttgataaatatgagtatgcatgattctaaaatagcatttctaagcaattgtcataattgactagagactcatacgtaaacatggttacgaaggcataagggtaaacaataatcaaggcatggcataatcacaagtagaatgttcatcattgcatgcaattttatttgtaaacaaaataatttcgcaattaggatcaacatgttcaaagaatagtgatgacttgccttgctcgtagtcctgcgggtcttgaccctcgctcggatccgcaactccctcgggttctaaaattacgtgcgaggaaatgatttgaattcaattggaattcaattaaaatctaaattactcaaaaagtcgaacgtgaatcgatctttctatattgactacaaagtttgcgaaaccactttattcgaattgttggatcttttaacctaagtcattttgtgatttagaagtacattcctaagaattcaacataattagttagctcttaataaatctaaactcctaccgcgaattgattacttatagagattaccaaaaataatctataattatattaaattttgcaattctacgactataattaatctataattaaattctaattattttaaattttctaaacctccttattctctctctaattttctatttattttcccttttcttttcctctccttttttttctctcttctttctttctctttttcctctctttcttttctttctttttcctctcttcttttctctctctctctccctcccggcttctttcttcctccctctctctctcggctcatgctccccggcggcgacggcggcagaacgagggaaggggcggcggcttaccgacggcggcggcgcaaggcgggcgacgcacggtgcggcactcggcgcggcgtggcggcttcgaggcgacggcacggcggcttcgaggtgacggcgcggcggcacgaaagcggcggtgcgtggagaaggaagggggatggagggggatgggtgtggagtggaaagggaaggggc

SEQ ID NO: 39672 - DNA, 775 bp, Oryza sativa
ccatccaaataccgtagtcgcgatctcgaatgtcaaacagttagaatgatataaacagacaggaactggattagaagtgaagaaacagatgcccttacgttttctaaacgaacaaagaaaaaaacgagctgatttcatggtttgggcatttaacttgtgactggtatattgcaatcaagcagttcctagcaaaacctcctgttgctaatcgctatagatagcccaagattgacaccgaaggtacaaaacagtgttgaccaacaatttcatgtcatttgcctgcttaattttcactccttccaccaaaaaagaccaaagcaatgtcaagagctgagcagttgctcattgtgcttccccatcaaatgacttctgcaaaaccaactgaataagcatgagctccaagagaggatccactagggtccggggcaaagcggtggagctagtctaacccactcatgcattctagtgcattttttcggagcacttcacccctttttgttgaatctggaccatttggttggtttccaactccatgtaaaatgaatctggaagccagagctataccaaacatgcccgtacattgagatgaaaggtgcaatgaaaaatagtagcattcattcattttgactgagatctctgcaggttagctctactatggacaatagttataaaaataggaagcagatcatttcgcttatgcttttccataagacgtatgaaccaccaaaaaaattagtgggtaaatcttttatatgtgtccttagtgattcaaaag

SEQ ID NO: 39673 - DNA, 691 bp, Oryza sativa
aaacataaatataatattagcaaacaaaataatgtatttcttttactacttattattttaatcttattatttaattctttgtgtttcatattattctaatataagctacgtgttgttaataaggtgtttaaatatatatatgatattcccttaaaaatgtgtctcaagtgaccaatagctagtccaaagtaatatttttgtacttgttaaatatagttaatttgagccttcaatatacgacaaaatctaatgtacatatgcggataaaaaataactataagattcagatcagatagttatgtttgtgtctaatacatcatagagagagggaaccgaatgggtggagggacaaatatatacatgtaagtacgtacgtatgtacatatggaagggagggacttggctcacgtgggcctttcaatttttttaataacaaaaataaatctaattggtccaccatgtttaaaggaaaatcaatggttgtgatatggacttgaattatttgttttcgttttccatctaatctaaatgagaaaaaaaagaaaaagaagtatggtaggatcatatgtacgtacaaacgtacatgctgtacaggtacacggaccgaaggatattttaagagagataattgatttgctaattttgtactaagatagatctaatggttgttgatttggcaattttgtaagat

SEQ ID NO: 39674 - DNA, 2373 bp, Oryza sativa
ttactttgtaaagggcataatatgtaaaatgcaaaacccccctttttaattagagtaaagtgcttcttactttgtaattcaggtagcatccatcaacaacaacagaacttgaaatcatgcagttcaataaatttttgaacccgactgcttatttgcttagccaaatcacggttattggcttcaccacctctacaacaattgccacctagcagaacatatagaggattaatagcccgattagattatttcaacttgcaagcatagatacatatgacctttatgttcacttaatactcaaaattcatcataataattattcgtgtacaaaattatggcatccattgaaaaaggttttgttttgttcgatttacattttcttaggaaaatttagacagcacctatgttattttttatagtggaagaacacacatttttttcttttccccgctatacaacacacaggtcgagcatcacgatcttgcgcatgtccctgatggatgcgccatgggtgtagttgcgcagcgtccagagctagaggacatacccggacatggcggtaaggctgacgccgccgtttttgggatgacgatgctcaggttggcctcgggaacatcgtcgaaggcatgagcgggcaccaggatctagtgcagctcgtgtatcttgagtttgaaggcgatgatgctgtgggagatgaggtgctaatagaggatttaagctaagtaccgtgagctgtttttcttattaacatggtgaatctccccaaatatagaaaaaacaaatatgataaaatttgacactaacgggaatttttagggtaagtaccgtgtgcagttttttttaataacacaaagtgataattttctgctgaaaaactaatatgggtccttattagtagtaaagaacatactcccaagcttattatttccaaaagaaactcatgtggaggcacttttgtagaggtcccctcaaaaaatcaggagtttcaaagtgtagagacacattttagagacattttaaaaatgcctaacacttttactctagggaaactttagagacatttttccgacgggaggcggagcaggatgctccgcaaggcgtcgttgggcaggtcagccagctgcagcttcttctcctgctgctgctgctgctgctccttctcgccgtcaacaacatcgacagaacaacattgatctcggccatggtgatcaggggctagctcagatgacaacgaactcgatccgacgagtgatagttgctggaaagcgatcgagtttggtgagggtgaagtgaagagcacagagatggatataaatcaagaggacgagagtgatgggtgccgtgacgcgcgccatggcgagagagagacgcgagacagtctgacgccgaaagcactagcattcgtcctggccgtgggtgacgaggacggcaaggctgctagcgccatgccatgcgatgacgcagcaattgtgcgtttatctatctatttcacttttttccaatccttttctcaactgctcaagtgttcttacattacatgtgactgacttggctgtatatggagaattggggatacggaaatgtgcatggttctatcaaccggtagaagaacgttctagaaatttttagtttctgctaatctacgtgcccgaggtgattttagtttcagctagatatatacggtggtaatatcctgccattttgtatgggcataattaggcaaaattttatataggatactcgaatttttgtaatttggtagtggacatcgcaaatacttgtaatttgtcggaagatactacaaccattattttattatttctagtccaattagagagatatttttaaaaaaaaacaagaatgcctctccggccacaggtttgtaacctaggactgagtaaagaagaaatacaatatgtggtagtaatgtacttggtttacggcagattgagagttgcaaaataaacattttaattttttttttgaaaatttaaaaaagttatgagatatactcatggccgccgacctaaggttttggaggggatcggatcgagtagagatggcatggtatattcaaacaaaccaagctgagtaacctgtgcttcctcaagggcaaattcatcttttcaacgtagtttctctctttagttggatcaggaataataaaataatggttacgacatcctccaataaaagtaacagcattctgaagatatccttcagccgtggcacctttttcaatacccaccagcaaattatatcctgtaataacatttgctatataataacggtatgagatcgagtaattgaacgacggactgctggaaagggatatctgtttggatgcttattagcattgttaggtgataagctaag

SEQ ID NO: 39675 - DNA, 3228 bp, Oryza sativa
ttcgcggcgccctatcgtgagtaaaggtgttattatttatagtcatatgaagtaagcattgaaatataaagcaatagaatgataggaaaagcacattatcactatgctatgaacagttcaaacgaacagaacaaatcattacgcatagagatatgtaactaatctagcacatttgcaaagcatatcataagtagtatagcgattaatacattaagtgatgctccaaagcagtagttagatagcatagcatggtacataggaagccatccatgtggactattccctccgtcctattatattacaacttaggatgggattaggcccattttaggactacgaatatggacaatatcatggttatgtccaatttcatagttctaggacccatcctaggttgtaatatattgggacggaggagtaacacatatcgaaaataatcgaggcaatgagaatctattatgtttatttagatggcgtcgtattgcagtttatctttatcctccttcaacatgtccacggtcggttccctcagaatcaatggttccttgtacccattgaaagtccatggtcagttccctcaaaatcaatggttgcttgcacccattgaaagcttttgatggttggctttcttggcactacaataagtacaataagtacataggaaacgaaacatgtaacaatatcatggcatcgaaaatagtatatcagtgagcaccatgtgtagctaaaccaacaaaaatacctacacgaaaatcaaacaaattgaaaaagttttaggagcacgcataaggcaaaaatattcctttccatttcctctttagaatcaatcttcatagtcagcagaactgcatccctttgatcatcatctatcacctgagacagtttaaaagaagaattttatataaattacaacacatttagctaaatgagttgcctgtgactatgggagttaccacagtagattattcactgaaatgagtctctggagatttaaatgaattcttactttgactttagatttttcagcatgtgcttggataaggacaatcttcaataacaacacataaatcagttagaagaagttctatagcacatcagcacctcactatttcgaattgtaggtgtttcggttcatggcaagaggattttatgccactattttagctgacatgggacagtctcaatgggatgtgaacatggaggatatagctgctagcaaccatgagatacaatatatggacagtccctaaagcttgcatgtctgctctcgttgtaacaataagtcatttacagtgagcgtctaaacatatggtccttttaccagtgtagaactctttacggtagagatgtactttaataatcgtcataaacaaaatcagaatgtcaggaaacacaaagaacataaaaattgaaatatttcacattttctcaaataaaaaaaaatgctaagatgcaaatgtcacgtcaaagacattcttatccaatagttcggcgtgaggcatagctaattccaaaccaaaccaaaccaaatctagaacctcgggtactgttacaaacaaattcagtatgtaattgctagggaatctaccttgatgctgaggggaaaaacaaaacatacgcacaaacaagaaggaatgaaaataatctctctttttacagaacagcacaaggcatatatcacattgtcagggattacatcttataccgtcataaatacaacaatctttagttaacaaaaaaatcagtactccttataatgatgcagaaataaagcgaaagaactcacatgtctgtgattgtgactcggtgtggcattgtcatgctcgttgagcaatcagtgcctgttgtatacattgaggtgtgagcagttcggggcaacacggttgggcagcggctgcaaccatggcctgaggcccgagcgatggattcaagggagatcatattgtaaggaggaggccaagcatgcagatagctgcgccacagcgctggcacaaatagacttcaataccagcaggatgaatgagctacttgtacttccggtcgcaaaataaggtcaattgggtctgcatctgagtgctcgatgaatcgctgcagtgactcattcctccaggttgcaagatcgattccttctagtgtgctcgtatcagttgaaccaccaaattattagtagagtgaatcgaagccatcaaacctggataggcaaaccagggagaggagtgcgtaccggcagtggctaggcctggagtagtctacaccagggtagttagtatccgccgtagcaacaagatcccacacatcgcatcggaggaggccagcgagcgagctggtgaagccggtggagcgacgcggagcgcgtgccagaggacggagtcgaagacgccatcggaaaggagtgcgccgagggcgtcgtcgccgcccacacaaggttcgacgcgagggtgcgatctagcctcgccccgagccgtgtgttgccgtcgtcgagcgccgcatggtccctcaacagggacgccgccgcggcgtccgtggcgtcgagcgcagcctggaggtggttcaccacggcatcgaacgaccgtagcagcgcctgggcgaaggaggacgcgcaaaggagtctgtggggaggagggcgaaggacggctggcagcgtcgctgaggaggaggaggaggcggcttcggtgcggctagggtttttggaacgcagagcgcaatggacggaggaaaacgcccgacgggtctgatgaacgagcgagcggtgaaacggcgaacctgccagcgcaccgtcccttggttgggccccaccctgacagcccatttagagatacccaagcccgcagcagcttcagcacaagcgccggaggcgctcccctagcgcgggaaacggcaggaaccgggcccacagccgcatcagcctcgcgcgcgcggagggagcgggacgatgtggatatcagcagaagcgagcacgtcggcccgaaaaggtccggagcgctgtggggaggcgaactcgccctcatctttaatttacaccgataaatagtactccactatattgtgttctccaatctccaatttcttactagttatttccaaacaggtaaaactaccctcataattaattatcaaagtcatacagaaaaactcatttagttttatttttgtttggtgtatgtgctctttatatgatacttcaaatttcacttactcaatgccatgcttcagaccaatattagaggt

SEQ ID NO: 39676 - DNA, 594 bp, Oryza sativa
cagtggtttggtgggaacgcaaacctcgccgacgatgctctggagcgcgcactgggcgccgccatcgggacatcgtcttcgttgccgtcgaaccggagcaagccgagccgagccaccgcaccatcaacatctcctcggtgtcctctcttaaatccctcatgaacccctgccagtggtgcagcgagcttggagatcggcatcgtcttccccaattccggccgtcaagctccacctcgatttctccctctccggtgagtcacagttcaattcctcgggcataaagctttcctgagacctattcaacaccgtgtgtatgcatgcatggtagatcatcagccatatcaagccggcgtcgtcatcgagcgaggctccctgccgtcgccgagtcgttctgctcgtggtcatcgctatctggacctcgccaagtttcattggacgctcggtaagcatcctaggatcccatagaggcacatgcatcaatgctctagctccacatgcaccgtcacccgagaaccaccgccgctcgcgccgccgtcgccattaattccgatgaccaatgcttgcaaaaataccacctatagcctcgccttgaac

SEQ ID NO: 39677 - DNA, 1378 bp, Oryza sativa
acaattgttcgtattcattcaattcaatgtcaaacatgaatacacccagctcagttcgaactaagattgagttgggatcgtctatgaacccgataactcttagcctaatcatgacatagttatactcatcgttatcacttttaatcgttggtgggagcgagggaatgatgttgctatccttcttctccttgggaccaaacttccgtgccagcattaatacaacctccatctcatcatcagagttggagtctgaatccgaataagaacttggtgaaatgattgatttggctgcatagcatcatgatggagagcagtaacttctatccaggtggcataaccatcttcataaatgtctttgatggagaaaaccttgatgattgggcccatcatgcctgcgtagccaagccgcccgtcttccatggggaagatgaggaagtctgggagatccaccggtgttctaagtagcgctagggtgttggtgtccaactcaaattcaatgatttaggtcctcccctctaccagctagtagatggcgtagtcgagcacagtggattgcttgaggtcacgaggtgacatatgtaaagtagacacggtatatagctcaaattatatttgatggtgttcacagatcgtatctaaaatcaagaggacatatatatactgatataatcggataggcattcttcaaagtctgacaccccttgcataataaggaccggccagcttccatgaatcgcgtagcacttagagcttcttactttgtaaaagtgcataatttgtaaagtgcaaatgcacacatattagttagagtaaagtgctgcttactttgtaattcaggtagcatccatcaacaacagcagataactttatatcatccagttcaaggaatttttaaagccagccagcttatttgcttagccaaatctcggttattcgcttcatcacacctctgcaaccattgccacctagcagaacatgtagaggattaatagcctgattaggttatttcaacttgcaaacatagatatatatcacctttatgttcacttaaaactcaaaattcatcataatcattattcctgtagaaaattatgaaatccattgagaaaggtttgttttgtgtgatttacattttcgtaggaaaatttagacagcacccattttatcttttatagtggaggaacacacattgtttcttttccccgctatactacagacaggtcgagcatcacgatcttgcgcaggtcccaggtggaagcaccatgggtgtagttgcgcagcgtccatagctggagggtgtacccggacacggcggtgaggccgacgctgccgttcttggggacgacgatgctcaggttgctcgtgaacgttgtcgaag

SEQ ID NO: 39678 - DNA, 681 bp, Oryza sativa
tgcatcgaattcctgcagcccgaatgatataattcaagaattattttacattttcgttttttgatggcattaaccacattaatcccagtttagttgctgaacaaagctttaaatcctgggaaatagcacacttttaatgttatttgggggtaactcccattttctttaatcatgtattaaagtccgacaagtcccatatattaacattagaatatagagtacctccttataccgattaaccaatagcttctgaatgcaatataatactcctaatatctctttatggatcaaaaaaatgctcaaactcaaacgacttgcttactctgacttcaaaattagatcaatgatgtgcctactctgacttggcaaaataattttgctcaaggtgatcatttgtttggaacaaataaaagatcaggtaagtgtttgtgctgtttgtgttggaccaaatcctaaatagttgaagatttggatagtatgaactgaaaatgttccttccccagatttcaattagattttatctgcaaactatgtttggagctgaaatcaagaatgtgcttttgacatgcaattggatggataagtgagcaactttcacatgtgatatgagaaatggaagagttacataaataatttgatcatcgcagtctatagggatcagaccataattttaaacggaac

SEQ ID NO: 39679 - DNA, 547 bp, Oryza sativa
tgaagaatctcttcactttggtataatatgtcatttgtgataatccttgcgagttcactttttgtccatgagaataatcaaacataatatttgcttgtactagccacaaacttgtttggaatgaatggcgttgtattgtggatacacaaggtcgtctgtgcatgggacagagaatattgtcactgttcttggtttccacttactggctagagcctctcttcatgtcatttatttggattttgaaagttggtgatttctcttgtattgcagttcatattggctcaatacatgtgttttcagttttatgctgtgctctgattgtaaatcatttctaactaaacatgtaaaatgcaattcctgcaatagctgtaagctgatagacatagttagcatggtggtgttcagtgttgataagatagcttaacaagcattggaattggatgtgctcattgctcaatacaggaaatgacagtattgtttgttggaatttgcttcaggttagaggtggagtagtgagcatattctactatcagtactagttattgtt

SEQ ID NO: 39680 - DNA, 1029 bp, Oryza sativa
caaataactatttgccacccctatctcaatgacatgtgggtccacatgtgtctatggtatgtgggtccagtggtaaaaagttaattgccatatttaaatgtggcaaatggttaaatatctcgtttgttggcacgttgtcaagttagagaacaaaacgaggagctgcacaatacaacagtgttggcattgcatcgaatatacttcactggtactgtacaaaaatttgttttttccccaagtgacaaaccctaaccctcataatcgggtgacattaacagaagcaagcatataaattagaatcatatcttccaaattcagtaccttttcttgcaaagaaaatcaaatcggttgcaaacaagaagagagggcatgcatgcatgcatgaagaacagaatctggaggccggccttgcctgatgactgtaaatcagggttttaaatctcccgctatagctgtttgagaagggttctagctatttgctctcatatacaatttagccgctatagctccatttagcccgctatagctgccgctatagctgtttgagaagctaaccgctaaatactttagcccgctatttaaaacattgctgtaaatcgatagtggtcgaaaccacgtggagcagccgagagaggagtagaacaggatcgccggggtacgcagccgcccgccggcgaggctagcgcacggcgtcggaaatatcgctccggcgaagcagggcgtcggaatcgggacggccgcggccgggaaggggatgatggatcgggagcgagcggtgaaccaccatgaggaggaggaggaggaggaggagagaagatgaaaaggaaaaggaaaatattggaggggacaacaaagctgtgggctgccgtatgtgggccgtacgaggaaacaaggctggtaggcccagtatttaggtagagcactggagcctgggtttaattgggccattcactgagaagctgcctgcggagaaagtccatactatatcccagaaaaacatgggttcggtttgatacggggctgcaggaa

SEQ ID NO: 39681 - DNA, 608 bp, Oryza sativa
gttttggatctgacagtttacaatccgtcttctgaaaaaccaactatgtatatcacttgttctacttcaatattttaaacatgacttgtatttttttatatttgcaccaaaattttaaataagacggaaatatattatgttcaaaagtgaacaacgccgtaaactcaaaaataaagggcgtacaagtttatgtgttacgtaccgtggtgcaacttaatttaattattaatagtgcgtcatgaacgactaattaagaaaagatcaaaattaatcatatttttttcgtcagcgcagaactactgcacgttattgatttaagcaatccccttctttctattattggccactaaacacctaaaacttaatatataatattaagtatttattagtactcctaaaatttacatacaagcatgttacatcaacccattaagcaaacaaaactcaacatgccatcataccggaattatatttaccactaccatttattttggtttaaaacttaacatacccatgctaaatcatttttatatatttctattcaaattattttattacttttcgaatatttaacatatatttcgcaacacaacgttgggcattattcc

SEQ ID NO: 39682 - DNA, 1094 bp, Oryza sativa
agctccagactcacgtgctgatgcggtataagttccacttgtccgggtagaagcatggtaagttgcgaatgtgttgatgtaaaaacacgaggcctgggagatctgcttaactccagtgcaggtccaaaagcttgcctttaggtgtatgagcgtgctagttgatttgatcctgcaatcaacaagaaacaaagacaaagaaaccgcggttaaatccataaacgacagccgattggctagttgccgatgacatatcatttatctctgagccgatgtcatctatagatcgatcggcaatcgtgaataagtaagaaagaactaaatctactcgatcggctgtagatattaacaatatataatccttatgtcgatatatacttaaatcaagtgattgggatagatcggtcgccatgccgagatagtataaatcacttagatcgaaatatatattaacaacaagactatatatgttcatagcatagccggttagatagatctagcatgtatcggctaatactccgataccactctatattaagatattaaagcaaatagaatatactaaacagaagcataatatacttaaatgcaacaagatcttaatataaagggcagatttaacatgtcaatcaagcatatagaataactatagttaaatcaggtaagatcggctgaaaccccgatgctaccctaatcaggaatcaaagacaggctagagattgagattctaatcacgactcataagatcaaacaactgatgcagctataagtatgaaaagaaggacaatatctagacaatcaagccgttggatgtttcatagagtggtggatatcgtatataatctaagcagcgttgatatttaacctaatcgactgccctctactgatagatgttagccgattgtaggttagatagcaatattgccagagattatataaaatatatgataactcgacgaattacataaataagattagagtatcataaagatggaagcactaatcccgaaaacacaagccgtcataacaagtttacctcttgttgaagatcgaaaccgatgcagctcaacccgaaagcaagaactcgtcgaaacaaa

SEQ ID NO: 39683 - DNA, 699 bp, Oryza sativa
tccattatgtctcaggtcatgaattgacttagctacaaatgtaacattaatgcatagctaaatgtaaatcacacatgcactcatgcacgcataccacataacagtcaataggaaccggctcatcactgccagttcacacatttttcccacccaaataatggttaattgatatgaatgtgatattgatactccttatcagtgccagctcgtggcatgcaccggcacagtttttggacagacagtgatatatcatggtatcgctgttggttgccaggtgttcagaaactagcacaggtagccattgtgaaccggcaccaatggcctatccagtggtagtgacagacacacagtaacacatactccctccgtcccatattataacaatgaatttacacatgcttcctgtttagattagttgtactataaagtgcatccggtcctaggttgttatattatgagacgtagggagtatatacctacacacacaaatattctactgttatatacttctgctagatgatttgaaattttatatatttccaataaggaatggtactgtacaccagtaataccagtagattgagatataattgaagtgcgcataaaaatttaatgatgatgttattcccttggccctcctatatatttcgctcaataacttgtgaataaatagtcaaacaaattattatattggcagta

SEQ ID NO: 39684 - DNA, 708 bp, Oryza sativa
ttgaaacaactggtgtcccacaccagacagttgacggcgccaacaacggtggcactcgtcatgaaatcaaagttgcagctgcagcctctgaggagtataccttgctctactcctttgtctaggagctccagactcacacgcatatgtggtctacgttgcagtcatccagacagaagtagggtaagtcgttaacgcaatagtgatgtggaacttcattgattggcagtcacaatcatcggttccggcatgttctgggctattgcagctgccgatcatggcggtgtggtaactgtcatcattggtgaagtaacttccgggcatggggattacgtcctggcggtggtgagaaaatccgaaaccagagatctccccttccaaccaattaatggtttgcatcgacaggtcaataaaatgcctttacacattaagtgaaaactgagatttcttttacagaagaagctgaagtcacacatatgtcaaatcaatgcatattaatttgtgtcttgatgctgaaaccatttgtgtcctcttccctaccacccacccagtggacggctcaagcgacgatggtgctcggcatgaaaccaaagtcgcagctgcatttcatgtactttatctcccaccactccttcatctacgagctccagactcacatgctgatgtggtataagttgcactcgtccaagtagaagcaaggtatgttgcgaa

SEQ ID NO: 39685 - DNA, 1321 bp, Oryza sativa
ctatcgtatagaaactttttgcaaaaacacaccgtttagcagtttgaaaagtgtgcgcgtggaaaacaagggagagggttggggaaaaggggtgccgaacacagcctatatttatctcaaattttctatgtatactcatttatcttgtcaaattcacttgttgctttaggcaccctcatcatttttccttctatatatgacttgtttcagattgccgtatttgaaaattttcattgatcatttatcttgtttgttggttgttttattaaacatagtattgtcataatcattgtcagataaccaatcatcgggctaattatcaagaaacttaaagcaccctaccccacttcaatgaccaagatattcaagggcttaacatttgagcgggacatgtcattttactacctttgtcaaaagctcgcatatgccctgttatatcattgaggaagagaagtagactcaatggatctaaagtaccaacacaagcatgatcccatgaggcacgggatatatagagattaatgtctagatataatggataaagaaatggtggctctacccttagttcgcattcaaagattaccaaatatggttaattagatatataacattacaaattttttaattttgaaatttaccactactattcatttatttagaactatgctattggtatttgtctgaaattgtaatggtgccattgacatacatattttacatatatgtgacggaaataccctcatcttcaacctctctcctctcagtctcagactctcagttgcctcggtatagcaggagcagcaggagctctttctcactcactctctaattaatccttttgtgggttaattagatatatgctgccggtggagcttggcgtggtgcctctcaccagcatcgggggctagtctcgtcggcgtcgccaaggcgcggcagacaacgggcaggtaggaggaggcgatggtggcgttgcagtagacggcggcagtggtcgtccaccaccacgtcgccacggccatggccccgccagtggcgcgaggacgaatggaagacggcaggacgctggcgacacgaggatgagcagacgaagccggcgatacgaggtggacgagcggacgccagctcaagattcggcggagctcggagcggacgaggctccggccagctctcggtggattcggcgccccctctctcgctttatctggatctgggcgaagccacttggggcggagctcgggccaggatgcaccactgctcggctagacggcgtcggtggatctgtgacagggaggctcgggcgtagctgcgcacgaccggtggc

SEQ ID NO: 39686 - DNA, 1278 bp, Oryza sativa
catcctcgatagttagagggttattcgtagttttgctatataaaatacaatcatatttttataaataaagttatgagatgtatatcaaatatagttttacttttacaatctgatatacacaaattacaattatatttttgaactagtttcatataagggagatcacctatcaatttgtaataagataataagatgaaattgacagactgaccacaataaactagtactcctatgtcttattggttttttttaagtggtacactggtacaaatacaaaaaaaaaaaaggactgtgcaggaatagtccggtgcctctccaagctagggattggggatacgatcgtcgttgtcgtttccctgtacgcccacaggaataatacagtacagtactgtataatttatattgctttctcgtttgtttttcaccgtggaccggacaagcaacaaagggacgacgtgacacacggtcgtccgtcccggcctccacctctctctgtccctccctcctcctctcctgttcatcggtccattccgacgtgtcacgcttacacttggcgatggcgacacccactacttagctcgagagcttagctccagaccggacgattcttcccttagctttcatttgtcccattcaaacgcacacgcgtcgtacgttcgataatataatctagttaatctgtcattattgagtaattgatctgaaacacactcagatacattcgatctcgtgctgattgagctctagctaatccagagagaatctctcctgccacacctgcaagttaaagtaacactgtgtatcccactcatatatgcatgcatctgtcgtgtaagccacagctagcaaaactgaaaatgccatacttatgaagtttttgacggtgtcagtttcccctaaatcttcagcgcgccagacaaagatttgtacttaaaatctaagattcgatatgtaggtacaatttttttttaaaaaaaatctcatatagttcaaatcttaagaaccctagaattatcatgttctttcttctcagaaatccagtttttctgtattcttatcagctgcacgctttaatttctcagaattagcaactccaaacaagcaggatctcggaaggaactacgaccccatcgtggaataagccaaacggtatttttacaaatgaaaagtaatggtaatttgtaaataaaattttttaatacgtgttcttagagatccaaaagcaacaactgaaaaataaacttcgatgaaaaaaaaccttagggggatccactagtt

SEQ ID NO: 39687 - DNA, 659 bp, Oryza sativa
attataaggatttgcggcatatgcggccttaggattcccatagcctccgacgtacactgcaggatgggagcaccatgtctgatgaagttatattccagatgtgcaacacggaaagagatttaaactacatggtcaaccttacaaattatgccctttggttgacatgatctgatttcaaaacattaagtatccctacataacacagatggtcccgaaccactaaaaagagtactagagaaaaataagcatccagagtttgttaagtaccttgattgcctccagacacagcagctcgtgacctcttctcggcctcagctcgaagcttctccacttcagaagccactgatatcaatttcttctgcatctcttgtccctgctcatagctctcggcatatcctttcttctcaacctcaatgccagatctgcaggtcaaataatacaaccatataaggttgaaaaacataaggttattcttggaatttcactctctctactactccaggggtaactggaattcattttggacaaaaaaaaagtaagagctcattccatttcaaattttaattataatagatcgtaacttgaccagacaaaccaaaagagttcatagaaccaagagaatggcaaaacaaaacagcgatggattgttttctcacaag

SEQ ID NO: 39688 - DNA, 792 bp, Oryza sativa
cttgggtgccccggttaaaaataagaaaggaattaggagtagcaaaaaaggaaaggtgaattgtctgacgggggcacaaacggccgcatttgcagcaggcagcgaggagattggaacgcgatccttgcggggtacggcggagtaaatgggggctttgaattggatgaccgcattcacatcgtgctagtagtagtacatgatagctagcccttgctcccatcaataggtaactgtgctatctacaggagccactgctgccaaagaagcttatcatcccttcactcccatcttctgaaaatgcctgtagcatgcaagaacgaccatatattagtgtgtgtgtgtgtgcgtgggtgggggggggggggtgttaacgttttggatactgttatttgcaagatcaagacgggatacagttttctacaggacgttgttgattaaagaaaatgaagaaattacggacgaaaaaagatgagtagtaagaccgccctcgcagtgatcgcaattaatttttggttctttaaatttgattaaatttattactgtaaaatttagtcaaaatttgttatttaaataatttcatgacaaaaaaaaaatctgacccccaaatttcgatggaaacgaaagtatagaccctgcactctcgtgtcgctcccgtgggacgtcatgggaggtgaccaaagcgtttctccatcgctatccaacctcccacctttcgttccctcgttgccaccgaagtataccgatggagctctatgcggttgtgatgacgacaacaacagagccttcatgcat

SEQ ID NO: 39689 - DNA, 588 bp, Oryza sativa
ctctgtattttgctgtcagtaacaaacttctagcaaacaatttaagtgtgtttgccgcaggatgagcctcacgagggcctgagggctggagcaacacattcaaccaggtgtattttttgtacacatattgtctaggtctggacaaaagccaaatatcgcataatcctgcattttttattcagatgttcaatattcccataatcaatccaaatatgatggattatcgcctttctagctaatgtggtaaatattagtagtaatgtttgaaatctcgtatctcataggtttggttgctgagctaacatgaataatctgtttttggcttttcgatatagctggcaattcaagtttatcgttttcagttgagcattttgacaaatgagtgagttaatttccctgttttatttccacttggacagttcaagcacaaacataattaggtgaccattatcgatttactgaattttgctaccaaatttgctgagattttttttcgggcacttgaattagattgtagcatgcgtattatcattctgttctctgaactaagaaaaagtttgatagggagtccaaatgcacaatatattt

SEQ ID NO: 39690 - DNA, 1313 bp, Oryza sativa
gcgcttgttcaagctgtgctgctcggttttttgctcggctatgtgcacgaaaaaaaaatcccaaaaatttatattggtccattttatatcttcaaccagttgtaaacactaaacagctgtagtaataagtgggcttaaacctcaaaaatggctacacaagcccaagcgatccgcatcccaaaccattcgaaattcaaattattcccctcttccgctccatctccttcccgtctttctctctccacacagacagcgcacgcatccaccaccccccaacacgggagcggagagctcgccgccggcgatcgccgcaggattctgagggcttcttccggcggccacgggagatggttctgctcgaacgcacgccgttggtggtgcccgaggcagcagcagcagccgccgccgcctcaagccgcttcggaggccggtcgcctaggggtttgaaggaaggggcccccggccccccttgatcccatccttcccttacctcaggtaatggctagatccaggatccaaatcagcccctggtcccctcgaattaggttctaattggggggggtggaattcgcggaaccgtggcgtggaataaggttgggtttgccctcaagttgtgtgcgtacgcatcgtactgggattctgtcccttcctctgagttatgtagttaattgggcgtgtgatttagattttgacacttcgcctttgcgattcctgttcaattgctcagtggcagtgtgcagttgaatttggacgaacggaaatgtgagaaatgggggcgtgtgtgttccgaaaaaaaaaaaagaaaagcaaagggtatgaccaccactgtttgagtgtctggcaacgacagaagtgcattttgccgagacattgtgactggtcactcgtaatgtccagtgttgggacttgggaaggatttagttttggagctgatttgttttgtgcagctaggttgatttttcttgtgaaggattagcttgttcatgtggagacggttctcttattcctttatcagttcttgaactgtcaagtaatgtaatgtgcccactttctgtgctccttctgtactaatgtgctgctttctgataggtccttttggtaaaaactttgcatatataacttatttttatgttcctggtactattatatctattttataaggtaaatctaatctttcatgcacatgctggtattcatgcataatttatctatgtatcactgcggtttgtttgtcctggtcagggccccagtcctggtgtatgcattcgtttatgttagtttctgacttggtattcaggtctatcaacaaggct

SEQ ID NO: 39691 - DNA, 575 bp, Oryza sativa
catgtcttgcatgtgcgttatcattccgtcaatgattaactgatgatgtcgctaatgatcgatagagcttggttgacctgaacaataccgtggggcactggaaagagtattgtcatgatatcggcccctgtcgcgggcatgaacacttgttgagaaaaccgtacaaacagcactaaaacagtgtgttttcatgggatatggcaccttagttttctcttctcctcttctccacgtcaagaaaaagctatacggcgaagcttaaaatgacacatttactgcttttttttcatgctctaattaatgaactgcttgcttggagtaatcatttagagcctagctgcctagatttatcaacttcacttttatggcgtacttctcaaaattgtcggcagtcggtgcagattttttttttttatcgacacagagtgtacttcccggtaaattggtcggcaccccattttcttcaactatctacatggcatttgacagaatacatatataaggctgagttcttttttcaactttcacaactcacatatctcgttttccacgcgctcgtttttcaaactactaaa

SEQ ID NO: 39692 - DNA, 536 bp, Oryza sativa
tcctgcagccctgcatggtacgtgcagagagccagagatgagttcttctatattttttttccttcttctagaattcattataaaaaatgtagtacttggtaactgtaaaatcaaacattcttctagaattcatctgactagatgaatatttgaatgggtagtgattagtaaattaatcttgtcctatgaatacatatttttctatgtatacattgctcttggtggttgatggatctcgtatatggtagtagtagctagaatatcactcatgcttggggtggaacatgaaaatttttgcgccccaattttgtttattgataattcgtcatgttctactagctagcagaatctagcacacgcaacatatagcctcctgccttatagccgaccttttgtccttttcttttacatgccttgaatttgtagagattgtacatctggcatgtgcagttagattactgatgcagttcactgaatttccaactctacatgctagatattaatttaacaaattcatcaatgaacaacctcattag

SEQ ID NO: 39693 - DNA, 598 bp, Oryza sativa
cctagttgacacccaccaagtttagggaccacccgtgcactttactctttgttgagttccttttgttcgagctatatagacttgatataccctgtctttgcccttttatttcgtagtaggtcataactaaacctattgaagctgctgtccttttattttatagcttatgtaaaagagcagtgctgttcttttgacttgaacagtaaagatgttaacaagtttgtcttcttacaggatctgaggcaatgtttgctgatttatgctatttctctgtcaaatctgttcaggtagtcctttctgttgttttaagagtcaatgttgcacttcatatccttgtacttactatgtctaatgtgttgcagcttacctttgtgtttcttgttcttccatgcctgctactgggttacctagggcaagctgcatttcttatggaaaatctaacagaaaatcagcaggtcttctttttatctatcccgagtaagataaactggttcatctatgtacctcttttaaatctgattttctgatgctatggattgttttcacacaaaatgaaatggaatctattatcccctaaattctaaatactttcattccg

SEQ ID NO: 39694 - DNA, 1106 bp, Oryza sativa
tgattgtacaactgtcctaccagaactcatgcgagctgcagaggtagaaagacatgcatatggtgattttgtaataataagatggatgcgagatcaatgggacaagtgttctcgaaaaagatggagagccatgacaaataaactatagctagctagccaattaggaaagcaaagcaaagcaaattcctagaacacgacattattccatcacctagctagctaggttctgaataagtccatcacatatccgaccttcatgctaattaaataaattaatttgatacatagatagatatatgttctcactagctagagcttatatagtacgtacatatatgtgctagacgtatagatagcttataccggttatatgttcctaaaataatttctcaaccatgtaagatctgttatatatactagatgaagttcaacattaattttaaaaccatgcagtaattaattaattagtaatgcaaaacccatcctatttcagaaggctaattttctttcagtgtcaaataataatttctttcactcatatgtaaaaaaaaagggtgatttttaaggtaataggtgttggcccaaaaaggaaatacttaaattcggcgacatcaagttcctttgtattttggattttttaaaaaaatgcaaagtcatttttgacaaatgttagcctagaagtaaagaaatttagcacattggaacaagcatcaaagtattttttttaaaaaaaaggaacaaactaaactcagatgagaattcataattaatataactactataattaagttaaaacacatatatagctgaagcaacaatatttaaaaaaaaacgaaattccaaatcaaatcgttttcccatttcccccatatgcatgcatctccacataaattgtctccatttgtccccccatttaattgttttgtttctatctacctttccctttcctgagtgatatgtactatatatatgtaattacctagcagttggtgtgaacatagccagcatgcatcaaaatgcgtctccgagttgctacgagacatgcaggtaagaacaagcaaagcagccatgtttttggcctctccagcagccaagagcatgcacaa

SEQ ID NO: 39695 - DNA, 955 bp, Oryza sativa
gggcccacccaccattgacacttcccacactatcgggtgggtcccgacccggcaactttttcctgctgcccactgacaagctgatctggcggattttgccggcccacttgccatgcactagtggtctagtagtggacaacgggtatttgtcattactgcgcaatggtaacgcgtacacgtcctgcccaccacaacgtgcgtgcagctgccaggtgggacctacgtttctatccccagctgggccccacgcgtcatgtgaatggtatctttcgtgccatgtgctgggccggggcgagagataatgcttcctgatggtgggacccaaacattaggtgggccacctcaacttgcgagcagttgggcttctaatggactgtacctcttccgttttggttggtcatgggcttctctgtcgccccccttacgtgggctggtcgttttgctttgttgcctccatgggctgaaatgggcttcatggcccttcactaattatttgggctttactgtacggcctatcttaggagccactgcacaaagattaggaataagttcacttggtgaccctcaaaagtgattgaaatctaatccgtgaccctaaaccacaaaaccggtgcaatttgactccctcggtggttttggagggcggtttcgctgatgtggcgctgacgtggcggtattgaccgggtctcctttacacgtggcgttgacgtggcgtttaggtggcatttagaattaaaaaatatgtgtgggacccatttgtcattgacatagattgtgggacccacgttccccttctctctcccctccctcagttcattccctcttcccgccgctccctctctctctctcctgcggcgggcggagacgacggtgaacggtggagacggcggtggaggcgcgacggcctgcgaacggcggcggcgcccgggctgagctcccccgtgggcgggcgggt

SEQ ID NO: 39696 - DNA, 725 bp, Oryza sativa
  unsure (1)..(725): unsure at all n locations
tgagcacgaacgacgcgcatatcgctccggtgaactgcgccgcccagtagaacggaacctgtgtaagggagaaaaaaaataggttgaaaagatgtttcatttcaacgctttaaccctgcacctctagctggagatcgatctagagcagtcgcagtagtatctaactgcacattgcgagatgtctctgttgaagccgggacgaatcggaaatncggggttnccggggttcaaaaggccctcacnncgggtggtggtgttgctaaggtgaactatactnangatagagtatgatagcggactaatagcgagaatagcggcaactagcttagccccggattcggtgccgatcgatcggacgacggcgccacaggcgatcgatttccggcggatccctatcgatcgaccgaatatatggcacatgaaccaccacgcacgccaccgcctttacatgaattcttgcgtcgcgaccggttctcctgtactgtatcgctacggacacttgtccctgctagctttacgtgcagtggcaacaaaaaagcctcgaccacgatcatactcttgtcttctactagcagcagcagcagaagtgccctgtggattgcgatgtaaaaatagactatatggaatgtgatccgtggcaactaactcagcgtatcccagcttagtggcttcatctttaatttggctgtgctggggttttgacgcgtgattgctcgtgttcaatt

SEQ ID NO: 39697 - DNA, 547 bp, Oryza sativa
ttcctattcccctattttttcagtaccgccattcaaaggggtcctcaatcttgtagcttcttacaccatcttcatttttgttatcttcaaccatgatatttatctccttcaacatgtccatcaactcattatgggatctcatcaaacatctcattgatcccaatatgtgaggcatcatctgtcttgtcatcagtacataatcctattacttgatccttacatatgagccatcaaccttttcacttgatgctaaaacataacctaccatcacaaactcatagtaaaggttaattccaacaatcgttatcattaatcaccaaaactcgtcccaatacaaggttagatgacttgatctttcatgcctcacggagatgattagttaatttaccgattaatatgctacagtgataattctaattaacgggaatgaaaaaagagagagaaaaagagaaagagaaaaaaaggcattttgggagggctctggcaatttcaatggcgatctcccatgagtgtcgatggtcacaccggcgcctccagggggtgggga

SEQ ID NO: 39698 - DNA, 953 bp, Oryza sativa
tggatgtgcctccgttgtggagaacactgaaacccaccatggcactatgctcctctttctgtctcactacaggctccaactgttcccgcatgggtttgtcttcttgcatctgcacacgcacagaataattcattcttcgcatcgcaacttgcaaaagctggtcgcttgcctgatgctgcgccctgacgcgtgctttcgctagctaacctttacatgtgttcaggcgtggatggtttgttcagggccttgagtttcttcagaaaatctgctagtagcgtcttgttcaggcagctggtttgatcatcgagcttgaacgctagccctcattgaatgcctgaagccgattgatgggttttatggatggattagtcgaactgtcgaagctgcctggttgtcccagcaagcatgatcgccgtggtgcagatgttgctgtccctctctgcgatcatgtcaattatagcacggagccttcgttttaagttgccatgtccagacaccatgcttccatggacgcggatcagaagtgtacaacccaacgcgtttcacctgtgccccaaaaaaaatgagttaaaacgatgcattcaagctgtggcgcctgctgcccccatcctgcttgttttgcatggtcccccctgttcaggttcagggagagaggtgaggtgaggtgaggtcccccttgcttgggccgtgcgatgcggcagctagcgtgaaggcacgctcgcgagttcggcactcgctttcggtcgggggggccattcaattaagctgcatggacgcacgtaggacggcgacgttcgttagccacggacgccggaacgcttgcgtccacttccccggaaagctcgacggagagagggagaaggccccggtaggcctttgctcaccctgcaacaatatgctgtcgggccgggtcgacatcgacagcccgaggaggaggagatgcgttagctatc

SEQ ID NO: 39699 - DNA, 637 bp, Oryza sativa
gatccttgtcttctgtgttgttgaaacgaagactgttatccttgtttatggttcttttgcgttgttaaaatgaagatcatgctaatatttgcttacagggatatccacctttcattctgaactttacaggagtaacgtactattgtcaaaacagcgtattccacgggagaaattcaacgcacattatagacctgcttgttttatattggcatggtattcaatggtcttgaaattataatggcacgcagctttaaataggtgaatactaataatatattttaaaaccataaaagttataataccattaaatctaattaaaaattatatcaatagaaaatagacggaaaaaataaagtaatactatctccgtccaaaaaaaattataattctaggttgttagtgttaaggtttgagaagaaaaaccataatgcctcttattaaatagtgtataggtcagaatggaagggaagtaatgaatggaatcattagtactctattggataattatttggggataaatttaaatcctaaaaatacaattattatgggatagatgtatagtaattttttttattaaaagagacagatgaaaaatacgaatattagaattccaaaattgaaatgacattagtactct

SEQ ID NO: 39700 - DNA, 758 bp, Oryza sativa
tgactaaatggagattttcaatcatattattacattaggtacgtatggacacaaatcgctatgacagggaagcgcgtgagccctcggattatatgtattatatatttgcatgaattagtatatcatattattatactatatgtgaaatatttgatgtatgagataaattaaattaaagctcaaatgcacagttcatataataatatttttttgctaccacgaaaaattttaaaattattaaagataaataggagttgcaacatagcgtttagcacgtgcatattactaatgttaacagtcagtgaagaaaagctaaaaaagggtgaaaatggagagagagaaagagggggaaaagatgaagacgacaattatctcctaccactgcagtttctgtttcatcactccagtgtccaagtctctcaaatcttcttctccccttctccgatcctcgcttctgtcgttctcccccgtttcaccggagccagcgttgggtacattttataaagaaactactccttcattaatgtatgacattgttgatattttgacctacgtttaaccattcatcttattcaaaatttttgtgcaaatacaaaaatatttatgtgatgcttaaacaatatttgatgataaatcaagtcacaataaaataaatcataattacataaatattttaaattatacgaatggtctaacgttgataaaaagtaaacaacgacatacattaaaatttaatacggagggagtattttaaaaaa

SEQ ID NO: 39701 - DNA, 655 bp, Oryza sativa
caaactcccaatcccatttcatccagttaccaaacaagccgttgaagtttctttggattggttcaaaacatagaaatttgaatgttagaagaattttcacatgaggtctaaccttttgaaaaaaaatcctatgcctatcgctcttgtgattccagtgtattctgtgctatatctaaatggtcattttcgaagttttcttgtattttttaatcataggatttaaagtgctaagataatctaatcttgtattttttttctatattaaaaatcccgctttaaaaacccaagtgttattaccttgtggcttcagggtcacaagcacatactttgcacgttatttgaatgtctagattcatccctaaaatttgaatctttttggacagaaggagtacacatctctatggtgcatatagctaggaatatagtgcaatgcttgtgtacgtgatgagtacgtagtacgtacgtttatcctacctctgagtctgaggtgagtgaataagaaaaggacagttgtcctcatcccctcatgattaattgcagttagtaactaatggtgatgagcgtactgatgatccttgttactactattggctgatcgatcgatggacaggagtgacattccatggattaagacattggtgattggtgaagccat

SEQ ID NO: 39702 - DNA, 510 bp, Oryza sativa
tgccaccgccgccaccaggcccaccaccaccatcaacaccacccaccacgacggcgtggatctggtggtggacaacctcgagctcttctctggtgacgcggatccggcggttggccggcggctacaaggggaaatcgacagtcgatggccggcggcgcggtggagttgatgtctctcccctcctcccttcaccgatgttgacgccggcgtgcctaaggtcgtcgccccgcggccctgcacctctctgctccagcgacgggagctccgactccaatggcggggataggagctccgactttggtgtggaaaggtgatgatgaggatggcgacttgacggggaggatggcgacgtgagataggaggacaaaaaaagtgacaggagtggcatggttccaattttataaattttcaatggcacccagctaataatgtgaagagtagtggcatattttcaataaggcatatttacgatgggcatggatccaattaaccctaaaatataagggattt

SEQ ID NO: 39703 - DNA, 934 bp, Oryza sativa
tattttccttaaaagaaaaattgactgatgctttttttaagggtacaagggaaacgtacacagcaccattactataatatcgaagtattgattaaaatatgtttggtttctagcctatcaaaatacggcactgaaaatatgtctatattatcaaattttgataaaattagaagcaccaacaatatgatctcataataaaatctagggccactagagaaaataccttgcactcagcgaataaagcctgtgcgggtcgccgcacagtggcagtgctaactggccacttcgatctcagcttgactgaaactccccccgaatacagaaatgtatgggtacgccatcgactcaatgcaatagagtgatactcggggagtagtattaagaaatgcttcatcgtggttatatgtgtgctaagagaaaacccaacgaaatgagtgcttggagcatacaaccaaccaatcatgtctgttaggtaatgtctagtgtagatgaaactaagattatcacatcataccatgccacatatggtttataatatcttctctctctccttaggctacattaggcgtgatctcataataaaatctagggccactagagaaaataccttgcactcagcgaataaagcctgtgcgggtcgccgcacagtggcagtgctaactggccacttcgatctcagcttgactgaaactccccccaaatacagaaatgtatgggtacgccatcgactcaatgcaatagagtgatactcggggagtagtattaagaaatgcttcatcgtggttatatgtgtgctaagagaaaacccaacgaaatgagtgcttggagcatacaaccaaccaatcatgtctgttaggtaatgtctagtgtagatgaaactaagattatcacatcataccatgccacatatggtttataatatcttctctctcct

SEQ ID NO: 39704 - DNA, 1370 bp, Oryza sativa
aatcccggcaatgatggggacagtggttatgatgggggcccagatgacgacaatatttggcaatttggcccaaatgtgcatgtggaagaagatcacccttgggaccaagctgtagggcaggtccatgatgatgcagaaaatttggatcaggctattgataacatgggccaggttgttaacaatgacaattggcagttagttactattgagcaaacgaatttgggtttattttctgaccttgcttctgctttcactcaatttgttcatcaatggtctgtaaatttgattccttctgctgtgattagaaatgggttagtctctctgccaaggggcccgccagttgtggtttgttcttctgctctgctgcctgttttggacgattttcaggagcatcatctgttgctggagccaactcctttggctgtcttgccccctgacaaccctctacttcctgataacccttttgatatgccttctgatgttgttgatgttaatccaagccctgttacacctaattcaaggattatcacgaagctgaaccctgtttctccctgcaaaagaaagaggaaaatggtaaccccattggtggattcttctgtcaggagaagtggtagactattagctatcagagatgggtttaggcaagagttagctgaagatccaaacatgggggttggtaagccaagagggaaggatgtcagaaagcttaagcagttggctgatgctagtggagtggtatttcctaatgaactgattccttttgtggatctccattctgatatttctattgataattctagtgatttgtccactgttatccctgctgattgttctgttgatttaattcagagaattggattggacatatgtggtgcttccctggaggaggtgtcttctgtggtgtcaatgtaaggttcttcttcagcattggtcaccaagcctatcagcccagttagtaatgattagaagtttgtgctgttttttgttgcagctaggctgctttggacttgtctgttatcagctagtgtcctgtgatgttttacttttgtcagaccttatggttcccatgttactctatgatatttgggcttttcagttgcagttattgattggattatatccagtctggatgtttaattttatccctgtgttttaaatgaacccttctttaaaaaattggaatgtgttatgctggaatgttagaggcattaattctgatgataaatgacttgctataaggaataaggttgaggaaagtggttgtgttattttttgcctacaggagacaaagaggagcagttttgatcattcttgtattaggaagcttgctcctaagcgttttgataaatttgcattttcaccttctaggg

SEQ ID NO: 39705 - DNA, 853 bp, Oryza sativa
gtacgcatagtgcgaacatattctcctttctgctcgccatgaagaggaaaatctctgcagacatgcagcctgtctcctcggcggagtgtagtctgagatgacgtgagctttcggtcgccatcgacgtatcatgggtggcatcgttgtggtgcagttggacgcttccgaaacaatcagagaaaacctcgagaagaaagaaagggagacatgcagagactctgtctgtgctgtccaggtttgccttcccttttcttcctttcatcagtctccaacctgcatgcatggatgatgatttggagagaaaaggggaaatggatgaatgatttgattgcacaagagcgaggtaaagctgtcatcatgtaccacgacctggatgcacctgtaacaagtttgtagccgtcacctacatcgggaaatattcagcctgtttttttttggcttaattatctgctgttccagcctgtatgattttcagaactactcggctgtttcagcgtatgagcagctatgattggctggctgagacagtaccactgatcactcatcattcgtgcttgcttagatcttaatggcgagtgattagcaccgagttagttaagggtttggtgaaagctactactagtgctgccggattaagatttaacggcgatggcaaggacggggacgtaccgggccgggtgtgtgcgcgggcaatgatcgtgtcgcgccgaggcggagcccagatggcgcgaatgattcgggcggcgaaaaacaaaccactgcacatgacctactacagtaccactccgtcctaaaaaaaaatactgctagctacgaatctgaacacacatatatatcaagttcgtatgtagga

SEQ ID NO: 39706 - DNA, 578 bp, Oryza sativa
gaatgcgtacgttgtgccccatacacactccggttagtgctacatatgtctgtgtcaatcagactatcaaagtacctagtttacttgcgttacttgactggttcaatgcatatactacttttttagactatttttattattattatttttagactagttcaatgcatatacttgcggtcatgtcacttgcaagttgcaacatgtgtcctgatccacataaatggcgtagtgcctaaaacgacagctattaatctgatccatgtgcttgtgcatattatcttgcggcagctacacctacaaactagatcgatcgaccacgaattaacaacgcgttaactgaataaagtcgaatataaatttgacatgagataaaactacactactagaaaaatgatctttgctggatcggctgttttccacaataataccggttccaataagaaccggtagtcccggttataaaattttgatctttagtcccggttagtaacacaaacccctgtcagaggcatgtaggaggctgaggtatcaatcggcactaaagtagtcccggttgatactaccaaccgcaagtaaat

SEQ ID NO: 39707 - DNA, 758 bp, Oryza sativa
ctccttaagcgccgaggccctgctacacatcatcatggcgcaggcgcgcaaggagctccccctcctgccgccgcctcaagcggcgtcctcgtcgcccaccgtgccagcagcccactccccattcctgctgtccaggcaaaactccagcgctgccccgcgccgtcgtcgtcgtcgtgggcacaagctcactcgttctcgcaggagtaacagcatgggcaatggcggcgccgcgaatgagatgatcagccctggggaggagctaatgagccccttgaacggcgggggaagctcctccgcgaacgcctctgccttattttctcagggcggggactctctcctagacgactgctagctgcaggagcagctctcgttcctgcacgacagagccgagggcgtaaaccgcgggcatgctctacaagcgatctacggaccgtattgccatagcccctgacctggccagagcagtgggatgcattactaccgtctacaccgggccaatgggatggataggcacagctcgccatcagttgcccacctgacattgttcagtggatattgctaagtgaagagaccttgactgatcgacgtccacagaacgagtacgatcagtgctatctatgcgtactacaactacgcggtgactcaacaattgtggtggcacccggtctggccggaagtgaaggcattggtgatctgagtgggcaaatacattgttgtcgtctccgccgcatggacagtggcagaagacttgatgtcta

SEQ ID NO: 39708 - DNA, 760 bp, Oryza sativa
aggaactggtgccatcattgacttttgccatacctgacaaacaacaaaatgaggatactggtcctcactgtcggtgatccgctggttgttattgaacacatgcatcgtgcatgattaattatcatagtaactcttgctacacatacaagtgtgaatgactcatatcattctcgtctccacacttaatatctagtgcactttcaccacctttcatcttgtagcccatgacgtgaagtctactcatatgacaacatgatgaacatgaactaatgcagcattccattatttgtgtgtacatacataccataaacccaatgaacagcctaaggcacaacgtggcgaacgcatgtgtctaacctatatctggtgaatgcaaaagcggatgaccgccctccccttcttttagtgtctctctttagaacacagaacgcgggacaatacaattcagccttgacaaccctaaccacttgcttgttagctactcgctgcagagtcgaacacttgaatgtggacatactcagtagacagacacaaaatcacctctcgcaagcgaacttggactagaaatataattaggcacatctgtaatcacctgcactatatccagcacgaagcccacgtggccctttgaatacgcggggagagccattacctactgcctggcagtgcacagtattgtcattgaccaccttacatgccgctgacaatgactcatccgtatcagccgcaatatctgaactaacctggcccttatccagag

SEQ ID NO: 39709 - DNA, 632 bp, Oryza sativa
accgattcgaagcaatctggcgcgaacacgcgatccctcctccacaaagcctcctgccggagtcgttgccggacgacgacggcgaccgctgcggctgtggtcgttcgacgccggcgagagggtaatcctttgaatggcccgcgttgagttggcctctagactgattttgttgttgataagagtaatgctatatttactttatggccgtgtggcttgtgacagaagtaagatgtaatctattttcattaaaaaaacactttaaaaaatctgtactagtcttaattagtagttagttaggggccgtttagattgcagtcaaaataaatctaatgctaaaattttagtagtcggacaatattataaaaattgacagaatttcttatatatttactaaagttggacaagaaactaaatgtatgcgcatttttaataattttaacaaaaatgatatgatttaaaatgacatcaatctaaacaacccttcagttagaaaagaatgggcttaaaatcaagaatcaatcatattttatccacatcagcttttcaagatgctttttgtagacaaataacagatttttgtacgcgtataattttccttttgagaaggttttgtatctaaaacagtttcattt

SEQ ID NO: 39710 - DNA, 587 bp, Oryza sativa
aaaaatacgcccccttatatattccataattatacgtggggtggaggtgtatgttgtaattgctgtatccatttgttatttcattcacttgttatccctagctctactatctccctcgttcattttctcttctgaatttgctgcaacttgtcatccgatttcctatattgctctggctactggttcaccggaagtggaagtgtggaacacacataaggaaaattatggtcctaaatcctaatccatatttatcgttactctaattttcctatggaaccttgaacaccatagcgctctctctctctctctctggtaattgtgccttgtagtttgaagactcgttatcaatgcagtgaaaattgtggatgcgatttatacacttctactcctagcaatccgaagccaaggctaaatgacaataacaatagaaaagactcaaaattatttataaaatgaagttctcaaattataagccgtgtcacaaagaagcaggcctgacatcctgtgtagtacactataatccacttttcagccatgcagcttgtgaagtacagaaatggacaaatcaaacttgcgattcttcggtc

SEQ ID NO: 39711 - DNA, 760 bp, Oryza sativa
aagacccggcgacttataatatgataacggacggagtatgggtcaagcattagattacatagaacaattactactcccggagctcattaaaggctaccactgatgatgcatatgctagcatgcattactaaacagtacaggtacatataagctcccagctcactactggactatcgatatgccaaacagaactttactctgtaccaatcatataaatgaaatctaccctgtccgtgccaaaagacagtggatacgggaatcaagaaaggaatgcaattgaatacgaaggagctccgattgagtgacaaacggcggtaggagataaaagagactgacagaaggatacaatggcctgtgaccggaatgaccggaataagtagtaatagacgacaacgatcatcagtgctcccaataagggaaggggatgacggagggaccattatttatagatcataatggagaggctagtgagccatggcacatgcaatcaatagtctgtcataagtgaagcgagcgaagcacaactagatacgtttgctagaatgcaaccagtccaccgacaatcaaaacctacaagccacatgagtgctctcacccacagacatataaataacgtaatggcaagccacagctcccaaggcaattcccaaatgacttggccaggtcaaaacagatgcctaccctgacagaccggggtggccttcgtcaatggaaactaaggccgccccttctgaaggtgctaaaagaataggcagtgacg

SEQ ID NO: 39712 - DNA, 766 bp, Oryza sativa
  unsure (1)..(766): unsure at all n locations
ctgcaggtggcgccaagctaaggccattcctaactcaatggttaagatgatgtccatagtattaaataggctgccatctaagataaaaaatgatgtcacaagtaaataaataaagaaatagaaggaaaccatgtcttgcatgagacatagtttctacacaacatctaagacatcatgtgagataagtagcattaaatttaagtatagataggaatcaattagacatatataaatcaaatgttacgatagacgacacgagtttgatgttgacggctagctactagataaacttgatagcagaagaaaacacaacatgccatgttgccatccatatgaaccaatcatatatctcttgttttctcaatcctcattctggtttattagttttacatagtagacaaataaagagtaaattgtgccggtatatctgtgatggtattttgaaactcgtcgacagataaaactaatgatatgggggggggaattctatagtgttattcttggtttgattttccatgcatgcatcatcctgatcactactccaataatgtcaatactaccaataataatgtgttaatttcctccatatcttatatgctatctacttctcatcagtactaccactactagaacaacgatttttgcaggtagccaaaacgaaacagcaagtggacgtggtggtgtggtcatcattggagggaggattgatgccggcgtcgccatccagaagccgcttttcatggacgccgnttnntaccaccacttc

SEQ ID NO: 39713 - DNA, 606 bp, Oryza sativa
tggtgattcgcaatgaggagcacctgtgggcgttaaagtgctgcatcggacatcttgaggctggagccagactcttgatactgagacggatgcagaccctggttactctactgaacattcttagctcatatatacttcttaagatctgacactcttaagaccctgcgaggggcatacgtctttcaaaggagaggctgatccttcccactcgcatatggtataggctcactgtacagcctggaaaatacatgaagagagacaaagttttgatccaattcttgatgcgcacttgatcctctggtgttgcagagatacatgacgggctatgcaatctaatgtacatataatcgccctggcatatgactgatgcaatatctgggccagctcacgatattactttcatgtgtttgataccctacaggcgaactgatatatgatgcgccatatagctatcaaaaatggccatgtgggtcattccattctgcgccgtttgctgccttactagcaagcatctgaaccatgtgaagcggatcttgctgctgcaggaaaaacaagccaacttcaatacacaaagattagcgtgtgagcggggtggactgtacacaa

SEQ ID NO: 39714 - DNA, 616 bp, Oryza sativa
gctctctatgcaataatgaactaaattgtgatgtttattattgcagggaacacaagtatgctcacaagtagcctactggaaattcatacagactttggacaaagaacagctgcaagccagagatgatctaggttttgggggcttaacaaaaatgaatggagtccagattcgccggcttttctgcaagcaaattgctaggcaatatgacgagtagactagagctttcaatataaatggaaccatgctggagataaccattgaagatgtggatcacatactcggcgtgccatcggaaggtgctgaactggttgaagtcccacaagcaatccaagctgacgttgatgccccaaaggacaaagatgaaaacaaagctctacagacaacaaaggccgctttgtttgcattatataaagacaaaaggggaataagataactctgtcagccttgcaggattcattgaatttgaacaaatcttgtgacgatcactttaaaaggcagtttgtgctatatacaattggtctgatcctatgtcctacaactgagagatttgtccattcagattacctaaatctgctcataaatataccagatataaagagaacgggctgcaggaatt

SEQ ID NO: 39715 - DNA, 649 bp, Oryza sativa
atgtcagcatgacgcatgtgtgcaaaactattttaaactattttttctcttaaattatttatccaaatcatgatccaattgcaccattaaatttgttgcaattaaatctttaaaacaagaccatatatggatatattccgatgaaaaaatagcttattattgaattatttataaatattgcacgttgttccaccaagtatactggaattatttcactaagtagatagaaaatgtttcaatcttttaaaatcgtgcgctatttcaccttttataaaaacaattttcagcaaatagtaaaagaatgtttcaattcattgcaacattagatctatatatagtaaaatattttgagtacactaggtgaaatatttttggtggaacaagaaataaaacgaattcccttgatagatggattatgtgggtgattttgttgcaaaagaatgtttcaattcattgtaacatttaatctatacttagtgcaacatcacgagtatactagatgaaaaaaattgttggtggacacgtggcggcgtacggacacgcgtggtggggccacgtggcagcggcgcgtgtaggcgcccgacgctgaggattatcggtgtttatagtagtaatagtctgattattttcgttggtcagatggatcgta

SEQ ID NO: 39716 - DNA, 519 bp, Oryza sativa
ctcaaaatataagcagcctacactctgataggatatatccgtactacgaatatgtactggctttatcgagattcgcactagaggtgtctaatctgattttaggttactataatttagtctgttttttaatagctgacgttcaaagattaaaatgtgcctattcattgtgttgagctcagtaagatgtaatttaatctcaagggagaattaaatttgaaaatatactattcattcgattttttctcacgaatattcgggatgcaaaattttttacagaaataaaccgtcggactctttctaccgtcagcgtcagacactacgaccggatattgaatggggttttctgacacgaataaaaaactaatcccataactcgtctgaaaaccacgagacgaaacttttgagcctaactaatccactcgttaacacatgtggggttactatagcacttatgactaatcattggactaattgtgctcaaaagatttcgtctcgcgattttcatgcaaactgtgcgat

SEQ ID NO: 39717 - DNA, 539 bp, Oryza sativa
ttctagcctcaaatagtgtaccgcacattttatattccaaatgaatgttttgcttattacctgggggtgggggtgggggtgggggttaaagtttgatttcttttcccctttatgattggcacatatcagaccaactatggtgtttacttctattttagaccttgcggctggagctggcatatttcctatataggccagatccacctcataaggagtgtatcagtgtacaaatcacaatcattatgagttgttgaaacaacactactatttgtaaatcagataactaagcttaatctctatccctgaaaaaaaaaatctgcactaccatcccagatagatgcaccaaaatgtattttctcataagacaaaaaatatacttttgttactgaagcacggatatactttttctattgatgtattttcatctgttcaaatgtcctgcatatttgttgacttcacgtatatatatgataccattttgatattagtgagattggtggttctgtcatagtaaattggcaacatgaactatgccaaca

SEQ ID NO: 39718 - DNA, 571 bp, Oryza sativa
tcccccgaccccatgacgacattgacctaggcaacggcagtgacggccaccaacggtgacaaagcttgggcagagacaaccataacacggtgggctcacataggacattcatgcatgaccacgcatggcagcccccatccagtctcccatcattgatgccacaacctctccacacagagccctccgcaccagagcatccctaccatcggcactcatgcgagacctagttctcatcgcccaacacacgtataggatctccaccttggtggcctctaccgagagcatattggtgggaagttgttcaccattaccagcggtccccgcatagttgcatcgttttcgagtggctaccttcgacggatctcgagtgatgcccacatttagcaccaccaccgtagaggtcacccaagactaggtggagggatcctctaagaccctgtttagatgggagtaaaacttttaagtccctatcatatcggatgtttggacactaattataaatattaaatgtagactattaataaaaacccatccataatcttggactaattcgcgagacgaatctattgag

SEQ ID NO: 39719 - DNA, 530 bp, Oryza sativa
cccatattaatcggagaaaaagaaaaaaaaagtagagttcatataggaatacaatttaaaaatagatgaaattcagaattaaaaataaggaatattgaaagagttgactggagtctatacaagtatacaatttagaattaattaaaattcggaaataaaaaataggaaaactaaaagtagaagttagagtccatatagaaatacaatttagaattaactaaaattcaaattattttttttaaaaaaaagcaagattaggagaagagtctagagtccatacatgaatacaatttataaataactgaaatttgaaataaaaaataagaaatattaaaaaaaagagtctagagtctatataggcatacaatttataaataatttaaattaaaaaattaaaaaacaagatattgaaaaatgaatttagaatccatatagaaatacaattagaaataacaggttgagaattaaaaaagtagaaatattggaagaggagtctacggtccacacataggaatttagaactaaatgaa

SEQ ID NO: 39720 - DNA, 572 bp, Oryza sativa
agaattatcatggcaccttattctagtgcaggatttcacatccatgtgtattctaatatttgtttaactgagaatgctagctagtagtatggttctatgcttgttattaattttttaagtagttggtttttcaggcacacgttgtgctaattaccggctggcatgctattaatcatgacagcaagatctactgtataaaaaaaccttgatgtgcatgagaaaagcatgccaatggagaatggcaggagtaggtcgccgagaaactttctgatattttttaaaccatatatcaacagatcaacccatcttaacttacaaagcgaacataagtcttacagcatacaggtaaaagcaaaagactggaatctccagtttgacatcaggacaacaaaaaccaccacataaacaatcctgatataacaacctactattgttgcttttatgtcttggtcacttgatatctgctgctgtgatttcctccaactttgcctgcagtccctttgatatgcttatttttgcacaactcggatctcaatcctgtactaaccattgtatgtatttcatttcttagc

SEQ ID NO: 39721 - DNA, 614 bp, Oryza sativa
agctaacctgttggttcttgctgctgatagttgagacatgacaatgtgataactctcttggaagatagatgccagtacattaaaaatgagaacagaacacgagagattccatatgctgtttattgctgctgccagatctcataccatgatagacagcatcagggagctgaactggaatgattctgtttgtctaccaaccaaatggtgctgtgtctagcacatcccctgaataaataggcctcagcacaaagctagacacatcataccatcagtttcctttccttctcatctcttggattcagcacaaagaggcagagctagcaacagacatggctttccaccaaagatcaattagcttgccttctaggcctctctccaaagttgaagatgagttgcacagcatagaggcatgcatctcatcaccctccacgaccatcgaggtggtctctgatggtttgaggcggcttggggacatctacagctccattgtggagatcatgtgcctgcctagcaaccaaatttgctcatcccaacagaggaggttgttggatggagaaattgggaatgtcccttcactactggatctctgcactctatgagtgagtcttcaccga

SEQ ID NO: 39722 - DNA, 1205 bp, Oryza sativa
tccaatagttctgtatgattattgtggagaattgtgagacgaggatcagaatccactttgtattttgccgattttcaagaaaatttatatcgtagttcttagtttataaaccacttatgttcattcactataaatgagatgatacatctttgatatgaggttatataaggctaattacgattgttaatttcatatggcagagcatatttctcaattcttatggaccactgtatacattcattttattatatacggttaccgaatgctactgttctctgatcatttttacccttgcatgatgcatcgtgataatgtcattggtaaaatcagtatcaccagcagctgcaatatttagtaacaaggatcaaacagttggttgcaatatggcgattgacgtgatttacttggagaatatctggaagtggattgtaagggtaagaccatgtcatttttatttaaccggaggaatggtagtattggtggaggactaccgtggtgtttggatccagggacttaactttagtctctttatttaaacattaatttagagtattaaatatagactacttacaaaactaattccataaatgaaagctaatttgcgagataaattttttaagcctaattaatccataattagagaatgtttactgtagcactacataggctaatcatgaattaattaggctcaatagatgttttcgttctcgcgaattagtccaagattatggatggattttattaatagtctacgtttaatatttataattagtgttcaaacatccgatgtgatagggacttacaagttttagtcccatctaaacaggatctcaggtctatcgatggctagctaaaacagccagtgcactgttctttttagagctatgcgccgtggtgtggagagaacactatgcagggttgtccactgaacagtgaacagtactactagctagacagcggtctagctagattgatcgatccatatacactggtgctgatcacttgtggatgtcaggtcggtttggtagaactcaaacttctaaatttagatttagaaattggatctcaagtaaagttgtggaacagatcaactaaactaaacccagcttcacctattttataaaaacactctatttatctccactcttattttagatcaagttaaaactgtttgacaaagctccagtttctagagttggggtgca

SEQ ID NO: 39723 - DNA, 619 bp, Oryza sativa
ctattgaacttgttcttagcctcttgttattaattactccctccattacataatataaggtacaaccaccttttttagatgttccataatataaggcatacatgcatgcaagccattaactatgacaattctccattaaattactacttttttaaatccttcacactcacattctctaactctattggatgcatgtattacatttattaggatgatccaaactataaggtgataataactatttcttggtctttgggttaagggtggttgtgcctcagggcagtcccaatcctccacctaggatggtgtctatggcattaactacattgccatgtaggacttttagcttatgtgtcactatattaattaagagagagagttaagagatgaagaaactgggtctcatgcaagacacaacttcaacacgagaacctatgcactagacactatcaagttttacattgggagagaatggtgtcttcataatagatgaagaataaatataattggtagagaagagagatgatgtatttattaatggcccactttaaggaaccatgggttgtggagtgtagtttctattatgatgtcttattgacatgacaccatagacactact

SEQ ID NO: 39724 - DNA, 648 bp, Oryza sativa
tccacatggtgcgtatttttatacgatgcgttaggtgctcctgactagctctatcacattgtgatgttccagttcttgggatcaagaatcagcatggcagcttactctattgctggcccttgacaaaaatgcatgctctaacacttgtttaatggagcacgcttggcgagtcgtatgggttctctatgtgtgctattaattgttaattggttggtttattaggcataggttatgctaattaccagctggcatgatgtcaagatatattgtataataatattcctgtgaatgaggaaagcatggccatctcatcatctctagtaaagaatgctggcttcaaaggaatttttcaaactttctgtactattggttctataacatccaggaaaagtgagcatcttattgataatttaagttttttttctatcaataaactttagcttaagtaccccaaaattcaggtgaatgtttggcccgtctctcagtgtgagggttaataagttccctggaaaggaaaaatggtcatacatacaacttcaaaatcagtaaaaattgacaactgagcatgggccaaaatattttttttccttttgactaactgatgtactgtacattttgacatttgtcatttcctctcatatacacatt

SEQ ID NO: 39725 - DNA, 546 bp, Oryza sativa
  unsure (1)..(546): unsure at all n locations
tttttgtcacttcatttttcatggcttattagggtataagtagaaggcctcctttaattccttcgtataggaatttttcataaatatccattccaaacaagtaattggaaatgaatcttatgtaatctccgaaattcaataaaaagtttctttgaatctttccctctcatcaaattatgtgtttttctgtggtctaaataaatggttattcttttttttcaattttctattttacacgtccatcccaatcaaaatcatgtgtttcttctattattaagttttttaacctactttccaaggagcctangtgagttcgtttgaacaacttcaaacgacaacttcatcatgttccattagtacacttcccaaaatgcaaagggatatgttctatggaaaaaattatacatgaaagtttattaaaaaaatcatattaatatattttaagtttataataattaacacttgattaatatatactaatggtttatcttattttacatgccgccaatttaccgagattcctaatgggcgatcgatcgccccgag

SEQ ID NO: 39726 - DNA, 531 bp, Oryza sativa
ttctcgatacatttggctagagtttatgagtgtacacaatgtgtagaaaagttcttatttatcctttgaaataatgcattggagttttctaaatctactactactttaaaaataagaggcgtttccatcgtctagtggaaaaaaaggcgagaaaaaaaaagagaaaaacaacttctaccataaaataaaagaaaaaaaagtcccactcctcatgtggaaaaaagagagagagaaaaaaccaaaataaaaacttatatcgttaaaaaatatgtctgacttaattccgactctccggtggagaaaaaagagaaaaaacttatacataaaaaataccgactcctaactactttatatatatatatatatatatatatatatatatatatatatatatatatatatatatatatatatatatatatatctataaagatatttttgtccgtactctactatgtcctctgggatggatcggcttttaaatgcgcgcgcttttggaaatataaatccgtatttgagtcggtttttaaa

SEQ ID NO: 39727 - DNA, 551 bp, Oryza sativa
gccccgtaccaacctcatctccttcctcgaccgcccttgtgacctcctcgccgcacaacagcaatggaggtgtagacggacgccagcggcgatgaccttgtagccatacaggagcagtgccggagcctggaaaaggccatcaacttccacagggagacgcatatgggcctcgtcccctcactcccaccaagagccccgccgccctaaagccccaccaccgccgcgtcctccctgaccaggtgtgctccacctaccgcaaacctcgcccggattctcccttgcctccgtcaccgctggggttgtgcgcgccatggttgtcgtgtgcccctacagctcgtccccttcgccgagatcaacgctgccgcgctcgcgcaccgcctgcaacggagagctcatctactagcgagggcgagcagactgctcttgctgacctagccgtcgaactcagcggcccggcagcctccgccatagtcctcgccctccgtcgtgctccatctcgctgttgccgccatccaccaccggtctctgccatcacctgcgagagaaatggt

SEQ ID NO: 39728 - DNA, 656 bp, Oryza sativa
aaataaaaatattaaaagaacacaatacgataataattaaaattcgaaaaaaataaaatttgaaattagaaaaagaaaaataatatttcaattagaaatgcaatttataaatgactaaaatttgtgataaaaataatgactattgaaagaaaagacgatctaaaacacatgacgagataaattaagtaacatgcctcggttgatatgataaataaaaactgttagtaaaacaccaaatagaatcctaatgacgattaaaaggagggacgacagtcatgccgtgaaggaaacaagcaaggcggttgccgggacttctagaaagtaaaaaaaataaaccccattgataatcatattcaatttttaaaatctcaatgacaataaaaaatagaagcagcgggtgggggtgtataggagtatagttgcggagccaccgaaggttgacggaacttctagaaaataaaaaatgaatcccaaaaacagttatgtttgatttttagaatcacaatgataataaagagtaggtggcggacgggccgtagaatagcatagtagcatcgtttgaaggtacttctaaaaattataaaaaataaaacccaacaagacaataaactctaaaaactacaaggtccaatttttaaaggttcggaactttaaaa

SEQ ID NO: 39729 - DNA, 527 bp, Oryza sativa
acagcgcaagtggggctacgaggaacagcaggatcggctccgccagctgcacggccggacgccggcacttgttgtggactccgccgccgatccgtctatgctgggccttactactgactccgtacatttcacggtaagataccacgttgtgccgctactagattagaatacataaaagggggggtggatggtacacaatctatgaagttatgtacgatttgttatatatccattggcgtaacaggctcacacaaattactagatccgcattggcactgataatgattctggacgtcctccactcgttctaaccttgagaaagcccggactcctctcacctgctgctttcttctcataaagaacaagtgctgaaattttgaaaacgaaatgtgtgacacctctaaaatctaaataattgatcgaaaaaagttttgaaaagctagagctagcaagctgttagccgatatatctttgatggtctatggctgcagaatttgtgggcttgtgctacgcatcccacctactca

SEQ ID NO: 39730 - DNA, 719 bp, Oryza sativa
ccacaagtgatcagcaccagtgtatatggatcgatcaatctggctagaccgctgtctagctagtagtagtgttcactgttcagtggacaaccctgcatagtgttctctccacaccacggcgcatagctctaaaaagaacagtgcactggctgttttagctagccatcgatagacctgagatcctgtttagatgggactaaaacttgtaagtccctatcacatcggatgtttgaacactaattataaatattaaacgtagactattaataaaatccatccataatcttggactaattcgcgagacgaatctattgagcctaattaattcatgattagcctatgtagtgctacagtaaacattctctaattatggattaattaggcttaaaaaatttatctcgcaaattagctttcatttatataattaattttgtaagtagtctatatttaatactctaaattaatgtttaaatatagagactaaagttaagtctctggatccaaacaccacctgggctctgacctctgcgggtctcggaccaccaacatgtcaaccagcagcagcagtactactcctacctatagccatcgtcttgtgattcttggtgccctgatggctgaatagacgaatgaagagagtgtatactaaagtccgtcacaaaatataacaaagtaacttaaatcaaaattataaaaacaacttatccaaattcggagta

SEQ ID NO: 39731 - DNA, 506 bp, Oryza sativa
tcatgaattatgaaacatatgttccacacaagcaaaattattttcttttcttttttgcagtcaaattgatctgtgatgtgccatagggccatgaaatggccatatgggctgtgtcactctgataccatttgtagcctcactagcaagcaaaggatccatgtatagtggatcttgctgctgcagttagaataggccagctccaatacacgaggttaagcatgtgagcagcaggtattgtacataatagagcacttgtagcaagcaaaggatccgtgtgcagtggatcttgctgccacagctaaaacagtccagctaccatacatgaggttgagcgtgcaagtaccactgattgcacaaaatagaacacatgttgaaattaacaagagcataaaaaaagataaaacacatataaaaaataccactctggaagcaatcaattaaaataatgccttgagtgcatgcaattatgtagagtgaactaacctgctgtttcttcctgccaacag

SEQ ID NO: 39732 - DNA, 1490 bp, Oryza sativa
taattggtagagaagagagatgatgtatttattaatggcccactttaaggaaccatgggttgtggagtgtagtttctattatgatgtcttattgacatgacaccatagacactacttatggacactatgggttgggactgcccttatattttagaatggagggagtagtaactaaactcaagaatcaactttagtttgcatatactctactagggaaccggttttctgtaacaggtcaagtagttaaattagaaccatttacatttataatggcctcatctataatgggatgttaatttgaccgtcaccgatggtgctggaagagacaacccattaaatatgcaaagtcatgtgtaatggttcgttattaccattgagttccaagctctatccgccatcagagttggggcgaggaagatagtctcgatatagaatgagatcaacggtgatggtgactagaggagaaggtggtgtccgttggtggagggctagaggatccctccatcgagtcttgggtgacctccacggtggtgctgccagggtttacaaaaccgcgcggttaccacacgcggtaacctttttagtttttgaaaccacggtatgtctcgcggttatgcggttaccgcaggggtgcggtaactgcaccaaaaacggtaaggccgtaaggggaaccctgggtactgctagacgtgggcatcactcgagatccgtcggaggtagccacttgaaggcaatgcaactatgcggggaccgctggtaatggtgaacagcttcccaccaatatgctctcggtagaggccaccaaggtggagatcctatacgtgtgctgggcgaggagaactaggtctcgcatgagtgccgatggtagggatgctctggtgcggagggctctgtgtggagaggttgtggcatcaatgatgggagactggatgggggctgccatgcgtggtcttgcatgaatgtcctatgtgagcccaccgtgttatggttgtctctgcccaagctttgtcaccgttggtggccgtcactgccgttgcctaggtcaatgtcgtcatggggtcggggcacagagaaaatgcaggcgccttgggtcctagatgtgttctggaggttttggaccagattgacacactgtaacaaatatcgagatctagatgtacatttcgaaattacatgaacctagatgacatatagaatgataaatttaggaaccgcccgtgtattttaatcttcgttgaatattgcatgcatgcaatcgtaaatcgtagcaatccctcgcgccgcaacttccattggtgtacgagagataattctactcgctggttctcgaaccagtaaatcgtagcaatccctcgcaccgcaacttccattggtgttcgagagataattatactcgctggttctcgtgccagaaaattgtagcaacctctcgcaccacaacttccattggtgttcgagagataattctactcactggttctcgaaccaat

SEQ ID NO: 39733 - DNA, 509 bp, Oryza sativa
caaaatgtacagtcatcagttagtcaaaaggaaaaaaaactttttggcccatgctcagttgtcaatttttactgattttgaagcttgtatgtatgaccatttttcctttccaggaacttatttaacctcacactgaggacggccaaacaatcacctgaattttggggtacttaagctaaagtttattgatagaaaaaaaacttaaattatcaataagatgctcacttttcctggatgttatagaaacaatagtacagaaagtttgaaaaattcctttgaagccagcattctttactagagatgatgagatggccatgctttcctcattcacaggaatattattatacaatatatcttgacatcatgccagctggtaattagcataacctatgcctaataaaccaaccaattaacaattaatagcacacatagagaacccatacgactcgccaagcgtgctccattaaacaagtgttagagcatgcatttttgtcaagggccagcactag

SEQ ID NO: 39734 - DNA, 545 bp, Oryza sativa
aactgggtgaggaaatggtcacctttagactctgcagcagttcttcagcgttggtttcattggagcaagggctggatggcacactcgcagatctgaggtggaatgccatggctgcagtggaagcttatcctttttctcttctctgtggaagtgaagatgagaagaatgctgtgctgcaatggtgtcgacccggctatagctttcctctatatagacaaagaggcagaagcaatggcatccctcaccgtgtagacaacaatgaaatctcaataataatgaagtgctttgctgctgcaacagacgccacccatctcctcgacaggctgatgtttttttatgtttcccaaccaagtgtagaggcatctctagctcagcttacaatgctgtcatgtcctgattattggcggcaagttcacctgcacaagtgtatagtctaatgtaatattcagatccagatcatgagaaggatgagccttgctcacaggagcagcagttgacttctctctccaggctccaaaccgtgtttcttatatggtagaatctgc

SEQ ID NO: 39735 - DNA, 892 bp, Oryza sativa
ctccaccccataaaccctaaccgatcgagggggcgcagccagtgacgggaagtccaccgccgcgccacgcctcgtcgtcgacaccgtcgctgctgcaaccgcatcaccgccatcggaaccgagcacatcgtcgccgccgtccacgtcaagcccgcgacgacaacgacgatggccggccggacttcctcttcctcaacaacgactggtcacaaccctaaatcctctcactccctctttgttcattcatctattgttgttcatccattgcaaatagaaccacccgactagatctaaacctaggtgatccaatagacaaccctatcaatggtatcagagccaggttagcgtttagtttggttcggggatagacatccacagagaagaaagaaatccaagagaaaagcaaacgatccaacggatcaaaaagatcgaaaccctaaccctaatcttacctcgtcgccggccgtcgatgacgccggccacggaggggggaggggcaaagaggcaccgccgaggagccactcgacggccgcgcgcgcacccgcgggtgcacgcgcgcgccggcgagggggcccgcggcggcgccgccatctccgtttttcggccgccgctctctctcacacggtgggggctagagacggtggagggagcggagaagagaaaatgaagagggcgcaagggccgctggcggcggcgacgccgctccgctcggccgctccggccggcggcgcgctagagaaaaagtgggcgcgcggcagcgcgaggtcgccggccatggcgcggcggcgcaagggtcgccggcgtagatgacgccactcggcgcggccgcacccgcccgcaagagagaagaggctagggtttcggccggccggcggctggggtcgggtttttg

SEQ ID NO: 39736 - DNA, 1671 bp, Oryza sativa
cccccttccttccaagggtcacacccacctcaccctccttaccaaaggcccaaaacccacctcccacatcggtcaaaggcccctcccaccggtcaaacccgcctactaactccccccaccacccacctcttctcagctctcgtcccaggacggtgcagtaactcgacgaccactatgcagtaacactgtgtcttacgtgcagtaacagcgttaaaatatagttgaaacatagtcatgacggatctacttttgataagctctttttttctagcatcatggtgcaaacggttttaaaaaccttacatcacttgggagatattgttcttcaaagtttgacagttttgcaatttgtctctccacaagtagtaatactatactattgcttgttactacttgtctgttgtacgttactacaatcgcatcacgatgttactacactgcgttttactgtattttttgggtagtgttactgcataaacacgtggtaacgtataccttccgtgcagtaacacttctacttttgtgcagtaacaagtatatgattagcatctgagacttttaacctatatatttttgtttcaattcctgatttactgtaattcaccacaatattactgtcaaaagtgcagtaacgtcatatacatgcagtaacactatattcgagggaggagaccgattttcttgagaagagggaggaagaacggtttcttgaagaggggagtacgtagatgcattttgaagtttaaccctccacatgcagtaacactatagcttcatggtgggaatgattttaaaaaataatacatatcttgtgagatattgcttttcaaatattggcattttgaactttaaccctccacatgcagtaacagaatgtgtaacttgtagtaacaagggcatatacatgcattaacatggttttacaaaatgtataaaattgttcaaacaactcctacatcaatcagacctcactcaaagccacgtacagactttacctatagcccacctattcaatattcatcttgtaaaaatgacatagtaaaactataattatcgtgcagtaacatagctacttggaagtggtaatatgcgtctattatgtagtaacacttctactttcatacagtaacaagtatattgttagcatgtgaagctttaacccatatatttttgttttagttcttggtctattacaattttactatgacgttactgcattattgcagtaatgtcctatgtattatacagtaacgtcatatgttactgtacttttacaacaatgttactactagagcatagtaatatgttatgagtttcgatagtgaaagatattagaattgataatcatatttctttctcataaaatttttaaaacaaatagtatcattagatgaattggttagaagaatgtgctttgaactatgaggtcatgggttagtcttgaatttggcaatttattttttatttttccagaaaagagaaaaaaatgtttcaaggagaaaaaaaaagaaaaaaatgaaataaaaaaagagagattgggaaagagacagaagggaggggatcgggagggaaggagggggagcgcgagagggggggatcgggagcgagagagagacagaagggagggggagcgagagagggggggatcaggagcgagagagagaagggagg

SEQ ID NO: 39737 - DNA, 516 bp, Oryza sativa
tcgaactctctcttctcctcttgatctctcttgttctctccgctctctctcgcccctctatctcgctcgctggtctaggcggcggcctggtggagcggcggtggcggcggcccggcggcgacgccctccccaccattctctctctcttagtggcctggcggaggtggtggccgccccgtggtggcggcggcggccgttgacgtgccctcccctcctccagatccagtgggagggaagcggcgacagctcagcgactcggcggctgcgcccttcctcggctagatctaaagggaggcaacggccgtgaggcggcaacacatcctccggcgacggcggcggtggtggttaaagcagccgggaaatgttctatgctgctaatgggttcttagatgccttctggtttctgtgctgcggtcttgacattgtcttgaagttcttgatgtgctcggtttgattcgtgcttgggtcggcttgattcgaacccacccgcaatttttttggggcctcgttcatcct

SEQ ID NO: 39738 - DNA, 752 bp, Oryza sativa
ttcctgcaccccctttattatgttttataatatcctacatacttatatagttcatcctcacttagttagtgcttaaatgattaatctatggtccaaattatctttctccttttttttctctaactaactccttaagcttaacatgcaacaaagatgacagatcatcatccactaacaagatgccacatcatcatccactaattaataagataccacatcatcatccactaataatcatcacatttaaacatcatgcaaacatgatatatctttatagtttttataatttaagagcttttcaaatacaaacacgttaaattatcatccaatataattcacataatgtgtcaatgtatatctttattatgttttatgatatcctatatacttatatagttcatcctcacttagttagtgcttaaatgattaatctatggttcaaattatatttctcctttttttcctctaattaagtcatatcacatcaattgtttttagcctttagatgattaatctacggtccaaactatctccctacttttcttcttccataaagtcataccatcttactttttatgtttgaatcaccattctacatactatttaaatataaattatcataaaccacattaatttacttaatctgatgttatctagctatcttacacgttattttattattattatccccgcagcaatgcgcggggtttcacctagttttaaacatgttcaatactttgccacattttatg

SEQ ID NO: 39739 - DNA, 1597 bp, Oryza sativa
gttgtggtggtgggggatctgcggacgagggtggttagggtttggggggagccatgggatggagtggaaacgattcgaatcggctcgagcggtggcgtggcgtgggattgggttgggttggtgctctcgtgcgcggctggacgcacacacggacccggacccggaccgggacgagacgacggcaaccttttttccgctggactactactgctgactggtcagttcgttcgtcctttccgttggttgcgcgcggcctgctttgctttcttgtttgctttgctttgcttcctagttttcccgttagtgctttgctttcttggttactgctttgctttgctttgtgagaaaattgagattaaggcatagtagttctattcttcaccttcaaattttagcttcctggttttcccgttagtatgtttttcaaactataaaataatatgtattttgtaaaaattttatatatagaagttgctttaaaaaatcaaagaaatctatttttcaagtttataattattaatacttaatcttatcttatatacatatatatttcatccccactaagtgtagttaatattatttctctcttctgttattaagtcacatcatcccaattatttttaatctttggatgatagatctatggtccaaattgtcccttctttcttctttcataaaaacatgcaatcttaattagttttaggctcagaattgtatccaattgttttagttttgataatcaaattacatcttatttgtacatattatgcaacttaattttccgcagcaacgtggcggggtattcatctagttaatcatatgctaatgagctttctcgttttgcgtgcactaaaaatatctcttttgcaaaggatcgaacacaacaaagccagcattacgaacggtttttcgctaaaatattattttataaataggtttatttagttaaattgttattattaaccagtgtgtcattgctaaaatacttccttccctacttcttctcttccttgagctccaaccaatcctctcttactactccgcgctcttactactccgcgcattgtcacgaccgcaagctccgcctctgctcaggttcttctcgccgtccctgcttcccacttcggccattgcactggggctagaggaggttgtgacggtgcaggaagtggaggaggtcgaccatcgcgttaggcgtaatctcaaatttttgaacttctgcctcctctctttccttcacgaggaagacacggagaccaagaacatatttgtgtgtgcttaatatatgtaggaagttggatttaaacaaggtgagtagaatacatgactccatggacacatcgtcgatcgactaatgtttcgcccacaatagtgagtattggtgatgactcggtaagattattgtctctattataataatttgatgccataagagtatggagaacgattggcattgacatttgagcgatggattgatgacaggtaaggttatatcgctttctataaattatattttagcattattcgaacctacagtttttaggtaccgagtctaatgggtcgactaatttctttaatagtcaaccggggtgcagga

SEQ ID NO: 39740 - DNA, 4000 bp, Oryza sativa
tcgtctcgcagtttctaggcgagttatgaaattagttttttcattcgtgtccgaaaaccccttccgacatctggtcaaatattcgatgtgacacccaaaaatttttatttcaccaactaaataggccaataatccctggcttgtgtaccgtcattgatatttatcatggtctctgtgtctaattgacataattgagaattgttttaatcgatctatgcctgcaggtgtacgtgttcaaggcccggtaaaattttacaccatgtcacatcgaatgtttgaacacatgtatagaatattaaatatagacgaaaaaaataactaattacacagattgcgtataaattgcaagatgaatcttttaagcctaattgcgccatgatttgataatgtggtgctacaataatatttgctaatgacagattaattaggcttaataaattcatctcgcggtttataggcggattctgtaatttgttttgttattagactacgtttaatacttcaaatgtgtatctgtacatccgattgtcacgtcaaaactttacacccctaaatctaaacacagcctaagcagaagataggagtaccgaggtcctctttaggaagcttgtagctgcaatttattattagtttttgaagagttgtaacttcttttagaatattcagctttccaaacaatttaaattctcacataaattccaaaaagttgtagttattgaaatataaactatccctctatttcatattataagtttgacttctttttaagttaaattattaaaagtttagctaagtttatagaaaaatatagtaacacttataacatcaaattacttccattacatctaacattaaacatagtttgatagtttatttgtcctgtattaaaaataaggttatatttttttataaattttatcaaacataaataagtttaacttagaaaaaagtcaaaataacttataatataaaacgggtgtagtagaaagcagataaaacgaggttcattctcactaactggtcactgtgttgggaaaaggatcctctgacttactcacaagttgattctcagagctttctcagccctcggctggtcactgtgatgggaagaggatcatctgacttacttccctctgactttgagtcactgacatgtggggccactgactttgagtcaccgagtagagggcccacatgtcagtgataaaagttagagggaagtaagttacagaatcttaattccactatgatagctctagatgttctttttgtttcctataacacaaaggatgtacatatatatatatatttgacgaaacaggtgattacatgaattctatgttccgattaagtagttaactgagcatcacatccagttgacccaaaagaagtgaagccgaagtaaagtgctcagctcaaagaaagaaggtggtgggggcttcgaagagtgaataagttcggcattctcgatctcagggcttgactagttgactatgggcctggttgggatgtttggcagagtttctagctatggcaacttttcctaaaataagaagtttcctagagttaagattctgaaagctgtagttgtaaaacccagaaaataaattagaacattagacggatttgctaattcgcgcatacgtgccgcgggcgcgcactccagcccacccggcccacgcgtacgcgtgcacggtccacgtcgctcacaaagcatgacgggcccgttacggagtaaaatacgattagtgcgaggattagcgtgctgattttttccgagtaattagatcgtaattattatttcggttaaagtttgaaaactttctacacaaatttaaaaactttttaactcatatttaaaactttcaaattaaaatttaaaatttttaagtcattttaaaaagttttcaatccagatttgaaaactttcaacctagatttaaaaactttcaacccagatttgaaaactttcaattcaaatttgaaaacttttagctcaaaatttgaaaattttcaactcaaatttgaaaactttcagcacaaaattttaaaactttcaactcaaaatttgaattttttgaagtcaaattttaaaaactttcaactcaaatttaaaactttcaacccatatttaaaactttcaacctagatttgaaaactttcaactcaaaatttgaaaactttcaactcaaatatgaaaactttcaacaaaaaatttgaaaactttcaagtcaaaattaaaaactttcaactctacatttataaagaggtgtgtgaaagattgaaaaaaaatcggaaagaaacagaaaaaagaaaaacacgatgaaggagaaaaaaaagtgcgaaaaaagaaaaaaaaaggcgcagggacgggcccagctggcgtgcgcgccaaaatttgaaaactttcaacaaaaaatttgaaaaatttcaagtcaaaattaaaaactttcaactctacatttataaagaggtgtgtgaaagattgaaaaaaaatcggagaaacggaaaaaagaaaaaagaaaaacacgatggaggagaaaaaaagtgcgaaaaaagaaaaaaacggcgcagggacgggcccagctaggcccagctggcgtgcgcgccagctaaactgctgacgcgtacgcgcgcgctaagaacccacaacattagaagctgggaagcttaatttttccagagaaacaactactgactaccaaccagctgtttgtgtttctcaggatgttaagtttctcaaatagaccctataggacacaacaattaaggaaccaaatggctgtgatatcaagagagagagagagttgggggatatttatacaaagttaaaagttagacaataattgactataaccacccatgccactggtaatacatggcgtgatttgatttagcacgcgtgagatgggacattattacacgaagcacgtactgaaatttggcgaagcatcactcgagaatgagattgtgatgccgtccaattgtgctgtgtttacttggagtacttttgattagcacgtacccttgtgccgcacaacaccatcgctcacatcatctaggaccaaagaaaattccagtggtcgtgctcactgcagcctgcaggcatcagcatattgaccatatttctctgtcaatttcccggcacaccgtgttgtagttttagcttattcaccagattaataaaacagattatttgtttcatgttttaaaaaatatatttagtaaaagattttttttactgcattgcattaattagaccacttgtgacttgtcttatgtggccccgttcttttccttaactccaaactttatctttctcgttttccattagcatacttttcaaactattaatttttttaaaaaaaaggttctacgtagaagtcgtttaaaaaattaaataaatcaatttttatttttttttataataattaatatttaattaattatgtgctaatgagttttctcgtttcgcatgcagtatagttagagaacgaacagggctttagactatttaacaagtttattcattaaaatacttaatgtatcctcgtaacaaaggagatagtttgtgataataatccattcaataatttaaattaaaggggccagatcatctacgctaacaatttggaattttgcaaaggtaagcttaataagagagaattttaaatttttatactactgttggtagctgttgatagcggtggtgacagttagggcctgtttggcacagctccagctccatccctcctggagctggagctcagccaaacagtttcagctccatcaaaactgggagtggagctggacgtggagctctctcacaaaatgagctggagttgtgaaactgggtttaggcagctccacactccactccagacccaactcctggagttaaatttaggagctctctcacaaaatgagctggagttgtggagctgggtttaggcagttccacactccactccagacccaactcctggagttaaatttagga

SEQ ID NO: 39741 - DNA, 1982 bp, Oryza sativa
tcctgcagcccatcatataattcaattcgacatttatttttgccaaagaagtccgatttgcctcttcttccctctccaccgattcaaaatttcagcaacttatcttctcttctccctcacactcagtcctctctctccaccaatatttctcatcttctcttcactacttctcacttctcagtcctctctctctctctttctcacctccttttctctctctctcgccaaccggcgcccgacggcgggcttgacgcccgcgacggctggtggaggcggcggcggtggccgggcagtagtttggcgggcgacggcagggtggcgggagcggcggcggcagcagggagtcgcggaggcggtggggacggtcggcggcgccggatccgccacccacaccctcgggagcgacggcgatgtggcgggatcggcggcggcagcgatgggaagggtcggcggtgtcggatctgccacccacgccctcgggagcgataatggcgggcggcgggcggcggcggcgggagcgtgcgacggcgatgtggcgggcgaggaggcgatgggacatggcggcggcggcttggccctgtggcggtgggctgatgggagcagcggcggtgggtctcgtcctgcccggatccggcagcggcgggcctccttgcgcctagatccagcggcggcgggcctcgtcccgcccagatccgatggtggcgggagcggacggcggtggctcccacgacagcggtagcggagggcgcgatgccggcatgattttttttaagactttatttttgtattttggatttttatttttgcataagaataccatatatccgatgaaaaataccggatagtattcgaccgttatctgattccaacggatatcacctatatcatattcgttttcattttcgaaaaaaagtatccaaattcgtctccgaatatgtcacgattaaaagacaccctaaaagactaagaatttgttggatgacactttcaactcagttggatagaggaattcttcaaaaagacaagaatatgggtaaacaaaatctttgagctaagactaaagtgaaaatgaaatacgagatatgaaaaaagaaaaggcaaacgttttaaatcaagtagcaataaaatgaatgatcaaaaatttatcaaaaagtcaaacggtggtatatattaaaaaccgagataatattataatagttgtctttacaaccttaccacaacttaagttggaggagagaaatacaaggacaatatgtgccgtctcatggcacgcaacaagaccaaaatatacgtgtccctctcaaaatagttagtctcgagcacttcttaaatttggcatcaagtctcactctaagatcgtgatgccattttcagtaaacatcgtccggtttgtgttttattagactagaatatcacattttcttgtaaattagaggctcatgtttttcctggttgactaaagaaatgtttaaaatatttgtctatatataaagtccatatctgaatacgacctacacatagcaaaatagaaggtgtcactaccaccgagtgaaagcgaattacactcgctagacattttgatgtaaaaatagctgccatacattttttcctttgtattcggacagactaaaactctcttgtgttttttttttaagaataactctcttgtgtttttaaatgtgcatgaattggaatataattatataatattctaacaacttcaactctagcatgcatggagtagtgcccgtgccaatttcgtagcaaagtgcacgacatttcaacgagaacactaaaaaaattgttatagtgggaacaggaacagaatatatatatatatatatatatatatatatatatataggcactgtttagttcccaaaaacttttcgcaaaaacatcacatcaaatctttgcatatatgtatggagcattaaatatagataaaaagaaaacctaattgcacagtttgtatgtaaact

SEQ ID NO: 39742 - DNA, 2430 bp, Oryza sativa
tctaaaacagagtaaagcaaacatgtgacacccctctctatttggctctagctccacccctgcatcacttcgtaataaatacgactgaacatgaatgtttctaaaaaaaaaagaaagaacatgaatgaacagttctaatttgtgtggctgacgatgctcctcgctctcgctacattgccaatttgccatcatcgatcttccacacagaaccgcagtgcagacacaagtcggaaaatgaaatgggtgaaaaagagaggaaatgaaacgggtgaaaaagaaatcaggttatctcgcactgatgcatgcggtgacgtgcttgtaatgaatcgacactaaaatgacagcttgattgatacaaagtatgcgtatgatcagctataggcgtctattgtagcttttgagtgagttaattgaattgtttgcctgtattttgagcttattggagatctgggcaatttttttattcgttcaaatttcgcgtgtaaactggttgatattgattttacatgatctttacaaactcttatcctcttccacaggttgctttgaaattgttcagatcaaaatagcagcaagaaaaaggatcaagaaaaagaagtactttatagggcccaaatgtataaggaaactcaagggctgcatatggcccattagtcgcttgtttgggcttcaaatggttagggtgggaacgacgagaaggcccatccatccacatctatcaagcgatgggcttttgctataggaataagtgcacttaaggttcctcaatttgttactgaatctgaaattcgtccatgaacccaaatatcaggtatagcacatcccttaacttacaatcatgtatcaactttgatccctctgcagtatagtggtcgatttcggttgacgtggcgagtgagacccacgtgggcctatatgttagttgttaacttttcttcctcctttccctcttcctcttctcttctcttttcttatctttaggattgtgccggcactgctgattgatgaggaagaaaaagatgatgctcctgaggcaacatgaggaggagcagtttcaaaagatgatgctcctgaggcaacatgaggaggagcagtttcttcaccaccgacatcaggaggagcatgaggatgagaaggcatttgagtccaaagagacgacggaaatcagacttcaaagagactccaacgatgagaagatagccgtcgttttacatggacatgcccctattcatacctaagtcattgcgtgacactatctagctcaaagagcaagaacggaagcgatgacgacagcttgagttggagctgcacgagaagaggtcaagagggttgatgacaggaaggctctaacgaggcagatcttgctccaagagatcatcaacgaagagctcctcacctacaacacagcttcaaacgacgaatccatcaactgtgttgtcaacattgacgacgagacagaccaagccgaggagcatgagtcatggcaacgccgggagatggcaaggatcaagaggggcagggaacaaagcagcttgatgacaagtcgatggaagatgagaacccggttgctgatcatcccaagaagcaaatgagatccatgcagaggtactaccacaagggtagcttcttccaacaagacgccgacaacgccacgcagactgctggagcagagggagagggagagggagatgagggagaagagttggtcgctaatatgtggggtccacgtggatcctactcgccacattagccaaaaccgaccactatactgtgtgggaccaaagttaacacgatattgtgagttggggaatgtgttataattagtatttcggttcacagacgaatttcagactcgacaacaaaattgagggacctaaaatgaacttattcctttcatatacaatgaagcttcattggagctaaccaatgaatatttgctaaaaatataaaaactatataaaatgctatagaaaaagttgagctagggtttaggattcagatttgagttcggggttagggagagatgcatagtaatacaccctttcagttcctcttttgtgtcctatcttactataaagttatccctcactaacttattaagcttaagcttaacatgcaaagatgccacatcatcatccactaacaatcatcacatttaaacatcatgcaaacatgttgtattatctataattttatagtttttataatttaagagcttttaaaatataaacatgttaaattatcatcccacataattcacatgatgtttcaatgtatatctttattatgttttataatatcctacatacttatatagttcatcctcacttagttagtgcttaaatgattaatctatggtccaaattatctttctccttttttttctctaactaactccttaagcttaacatgcaacaaagatgacagatc

SEQ ID NO: 39743 - DNA, 507 bp, Oryza sativa
agttcatgactagtcactgttaaactgggaatgtaacccaacaattccagagtcactgttcaaacagggaatgtaacccaacaattccagagtcactgttcaaacagggaatgtaacccaacaattccagcaagacacaacaaactcaaaataaatggcactaaggatctcatcagacatacgcatcaccaacacaagtagacaatgacctttcaataccagagtggcaaaattaagttgcaagaagccaataaaaagtactccctccgtttcacaatgcaagtcattttagtatttttcactttcatactgatgttaatgaatctagacatatatatctatttagatttattaacatcaatatgaatgtgagaaatgctagaatggcttacattgtgaaacgaaggaagtaaccatcttgcgatgttgaaataaacaacgagcataatcaactgttcagtctcagacttccacaaaccaggaaaaaacagtctcaggcatttaaat

SEQ ID NO: 39744 - DNA, 629 bp, Oryza sativa
agatgaagcggatcctgctgatgaggaggtcttccaggagcaagccggctacgatgagttttagggtttcggcctagttcccaagtcgcgcctgtgtcgtttggtccaactcctagcttccgtttcccttttgtagtgcagttgtgagctcgggatctgtccgcagcccaacatgactgtacatctactctataataaagagacctttgttgctgtgatattctgtctccctgtgataccagcactgtttcctgggactggtatcgattaacaggttaatttggagcgtcacgggctagttccggtcgggactagttcggggcgtgacactcatcatgaaccgtgtcgggttcgtcctgactagatccagatcccttgggatccaccaagagaggcttgagctcggcagcggcggcgagggggacgggtgaggcgcgggcagcacgaagtcgagcggtgaggtcggctatgaggaggcagcggtgaggtgctcctgccgctcgtggagctcatggcgggtggcgaggaagcggtcggagaggcctatggatgaagagagcggcgcgagcgcccaatcgagagaggaaaggggagagagatgaaaagatgggaaatggggagagagagga

SEQ ID NO: 39745 - DNA, 579 bp, Oryza sativa
tatgtgtctaggtgcatatatagcgttgatttgattgcagatgatggtcgctgaacgtggctggattctgacggacttaattagtcaccgtgcgtgtaccacatggagattagttagctagcgatctacatgagctttctcatgataaaaataaaggagcactagtacttaggccgcatcgagcaggtgaaaattatcattgtcagactatttccagaggacccggtcactcgagtgttgagaggatcaaaagataatggaactcgtctgcgctatgaacttaatttaatctggctatctttgacaagctaattctgctgctagaaactttcaaaatgttaacaagcttagctaactatgaaaaaatggtcggtaggcctagctcccgctaacggcgcggcctttccatacaggacttgcgactgattcgctaatcataagcaagacttgccctactagaccatactgttatcggtagaattgaacatcgatacattcgatattgaatacgggacgatgtttactttgaaaaagtctatcaccttactttgtattgtttaaaaagcacacaatttttat

SEQ ID NO: 39746 - DNA, 712 bp, Oryza sativa
  unsure (1)..(712): unsure at all n locations
tgcgcgccatatgtctggtcaaaattagagttacgtactcctacaattaaatnatgtatattactttctnagatttatgcacgccattttgctggtcattatactatttggtcaacactagtttccaaagtgctttatcaatcatttttaaacagtataataaacaagatcaantttgaatttatttggtccaattttcaaaaaaaccttaatttaaaaaaaaaaaaatttttaaaggggttttttttttttacgaaaacctaccccaaaaataattgttcatgttgattggtttgaattttttaataatacataaatcggccgttgctgcatccgagttggtttatatagaccaataatgattatgagagctatatatttttcatatataccgatgcgtgttgtataaacgaacttctgccatagttgcatgttaaatacagtatacatattaacaggagtatatacgtacgtatacgtactccatcaatcggtgtagtagagagatcgaaagcaataaattctggacctaaaccacctattaattctttcaccacaagtcatgaacagctcacaaaaaacgggggcttttctttgggttgggccccccaagtttttttaacccgccgttcctgttgctctgcctgctgttgctgataaaaaccaaacacaccacttaccggctgtgtgtttcttctcccttttttttttt

SEQ ID NO: 39747 - DNA, 506 bp, Oryza sativa
tgcagccctgtcgggctggatgttcagagaaggaagatgcacacctcctactaacaatgcaagcaatcacatctctctctctctcccattcatgttgagtgtgatgtagtgcactcttgtactttcaaaaaaatatatatttctataaattagaatttatgcgcaaaaatccaagtgtttttaaccaattagaaacttagaaagggaatttgagtaattcaaaatttaactaatgatgtgattaaaaagaaatctttctcctcaataatattaatctggatagtctaaaaatgcttttatttgagaacgggggtatgtattttcaatgtagcgatgtatctacttttatcataaggatgtcaatttttggaaaaaattttttaattttttttggggccttttaaaccctttaaccccttttttttcccggttttaacccaaaaaaactccttttgtttgtttttcagaaatgacaagtgtaaattaatcattcaattgcatcattt

SEQ ID NO: 39748 - DNA, 509 bp, Oryza sativa
gcagcccgatcttcagcatcgtcaagcttgtccatccagagagcaaaccacaatggtcccaaaagttggcacagtacaacctcatcatcggttgtataaagcagaagagagcagcagctggcagttgtttactgaaatgcatgaagcgtgtgatcggcatccagcccagcactatgactcatgtcgacatctctcatgagctgaagaagctcgtccttgataagctactacaggttggaagcagattgcatccagatgatgtgtggggacatcagcaaattcaccggccaatgggcaaagttggagctcatgaggagcaaactgcacattgaaagttcatcaagagctcgggctgcagggtggccttgtatttcccaaaaccccgggaaatttaaaggggcccaaattttttttccaaagaaccggggtttggggcccccccccgcgtttatgtctgctgtccttgcttggcatattgcgacggacatatccttctttcatgaagatga

SEQ ID NO: 39749 - DNA, 635 bp, Oryza sativa
taatatcaatcaatctcaagacatcgagcaaggcaagttaccatatacctgttgatcatttaagcctatattttacaaattatttatttatagccttctattcaatattctatttttctatcgcataaatcattcatagaaacccagataatttagtattgcttatttttgcttacaatatggttaaaatacctcatacttagattgggacaatatgtaagatttttgtggtttgtatttccgggtggctagtattgtctcaatcgatataagttttaccaggtacttatgtcgaacgaacgggtacgaccgcagtttctagaatggggacagacctagttattaggttaattggcaatatggcacctctgtatagtggttcttatttttaagtcctcgcgcaggaggcaactatagccgcgaagggcaactttaaccattaccatgtacaggtaaaatggtttgtgatactcgagtataaactatatggtatatttctaaaccctgatcgagatgacgtggtgtcaaacgatcagttccccttaaatacctagggaacgccagaactcctcttgctgctattaacattacgttcagagcatatgaggatataagttcatggaacaggtgccatt

SEQ ID NO: 39750 - DNA, 3155 bp, Oryza sativa
caacatcatgtcaaccatgcgtcgcgatacttaacaagtacccgaatagagattgtgacaataccctctgcataacacaattcaaagcagtacaccattcctggatcataatcacccccttataaaacaaggcatggactccccagcgacccccgtgggcttatctccgccacttctctgtctggtgccccacaatgaaccacactatataaaaggtaaagccattgcccacgatggcttgtggttggcacgattaatgtttcacaaccgaaaatcgtgaaccggaccttaattgtcatgagcacgaccatcaaaaccatgtgctcacaacccaccattatcatgtattagttggcatcttaattaatcaacctatcatgattaaccatcatgagctaccactaaaccatcattaagtaatagtgaatcatttattatcccattcatatgagctagtgtctctatgcatggctaagcatcctaatcattttagccaaaaccatataatgttctagctaatccaattattaaccaagtgaccaagtataggtaatcaataacaaaaggctataacaaaggaaataggtcattcctacccgatgattgtaacaccccaagtaaccacgtacctagagtgccataccaaacatacactcaaaccactaactcccaaaattattagaaatttcggcagagtctcccttgtaaatacggacatccatgacaggcaattataagttaaactaataacaatatcattcccataatacgatccatccttataatccatggggaagaaactattaaaaatctaaaagattattacaagaccaaaccatgatatagtttaagtatcattatggacctaggcaatatagtttgatagtgtgcagataaatatgtatataagagtgctacttcccgcccatgcatgtcggtctcaatatgtacctaaaaccaaataaaacacaagagtgagtataaaaatactcagcaagtacaatatggaactagaaaacacatatacacatcattggcaataaagcatgaacagaaggctttctttctctgataggaaacacaatttcaaacaccaagtcaaagaagatagtagttcccatcccaagcaggcatgaattgaaatagtagtttccatcccgaacaatagtgaatacatcctaacatttgccggcaaaccgagtaagcgtgatcagtgcttacccacacgaacatgaataaagaaccaaattgcactcccatgactacgcatggtacttgaataattgaaaccggaatcaaagaaccaaattgaaatcatattgcacattcatggcaagcagggaacttgaattatttacccagaaccagaatccggaatattgaaacaagaataatgttgtaaacataggataaacatgaaaatctaaatggcttgaacaacaatatgaatataagcggtcacatgtcacatagaaatatatcggaaataaatagatagaacaaacaatccatcaatcacacacttagttcgtcatgcacttgcctccaatgaagggttgatatcatgcacgatctgaaggaccaccacctaatcacaaacaaaacctcagcaaacatattcaaacatgcatataaaacaatgaaaaaggttaacctactgccccatcccatcaaaacgcaataacaaggaacgccgcttgcactataaacaatattgttgcttcaaacctttatatcttgaaatatgaaaaggctatgaccgcaaataaatacattttggaaatctacagaacaaggcctacaactcttatgtggaaatcatatttttattatgccattaaaatggtctaatttgcgcttgaaagcaggcttcacaatctgtccagaatttcagactatccgcactaaaacaatcataactggagttctacatgcccaatcagggtgtactttaccaatatggaaagctaagaaaaatctctacaactttatctataggcgtcttggctgattccactatttatcccgtccaaaaatagttcaatctactactatccagattatgacataaaaataacagttatactcaaaaattcgtatcgtctaaaccacttgagataaattcgcgccctttggtcagaagatagatataaatattatctacaacttcctagttgtacactttcacataaaatatcatttagatctccgaaacttcgaaaaactgaaacactgtaaatctgccaacgtgcagaacagccaattcgaaccacaacaaacaaaactccttctctaaccttccttatccacgaattaaaccgctataaccaccctagatcaactgatatgacaagagaaaaagcctcacctagggtttctttagataacttgtgaggagacaataggggagactctgatctaacccctccttttactcctctccacctcctcgttccgtttttccactttgcttcttgatccaagctataaagatggagatctagggagagcaatttgctgtagaggggagagatgcgaacacaggaggatcaggaggagggaggcgccggccagggagaggggaggcggcactataaggggaggtgggattcggttcccctctctgttttaggggagaactaatgggctgggtttatgggccttctcatgttggcccacttctaaagatattttttcttttgtttatttatattaacatctttattttaacaagtcaacccaactaaaaacctaaatatattttttttaatatacggggtattacattcctcccccttcaatcgaattcgcccactgtagagcttgagaaacagtaaaaatgaaaggaatacacaaaacatacatataaagtagttagtactctcaagcaacttcgaggacatctcctatattcacaacactgcttgcgtctaggtatggtaggtaataattaactagcataagaaagtttagtagccaacaattcaaaaacagctaataaacctactcagacctactagatgggaatattggcttgccaaagaagcacaatgcacatactaaaacacccaattggggcatattcaagaatcattggaacacatcatgaagaatctcactacaaagcaatggaacaaattgtgaaaacaaccttt

SEQ ID NO: 39751 - DNA, 599 bp, Oryza sativa
atgtatgtattgttagattgatctccctccccttgagcccaaccgcttaagggggccttgaccgccccctgatcgggggcgtccaccccaatggctggtgggccccgtcacactgcgccatataaaagaggggtggaggccggcacggcacgaggtacgagattcaccgccgccgccaactccaccctacaaaccctaatccgatcgagagggggcgcagccagtgacgggaagcgccaccgccgcgccacacctcatcgccaggacatctacgaccgtcactcccgcagccgtcatcgccgtcgacctcaccggcgccgcatccacgacaaccgagcgccaacgacgacgatggccggcacttcttcatcctccaacacctcaaccggtcggtctatctaaaccctctcccgttttcaatctctatagttcaaacatcaatcccaaatagaaccacccgactagatctaacctaggtgatcctagtgcaaagtccaacaatggtatcagagcaaccctagtgtttagatcgtttcggggaaagaaatccaaagaaagaaaagcacaagatccgcacggatcaaaagaaccgaaaaccc

SEQ ID NO: 39752 - DNA, 4333 bp, Oryza sativa
gacgcggcagagggtaggcggagcggcgcgcgtggcagggtagggcaaaggctggggaccaggtcgaacacgtggcgggcaatgaacagtgcacttttccaataaaccgattttagagtgtttctcatatgaatttgattccgaaattcttaattttttgcataaatgaagttttaccccatatttatattattctaactaaagattcacctaatttaatatcactcatattttgtttatataattcatttgaatttttaattaaagttaattctcattccatcgtattaaaatttaattgttgttaatatggttgcgataacattttatttatttccaaacccacctaatctttattttaatttatattttaattatttatttagcccacttgatttttagggtttattcctagttaatttcctcccatttgtgatcgatgaaatccgaaatcaaaatctaataaaatcttcgaataaaattggcatgatgcaatttatttaaaaagttttttttttttttgaagatcagaatttgtttttggagtctttgattttgttggtcgaattttcagaatgttacaccaatatactagctaataccctctatccgatgccctcctggtacttcgagaagccacccctgactgccgagttccttacgacagcccgtcatgaccatacaaccagagctaaatacggtggaataccctccccagggaattaacttagaattacatatcggcgcgaaggaatacccatactgagctgtcaccatcagcggctcacctctcatccgcaatatataacaccaaatattgatatctcgtaatctagacaccacgtctcaactacaagatactactctaatatcatcgtcataacagagtaattgcataagcaaacattatacccgcaccaaagcatctcccagataagctagccgtatattctgtataacatgaacataatgtaaagtaggtactcagatactcggaaagtatttcaatgccataaatgtatctagaagagtattctaataaaagtaaaaagcttacaaaagagaagagaaaagctactagagccatacccgaactcttccgaagacatccggactcctgatttctactctattcctattctaccagctagatactactaaactaaacttgaggtgtgtgagtgaagtgaggatgacaactccttttatagcctaccaatgacggttgtgacggttggaatggtcggaaataccctccaaccgtcattgggggctaatccacaccgtccaggcgaagccctggatcggatggcgttgaggagggtttggccgaaccccctggttcggccgaacctggggccgacccaatccagcccaatttcggctggtggcctcctccgttgttcttctctgcagacttgtgaattttggcccagtttgtcacgtcaattatgagttcttggcccattcatacataagtctggttctcgacatcgtccgattgatttatcttctatgttgatgtcgattctcctctactttagtgtcattctctgcataaggttagtatacctaatactagtggaatattattattctaacatatttctgcattgcaagcatcactagttctctattttggtagtattgacggtcgaaactgattgataacgactgtcaacatcaagcaagagctctttcatattctctcaagtagtttagtgttcttaagctagtggaataggaatagagtagaaatcaggaatccggaaaccatcgaaagagttcgggtatggctatagtagctttcctttcctcttttgtaagctttgtgcttaatttagaatactcttctttatacatttatggtattgaaaaactttctgagtatatgaatgccaactttacactatgttcatgttatactgaatataccgctagcttatctaggagatgctttggtgcgggtataatgtttgtgtatgcaattactctctcatgatggtgatattagtgtagtatttggtagtttagacgtggtgtctagataacgggatatcattatttgaggttaaatgctgggatgagaggtgggccgctaatggtgacagctcagtacgggtattcctccacacgtgtatatagtactaagttaatttcttggggaggatactcctccgtatttagccccggttgcatggtcatgacgagttgtcgtaaggaactcggcagtcaggggtggcttctcaaagtaccaggagggcatcggatagagggtattagctaatataccagatgactagaatatatatatatactatgtatactagaagtataggaatagattatctttctcttttctttccacttagcttagatattttattatgagaatgagtagcttgctgcttgtgtgacaccctacccttggattatcttaacccctgcttagactatgattatcacaagtaatatataaattattagtcaagttctctctaccatgatctccccacgggtttaaataaatacgatatccttggaatactctcgggtgaaatgctacaataggttatctgttcgcttgcggatgaactctgtaaccataatatatcaggagtatttctgtgccattgctggaaattatatttctagtaatgacgttaagaaatatcaacagtgatgaaaatggttttttaaaagttttgagtcgatttgtggtagagaatagacaaaatgtgtatatgaagttagtaataagtacttctcaaattttaatggaatacatacaatattatgtttttcaaatgagtagggttaatcattcgacatttcttaataaaaactatagctaaagagacgtaccaccatgaaaaactgcaaaacaccatatcattattatactttaataaagatttatactttagcgccagatttgtttccaccatatgttgtttactaccatacgagactcattaactaattctaagaatgtacttattttcacaaacttttttacactaactaattcgctagagtgcatttacagttgggttcagtggtgtatacatttgtccatcaattatacccggtatattagaatctctatcaactataaaaaatataagtagttttatgcgtattttattggattattcatgtttttccaatactacttggaaaagaaaatacataattctcgtgatgaattaagggttgtattgtagcaaattaactgcctaaaatcttatttatttatttattttcacatatatctatcatgtatgcttctcactcctcaaatagcaataaaaaatttcagatacttttagaatctcaatctcacacaaaataaacttaaaaatattcacttaaaaatcaaatctaaattctgttgttttattatcactagctagaatttaatttaatttttctcatcaatctattaattatgcttctcatagctcaaataagaaaagttatcaaaaattccaaatactttgagaatctcaatctctcccaaaattaaataaacctaaatagatgtacttaaaaaacaatgctaggttttcttattttaatttttacatatgtagatctaaattaacgctctacatttgtcaagtaatatttgacaccataaaatatgacataaaattaattgaaacattattatcgcgtttgctattacatgctggtgtcatttgtcatgatatatttatcactacaataagtttatgattaattttgactgtgcatgtgtagtattatttttaataagagtaaagtacacgagcggtctttaaacttgaagaggtgtgtcatctaagtttctaaactctcaaaatgcatatccaagtcgcagaacttgtcatagcgtgtcatctaggttccaaattgccacagccccttcaagatcctacgtggcgctgatgtggcacgcgacacaaacaagacgtagcataattttgactgacaaatgggacccatttaaaaatttcttgttttctttttttcttcttttcttctcttttttttcctttctactcctttctctatgacccgagcagaagaaaggaaaaaaagaacgagacgaaaacgaaaaagaaaaaaagtagaacaaaaaaaaaggacacatcacgtccatgtggcatgtcacatcagcgtcacgtagaatcttagaggggctgtgtcgatttgggacctagatgatacactttgacaagttctaagacctggaactacattttgagagtttggggacctagatggtacaactctgtaagtttaattaccgcctatacactttagtttttttataaaatcgtagatt

SEQ ID NO: 39753 - DNA, 1130 bp, Oryza sativa
atcgtaacgtaagcatgtcatgtttttttttgatagagattagcagcatgggaattttaagagctctaatccaatgtttaaaataacgggtccactaatttaagtaaaaatataaggttggatgcttttctttttttaagcgtcacgtaacaatataggagcgtttgctggacatataatagatttttagtatataatagatttctatgatttctctaatttatttgtgagccacgtagcggtgtaaaagcatttgtacaaagtttaattaacttttagtgtataatagatagatttagaagatggtttaaaagaacattgattgaatatttattatagatcttaatttaacaacatattgatatttgtgaagtaatatattttatctttatattgtagaaaatcatattttaaaaagaccgttgatttttatgaatgtatgttttttctgtcctttttatgtagacatgtgtatttggtttcttccagcgaaaattaggaaacttttatcgttttattttcacaatcatgtacgtctgtatacgtacggagagaaaaatcattagcatttgtatcgtacaaactcatgcctacgggcagtagtagcgcttgtatgttataaacatgcagaagttattattcccgtagtagcgcttgtatgttataaacatgcagaagttattatttttaaataataggcttgatctaatgatgtaaaataatgcgtcatcaatttaagtgcaaatcgacgataagattagattgtaccatgtgatgacttagaagcgtttgtaggagtaccacgtggtgacttagaagcgttcgtaggaagtttaataaacttttattataaaataataaacttgcattctacgtactcaagtagtaccttacctaactcaccataactcacctgttcagttaaacaaataatgaagtagtagatgcatattggaaggtgtaattttgttgattccctactactatatatgtttattgccataaatgtttgttctggagatgcacatgcctaaaatatttctatgatatgcattgcgtttgcacatgtattaccaccggagcggtagcatgggcaaattactagtacattataattaacgaacttcaga

SEQ ID NO: 39754 - DNA, 927 bp, Oryza sativa
cggaccgggtccacgggggtggggcccacgcggcagccccacggcccacggtggaccgggcgcacccgggctcacaccggccggcaccgtgggtcccacgcgtcagccgcacccgagggcgcgggcgcctgacagccgggccccacgcgacagccgcacggtgcgcccgaaggcagccacgccggcgcagcggcgggaggcggcgcgcccgcgcccctatggtcgccggcggcggccataggcacggcggagcggcggccgagagagggagagggaagggggaaaagaagaggcggtccacggctcaccctaggtcgacggcgacgacggaaaggcagctggagcggaggaaggcggcggcgcggctcgggttgacggggacggtggcgttccggcggtcggcgagtgaaacggaggggtggacgaggtcgccgaggacgcggcgaagccgaaggaggcggcgccgagggggaaggtggtccggggcgacgacggcggcggaccggagctcggcggagagagagaacgacggcgtgagctcgattctggcgaggagagagagcggcgagaggcggaaacgaacggaggaggtgcggggagggtttatatagggttggaagggggagagagcgaccggacgagggggaaatgggcgcggaagatccggccgccattgatggcgccggcgaggttaggggagaggtttccaaacgaatccgagggagagagggagggaaaaatggggggaaagagggagggaatcacagggaatatttccccccactttattgcgtgcgtggaccgcgggaggcggcgggattcgcggcggcgcgcgcggcgctagggcacgggcgagcgcgcgggagccgcgggaggacagggatgacaggtgggccccacccgtcagcgagggtggcgggcgggccc

SEQ ID NO: 39755 - DNA, 1221 bp, Oryza sativa
ctttgggccaaacttggcccaaaagaaaaggaggattattttttgctttttatttttaataaactctgataattgtttttgttgtttaataaatatttccagtgctctgaaaatttcaagtaaaatttgagggctccttttagaccaaggagaatttaacaaaaattctccgggccacattcgaatttttcttgtacgcattttagtgtttgccaatttcttttcgaattttaattaattctattattccttttagaaaatgatttttatttcgggatgaatttatcaggacgtgacagatctctagggacttaggcatttttgctttggcaatttgtgctcacaatggtgtggcccgatgctgttaaaatcctttttaatgcagttagatgattctttggaatcattacgatgcgaacagaagctgttaggcggcaaaagctgttcgggttgattcgagatgactagttttctaatggtcattctcttggcatgatatatgcttattttgattatggtgagggtcatagcctaggctatttagactcgttaattgccatgattcttatcatatttggtggatcatcttaagagtttttactcggattcttgtcaaatatgtttatttatggaccttttggagcgtttttcactcgggtttttctttatgtctttttggtatattaaagctaaagcagtcgactggatgttttattaaacgtcgcatttgctcagctatgtaaccactcggattggatgatatttgcaccttgactatatgtttagttttaaactaatcacatagtcgggggctacacctaattaggtgcatctaatcgatgcacctaacttttttatttctttttcgcccttcacagtctttgattttagtactcgggaggtcagagcagaaggagttgaagcactcagattattgctttagatttcaagagaaggctattttgtcgactgcaaaggtctcgggggctactgtagagattatggataccccatatctacatggcatgtatagtccgactgggtacagggtgccatatatagatagaatatctttatgaggactcgggttaagtttaaacttgtatgtcaaagaaatatacgagatcctagtcggttacgattgtattttatctgtaattgcatattccgttagggatatggactgtattttgtaatacagaccccttcccctatataagg

SEQ ID NO: 39756 - DNA, 574 bp, Oryza sativa
ctattctcctatctaaatttattgctttactttacatcatctgctcttattggtctggtagtgcaccatatgcccgtgctaataaccgacatatccagtacgggaatttcctcattttacctccattacccatttaccatttgtgaaatttttagggttgttataaaccgcgccatactttccacactccaagatgtcaataattcttttgtacgaaccatgttactcattcttttcattaccacgctctttttaattaaccaaggttccactcctaaatcttttttaatgtcaactctaacctcctcttgatccctccaaggttggttttataatgattttttatatttttcacccactccacttttatgccaatctttttcctccctttttccattttcaaattaaaacgtttccaagtttccaaaaaaaaaagatctcatttagatctttttttaacaaaccccaccatttgaaagttttcgaccaataaacgtgttttccccccttttttttctcattttaaattttcgtcaaacccttttacttttaacaaaaaacccatttattctct

SEQ ID NO: 39757 - DNA, 561 bp, Oryza sativa
  unsure (1)..(561): unsure at all n locations
gcagtgnnatganancattttgaanctagctggccccttgccggtctagctcgctcgctcgctcggtttgtccccttgtgatctctgcttccaaaacgggctgacccaagtttgaattgaatcgcgacaccaaccacgcgctgcgcgggcacgcacgccgcgattgacttgtagagtcgtacgtccatgcaatatattgcagccaccaatccaccgcccggttaggcgcagcggcgtattggcatcatattggagtagcggattagccgtgctgcgtcggatgcgcgttggcagcagttgccagttgaacccaccgtgaccatggccgtggtcagaggtagccagcgccacggtcactctcttccaactctcaaagctactagtgcaccgtacgtcagtgggccggccaacgcccatgatcgctactgctacttggcacttgcagagtgagtactactgttccaggttgcagatgcagatgcaggcaagaagatactttggggtttcacgaaactgcaggctgcagcttcccttcagacctcctcttctcttctactacta

SEQ ID NO: 39758 - DNA, 649 bp, Oryza sativa
acaacttctccaccaacattctcttcccaactaatcacaacctttaccattcacttttcacacggtacggccactactcatccaatcacaaccctctaccactcacttctacctacttttttaataatcgtgtccaacactaaaagttcttatattccttcttgaccagattcatagtactaaaatgcatcacatctatccaaaatcctttatattttggaatagagggagtatatatttttgtgacttcaacagatatgtcgctgaaattgaccatatgacaacgccaagagtgaggtgacgtgtcaataacaaaagaaccactagcacatctctatcctaaattgtaggcatttttaagatgggcatgtgtatcaagaaagttgatagaaatgattaaaggaaggttgtgattggttaagaatagaaagttgatgaaataaataaatgaaaaatggttgtgattggttgaaggaggtagatgaaaaaaaatagtttcattttaggacaagctactgtgctataaatagctacattttggaatagaggaagcagtacttagaaatcctaaaacaaaaaaaaaacagagagagaaataaatgatatccacgaaaaaaacaaaaagaattgccatccgacgtggcgaaag

SEQ ID NO: 39759 - DNA, 753 bp, Oryza sativa
  unsure (1)..(753): unsure at all n locations
gcagtgcttgaaatccatttganatcgagctggtacccgcctttcgaacacttgccgctacaaagacttggatcttgcaggggcggtagctaccgcgctgctacatgcgcatggcttttcccttggttgcacgccgcccactatacctttcttttacttaagtccaggggctatttgatctttccgcaaaagaaaaaaaaactggttgatcactaatgtatgagactgttgcaaagtaaatttatatgtcagcgactcaaaattaagtaacttaaggcgaagaatccgcatccatgaataaacattgcgcggcttatcttagctaacacaattctaactcatctcaaaatttaaatgcattttttaggtttttaatatttgattcatccatttctgcctttgggaaaataacatgacaagatgagaataatctataatctagttgatgtcacctgatgatctgaagtagcactacaataatcccgtaattttttggtggtcaaaaaccatcaagtataacatgaaaaccgccaaaattcattattctatcgggcgtctagggatattcatatttgttggctgcttaccataagagaatatttttttggtagtcggaccacttagcaaattaaaaatattacgaactttataactttgtcggtttggaccgataagatatatcttactcttgcctgccangaaaccccccacgaaaatttcttttttttgaccgtaagacccacaaggtattaa

SEQ ID NO: 39760 - DNA, 637 bp, Oryza sativa
atccatgcgtacacaagcatttataacccacatgcaatatcttgatttgctattggctaggaaataatggggatgatgtatgcattgagtttgttgctagagtaaatatagtatgagagagttattagcttttcttgatcttggtgtacccatgaaatatatagatcaatttgaaattgagggagtaagggcacccgcaatggttatctataggctctctataagagatccatgtcagcatattttcctacttggaatagattaaatgaagagagacatagcaactctatccccttccctggagatagtgtattgatgaaaacgacacaatgcgttagacaccttaccatacctacgtatacatcctattgaggagaatgactattaatttatacgatggctgatatgtcttgtgatatttggacaagaactttgaagcttttattcgcgacggatcattatctcccccttaggataaaagggcatttcacgacaaagctttagcaactttcggtattatctgaaagggtgaaactacaaatatccagaattccaaccttaacatctagtgcttgatatttggatccctgatatttcttaaccgctttttctttagagcaacccagttactgatggt

SEQ ID NO: 39761 - DNA, 766 bp, Oryza sativa
  unsure (1)..(766): unsure at all n locations
cgccgggaatagaatacttttctgcatgcccgcaggtcgactctagaggatcccctcaaaggattggagttttccaaatcctatacaatttctatggaatagctcattgtatttaggttttggaggagatttagcaaaaggttcgatctcttggaaaaaaaatgctataactatatctttctcatccgattcatacgtttttcatgcggtctaatcaaacgattattcgtgcgtattctctgctttacatttagtcagaatcgtgtgtttttttatttctccaacccgtccatcgtgcgcccctccaacgtcgccggcgccggcggccgatcctgcatgtctcctccgcccgtgccgtgcccgcgcgcgtgcgccttgctcggcctcgctatccatctgggcgcgcgcgtctcctgccacttcacgcaacgggtggatggttttggagttttggccggtgcgaccaccaccaccaccactcctcgtagtgcgcctagcgccgagcggaggaggcgacgactagcctaaacaacaataaagaaaaatcgcgtgtggcctagcagctgcacacctgtagctctagtggagtangcccacaacagggatagagagagagacctgccccttatgcaagcattcaaatcaacctgtacaacctacgagggggggggtccaggatggccggacaaaaccacccccccctggccgggtttttggaggggccacgccccaatttctgccactttccataaagagtttttttttt

SEQ ID NO: 39762 - DNA, 595 bp, Oryza sativa
attccggaagtcttacgtattttttaattagggtatagatagatggatgtagatatagattcttccatatatccgtaacaaagcacgtgcgtcatagcaatagattaatttaacttctatggatggaaagttcttatgtcaagggtaattagcaccaagattggtaaaataattgtctgaatgaatttgcaggcaaactagtttgacttagggaatggtgatgcacacaattaaggttaggttgctccaacctgagcttcacaaattctgaagcaagggaaggggcaagcaatcactattcaccgcccattttaagtaaaataatattttaaaaacaagttggacacaagaggagaagcttggtgtcgattaaaagaaattttatggtacttcagaaagtacatagagtattaagattttacacattaaaatacctagtatctagagatattaaattttacactagaaaatatgatatctcctgtaccttgtgaatggttaagaatgataaaattatctgtcaattaatcaataagacatgtgaatgtgagtcaaacatgagatccctaggatgaattcacacacatgacacacc

SEQ ID NO: 39763 - DNA, 621 bp, Oryza sativa
tagcatgcctgacttagatttcaccagcattaacaaaataaaggaaacaaggggaaaaaatacccacttcccataaatctgcacatgttgggtaacctcgtattgcatactgaaggctctgtatagcctctgaccatttcttctgatgaacctaaatgccccataattgtcaatacttattgaaaatacatcagtgcataatttagcatgcataaacaagaaaactatgaagaaaaatctagagatgttaaccgcataactttagctttaagcaaagcacatagtctacttgttccttgctccaggaaaaaacctacattttcctaagcaagcaaaagttggagattatagctgggcaatggacattgttaatttaaggtttggtttgaagaagaacggggtgttctttttcctttgggatgatacaaatcctaaggatttggatcctattcttcctatcaaagcaggcctgacaggctgatataatcacagctttgaataaagataaagctccaaaactaagtattgcagaaatgcgaaatgtcaagcctaaacttaccatgttggcctataaatttcacatattctctatcaacttatccaaaatgacaggaacatgcc

SEQ ID NO: 39764 - DNA, 603 bp, Oryza sativa
tcaaaaaaaatggcgcgagacgagacggccgacgtgtgtgttcccaactgattaactaactaaactaactccctcgcgatgatccagagctagagctgtaactatattacccacgaacacgcggattaagtccacgaactaaacgagattatgtcgcagattgggttagtttaggacgttatttaaggatcctaacttgtctaacaaactggagatatgatgctactctgctcgttataaagattagtcgttttcattttgttcgggggaaaagcgcgggtccacggctgacaggtggggccctcgaagacttggcgggaatcaaagtcaagtagtcaactgcctaaggcagtgggacccaattgagacgttaattggttttgtatgggaagacttgtgaaaatatacatatttggccccatctcttttcgtttatatttatcagctaaaatttaaatttttaatattaatttagagttaattttagagtttttttcattgttgtttgttttttaatctttatttctagatcgtcgagaacacgtatataaaagttttatttataaattattttttattgtaaatatgttgttttgcctttgc

SEQ ID NO: 39765 - DNA, 604 bp, Oryza sativa
caagtattaaaaccggtgttaaagaaagattgtaaatgtgtcgtccttgtggcacttttgctatttatcctgaaggaatatgtttcgataaagtgaagaatcctccgaggtaatttataaatatatactacaaattaggtcttatttgtttcagcttaagattattaaatataatctagattattgagccagattactataagttagattatgataagctaagttgttagctatttgtttttttattaatagttgttagccaccaaataatctaaaaaaaacaactttagagtgtattaccatattacagtaatctgacttatagattataataatctatcataataaactatctgtttgtttcagcccacttctaacgattcaggttataataataataaactgaatcatacaaggccttaaatacctccctccatttcccaacgaaaaataataataatcttccatgcccttatttgttcttaacagtataagtggcgtcccaattctaacaaaaataaccccttctacattagtcaccacccaagtgtttcacgtactactgctgttgctattataaatacttcttttgaaaaaaaaatat

SEQ ID NO: 39766 - DNA, 615 bp, Oryza sativa
ccatttttgcatttcaaggagcatagatatgatgtcgattctaacaatataactctgttttacattattcttaacaatataactctgttttacattacagacacaaggaggtaatttcctgtcatccattagagaattggatgaccaaaatcattcttcttttacatttaagaatcaatacattcaggagggccatctcggccatccttgagttaaaagaaaatatttcttccagcggtttatgttaatctgttccttttatttattggttaatgtaagaactttagcttttgtcattctaatgttaacatgaggaattaaggggcctccaattagtaaagataaatatatttattgtgcacttgatttatcttaccagattctccacttatattgcttacggccagtccaagcttgccaacattttgcactctaccgagcttgcacgaattctgaaggtagtgttcttatttgctaagcatgcctatgagtaaattttgtatgttgtctctgtttgcatatgattatagccaaatctatgaatcataagttggaaacccgtaagtatgaatagggagatggtgtgaacatttcagcaaatgcgatccatcccgg

SEQ ID NO: 39767 - DNA, 728 bp, Oryza sativa
  unsure (1)..(728): unsure at all n locations
ttatttcctaaacacaccctaccaatttattgccaaaattaaatagtatgtgtgttttttggattgaacccaaatattttggtggttcccttatactatttggtcattttctagaagtttcttccctgtactattagaatttgattttatattggtagcaatccaaatggtagccaaataattttaccctaccaatattttggtagtgccaaattttgcntagactttggcactaccaataaattggtagggtagagaaccaaacaagccctaagaaacggaatcagccctaatcaatcatatcttcctttttcgtggggcctctaatcatcttcctttgggatagtggttgagcacgggttatcatgtagtcgagtcaggttaggccaaatcacacgtcgacctttgggtacgtgttgggcctcacttgtgatggattgggccatgctcagtctttacttggcaagtctctcatcgactgcgggggtcgcgataaaccgccataaacggttccgggttttggaccaccaccccccaccgccgccacgcagccggcggccaccaccccatccccgtcgactccaccaccaccacgctagctagctgctgcctggacttggatcagacagagcaagggtagtagtagtagtagtagagatgcggctaatgcttctcgagttccgggtaccaaggtcgaatntcgaatttgcaatgnnaangcgcgcccg

SEQ ID NO: 39768 - DNA, 710 bp, Oryza sativa
  unsure (1)..(710): unsure at all n locations
atgtcctctaaataactgctcacaagtcatgatcagaagaataatgacaactatgggctaacaactcaagacatggatattacagtactggcttgtcatgaaaaaagcatcaatcaattaatagaaatcgttatagcattaggggatggtctcctgttcctgcacaattaaggctgtcaacttctgatggtcgtgtcagatctttttaagctttggtgttaattagcatcttataccatgcgtgcacaagatcttgcagagtttccttttagctcttccgaacaatgaaggtttctcatgcaagcaagtaatgttactgatggggattttttttgttgtttcctacagtagttttcagctgcattgtcaagcaagagtactcctttctgttgcttctacctcgcacattcaatccgtattaacatctataaccaatctgttggtagttaacacagcagatgtactccatccttatcagaagaaccctctatcacaatcaatgatttttttcctttaactgggccatgtcctttaaatattaatccttccaaattttcctaaaaaatattggttcaacgttcctaaaattccaattttcaaaaaaaaaaaaccttctttttaccatatggtatatatattaaggcatatgcgcaacttntttaaanaaattaataaatggtgtaacaatgggacattcggggcaattaatt

SEQ ID NO: 39769 - DNA, 809 bp, Oryza sativa
  unsure (1)..(809): unsure at all n locations
ccggcacatggcatgtttgggccaagaccaccattgggtctgttcggttcagctgggctgtggctgcacagccacagcgctgcagctctcctagcataatcttgcttcctgagtcctgtagctacagcgcttccgaactcacccattatatggtgaaagtttgctggacctaatgggctttgtttcctaggcttcgggcaatggcatgtgtgtcttgaggcttggtctgcccttaacacaggtggagcaggagcccaaaccaagcccaaaaactagattcgccactagacctgggacatgaacctcaacaaatctagtcgacgacttggattgatacccaattaataacaatttgtaatgtaaattttatattataaccatatgacacgtgaaagagtgaaaaggtactagccagcccacactattccaacccaatagcctttagcccataaagtccaactactaccaactctcctctgccctaatttgtctctcacagtcagcctactcccccatcccacaccgcgccgcctccccctcacgccgcttccattcctccccaacctcatctcctccatcctccccctcatgccatccgctttcctcccaaacctcaacttcaccataatgtgctcccattcccctcaaattcaaaatgtatctcaaacaacaaaggcgtacaagagatagtcgtagagcaaatgaaggctagaaagtaatggtgaccatggtggagactagagaacaagatgaccattctaagaagaaggatttacatgggtaccgagtagntgttcatcttcacagct

SEQ ID NO: 39770 - DNA, 718 bp, Oryza sativa
taattttcttgtggtgtttcttggcagccaaagtaagatatattcttatcggtccaaaccgacaaagttataaagttcgggatatttttaatttgcttagtggtccgactaacaaaaaaatattctcttatggttagcagccaacaaatatgaatatccctagacggccgaatgaataatgaattttggccggtttcatgttatacttgatggtttttgaccaccaaaaaattacggattattggagtgctacttcaaatcattaagtgacatcaactagattatagattattctcatcttggcatggtatttttccaaaggccgaaatggatgaatcaaatattaaaaacctaaaaaatgcatttaaattttgagatgagttagaattgtgttagcttagataaaccacacaatgtttattcatggatgcggattcttcgacttaagttacttaattttgagtcgctgacatataaatttactttgctacagactcatacattagtgatctaacagattttttttcttttgcgggaagatctaatagtcactggacctaagtaagaggaaggtgtagtttgcgcgtgcaaacaagggaacagccatgcccacctagcaacgcggtagctacccgcacttgaagaaccaagtctttttaaccgcccgtgtgtctaacctccctggtttacgccaaccccaagagcttaattaagtttt

SEQ ID NO: 39771 - DNA, 640 bp, Oryza sativa
cggttacataccaagaaggaaaaagtatacttaaggtccctcaactagtcatcggtataaaaaacgttctcgaaccacaaaaccagatatgcggggcccttaactatacaaaacgggtcacccgagatccttcggtggttttgaccccgattttagtctacgtgacgactgagtcagcatggaccccacatgtcagctggccacgtcatcaccctctctcctcctcaccctttctcctctctctctcactgtctcacactcttctcgtttgggtaggcagctggggaggatgtcggagggctgttgccttcaacggggctaggtgggacgagggcgtcggcggccggcgacgggcgacacgacggcggcggctggcaactggcgacgcaccgccgttgcaaaggccgcaggagcggaggtgggccgccgtcgagggaggaggtaggcaagcaaggggggcggggaggccggcgatgacctcctcaccggctgcggggggggggggggggcaaggcgtcggcggcaacgaggcggttcttaggcgcggccagctcgacccgtagtctctcaagctcctcgccgagcggcatggagggacgacacggcggggggaagccagtcgcatcgtcgggtttgattt

SEQ ID NO: 39772 - DNA, 595 bp, Oryza sativa
cctatgttcagattcgaaatattaggatatgtcacatccagtattagcttagttttctatgaggtcgaagggagtagctggctgctacattgaccgacggcgcctgcctcaccaaggcggtggcaagggctgcagagcggaccacggtcgacagcgagacgtttatattgacgctcatttttatgatactaggtgattcctcacgcttcgctacgagaattctcaatatattttgttagtaaaacatcagggtttattagtacttatcatgaagtatatgttaaatattataaaaataatagatatatttgttaaaatattgtgcaaatgatgtgagtgtggttattggatatgcttgcatattgatttatggaattaaataaattgtagataatgttatatgcttacatgagattatatatatatatatatatatatatatatatatatatatatatatatatatatatatatatatatatatatatatatatatatatatatatatatatatatatatatatatatatatatatatatatatatatatatatatatatatatatatatatatatatatatatatatatatata

SEQ ID NO: 39773 - DNA, 555 bp, Oryza sativa
ttagtacttgggtagtgggttgttgcaaatcaagccttcagtggttatgacaatcatgtcatcgactttagatagagaattgaatcacttgcattacgagcttgactggattagttagctgagtgggttctggctcctctagattgccatgaatagctggagaaatggataaatatgagtttaagcatgcttaaataagttatcttaatctttccttgcgatacttttgctttaattgttagttgtgtgacatcttaagttcacagagttgcactttacgtccttgaaatattatgctatattctaactttttggctttggatattttgtagtaacatgaggcaaacgctagcttcctccttattaagcttggttggaacacgtgtggtctatgaagatgcagattcacttgaaccttacatggatgatgcctgcttgattgtccaagtgaaagcctattcgataggcttttatgtgtcctgcaagctttgcttggcaatagccaaccaagttggctgaagactaagccaagctccaagccagctgttaaatttt

SEQ ID NO: 39774 - DNA, 536 bp, Oryza sativa
tgtataaacagtacacatgtctgaagcatggacagtatactatgcagaacaagaagtgacagataccaaaacatattaatagataaatgatacgttttcttaaaacataatttcttacgctgtaatacctccgtcccaaaatacttattgctttgagtttttatttgtaacttttaatcattcgtcttattaaaaaaattatgaaattattatttattttgtttgtgacttgctttattatcaaaagcattttaagtataacttatcattttatatatttgcactaatttttcaaataagatgaatagtcaaacgttataataaaaaaaagtcaaagcgaccactaatttgggacggatgtagtattgtttagatctcttgtcctaaactagtatttgttaagtttatttattaaaatatttaattaatatctatagtcttattggtaatcattttcagtaatccaataaatgtattaatactagtatagtaccaatacattacagtaacaaactgtacacatctctgaagtatgg

SEQ ID NO: 39775 - DNA, 513 bp, Oryza sativa
acgtgagatggggccgttctgtgccgtcatgtcctgcaccgttagattgaaatcgtgtggttcagataaaggaggatgaccccgcaccagattcatgtgtgtttgggccgtgcaacgaatgggccgggccctttagtcgcgatgtctgcatatgtgggccacagcccacagccccagtttgagcactgcgcgcggcttctgttgttgcgctccggatcgattcggttgtggtcacaaacagaaattcagaattgatgcttcgccatgatatggtcgtcagattcattagcttgatcgatcgatcgatcttacgtgttcatagatcagaaagaacgatcatattaaaaatgaaaatatattaattgatgatgatcacaatgcattggttatacaacatcaaattacaagtgagtgattccaatggtacaacaaattaatgcggatgcaacaaattaattaaactaacacaaggggggataatgggtaccgagctcgaattcgccatatagtagt

SEQ ID NO: 39776 - DNA, 547 bp, Oryza sativa
actatagggcgaattcgagctcggtacccaaaaaacttatatactgatcaatatataaacccaaacagaagttacggaccttagctagatgatctgaaaccataattgtacgagctctaattgtacagtacccatgtattacactagtattaattgatccgggaaaatctagcaatatattgtgatgaaaagaatatattgcaactaggacacacggagaatataaatcacaatcccaatacagttcatccaatcaatcatccatactcacggtcgatcgattcttgattcgccgattgggtaccacacgcatgatcatctaggcccccattcacgtactcatccatctacacatcttcttctcatcatctcctcctcctccatggccactataaataccactcgccatgcacactccaagcacacacaaagcaagaacctcgagctgatctactagctacctagtactctcatcttcttcactagcttttgcttgatcaattgcagcaatggcggcgaaggcagcgctcgttctagcggtgagcct

SEQ ID NO: 39777 - DNA, 641 bp, Oryza sativa
taaacggtgtgttttgtgtgaaaactttctatattaaagttgttctaaaatataagattgattcatttttcaagtttgtaataattaaaaactcaattaatcacatgttattaccacctcattttgcgtgaagcacttaatttttatcttcatctacatcttcaggagattcaaacactgtcttggtgtgactagataacggtataccattcaatcaatggaatattttacatgctgatgtcaccatgatattagcatgataccgtaggtaccaatactcacatgtattaggttatggcacctaagtagcattttaatgttagcagataccttaggtacgggtccgtccggtatcaagagtacccgacgtgatacccatataccagatctggtatctaggtaacatgatgacattaggatggtgtttacaaatgtaaactatatcggatagcattttatagtatttccgtagcatagtactctctctttcggaatgttagatattttggtgaaatttgactaaatttatagaaaaatatataacatccacaatagcaaattaattttattaaacctactattaaatatattttataatatatttggtggtctaaaccatgttaattactacttttcttata

SEQ ID NO: 39778 - DNA, 510 bp, Oryza sativa
tgatgatgtcctactgaacaatcgatctccaatcctaccaactaataaacaatctaatcctttttatcgtcttttgcacaatcactcgaactctagggaaaagtgagacgatcaaattaagcaattcgattcataattctctcgagaaagcataaggtcaaaccatttttttttttaaaaaaaacagaacatcctctatcctgtgcattaatggcgggtacgtgcaatgcacgccctctcagtactagtaacatgcattaagcaaaaaaaaacaaagaacaaaatatcaaaattaaaagggcgattaatctatacctaaggtaggcatcgtgacgggcacgtagtgcccacgactccagaatcctgattagtaccctccagatacaattctttaagtatgataagaggatgtgattagttggttaaactaattaaggagattaattagcaaacgtttggacgcctgagctaagcatctgctgctaatattgattcaggcatgctcccctt

SEQ ID NO: 39779 - DNA, 579 bp, Oryza sativa
aagttttgatgattctagtattacatcttgtcgaaactagatttcggcaataataaaagggggtggctatcaagctggaaaagtgtatgggtttggagacaaaggatttatacaggttcaggccttcttattgaagaagtaataccctactcctgtccggggatgaatccgccgaatgtcttattgattatatgatttggagaaaatcaacatctgccgctagaggcacccggaccccccttatatatgggaagaagtccgtgttacaaaagataatctatatccctaacggaatatgcagatacagataaaatacagtcgtagccgactaagtctcaaggtatttccttgatgtacaagttgagaaacaaacccgagacacaaataagatattctatctatatttggtatcctgtattcagtccaaataccatcgccgtgtagatatgggatatccataatctccacagtagcccccacgacctttgcagtcaaccatcatagccttctcaaagataatgatccgagtgcttcaaacatttcatgccaagatctgccgagtagcgaaaacaaagactg

SEQ ID NO: 39780 - DNA, 534 bp, Oryza sativa
gttagtacttaagcatggtctaatggggaaaaaaataaagcttcctaatagcgaaaatgaagtgtcgataattttgatactaatgcaactaaagataactcgtacagaaaaattactaaaatagctaaggaaaaatttaatctctcttgctaaggatgacttttggtgcttgttttgactaaactaatagtatatacacatattatacctattaaattgcatattttttgtcaaaaaaaataaatttagggatataactgtgccccatatgtcctattgagatcccccttctctcgggtgggtgcagtggtgaagatgctatacatcacttcacctaccaagccaccaaaaggttctatgaatataaatgtatttttttacacaaccatattaatcaatctacactcttataatctgaaaatacacattatatatatatatatatatatatatatatatatatatatatatatatatatatatatatatatatatatatatatatatatatatatagaggggtgtatatatata

SEQ ID NO: 39781 - DNA, 597 bp, Oryza sativa
ttcaatcatacacaataatccatccaatgatctaaatcacactactctattaggacaaaggaaaaaaaaacaatagcaccacaagaagcataacagagtggaagtcaggcagaagatctgtccaaactccaaagcttgcaatgcatttgcagccaggattggagttcaccaagagagcatggggctggaagacgaacatgtggggccattcccaaaaattttcatagaatccctgcattgtctctcgcagtcactgctgctcatcagcctctcacagacctgtttgcctgctgctgctctcttttcatgcagtgaacctgttgaccacacacacacacacactgactgggccccgggccccacccacgcctgcccagcatcggtcagtgaggacttgtcgatccgatgatccaatccgtgtcgggcggtgtggcgccaccaaactggcgtgtgggccccacctgccccaaccctttgccaccatggttttagggcacggatcctatgccgtaacgggcccacgtgtaagtggctgtcataaactgtgtgtggacagtcgtattgtagagaatacttattaccggtagtttcaaaatg

SEQ ID NO: 39782 - DNA, 1160 bp, Oryza sativa
tgcaccccaccatcgtccaggcccaaaccaagcaagcagcggcagcaactcgaccccagatcgatcatcgccagacactcacctgctagttgttggcgccgcgctcgctcattcgtgcgtactcatatactgtagcagcctcgtgtacacacacacacgcaatgctctgttcttgagagatctggattctgaacgaacgaacgccggcagcagatgcttcttcagagtcaccgagaaagaataatttggggttgggttggttgaggactcttgccggtcggtgacaatcatggagaggagagcaaagtaagcaaaaaaaccgtgtctcgctcgcgagagagcccatatcatatggcgtgcagatcagccaggaatatttgagtaaactaacacccaaagtactgcaccgtactcctcgcgaagatggcacagctttcatccatcgtgtccctgttattaggcatctgcacgcatggagtagtaaattacacgcattgcatctaagagcacccacaatggtaaagtaaggtgctctctataaaacatgtacatctcataatagactagattaatagtaaaccacctcaatagtatgtctacatgggtatctatagctctctaatacattgcctctttttctctatagactatctctaggttagtagatagctttgctctctctcttcatttaatctctttcaattaggaaaatatactgacatggatattttatagagagcctatagataactattgtggatgccctaattagctgccttgatcattaccacagcaaagccaggcatgcccaacagtaatctaggtacccacactgcgcgcgcgcgcacacaactaccttgatggtatggcaccggtaattaattactcatcgctgttaagtctgtatctgatgagaattgtcgaggaacgacgacgtagggtgaagtgcagtgctgctactgaagattctacatggacatgattacagcaggtgatgaacagaacataaaaagttttgtgcgagacgcacatggagatttcaatgaaggataaggagtgtaaaattaataaagatttttagagccagtgaggcgacggatgagcgatgcgcactggcaggatggatgcattgccggatatgttcagctcatccgcgaaag

SEQ ID NO: 39783 - DNA, 601 bp, Oryza sativa
tcaaaaatcaaaacaactcaaccaaaatattgcattagaatatgtaaaattatggaaagataagcctaattaacttacatctcttttattctcaaaacaggtaattcttggtgatatattatgtacggttcaacttacagcatatttgacagttgccaactgccagctccatacacaaaatagagtttaaactgttaacatttgacatctttatacataaaagtttgttcagttgtaagattctggatgcttttattgttgttgttatttcaacttcctaaactattatttctcagttcggctttgcaattttttatgatggtttacaattttacaagtgctggcctgctgggccttgtaagtgattgtctctcagttcataactttcaatctagacatatggcattatcaaaattttaagaacagaagttacctttactcctgggcaaaagctcattatagtataatatgagcacatcaatgaaaacaaactctgaaaggttcttaataagcagggccggagcttgggctcaggaacttgagcacaaagatcactatatgtaaatctggaaaggaaacgagaacagattagagagagaca

SEQ ID NO: 39784 - DNA, 600 bp, Oryza sativa
ttataggacatgatatgcacgcatcatcaataatcacactattcaaatgctcacctgcatttccttcttccgatcaatcaccaaggctgtatttgggccatacaaacgaacagtcacagaagacttgttgcccttgccatcttctacggagacactcagcactgcaagcagtaaattacagttgttgtttccactaagttctcggtaaattggtagtacttcagtgacagaacattatataattttctatagcaaacaacataagataagatgatttaggcattaaaaaagcaagaaagaaatggtaaaagagtccctgatctcacaaaagttcagaaatgcaattaagttcataaatgttcagaattcagaaatgcaatcaggttctggtaatagccataatgttatgtctgccgctatccaaattgctttaaaatgtgcctaaaaccaattttccctttgtttgagcagcagcctgacctctgttttcctctacttacaacgagttgcttaggtgaagcaggaaggaaaaaaatcatgacaacgcgacaagccatgaaactgccaaggagcagggactcacacatattcgtgatgctg

SEQ ID NO: 39785 - DNA, 549 bp, Oryza sativa
  unsure (1)..(549): unsure at all n locations
aaggtgttctctataaaacatgtacatctcagcaatagactagattaatagtaaaccacctcaatagtatgtctacatgggtatctatagctctctcatgcattgtctcgtttttctctatagattatctccaggttagtagatagctttgctctctctctcttcatttaatctattccaagtaggaaaatangcnngacggatctcttatagagagcctatagataaccattgcgggtgcccttactccctcaatttcaaattgatctatatatttcatgggtacaccaagatcaagaaaagctaataactctctcatactatatttactctagcaacaaactcaatgcatacatcatccccattatttcctagccaatagcaaatcaagatattgcatgtgggttataaatgcttgtgtacgcatggatgcatgcatcaatgtccatttattcccgggcccaaatacggaatagacctaataaatgaacccaaatatgtaaatcatttaggaataacctcaaaaaaaaactatatgtagatccattt

SEQ ID NO: 39786 - DNA, 1387 bp, Oryza sativa
ggcccacatgtagtgagaagaaaaaaaatataggtccgcatctcctctcttttcttcaatcttctctcacggtcccgacaaaataaggcaggccggcgcaatctccagcggtcgccacggcggacggcgggagcatgtgagcgggcgacgacacgggcacgggcacttattcctttcttataccaaagtagttcatgggccaaagtcgctttctctgtatattcggcgggtgacatgcaccgggatattttggtgttaatcatgagttgggtttgccactcggggttccagtccttctggcgtaatttattgttgagaatagttacttgtgacaaaataaattgcttatattacttgtaacacgcagcagcaaaattcccaagcatagttccaaaccagcaacagagtccttcaaaacctaaaggcaataaataaaggtaacaaaaggttaaagttcaatttgcttacattcgattaatataataccaaccaaaaatccaaaatatatgttacactaaccagaaacccaaacagttcaggcactaccgtaagtacatggtgattatgtacatgctttctaatcaccatagatttactaagtataaaaaataatcagaaataacctacatttccatggtgctgattataaatgaggggggggggggggtgttgcatgatggaatataaactgtgattatcatagatgaactaagcttttacaacagtactttatataaatttggaaaaggccgaaaataatttaggaattaatcgtagaactgacacttgaattagtccaactataactgagaatgtcgaaaatatacataggagaaatggaaagtttgtaaatgcctaaataaccccttaaaccctgccgtttgaaaatgccaactacaactagatgtgaaacacatcaggataaacaatcatggcaagtaaataaatccacttataatttggttacaatttatgtatctgtttacaattgcataacttcactcactaatggccaacaaggaaataataatgtttaacaagctcaaatacttcccattagaatatgatcaaaactatggtgcatagttgcacaccttttacagcaggcaatgtacatttagacacaatcaggatgatccacgctagagctcaaatgttgtctgcaagttctaattcatttagtacaatgatgcctgaccaaaattccaagccaagcagctttgcatgaaagcccagcccccatcaattgcatatttgcatccctcaataataaaagctctaacgatatcacgttatgtgtgtatcatgtaatggacccagacacttttctagacataggaaatctggatgtgttttaccacaatattaaaccaagtgccggggtgca

SEQ ID NO: 39787 - DNA, 737 bp, Oryza sativa
gactaaaatcatttttagtcccggtttttaatggaaccgggactattatggatttgggtcgaccgaccaaagatagtttgtgtatccttcaattgatgaatgatggataccatacatgtgagaacatactagtttcctcttaaaaaataggaagagtatccttcatatatagaaagagacatgtttccaatgctatttatttttctttcactgctatattgtacttttgtaatagaaaaaaatgcattattatacagtgcttgtaaagtgaccagaagacagaaagagaaaacttgaaaatgacacatgcacacacactagctagctcaaacaagataatgtttctagcacttaatcaactcctatctagctagcaatagaatagactacagtgcattatatatcggtgtgcagaaagtggaagctatagcttactagctacttttacactggtttctcaagtggggcaaaacagaatcgcccaaaagataggatacatgcatggtgcacacactcatactaatataccgtacataagctagctttgcagcatgcatgggaaagctagcactctccttgccatatcattttttgtttgtttcacatcactgctctctttgccatctatctacatcagcgcatatacagttctacacatgtaattggttgctaaggtttttcacctaatttttgcaccatatacgtcaacgcgtgctgttcttttcggccttgaatct

SEQ ID NO: 39788 - DNA, 688 bp, Oryza sativa
ctgtagatgataaagaaaaagagaaaatgatcctttggaaggtcgcaatatcactaatcgggtcattgaaacattttggtgagatattatttagatatagaagaaaatctcacaggctctgcatcaaaagatgcacaaagccataatcttattaaatcaagtctgtgcatagcagattgaaaacaagattacaacaaacaagagtttctgtaaaagattgaagcagctctcagcttattacgaaatctccatctgttgttcttaagaatcaattaaaataattcattttggtgagctataagaatttgttactaggggtagaacaatacaggagtaattaggcattagaattagtcccccaaaaagatcttcacggattggatggtcattcgtggtcaacaataagtactatcatttcagcacgtgctcacaattcaattctacagcatgtcatggctatgttctatattgcctgaactcgaaaagatacttacagcaagtataataacacatgagccagattatgaatcatcatgaaaccaaaaaaaaaaagcacgtatagttcacgtgtaattttgctcatgtgatgttgtacacatatagttgcacacaaccttaatggaatggagggagtaatcctgcccccacttctaaagaatataattgcatatattgttgcacacaacct

SEQ ID NO: 39789 - DNA, 528 bp, Oryza sativa
tgcaatttgtagccgccaaattgatttcattcttcctgaaaattacacaaccgtgttgttaaatggacagggtcacataatactgtcttgcagtactcacctatttgggtggataagtacagaattaacagtgtttcctgcatggacaagggatttccttaccaccagcattcatgatattgttgagctgattaatggtgtaaatctatggctacgaattatttgagaaaatctactagctttccaaggtcaacataataatatgggatgaatcactaaattatgggtccatatattcatagtgctatgctacaagagtaatttgtaggggtaacttcctcatgtacagacatacagttcatgaataagttgtaagccggcctgcaaatcctgataatgacttggctcattttaggtgatgcataatacatctttgcaaaattatgtttaaattgtatcaacactgtatcatgcacccacattgatgctatccttcaaatactgcatctgctgagatatgtttgatag

SEQ ID NO: 39790 - DNA, 1651 bp, Oryza sativa
caagattcgtgctgaccatttaacctaactcctccgcctcctctccccggttccagatcgcgccgccacccttctcctcccgtcccacgcgtgaccgccgccaccaccgccaccgctcccccggccgcctcgccggcgccgttgaccttttccagccagccggcgaggcgggcggcggcgcggtggcggtggtggcggcggatcacgcgtgggacgggaggagaagggtggcggcgcgatctggaaccggggagaggaggagaggagttaggttaaatggtcagcacgaatcttgaagcacatctaatgatccaaaattcaaattataggaggtgggattttctgtcacatgatatatatatatagatagccccaaaaaaattggaaatatgacctgcacggtgggcccaccgggacagagagacggcccgactcatcaccgaagtgccaggcggctgggcctagctgtcagtgacacgtcagagcgccggcgtaggggaaggctaccccacccgaccacgacttccaccgtcttcttcctccacgttcctatccatggcgccagttcatctcgtgacgtctcccgctcccgctcgcgttgctcccaaaaccctagcggctagagccgttgctgcccgatcgcgcagcgagatcgatcgggcgcaggcgccgcgccacgccgcggccaccggcaaccggtagtacaaggaaggatggatgagagcggctgcggcggcggcggcgacgacggcgagtgcatcacatctctcccgtccgaaccctagccgtatgcggaggaggagccgccacgcggcgccatcggattcgctgcgtccgctcccaccattgcgcgagtcgcacaccggccggcctggttcctctcgctcgccgaaaccctagcagacgaggcgagcggggatgttacgaggctacgccatggcggctgcgggctttttggtggcggaggcgagcacctcgagcgcttcggttgtcaaggtaagggtattcctcaggtggagtcgtggtccgtggaccttgaggggtttggggaatttgtcttcctagtgttttttgttacgagggtaatccgtgattttggttattcgactcggaatttcactggttctgatgcgatatgcttgatcactcagttgaattatggggaatctgctctggttttgatgaaatctgcatggcaataaggcgattttggagattgcgtcggttaattgggtcatgctgttggattcccaggaggttgatatcaggccacctgaatgtcacgaagcttctagagcgagatagaagttcggggaaccatggcttggatggagccaccacaacttcacagctaccgtccaggttgcctgctacagcgatactcaccttgcggtggtaaggactcatggaaactttgtcgcagttaattttaattgcactcattttcttaatgtgtcattgtaatcatgcaatcgtattgttctggtctgtctgtgtatgggcatatcactttctttatgacatctctaattttgtgtcggcaaggatttgatatatcgttatctacccgtggaaaaactatattgtgatatgttcaacggttctgctactcttttgggtccattcgtgataactgaggggatcggggtgc

SEQ ID NO: 39791 - DNA, 811 bp, Oryza sativa
ctctcattgcttctatttcttagctagtcgtctcgcaattcgttgcctggtcatcatcgtggggtgtccatggcaatgctcatccccatgaacagtgatgcgaactctcgcggcatcccatttgacccccacacccctgccttagtcgactacgaccgtaatggtgctagatatcccatggttgcaagtttgcaacgagaaagcggtgctatgcttgaccatggcagatccagcatggatccattggctgtggagcatgagcggttatattaaggcttaggacctagcgaattcatcggtgtggcgatgaagcagcaacggatccagtggccagggctgaccctaacgagataatgggaaaagatgaaaggatgtgtgatgtgtcagtggcaagcggctcgccggctgacttaggcagtgtgggacacgcccccttcctaatcatgcacacacgcagggggatgaattgccatccgtagcgcgcgcgcgcacactctctctctctctctctctctctctgagatgttaggattgagtttagtgttgtgaaaagacacataacaatgcactaaccttttattactcctatttaaattttgatatgtctatccacatatttggtagattttagtaagctattggacagcttagatcgcataaaaattatgtgtgaacaatagccttattgtatccccccctcccctttctcccaggcttgcatgctcacctctcacccaacattgtggcctccccaatccccatcctcgcgacgagtacccctcctctctttcacaccctcccattccaagct

SEQ ID NO: 39792 - DNA, 4495 bp, Oryza sativa
ctaggccgaagccgttttgtcaatcgatcgatcaaccgtttttttctacgtataaacagtgaggacgatcgagcagctctgaaccatacatgtccctttcagtaaagcagcaattagccagctgcagggagatgtgcagtgagcaactggacatacacacgcagacacacacaacacaagttgtgtccactttaaacctgcacctgcggctacgcactgactgcaccgggatgctctgtacagagcccaagctttgctagtaaatataggcttgtgtttagatccaaaactctgcgctgaactaaacacaacttttcagtcacatcattttcaatttcaaccaaaatccaaactctgcgctgaactaaacacaaccatagattgctcgtgttcgtgctcctttccggttaacctgctcgtaatctttttaatcagtttagcacgcgagctagatagcgtagagaccaccggctttcgaggaggggaggtggtggttgccgctgcaagccacattgattgaacggacgcacgctggctgtatgtaaccgaacatcttaatgccgcgatacgctacaaaagttggcgtagcacgagccattttttcctttgtttcttgcagtactcatcgtttctcgagagcaacacgacgacattgacattgccgtgatgctacgagtacgagctcccaggaggagagaaattaagcccatgaccatgaggccgtgactccatcacctagctgcgtgaatgccagaacaagggtccaatataatgaagatgacaatgcaagtttcatcagtttcctattgtccttttctctccaggaaatcaggagcagggcggatgataaatggatagtggcaagaagcactgtcactgagagacagagatgctttgccatggacgccacggagtttgaactttgaagcgagctactagtagtagcttagctgactgaatgagtgagtgcagaaggatgcatggtttctgaagaatgcactcttatcccttacttgagctttacccaaacacccccagttatgcggcataacgaaagggaaacacaatagtatcagcgattattagttaatccaatccaaaggcggccaagttccaaagtgatgcttgccgtaaattggggctcattgcaagaattcctcccttgggccccgaacacttgcagcagttggccgtaaatcaaggtgcttctgcctgcagcaacgagcatggccgaacgttttcctttctttaacgggtaatccctagggtgtaggtccagggcccataaggcccacatggcagcgagagaacatgtatatgccggcctgatgaagagatcggacggcctggattggcacaactggccgcatcggacggctgcgaggcaatgaacggagagatgggagatggagagcggcccaccaggaacgggccttttttccggcctagggaagggagcctccgtttttgggggcctttattctgttcccactctaacgagaaaaactgtctcaacgcacgctaccccgtggcccacaacttttcacgcttttaccgggcccaccaataaactacccctacagtaacaagtactccctctatttctatttcaggtataagataaactgctttaaatttaatcaaatttatagaaaataataataatatttttgatacaagataaatttattataaaaatatatttaattattaatttaataaaactaatttggtaatgtaaatattattatatttgattataaatttagttaaacttgaagcagtttgactttaaccaaagtcgaaacatcctgtaacctgagacagagggagtagttaaaaaaaatccaaaaattactgcagctgcagcggtggggccgcgtgagcgtgtgagtatgagacgatttgtggatgaggagaggagatgcacgccgatgccatgctgcattaatggccggtggtcgcggctcccgacgaataaattttgccgtcggtggccggtgcagcacagccggcggtgattcggatagtgaccctctccggtgtgtactacgtgtcatcgtacaccacccccccgtctgaaacgtaggacgccttgtcctcttatacacttggcacatgtgcacatcgtactggtggccattgacctctccaactctgttttccagcggtaaactgattagtacaaaatctcaatctcactacaatctttctgtgtgaacgagattatactattgtctgcgtggtaaacgtacggaatctttcgcctgcacctggggcggacgcgaaggcgacgcgcggcggcggccgctcgtcggagcggagatggtgaggagtcgctcgcggggtcacatgcgatggcgcggcggcggcggtgggcatgtgggcgcgcgtgtgtttgagggggtggtggttctcgcggcgacgttaacacgaacgtggtggttgctccacagatgtcagctaagcatgtgaaatcatagtgcccgcgggacccctgctactactaccaccaccattacctctcttgacctctactactactaatttatgcctgcctctctagtctctctatacccacaaatcccgggtactaatactactccaatacgactatctcagttcagctctacctacgaagagcaaatactcggtccattttgggattttcttctttgctactctactcttgtttccatctccgccaataattcagggttcacccgccaagatccaactaggacatgtccctgtccgctctaacaaacggatgcattatgcgctacttgcatgctatggctacatggcttggtgtaatttcggactgttcgattgctacttctggctgatcttctagtagttgagaataatgcaagtggtttatggctttaggtgctattctgcggacacgcgctaagcaacaaaccaacgggtgtgtaaggtttgctcttgggctgggttggtagaaattgttcctgctgaatcctttgggctttcgcttcgcactattccagcccaaatatgtatggaagttttggtcttggcccatcattccggacaaatctggaagcccaggaacatattgcgcgaattgtatgtttccttgcctctatgctctttttcatagtggcagacaaattaacaaatcggcaggtttgtttcagcacacttaagggcctgttcagattgtagccaaaataaacctaaaattttggcaagatagcaatattgacaaaattttgataggatttcttatgtatttaccaaatttggtaacaaactaaacgtgatattttttagcaactttgctaaaagatggtatggttgaaaatgacatcaaagtgaacaggcccttacagtactgagttaccaactagcaaatgcatttttacactgtagagatcgtaaatctgtaactaagataagatatgttttacaatgctctttgctaattgtaggaccaaatttttagataatggaaatggattacatctccgacttctgtcaaaagacacacagccataagtttaatagtaataaaaatgcaagataaaagtaaatcaaaatgagaaataaggtgatgggacaaatccccaactcccctttattattgactagcgttaaaccacataaaattttttagctaacaattcttatgtaactacgccacccatagtggaataagagacccttggctaccgatttcaaaagtgtagcaccattgcgcatagtatcatgctctgtaggaccaaatatatattgtttatctttttcaatccaatacgtacatcaattattggtaatataatttttttcctctatgactagtagaagagtagaactcataaattactgtagctcttaagatcacttccactgacaatagtagtggcagtagaatactataagtagaaagccctataaaggtactcaccggttaaagatttgtaaacccttttatctggttcatgatatgttgcaagagtatggtgcatgtcttttatttttccctcaatgagtttgtaacagtaaaaaactcatcagtcccattaattttataagttgaacagaccaaaaactaaagtcaagtttttttttttaatgcaagaaggggaaaaaagaactggggggaaagacaatcgcatctctgtctctctaaaaaaaactcaatccagttgtgatccgtgtgtcctaaaacttagggacggcttctgcatgcattcactttgcagcgcatgcatgttgcaaccactacgctgcgtatcctagttttaaatgagcaacagcacggcatgataattgcatctatcaatgtggaatcgtacgtaccattgtccattgattcaccagaaaaacacacataaacggactatatatgcccccctgcaatctgcagagcaacttcctctgctggtacctatagagctcagataattgcagtgggtatatatcactgtataagaatatacgactagtaggatttgggctgcaggaa

SEQ ID NO: 39793 - DNA, 665 bp, Oryza sativa
cgcgcaggtgccaagtagacgcgcatgtgaggagtaccattcacttgcaatactctggcggataaaagaaaactcgcgcacgccagttaacgtgtcagggaaacccacggtggagactatggtggcaatgtcacgtgcgcccactatttgcaccatatatgtgtcagtccgcatcatcaattcatcatccaggaagtgaaatggacggagagcagggacccttgtaaacgcatggcttagaagtcgtcggatcgtggccgtccatttgcaatctcatggccttactcgtctccagtccactgcactttgtactgggagtaaatttcctgtgtacccctgaaaactcactcaattcctttcatacccctgaaatttacccaatcccttctatacccctgaaaattcaatttgatcccttccatgcccctaccgttacattttccatcatttcactgttacgtttggttgcaaatatcctttttgccctagatgctttaggtttaaatataagcttaaaaaataattaaaaaattttgtttgggtgcacagtatgtgcattttataagactaatgaaactaaataattagtgcagaaaattttgacataaattttgaaaataaaataaatgtaataaattaaaatttttatttcaaattttaataga

SEQ ID NO: 39794 - DNA, 508 bp, Oryza sativa
tcctgcagcccagaacaaatcatttaaattttgaaacatgtttacatgcatgctctgttggtttgtcagtacacctaaccaaccgttttaccatacacctacactgttgttcttttaaattgagacgtccgattttttatttttggccggacggccgatggtaagcatttccggttttgcactgcgggtggcacggtgctctgcttgctacgcggcgggtggactgcgcgtgtgcgcagcagggttcgtggtcggtttttgtgaaatttgatgtttctttctttctttgaacaaaccgacaccagcataccaattttattgaatatagtgaaaaggaattttcgtacataacaaaggaaaaaaaattaatgttttatacgaagaggttgccatgggactaaggtaaaagctccgctatgtggttggctccccacatcgctcatgttttcccctccgtttttgtttggaatgctgtcattgacagtcctatttgctgaaagcctatttg

SEQ ID NO: 39795 - DNA, 1491 bp, Oryza sativa
attagatcaaggtggagtcgaaggcggagattgatccgagaacagagcaagaatcggctgaagtctagatcggctacgattaggatcggctgggtctgagtcggactaggtgagctgatgcagccgattctgacagtataatttggtgtatgacattgggttgaattgaggtgcttcaacatgattgtcgtacatggatagagtcctgagaaggcaattgtatctattaattaggatgttttatgtaacttccttagagatatgtgtgggcaaaagtttgccgcaaagacttatggtatcttagagtttgttagagatagtggtcgtgtccggtatggacatatcttgtaattctcgggtataaatagacctcgagccctatgtaatttttaacacacacgttcaatacaatttcggcgcatcgccacctttttgctttagttttgtttcgacgagttcttgctttctggttgagctgcatcagtttcgatcttcaacaagaggtaaaacttgttatgacgacttgtgttctcgagattagtgcttccatctttatgacactctaatcttgtctatataattcgtcaagttatcatatatcttacataatctttggcaatatcgtcatctaacctacaattgactaacatctgttaatagaaggcagccgattaggttaaatagcgacgttgttctcgattatataagatatctaccattttatgaaacactcagcggcttgattgtctagatattgttctttttttatacttaatgctgcatcagttgagtttgatctattaagtcgtgcttagaatatcaatctctagcctgtcctctggttgccaattagggtagtattggagtttcaaccgatcttatctgatttaaccatattcgatctatatgcttcaatgacatgttaaatccgccctttatgtcaggatcttattgcatttaagtatattaagcttttgtttggtatattatatttgttttgatatctttatataaagtagtatcggagtattagccgatacatgctagatctatctgatcggctatgctataaacatatataatcctgttattaatatatatttcgatctaagtgatttatactgtctcggcttggtgaccgatctatcctaatcacttgatttaagtatatattaatataagaactatatatcgttaatatctacagccgatcgaatagatttagttccttactatctatttataaccgccgatcgattcatatatgacatcggctcaaagataaatgatatgtcatcggcacctagccgatcggctatcatttatagatttaaccacgaattctttgtctctatttcttgttgattacaggatcaaatcatctggcacgctcatacattcgaaggcgagctttggacctgcactggagttaagcagatctcccaggcctcgtcttttctgtcaacacgggcgtggggcggtgcgtgggcg

SEQ ID NO: 39796 - DNA, 667 bp, Oryza sativa
ctaacgtaaatcgatgtccattaatttagcaaaattccatatatatattgcattgaatgtttgtgaaatataaactgccaaaaatgtttgtgaaatagcaatgtattaaacattgacttgttgataagatcaggccgccttaatttgaaacacaagagttttactggatatattttcattatataatcactatagttctaaattaacccttatgaaattctaaaatgaaattcctttgtttcgaaggagatgtacgaatgcatgtcctcgggacaatgattgggagagtacgagacgatgaggttgtgttaattaattggtgaggttacctcgtagcatgagccgcatcccctgccggcctttgagaatgggacggtgccgcaggagatcatgccgttgtaaggaggcaggttgacgttcttggtcccgcacgcgccacctggaaaaaaacaaaactcacccattaatcgatcgatcgcatagatcatggatgagctttacagctacttcatcggcatggatttagacactgttcaaattccgtattctatcgtactatcttgagacaaagatagtacacttcatgatgagccaggtaacttatattttgaagaggagatagtaacattacacgataagatgttactttaccggtgtcggccgaact

SEQ ID NO: 39797 - DNA, 567 bp, Oryza sativa
  unsure (1)..(567): unsure at all n locations
atacacctatatgctttcgtagcggcgacctggttggatcgatggatctagccttcacgactagaaaaagcattttcgccgatgttgggtattaattttcacaagtggatatgatccttagaatcaaatagccacctacaaaaatataaattagggtgaagttcactgtctattttcgcaaacggaccacttaagccgtgcctgcaaaaatgattttcgcaggcggaccacatgagatgtgcctgtgaaaattagcgtggtatatatacagtgacacatcggctgatatttttctaagtgtcatttctcccctcactcacctctcctctcccctccccttcaccttcccgaccgccggcggaaggggcagacgtgcacgggacggccagcggctggcggcgggtcccctcccccctcccttccagatctagccagaggagggacggnggaggccggcgcgggcaacggcggcgactacggcacgggcggcggcggcgacaacggcgcanggcggggggggttcccctcttcccctcccttctagaactatcccaaaggagggagggg

SEQ ID NO: 39798 - DNA, 553 bp, Oryza sativa
cctttcttataatttttcttgttttttaagccttttttatccttttggatataatttttttcacggcctttttttcgcttttttttacgtatttttcttttttttctttttttcgttgcatagaatcagatcttatttttgctttcttttattttttttacgaacgacttttttcgcagggaatcggacttttcttttgggacctttttcgctctttttttttctttttttacggacgtttttttcaccccttttatgccaaggggaaaaaaaccaaaatacagataaaacaaacattctgatacggaaacatatttaattaaaaccgattctaacatagatgatgtatcaaattttcatgcaaaaacacattgaatttttataataggtatagatatagatgagcaaggaaacactctaactcgacgattagatatattattatgacagaaaaatatgcttgaaacttttagtaatagaaatgcattatatatatctatatctatatttatatctgaatatgtcactacccaccatcattaccatgttggtc

SEQ ID NO: 39799 - DNA, 748 bp, Oryza sativa
ttcctgcagccctcatgtaaaaccatgcactgtttttgttctacccgtgtacgtacgacctgtgaattggcattgcgcggcatatacgtgtgcatgtattatttgttattggatatttttgttaataaaaaaataattaatctagataaaataaattgataccatcatcgagggttgtaagaatgtgttagtctagctaggaagagtcaaaatgtttaaggactttcacgcacagctattattatagtacaacttacaatttgatcggtaattgatcacttataatcgaagtacatattatacccctattttgaatgatgatcaaaattgatcagaaactgtgacgcatgtcatcgtctctcgcaggcgcacaaataagatccagcgactgcaccggcaccatcgagcataaattagactggatcaagtctcaaccatgaaattatttaaaaccctttctaactttcataaaatttttaattcgtccattcgttgctagtatatagtgacagtatattgtacttatgggttctctaattatttgatgctagcacgctctgtagatattttatctgtacagaatactgatcacgggatgttacattaaactacctgagattaatgatgaaaattacaccttataatccaacaaaactagtactgtacgtaccaacagtattttccatttctaagacacgacacttcgtcgaaaaaaaaaaactgtgttccatacttgggtaccacacgt

SEQ ID NO: 39800 - DNA, 768 bp, Oryza sativa
ccctaatgtttgatgtaataatgattattgttgcagtcaatactttttatatgttgtacctctttagaataatttgtgaagtgggttgaaacatctccacaaaagatgaaagaattatttttaaatagtttaacataagtttgttttcttctagaatgcatatatatttttatcaaaatatattcatgtgagatcttgttataaatgatagattggatatatattttagaataaaattttgtttaaagtttgattaagagagagaatgtaatggtgcctcaggccaccttggcagccagctctactcctgcatgcatgcatgcgacaaccttgcccctccaacgcgtccctgcatacagacgaagagcagcattcgatatttgaaaaaaatattgaacacacgatttgtaacgtccgatttaaaaatatttcaacataattaagtatttgtgcaaaattctaatggtataattgaaattttgatcagatatataattttggagaaaaatatttacaatttgaggaaaaaaattaggcacgtgtaataggagggagagggagagagagtatgcaagcagcagcgcaagcaaaacacaagccgaacggtccgatttttggtgtgatgccgaacggtccgagccgtagcgctctccgcgcaaaacacaagctatagctggtgagatcggcagggctggcgcggctgcgcgcgcgcgcggccccggaatccggtgcgagagagggtgatggcgccatctcgcttgccggctc

SEQ ID NO: 39801 - DNA, 762 bp, Oryza sativa
tacacaccgtttaatggttggagaaacgtaaacgtggaaaacaataaggtagaggttaaaaatgttgagtgaagaacacagccttagtgttttaaaagagcacttcgtttgtgcgtacgcattgttgttttatctcgggcacaataacttgcatgtactagtgagggggttctaatctttcgagatgatgtcccctcctgtatttttttcttcaaattcaatttaagtggttgtgagaaagtttgttttttgaaaaatgtaaagtacaatgacatctatcattccacaaaaaatatatgctagggaaaaaaagaaatttaagaataaatagtactatacagtttataggttggatttgttttttctatttctccgtatgtgagttgagtttggtttaggttggtggagtgatatatgtatgctgtatgaatattgtcaatattttatggattttctcgcactccctccggattgataatacttgtcgttttagactagggcacggtcttaaaaaaacaactttgaccattattttttattataatatgtataaaattgttagcaaatatatgatcttattaaagtactttttaagactaatctatatatgtagtcaccatatttgaaagacaaatattttaaaaataattcataatcaaagattctaaagtttgacttcacccttgtccaaaacgacaagtattatcagcccggagggagtagctatttaagtggtgtttgaataaacgaggggggctgcag

SEQ ID NO: 39802 - DNA, 728 bp, Oryza sativa
agttttttaaaaaaaaatgtttcagaggatatcttcaaatcagtatcagtgaacatactggaagctcagaagacacttattaattggatttaggaagtgtggcaacataattttcattttacctctcaatacagatagttatatcaagtgatacaacacgagactacatatttgtatttattacatggaaatgcagtgagagcaaaagaactctagaatttagattgatatgaaattaaacatgaagggtaagaaatttacaggagaatcaactaataattatccttaatgttttcctacactaaggcaaaagaaaatgtgtaaattaaattgactgtcactgtgaagatgatattatgtcagtcgaaaacgctaaaaaaaaatgcaatagcaatgccaaagtaaacacctttcatcgcttgagttgtctcaagttgaaagccattcaagatccagaaagtttgaatcaccagaatgaatgcaactttctttcaacggctggaacatgatgtatctgaggtaccatgggtgtatacctgtagcaaattttgagagaggaattaaggtttcaaaaacaaaaatggtagtagtccactatttaagacaccatgctttttcatgatttcctagtaaaatacttgtatgagaaggatgaaggtcaaccctgaacgaatagaaaccaaccttaattttgatacctcactttcacagctcaatgaaatttcatt

SEQ ID NO: 39803 - DNA, 637 bp, Oryza sativa
ctgcacccctttatatggttagttgaaaaatcacaattaattcttcaatgattttgtcgtcatcaccaatgcggatcatatggttggcaaagctgcctccaaacctatcgcatggctttataatttcaggaggaaattagagtaatcaaacattgtaatatatatccacatccatcttaaagctttgattccttgtgctacatgcatgacggccagtaaagcatgctgtggcaggagctggagacagagcacatcagactgcatatatattttctaatggagcatttagcacattcggtttagcaagtaaagcaccatgaacctagcttccatggcagggtagggcacaactgcacaagcccaccacaaacaagcaaagaatccatccacactactcctacatagtacatggagtacatacaagttacaactactcgatcagcatcgccattgctgcatcaccatcacctccatgatcgatctcatcatacacacactgacagaagaatacacgagacattcagacattcagagagaggagtgatcactgtactgtacagaggctagctctagctaggtagctaaggtaggtagaaggtagaggaaataagaagcatatatggatccacggctgcac

SEQ ID NO: 39804 - DNA, 626 bp, Oryza sativa
cggttaccgatcatattaatccatttttcaattttttagactaacacttagttaatcacatgttaatgggttaacaccgtttttcgtgcgacccgaactcagccataactttggatggtatgtggacaccaaaccaaagcaagtagattgatttaattcgagtatttggatgatgggctgtggattcaggtagggcttcgttttcggcactgttccctcgagtctgggggcccatgatactattcgtcggcatcgccggtgatacactgtgttggggctgcgaacgggaccgctcgaaccggccgatgttggttcctgtcgtcgtcgtcgtcgtggtgatgcgtgatgccaataaaaacacatgctcgatggccgatcgatcttcaactgtccggagttagtaaaccaatcaaatgagactttgatcactccgcagctataggatctcactgtcacgtgtcagctccaaaattcaaggatttgatagcttggatcccgagcttgtaacctgaaccacgtctgtgttcggttgggtttaaccttttctcttgtatggaaaaatacacgatgaattagcgtatgattaattaagtatccgctttagaacttaaaaatagattaaatat

SEQ ID NO: 39805 - DNA, 500 bp, Oryza sativa
aaatttaaatttttaattttaaatttaaagttgattttggggttcttttatcaaagtttatttttaacatttgcttttacatcgctaagaacatgtatataaaagttttattcacaaattattttccgtttgtaaatatgtcgttttggccgtctcggaccttttactttccgtttcgctttagtttcctgtcgctgtgggcacgcttgggacccttttaccctccgtttcgtcagccttcttttccttgggaaacgtcagtatgtattggtgaaaccattgactgactgtatattaatatacagtcgccgggccggccggcgtaggggcgctatatatacggaataaatttatcaagattctggacattacaaaggcaagttgggcctgacaagtacttgttgcaataatcttgctccggagtaagtggttataggatgcaagtacaataactagttgtagacaaagtcaatgacgatacggagaagaataagcgcaat

SEQ ID NO: 39806 - DNA, 551 bp, Oryza sativa
catagcattattgagctatccagtttgcgataaaattccttaataaatacatactagtactgattaaagcaccatgcacagaacagaatgttggaaaagtggcaaaccaaaaatagtcttttcaggggaaaaataaaaaagaatgaaatttaacaagttttctagttaacaaaaagtatgatatagtaaactgaaatcatcagatgttacaaacaaagaaagaaaagaaagacagaaaattttacattccaggattatgtataacttcagaagcagaagaaattgaaaggagaagtatttgttgatgctgggtgtcaacagttttcaaatgcccataggcaaaagtattctttatcctcaaagatgcatgaacttgacaaatccaaagttccaaaccaactctgagctagaaagcataatagttaaacagtacagaactgccagttaaacaaggaaaaaattcagaaccagactacatcagctgcatgccaatggcaacgagcgattaaaagcatctcatggagatcgcttgatttgctttgatattatgc

SEQ ID NO: 39807 - DNA, 697 bp, Oryza sativa
gggggtgaaacatttcttcattgctatttacttgatggcacgcagttcagatagagactgattaattgagcagaattccataaaccacctatatggcaaaggaacatgagcaatcccagaattcaagagcctggtaatttggacctcaagtcctcaactaaaaaggaatatatgagcaatcccacaatcacaagataatttacacaaccacgttgctctgtgatgtatttcttttttatctgtagaggtatgctaagtagctcaggtataagttctcttcctttttgttacataccaccacccagccttcccatcggctgccattgctctttccaagatcacatccagtaagcctactattgaccaacccaaatttgcggctataaaaggacacaataatatgagttggatgaagaggtgaaatcatctctcaatatagattaatgtaaaccattgcctccgatatcaaacgacaacagatgtacgttttggttccaaaccatttgttacctacctcgatcatatggtcaaaccaaaaaatgcttcaaattattaaaagctagaaccatgcaaagttgtcaacttattagtatgtcatattgctatgagaaattgaagaaataaacactaatgtacaggaaggtgtagtggcaattttaaccagcctaccaatgcattagggttctcatagattttt

SEQ ID NO: 39808 - DNA, 614 bp, Oryza sativa
gaacaccaccgagaccgtgtttgttctttgatcttagaaactaatcctttccaggaggaaacgtcctgaaggttacaacccaaagcagctaattcatgcgctaccttattacagtttcgtgggcagtaattaatagagaaagaataaaaacagctagcaatcacatgcttgatctcaaggattactccacccatcactgataagttgaaagagttactctggagtaatccttgagatcaagcgatggaacgactggtgaccagtgatttagctggatcagttatataaagtttcggtttccctaaaaaaaaaaagaaactaatcccttccgcatgtaaaacgagcaccggcaacggccatcgctctatccaacatgtcagccagcgtatagcacgaatattgttcgcccatccaaaatcctcggaaaacccgccgtaatcccacgaatattccgtccacaaggctggaaccaggtataacaagcggaacgcctccagtgtcgcggacaggtgggtccatgtcccagcatcgcggaggtgtgtccctacatgtcagtgacgggtaggtgtcgctaccgcgtcctggaaggtcatctacttggttgggatagcgta

SEQ ID NO: 39809 - DNA, 691 bp, Oryza sativa
ccctctagatacttatatgcactaatcaagttattgcgcaatatacttactcatcttttccagtttctcaatctgctccagtatagcctctggatcctttttcaaaatcccaacctctcgtactttcttcctttcttttttattctggcaagtaaaaaaggtgatgggaatttagaatgtgaggacagaacaaactaattggtatctaccgtatttatatcagcaaccataaaagaaatagaacttaacaagagtacaagattaaagaaaatctgtaaaaggctagattggtttgctacacttaccgaaatttggtaataccgaaattttggcaaggtagcaaaaaccaaacactccaacaaaaccttcttccacaaaaatgttggcaatgcccatatatgtgcctcataatagcccaattttagcaccaaatcaaacctcttagccattctacactaccgaaatgtggcaataccaagattttggcaaggtacagaaccaaaccaaccctaatatacaagcagtcatacagatagtgggtacacgtgcaacaatcatggttgtcaagtcgtaaagtcaagtcgaggtacccctggaccgacttgtcgactagttgacaacttgtccagttgtccatgacttggtcatgcaaaaacaggggatgcaatatatagtataaactatggactat

SEQ ID NO: 39810 - DNA, 769 bp, Oryza sativa
ctatgctgacgtcagcaaggggtgaggcgcggaccgcgtcacaaaggggcgggccccacacgtcagcggcaaagcccaccgtggaccgagtccacggcggcagccggccacgtgggcgcgcacccgacgctccggatcggccggggccgatcggacggccgggggcggccgagcggcacgaccgggcaggcacgcccacaggcggcggcgaccgccgagcctagaccaccggcgacgacgccggcggcgggcggcgacggcgcgagaggcggcgagagagtggagagggaggctgttctcaccgagcgaatggggcggcgagacgaagacgaggaggtggccggcggcacggattaggcggcggcgggctcaccggggatcaaaaggaatggagcaccggtgggttttcggtggtttggagcggcgaccgatctgtggcttgaagcggccgagccggtgaaggaaacggcacggcttggcggtggccagggcgacggcagaggtgcgactggaggcacaaaagtggctgtggctcgggttcaccgtggagcgggcggctcgggggtggaatggaggagcggcgtggtggccgggcttgccggcggagcagcgaagctagtggtggtggcggcgcggcttgaggtggacgggaacggcggcaagaggctgccgaaggcggcgaaacggcggcggtgctcgggtgagcgatggaatcggtgttttgattgtggtttggggaaacggagttgcggacgggggctgcaggaat

SEQ ID NO: 39811 - DNA, 1031 bp, Oryza sativa
tgcagcccggtcttttaaagacaacggcagatatgagcagtattgaacttcactcgatcgtgctgctccagtgctgctcggatctcgacgcctcgttggcgcgctagcaagtactccctcagtcccaagtgcaattttgtacggtttatatatacaaagtttgacagttcgtcttatttaaaaaaatatataatatttttattgttattagatgataaaatatgaataatattttatgtgtaacttttttttatttttttataaattttttaaataagatagatggtcaaatattgaacacatatacccacggctgtacttattttgagatgtaggtagtaataactttaaatacttgtactcgtagtcggacttgaatccctcccgatttgttactgatgtgcgaaaaatattcgtactcgcatctcgcggtacgatccgtcatcggtggaggaaaagaatagtactgtcaatattttgatagcagtacaactagcaagcactactaattttttggtaaatattggcattatcaattctgagacaaattttataatacagtaaaaaaattctagatctatacttcaatgaatcatcagctttaccaaccatatatgatcaaactaaactatcacatttactgtttaaactaaactatcacatttactgtttaaactataaaaagttagtaggatattgttttagcatcaatccaatgcaaaccagtactcctactcttaattcttaagggacactccttgattattagaacaaatttaatagtaatagtatagtcaactactaacttcaaattatctatatttaatttaataacacatttatataatagttatctactacatcattaatatataatctcacatctcacatatacgtaatgttttggagtctgtatctggctataaatctttaacttatttttcttctctcttctctcttatttttttcgcacgtgtttatagctgatttataaagtagtacttgctcttggcatccacaatgtatgaaaa

SEQ ID NO: 39812 - DNA, 710 bp, Oryza sativa
ctgaactttgcagcatgtttggctgtggttagatctagggatgaaaagttctaacatatctcacattggatatacggacacacatttgaagtattaaacatagatagactaataattccgtctgtaaactgcgagatgaatttattaagcataattaatccaccattagcaaatatttactgtagcgccacattatcagatcatggagcaattaggattaaaagattcgtctcgcaatttacatgtaatttgtgtaattagtttttctttcttttttttttgtctataattaatattctatgcatgtatccaaacattcgatgtgatatggtaaaaaaatttgtgggatctaaacatgccctttgtctctattatctgttcatcaggctatccggttgcccatggtagcgttggcttgtgtaggcggcagctagcttagcttgggttggcttcacccaaaaagagaacaagaacaaaattgttcagaagaaagcagctctaccacttcgactcgttcagtcctcttcagatcaacccccttttcttctgaaaagcttcttcaagtcagagcatttacaacgctctagagtggctgagagggcagggaacctctcctgcccacatcaatgggcgaagctgccatggacgatattgaaatgtcatgaaattgccctatcacagaacgagcaaactctccatctaaacttaat

SEQ ID NO: 39813 - DNA, 715 bp, Oryza sativa
  unsure (1)..(715): unsure at all n locations
ctgtcttacatattatttctatttattattatcataccaaacttctgcagcaacgcgtaggggtttcatctagtatttattatttttgttacaacttgtatgagtcaaaccgtgtattatttgtcaaattttcgtgtaactgtgacatgtaagaaataaggtgacatcgatctgtcgagtgattgcatgagtcccattaattaattcctatatctgtatgtctccattactgttgtgagacttgacgtcaaccggtagcagtgtcttctgaacaaacggtatgtagaaagcctccttccctaatatgagtatcacgacgaccggagtgcaggcgccgatggtgatcaccaggtacgccggccacctcttggtagacggaggtcatgagggagacgatcatggcaaggcaggctatgacggtgagcatgtgtnnnnnnnnnnnnnnnnnnnnnnnnnnnttgacggggtcgcgccacgcccagatgaagcagaagacgacggtgatggagctgcacatggcgacggtgttggagacaaggaagatgtcgaacgccgcgcggtcggcgtggatggcgaggccggaggtctggttgtagccgccgggcatggtgaaggtggcggcgaaggtgacggtggcgatgagagtggccacgagggtgtaggtgccgacgccgagctcgaagtagtcaccgttgccggagccagctgacctgtg

SEQ ID NO: 39814 - DNA, 601 bp, Oryza sativa
aaatcagaaatgtgtacccctaaactcacacaaaccatgcactcaagattctatggtagtatatatgggtggtttcgctgacgtggctcctagtcagcaaaaaaattaaagagtaaattgcatctccggtacacgaacttgttaggtgagtgcaattcagtgtacaaacttgtaaaatgctcgttttggtacatgaacttgtctgctgcgtgcggaggaaggcgaaaaggatactacatagctaatcttattgatttaggggttgattaggatactagtaaacatatatctgagaaggttgatattgacatacacctcttcaatgaaaaatagaataggatatagtgatagtataaaaagtttaaaaaaactgagcaataatataagggttagaaatgtatgaaagtcatcatttccatgataaaggatacaattgagaccaaaattataaatattgcatgtcttatgcatactcactacacgtatgcatgtcacatcctaatcaacatcagcttattttggtccttgttcgcatgaactagacaagttcatgtaatgaaacaagtattttataaatttatgtactaaattgcacctacct

SEQ ID NO: 39815 - DNA, 636 bp, Oryza sativa
gataataaatacttattaaccgtacgttaataaatttctatagttaaacgtaatatctttagttgagttaatttgttagctactcattccgtcacataaaaaaccaacatagtactggaagtgacatatttcagtactacgaatctagacataactttttttagattcgttgtatgtaccacatccaattctaagtttatttttttggatggagggagtatcatgtacgtacaatcatacatatgcattaccacattagtatccaaatccctgcctaggaataattaactatttgtcacttttgcaagtggtgataaatgatttgccagttgatctacatatcatagatacatgaggactcacgagccatagactactagtggtaataaatcattaattaccaattctaaaaagtgacaaaaaaaaaaggttaaatgtcccccttgcccaacctgaccgggggagacacgcccggacgcccgcggtggccggtgccgtccgagtccggttcgggcgcttgctttccacgagtctagtctacgacggcgacccgcccgaccccgtggttgcgaattttaccgtattggcccctctccctctccatcccctacgcggaatcccacttttacccctcct

SEQ ID NO: 39816 - DNA, 703 bp, Oryza sativa
ctgcaccccagcgtatctttgatgtcgataccggcggcttgtcttggcgtatataggcttctatgttgattgtgttgggagttgattgtctcatggggggtctcgatcgtggtgaccgtgttgatcgcgttggttctccctggtgggtgtccgccctcttcccctcctagggggtcttgtatttatacccataggtgtccccttgtctaagtagaactagggaaaccaatatggatacaatccgagtagtccttgtcgtttccatgaagaacttttgttgtctttccttatcggaactcctcctatatccgaaggttgtttccgtataggacatggtatgtggtgggtcctgccgagatgtagtcaactactattaggtatgtggtatccataaccctgacagcgccgtcaaatacattgttcatcctatagcacttaacggcacggaatggacgtaaccctaatggtgatgtcatttctgaaataaaatcgtttgtacagtggcatttcttagaattcatacttatcgatggcatttcttaaatttggatgcttgtcaatgacatttcttggattatctctaactaaatatgtttgcctaagtttatcgaaaaatttagcaacatctataacaccaaattagtttaaccaaaactaacattcactatattctgataatatgtttgttttgtatcgaaaatgt

SEQ ID NO: 39817 - DNA, 669 bp, Oryza sativa
ggtgaagggggaaagaatttgggccgagcccaaaagggaggaaggggaagattattttattttctttttatttaaattgattaaatgaactttgtattattataattacttcttgagctccgaaaattcacggcaaaatttcagagaatatttagggcacaaagaatattacaaaatattctcgcccaatgatttttaaaggaaatttttaattccctcaatatttcacttgattaaattgctttaacttttatttaatttctggaaaatacattatttaatgatttttaatcccaacgaaaatcggggcgttacagctaggcccatctggcctggctctttgcgcatcttcccccctgccttctctacctatttctcaggattttgggttgactctcgggtattttgatgaagttcataacccatccttgtatggatacataattctcctcactttagtctagatttcctcccaacatcgaggtttatcacctgctgacggagcatgggggtcctcaccgggagaccgcgcaggcccccctttgccggttcggccgggggcgctaagtgaggttcttcgccctcgatctgaggaacgtccgcgagagaggaagtgcacaagacacgggcgacgtagacaggttcgggccgctggaagcgggctgcagg

SEQ ID NO: 39818 - DNA, 578 bp, Oryza sativa
ctagtcctcactgctacaacaagtagtacgtgtttcggtaaatctggttcagaacatttaataattgcagtactatatttagtggtggacattttcaaaattatcattttttgtaagatatcactgtgtaaaatacatttggtggtcttggaaatttaggtagcatttggctagctgtgaagcaccataagtaacaccaaaatttagtaggataacattgtcaaaaatatgtttgctatgttattgatagttttctaactaggaaccatcgatgatgtgttagtgatgtcataggtgcataatcttgtattctaaggttttaaatcctaatgtccatagatattgcgcaaaagttgtagcagttacgccactagcctcttctgtttgagcgtgtgttagctgttcacaaggatgtgtgatcgtgatgtgtgtacgtgatgacgtgtgtgcatgtgtgtctttcaagttattggaaaagacatacttcttccattcccaaagaaaaactaaacatcgtactaggatatgacaaatctggacacatgcagttctagattcgttttttttatggatggagt

SEQ ID NO: 39819 - DNA, 536 bp, Oryza sativa
ttggattgaaatatgcctatcaaaaataaatttttcagatttagaaatataactattaaaattagatggagggagtactaattaccactcgacacatgtccagacaccagaatataggccaagaaaattcacgcacgggatggactagcagcgccgtcgtcttgctcaaccaccgccagttgcagcttgcagcactacgaatgaaatcaactcatcagtgacgacgccgtcgctgaaaaggctaggcatgatgagagaccagccgatttttttactgtaactacccttctttatcgtaccggtccacttcagggaacctccaattatgcccaggaaagcagagacagtgctgccacaaagtcaatctagcgacatacgcgaatgacttctaccgggctaatcaaccactagctttttcatctaccgtttcgaactaattgaacaccccttagggcacctgcaatggttatctataggctctctacaagagatccatatcagcatattttcctacttggaagagattaaatgaagag

SEQ ID NO: 39820 - DNA, 522 bp, Oryza sativa
ccaggaagtccgtgggaaaatactaccccaaatccatccttcagtcacgcttctcctcgaatgatgcctggaagtagcttccgtatgaatccacctgctcctcttccttttataccatcttctgttacccctcttacacagtttcctggaggttcagcacagcagtctgagaaaaggccacctccacctccacctccaccaaatgtagcccccccaccatttactcgtcaagatataccacccccaccaccatctccaccaccactacctattactcagccaccttctgtgccaccacccccaaattcccctcctccgcttcaacctgctactgacccttctgactcacaaaagcaacgttctcatcctcgatggcagggctctctttcaaaaagtggtttacattactgttcaatctatgcaagtagaatagagttggatgcttgtagatatgaacatgcagtttctgaaccgacagggtaagagatacatcaatccagcctacacattctattattacaa

SEQ ID NO: 39821 - DNA, 556 bp, Oryza sativa
gtttgcagcagttatttctgctgctaaacgcagcccacaaaacttttggtatgttgtctgagtctgcattttctctgtggtacagatactggcctagtttctctaatcttgaacttgtttatatgtccattttgtgtatctcttctatacattttagatccttattgaggtttctagaaaattttggcattcctatgagaagctatttcatattcaacttctggatcataggttgcacatctgtgagtgtttaattctttattttccctttgaactaatcatgtgttttgtgggtaccctctttatcatcttcccacaatattatggtgtctttagtttttatgcagaaaagtttagaattgtgctttggctgaatccttgcttcacataatctggtactagagtcgcttaagtcctctcgtcatagtttgacatttcattatttattcactgatggagacaactttgtattgagtcatccagcaacgggaattggcgctcaatttggactctggaattcatagatggattacagcttgtcgaaattaaagggaaa

SEQ ID NO: 39822 - DNA, 540 bp, Oryza sativa
gggggtgtaatgtcatgggctttggaccgggcgtcctagactcattggataggattagggtttgttaggattagataaggtttgttaggattagattaagtagtcctccatctatataaggagggattctatcacaggtcagttaggcattagatcaagatttatcttagtgcccatcgacctgccttctcagtgcgacggagagcgtcgcgccgtttaggttcaggaccgttccttgttatttcatctactataatccaatctatccccattcatcccgattcttctccacaaatccttgctcttgacattcctccaatccaaagaatcatataggaataaaatcctaaggaattcaatcccctatgaaaatcctccaatccaaaggtgcacttaacagtttattaagaaggatttggaagttaggtgttgaatattctcaccactacttcttggttatgatcagattcagtcaacttttcagagttgatatggagaaaaacgatattaaattctgcatatttctacactacaaattac

SEQ ID NO: 39823 - DNA, 1247 bp, Oryza sativa
aactagccaaaatttattccttgtgctagaggcagctcgcttccatagttgatcgtactgcagaaatttggattgagaattagtgtgcaggaaatgcataactataacataaagaattatctatgcaaagatttcgagcatggtgaacacacactagaattattgccctgaatatcttgcaacagaagctactcttgcagtaattatcttcatggcatggttcacatctcaaggaactagaattcaatgtacataggataagcctttcattgggaacatctatacataagatattgtgatccctatgcttcacagagttttgggacgtcgcaaatacccattgaaaaatatggcagagcaaatcaaatggttttctcagtgctaataatagagtaatatatatgtgtagttctatttgaatttattgcttcatggcattctaagcttctatttgtatgatggtactcccaaggccttttgggtaaaagtgctatcccaggtcagaatgatcacaatggatgacatggaatagcccggtgggcggtggcagagatgatattctgacaacatttctatggcgtaatggtgtctacacaaccgaaatgttacagcatccttatgtagattagttttatgtacatcgtaacatcaatgagagaatagccagaaacttcaaaactcaaaatcacagtgaaaaaagaaggtactgtggtggctggatcccggttatgtaaatattctccgtgcagtttgatacagagttaggtggtgtttgggaaagagggactaaactttagtccctctcacaaaaaaattagaccctgtttagatgggactaaaacttttaagtcactatcacatcgaatgtttgcactaattataaatattaaacgtagactattaataaaacccatccataatcttggactaattcgcgagacgaatctattgagcctaattaatctatgattagcctatgtgatgctacagtaaacattctctaattatagattaattaggcttaaaaattttgtctcgcaaatttgctttcatttatataattaattttgtaagtagtctatatttaatactctaaattagtgtctaaatatagagactaaagttaagtccctggatccaaacaccaccttagtccctaactaaactttagtccctctcacaaaaaaattagtccctaactaaactttagtccctctcacaaaagcaaaagtccctcccatagggac

SEQ ID NO: 39824 - DNA, 698 bp, Oryza sativa
gtatatcttaaactgttgtaaaattataatatcatcgttacaaatatatgaattataacggcatattttcaaactgaagaatttataatgtcatggatccaattaaccctcgcataaagggagtttggttgtggttggtggtaacgtttgtgtactaggatcatcatcaggcaaaattggcatcatttctatccctgaaccaatcgctgattcgctgcacggtgcacgctacgacgactgcgtgtagccgtgtaggatacactttgaagtcgcatcctgtttggatccataatcggaaattcggaagtctcaacggaacattcaataggttatatctttatgagcctcagttttcaacggaacattcaaacgtttaatatgatagggtgtaaaatttttacgtgggaagtaaacatagcctcagtttgtacgagggaggtcagacactgctaattgtacatggtcccacaagatcgatgtaagtgccgaaccaagtaaaggtttgctttcgtgcacggccggtaggcctatagggacgatccactgatttggtcatcgacatcttgaggaataagttcatctgaggtcccttaacttgtcaacgaattcgacttttgtccctcaaccgaaaaaccagacacaacgggtccctcaactatcaaaaccggtgtaaattaagtccctcgatggtttgaggg

SEQ ID NO: 39825 - DNA, 4210 bp, Oryza sativa
atggcgagctcgccctggccgttctcgctactcagtcgcgcgagttaacttttctccgcatgaagtcacacactcatcgtgcaaactcgtgatgacatcactaacacgttatgaatttgctcactcactttacgaactcactgcgagttcgtattcccgctgtgcgacaatggtatatttctgccaattccttctaaaaatatgtatattcctgtaaaatcggtgaaagaaatgtataattttaatttattttccgttatttagttagcctcctaccgtgccatgtcaaccatttaggggcgggagcatgtgaattttgagtctaacagttaacaatccgcattgcaaagaaggtggcaacgcgaggttcaaggtatcggatcaccattgctgtgatctgagaaagtcagaatgtgatcgagccgccgatcgagctgatggtaacgtgaccatcgtccgtatcgcgccgtaggggaaaaaaaaccaccggtcacgtttttcagctacgagttactccatctaggagtacaacaccagtagtagttcagtgcggttggtcgttgccttagatcttatttagataaaaaaattgatcaaaaacgtcacattaaatatttagacacatgcatatcatattaaatgtggggaaaaaaaaccaattgcacagtttgcatgtaaattgtgagacgaatcttttgagcctaattacgtcatgatttgataatgtgatgctacagtaaatatttgctaatgacggattaattatgcttaataaattcgtctcacagtttacagacggaatctgtaatttgttgtgtattaatctacgtttaatacttcaaatgtgtatccgtatactttataaactttacacccacaccttcatgccagtggtgagcagaggcagacagatcatcactgagcacacaaaaaatatctcggtaacacaccgctaacgctgtgtgtgtgacgaatttggctaacttgtcgatcgatttctgtccggccggtgagtacagcgtcgtctcgtggtgcacgttaagccaggttgtcaggatcggggcagtattatttttttaaagtaatatcgtatcgtagaatcgggatactatgagatttctttttttttcaaagtttaattaatatttatattaattatatatagccattatatattaaaaaatatagtaatgatatatatcatgcaaatagagacatttatcaagagaaaccatgttggtttgatatatttaactgatttttatataaatttgagcatgtttatttacattattttcaaaccatgttattttaaataatattttatagtatcgtagggatcgtagaatcgggatatcacctaagatttcgtaggatcgtgtagtaatgaatagtaggatcgagatactatgaaaattaggatattaggtggaatcggtattgtttcggcttgataggatcgtagtatcgttagatagtaggatacgaatcaggatactgactaccatgacgttgaggaagacatgaaccgtacgagcatgaatgctagtagtagtagtagtaataagggggcaaaatggctcacataaagtcgcgggggataaagacagctcgatcgatcggtcgatggtccctaaacaaggaaaatgtgcgcccgcacgctccataagcggacaaaacgcaagttgttgcttccgttcaatgcaaaccgatggttggctggcctggtgaccacgggtatgtttcggagagcttctagcagctgcaggttcatttagaatttttatttgtcaaaagctccttaaacagtttagcttttttcccagattctgagaatatgtaattgtaaaatctgaaaaatgagctagaagccagaagctgggtttccagcttctccagattctcaccagctagcttctcagcagctgcttcacagaattttaaattccctaaacaggcctaaagttggcttcgtcaggtatagtggcatgcatttctcgtgactaatggccgtaccagctgctgcccgctatgctatgctatgctttagtgctaagactattcatggtgtctatacgtacgtctcgtataaccacaagttgccacatcagagatttccctccattccgtatagctctgggcgtgcccttgcgaagaaactcgtcctcccgcaagggcatgcatggatgccccactgtgatgcggtctcctcctctccccttcaacccagcctacctagtaaccaacctctggcgtgaagctttgagcgatgatagcaagaacgagcacgtcaaggagaaagagagacctcctgataatcattatcagctaatgacagccctaaccataccgtttttctccgtttttagattttctttttggatatcctacttaattacacgtgtacgttagctgctgttggctcctcggtccccatcggttggtctaatcttattataacctataacgacttattagtgattaaaaaataatatgtgaatatatatatatatatatatatatatatatatatatatatatatatatatatatatatatatatatattcttagtggttgaaaagccaaagttaaaaaaaaaactatgttgaaaaagaatcaaattcaaattcaaaattaagttttaaaatttaaattttggctttggcttataagccatagggcaaacgatgaggcccctcgtgcggcgtctttcatgggcgatttccggtgcgccaatcttttataccgattgcaaagttctaacactgccaagtgattgggccacgtggcgtcctaggaattaagctctacccctctgagaatctgccacgtgtttccttggctcttctcctgcaccgttcgatcacgtatcatcatcatcatatgttctaaaaccgttcggctgaagtttgattatatgttgctctttggtgcgtcgactggctctggtccgtatccttcactccctctggaacaatctagctggctacgaaatacaaggcacaccgagcgcacgctgtagcttctcggatttgtgacaccgttgcgtacgttgtgtgttactctccggtaaatcgcatgagtaggaggctaggagcgaacataaatacagcatgtaaaaagcggaggaaaatgaaaaaaaaacaagaactaaataaaaaaacactactctttatttttaatagatgacgctattaacttttagatattacgttcaatcatttgttctattgaaaatatataaattatacttaaaaaaatctttaatgataataaatgatgcttgcatagttttcttaacaagacaaatgcgcaaacaccacatttaaaagtcgacaatatcatctattaaaaattgatggagtattttgaattcttggataaatagaatatattgcattataagtcaaaaagacaaatataaaattggcgaaaaggacgtgtcatcattaatatcctatatttttacaagaaacaataaatagaagaataaatgacccatctaaaagatcggatccaactttacattctgaagaaccatattttaaatatttgttgtacattgtttctttcgttctaaaatataaaagtatctagcaaatttaaaaccaatcaaagctggaagacaaaagtctgaaatggcccacattaaacaagcaggaccactcctgattggcataattaccagccgctattgagctaatccatgctgattggtggaaaggctttgcttggttaatcctttcaatatctctttttggattaacagccttatacggttgcacctattaaacttatagaagattttatattttagatgaaaatttaaatgccagaagcccgtttattttgggaccgagatggaggaatatattattagtaaaatgcaaaactgtcagattttgctaaatcactacaacatgggcttaaacaacaaaattaatgacaagcataaattactacttcctccgtcccattataagtgcagccataagtttccgtaccaacgtttaaccgtccgtcttatttaaaaaatttatgaaaaaattttaaaagttaagtcacgcataaagtactattcatatgttatcatttaataacaataaaaatactaatcataaaaatatttcaaataagacggatggacggatggtcaaagttggacactgaaacccacaactgcgtttattgtgggcgctaattatggg

SEQ ID NO: 39826 - DNA, 1181 bp, Oryza sativa
acaacatattccgtgtgagtacggcctccgcaattgcatcttcagtcctgcacccaggccatcagggcaccgtgctccttggaaaatcgatcagacgccatttggcgttgccgcttcttccaggaaactgcccatttgtcgtcgactggggtagatgcgggcaaccggagattatggatttttatggtagagagagagagagagagagagagagagatcggtggtccattgcaccaaacgcggttaaatttctcatcccgtattcatcgcccaagggccgtgcgattggtctagtccggagtccggactcctgcctgaccggccatgaatcattgacgactaataacttcgtggccacaagaaacacatgctcactttgatgaaacgcaaattattgggagctcagctactccagtccctgtgtagatttcaacttttttctttaaacctacaacttttcagtcacatcgaactttcctacacatacaaactttcaatttttctgtcacatcgttctaatttcaatcgaacttccaattttgacgtggaactaaacacaccctcatagttctacgctaaaattggaagtttgaagaaatttgaacgatatgacgaaaaagttgaaagtttctatgtgtagaaaagttcgatgttacgtttttgggattcaaacttggcatctaaatatggcctcagtctgtgtagatataacatcttctttaggggctacatgtactgagcagtgagcaagaacctcattgttcatcgttgttatgattatcaattcatcttagagtttgtgtcgattacaatatcgtaggccgcctaagagttgtattagatgttagaaaaaaatgtagtagaacttttaatctacgctatctcttgaatgaaattaaagcaaactaaatgagacacatgatgtatcgcgtgaatgacaatagggtaggtgtagaaatgggtagttgaggtatttactggtcaaaaatcgttaatactatgacatgttgtaattatgttgaatctggttaaagcgtttgtaattagctctagtagatgtcgggtttggctaaatattgttaataaataccgtgtcttgatgtcatcgttaaatatggtttttttatttggttactaaggtatatgtcgatgcgagtttgataactattcatgcaccaccc

SEQ ID NO: 39827 - DNA, 698 bp, Oryza sativa
aggcaaatgatttgaacaaactagctaaaattaacatgctttccatctatgtatgaaaaaaaaagaaatagtgagagctcccatagtccttgcaccaatactgcagactcggccccaccacctcatgatagaaccttccctgcctcacatgagttcaagatatagacttaacatggctcgagcccggctgcgccatgatagaaccttccctgcatcacatgatttcaagatatagatttaatatgagtgtttgtatttacaactaatttttcttttagtggtaggtgacgtatcttctaaaagaaaaattaagctgtgtgttatgcttccaggtcctgggaaaaaaatgggtgtttcgtttgggacagctaaaagtggagttacaaacttatacaatatcaaatgtttgttcaatggtggctttctactaaaagccgggtctctaacctctagtctaaaaaaaagtttgttcgatgatgttggcacgacgatactgttactagtgttactaccctggaaattcctactaccattgcaaatgggggagccttaatggacgatcagtcgctctctctgcacgccgcgcgattagttcaaacccctctagtctttcctctctactactagtgcggcggacagcgcgtcgcttggattgtccgtattttccgttttttttcggtttctcttgagcgcccgcg

SEQ ID NO: 39828 - DNA, 674 bp, Oryza sativa
agtaggctttatcttgcctaacaaccaactgccaaacagttgtttcatgaaaaacggaacattatcatggcaaagcaacgtgaattcagaataaccatcgtcgcattaatcagaatcttcaaaagcaagctcaaagtgatgccctggcacaacgagccaaaaaaattgtacaacggattagcaatccgccgctttagtccactcagccatctctccctgttccaaatcgaaaggtttccatgatatgacagaggcaagaaataacgattgcaaaaaatccttcctttttccttcaaaagttcaaaaaaattatattgccaattccatggtatcaaaaatataccaaaagaaagaagagaaagtcgagccttgattccagagggagacaaccgtctctctggactgcactcttatactcgacagctctatgtggactttccaacccccccactctgcaccgtggtcttagctctcacactgagaaacccactcttcccccagaagactgtcttcctcgactatacattctcctaccccaaacgatctaacccagacagggattagttttcgataacaccaggcaagaacaggttagagacttgaacttcatcggacaagaaggcgctggttgtggtttgattcccagaaaaactacgggtactggtctcaatggg

SEQ ID NO: 39829 - DNA, 1066 bp, Oryza sativa
aaagttaagtccccggatccaaacaccaccttagtccctaactaaactttagtccctctcacaaaaaaattagtccctaactaaactttagtccctctcacaaaagcaaaagtccctcccatagggactaaattttttgtgagagggactaaagtttagtccctccttgccaaacaccaccttagggacttcaattttacaggcttacacagactccaacagatgataacttcattacagtaatttatcaacaattatttgttccccttgtttgctaatgagtaaagtccatcaccggtccctaaacttgtaccgttgtgtcatcccggtccctaaactcgcaaactgaccgttcaggtcctcaaacttgttcgactatgtcatcccggtccctaaacttgcagatcactcatttaggtcctccaacttgttcggttgtgtcaccccggtccctaaacttggatttgaatatcatctgggtcaaataggatggtctaaagactttatatttaaaaataattcataactttttcatatgaattctaatgaagacaaactttatatcaaacttgtagccctcgacgcgatctacaactttgtagttgaattttttttatttaaagtcattttttgtcccaaaatgtaattttaaaattaaaatttcaaaatctataaacatgcaacaatattttgggaccctaaacagttttaattcaaaaacttttcaactacaaagttgtaggtcgcgtcgagagctacaattttgatataaagtttgtcttcagagttcacatgaaaaagttatgaattattttttgatataaagtttttagaccgtcctgtttagggaccggggtgacacaactgaataagttggaggacctaaacgagtgatctacaagtttagagactaggatgacacagtcgaacaagtttgaggacttgaacggtcgatttgcgagtttagggaccgggatgatacagcggtacaagtttaaggaccggtgatggactttactctttgctaatcattgtagtgtactagagtctctaaggaagccatcag

SEQ ID NO: 39830 - DNA, 538 bp, Oryza sativa
cacgcagttatgcaaatggtcaatgttaatctccaatttacaagtaggtcccataacttaagctctatacttgacaaacaaacctccatatcaacaaaaccacaggaaattacctcttctgtgagccattgcaaggtttcccagtcaacttcttctttgataaaaatctcctcatacttggatagccccagattccttaaccattccataacacgcctcttttcaacattgctttcaccgcagggttcattttggttatcggaattcgggtcctggaacagagataattcaaaaaacttaaaatatgataatttgttgattccatagtaaggaaaaggaaactattaaataacataagaattatataattgctattgtctccattctcaactaaactttataagggatagaaattagaaatgtatccatagtatggtagcatcaatcttatattcttattcagtggcaaacccaaaataaaaattatggaggtctaatacggcaatacatactaatcatctaattattgagtgatata

SEQ ID NO: 39831 - DNA, 616 bp, Oryza sativa
aaacataatttgaggagataaataatgagagagaaaagcagtgggtacagatttgtagccagctgtagcatagactccaagacgcagtgtgtgtatgacaggtgggaccaggtattaatagtgtagtatgtaactattgtatggataaactattagattggctatagataaattcaagctagtagttagagcatgtacaataacaggctataagctggctgcaaccatattttaagaagttaaacagggagagagaagagcagcgggctacagatttgtagccagttgtagcacggactccaagacacagtgtgagtatgataggtgggaccaggtattaatagagtagtatataactattgtatgaatgagctattagattggctatagatgaattggagctggtagttggctttactattaaacttgctcttagctatactactccctccgtccatagtataagggattttgagtttttacttgcaacgtttgaccactcgtcttatttaaaattttttcgcaaatataaaaaacgaaaagttatgcttaaagtactgtagataataaagtaagtcacaaataaaataaataataattcaaaaaagaattgaat

SEQ ID NO: 39832 - DNA, 663 bp, Oryza sativa
  unsure (1)..(663): unsure at all n locations
gagggagaaaagaggaagggaagaagaaaaaagaagagggggaaagaagggagaaaaaaaagagaggagagggagganaagggaggagaggaggagaagaaggggggaaagaaaagaagagaaaggaaggagaaaaaagaggaaaggaaggggaaggaggggaaaaaanaannggnnnnannnnnannnanannnngnnnnnnntnnnaannannnnnnngnnnnnnnnnnnnnnnnnnngnnnnnggngtcatctattaaaaaacggaggtagtatttaataaaactaaaatatgaaaaaaagtttaactcttttgatggagggagtatataagatcaggtgaactaacgttgaggagcaaagttgattgtggtaaaagaaaggcagaaagcgttattagactccctaaagacgaacgataagcccttcgcaaagacgacggcatgcatatggtatgatattagattataaacagttctagtggcgcacagcctcgttgtcacccgtcgcgcggcgcggtgacgaagcagagtgcgagaacaagccagcaaagaaccgcgggaaggaaaaaacaaatcgtaatgacggcatacaccgtaatgatgaataacacccacatcgtgaggagcatctcatgggagttggccaagacgaaggtggca

SEQ ID NO: 39833 - DNA, 660 bp, Oryza sativa
  unsure (1)..(660): unsure at all n locations
ctcactgagcagatggggtagcaggagacaagaatcaagggcgtacaagacatggcgatttggaacataacaatggccttggccggaacaccatcgggtacagccactgcaaggggtactgagatgaggaatactaacactggggacagcaccagcgagcaccaggggaggcagttaagcgtactttttttgacagcgctgcaaaatatagaattggaacttatgcaatagaaaacatatgattgcggatatgatagaggtgttcgtgctatatactatgcaaaaggctacagttcaacagtgaaacggtaagtactaaccttgagagaaaatatcacactgaactcgtattgcaataaaggagcggtgagcgcctgacagacctgagatatgtactatggctctgttaccaaatgtaccgaggctatgcatcttcagggacagaggcgcggngcacgttaaatcactgaaggtgaatgatgcataggatgcatactcatatgcggagactggagatgagatgcacatgtgagagaaagcgcaactattgctgacagtttcaattgcacaaacagagattggggcaatggcagcgcattcatgtgtgaatgaatggtaatagataaggtagagtttatggctatataatatctatttgaa

SEQ ID NO: 39834 - DNA, 510 bp, Oryza sativa
aaccatgcttaatttaactagtacacaatgggggaattacattaatgcatagattccacaccctaatattgatggtggattaatgccaccgctattgtggaaggtaatcaaaatatattaaatggtgggtaaagggtgcatggattttatggtcccacccatggcaattaacgaccgaatcgcggaaaactctggaaaaaaagaggcaactgatgttatttattatacagatcaaatcttagatttcaggggcatctctgcttgatttagtgctcggtttccttaactatctatcatcatgatgatgtttcctgtatgtacatgatagctttccttagctttctatcatcttgatgatgttttctgtatgtatatgatttacgctcttgaagagcataaattgccgacagtgctcagttcttgtgctcaggacaagcccgtctactctaactgttctaggaccgactggttcactctgaattctgaaaaaagaaggggccatttctgctg

SEQ ID NO: 39835 - DNA, 664 bp, Oryza sativa
tatttttattacaacttgtagaagtcgaatttgaacttgcatgtttgtggggtgatatattacatatgaatatatcttgtcaatttttttttgattttcttttcatacccatttagttgacatgcaacaaatgggtggatgtccacctaggtgattaaaagtgtttccccattgtaacagctctataaactactgagaagaatggacttaaggaagctgactcttgttcttctctaccaatcaaccagtgtagttcaaaccaaaaaaacaaagcatcccgtaatgaagttgaaacagaaacaaattttaaattattaacacgtaaggtagagtttgtttgaatgatcttcacaacgagtaactgcagacgagaaggcctaatgtgccacttagaagaaataaatatcactagtaggctagtagacattgcactattacaaactagcacaagaacaaaaaaaaaaactcacaattacgttgtcccatgagaaaataagcccacatgcttcatctggcttcatagcatgtcttatcctttgaagcgaggacggaaggcggacggggtcgcccttgaccttcagaaggagaagagggagttagggaggggaggaccgatgccgggtgactggaaacgaaaaccgatggcgatgacaagaagtagagc

SEQ ID NO: 39836 - DNA, 563 bp, Oryza sativa
tagacctttttagtatcagagtgagctgcgtgctcgagacatacgaatgaccaaacgtatctaaaaaaaataaacggtgtcatatattaaaaaacaaagagagtacagaaagggcaatagtcagtagtaaatgatcttgaaacttgaaagccagaaatgtaaactgctaataaaacaatgttcttatattcagctcccattaagcgacttgctcatacaaaggggaaaacaaaattatccaatggtctaagacaacagaagagtaggtcttgcacactttgtaaaatagaatgctaaattctatcaaagaaggccaacatataacttactaatgaagatgtccaatatgcaaaattagacaaatcagatgcagaaacgcagggaccagaccattgacagctatggaggaggcaaaagtatcatatcatccatgatcttatcagtttcactgtcggaaagcccataataacatgtactagcgaacgatagtgatgtttcttcttttagaaatagaaagaacatactacttcgagaatatcactatattagaaattgaataatat

SEQ ID NO: 39837 - DNA, 544 bp, Oryza sativa
ctagttcattttgtgagagctctgctcttatgttaggtggagctgaaactgtttggctgagctccagagctagagctgtgctaaacaggcaaattgaaaggcgcacacctgcagttagataagttaggggctctataaaattgggctattactgaatatatgctcagagcaattacaatttattctattgcttcagttggataagatggaatacaatttgttgtattgcttttagatctttttgttgaaactgtaccactaatctttgcttcttactaccattttgcactccttacagatataggcaagagctggaacttgctgaacagcttgagcaaatattccagaggtcgcctcctagcaggctagtctttttgcaatgggagatttgctctggtccagcaaaaagtatctcgaggtaacggtacctcacggtaccaaatcgtttccgatcgttggatctacctggtcaggatgtacaatgttagatccaacgatcgtaaatgatttggtaccatgagataccggtacctccagctacttt

SEQ ID NO: 39838 - DNA, 630 bp, Oryza sativa
aatataaaaatatttgagtcatacttaaataacatttgatgataaatcaagtcacattaaaataaatgataattaaataaattatttaaataagacgaatgaacaaacgtatctaaaaaaaataaacggtgtcatatattaaaaaacaaagagagtacagaaagggcaatagtcagtagtaaatgatcttgaaacttgaaagccagaaatgtaaactgctaataaaacaatgttcttatattcagctcccattaagcgacttgctcatacaaaggggaaaacaaaattatccaatggtctaagacaacagaagagtaggtcttgcacactttgtaaaatagaatgctaaattctatcaaagaaggccaacatataacttactaatgaagatgtccaatatgcaaaattagacaaatcagatgcagaaacgcagggaccagaccattgacagctatggaggaggcaaaagtatcatatcatccatgatcttatcagtttcactgtcggaaagcccataataacatgtactagcgaacgatagtgatgtttcttcttttagaaatagaaagaacatactacttcgagaatatcactatattagaaattgaataatttataagaaacgtcttt

SEQ ID NO: 39839 - DNA, 588 bp, Oryza sativa
aatgtctaacgaaaaaagttatcaaacaaggctaacatccactctaataaagtttacctatcttcttaacatatctgccacattatctccttctatcttttacacaaatagcaattctaccttgaatgtatctctgtgggctgaacaagcactgcatttgatgctgagagtatacacaaagctggacaaagtgagcctcaaattgttctgtttgttgggacccttgcaaagaactatcctggcataggtaaaaaatataactacagatgtatctttgcttatgtagagcactgcaactaactattttaacaatacagggttagctctgtcgagaggctctgcatgcaagtggtacattaacataaatgtacctgagatggttgatctaaagaataggttggtactagatactaaatgtactataaccatctatatggtcaaatttatttaaatgttctctgatacatgcattctatttttttcaggattggagcaaacttccagccaatcaaactgcttcaggcaccaaccacaaacattgctgatgaaaatgctgatgacaaaactgtgagagaactcttggacatg

SEQ ID NO: 39840 - DNA, 713 bp, Oryza sativa
accactccaccactaccttcttcctgtagttccttctctgtggctgactctccctccctttccgccaactcctctcctccatctcctcccccaaccaccaaatactagcgactttgtctctatctccagtgcaaatcgaaggagcaatacgcgcggatggggaaactacttgatggcggatcgagcgaagaccttgaaatatccgaccatggattaggtgatgagttcgtggcggtagacccctcttctctcctcttgcactgttctcgttctcttccccaatcctgttcatcacgtcaccgctcaaaatttgtgggactattgctgctcgggagttgtgggggcatgaccttggccatggcggcttgtgagtcatgccccgaatgcgagtgcccttggtcgtgccggggcacccgtgccctttgcagggcatgaggaacctcgcaggggcacatgtttggcctagttgtacatgccacatcaatgttgagagccggaaacatttgttaggctatatctgtgcactgggaataacattatgcttctccatcctctgtttatgggatcatcaagagcatgttgagttaggaagtcactgctccccatcttagctctagcagagaagtgctcaacattgtggtgcgctatcataacgattgtagtttattatatagggacaacagaggcacgccctatgtggaaaaataagtgaa

SEQ ID NO: 39841 - DNA, 612 bp, Oryza sativa
  unsure (1)..(612): unsure at all n locations
ccacatattacactaattttataaattcacccacatcaggaattaacttgagaaattcaccaactttttgggcctgatttacatgtactgattttatacacaggaggtgacgacaaggaacagcaagtgaacaaaacagttccatatattggaatccaaagtacacaagaccccatttaattggctgaatgcatatccaggtgacaaaatgcaaatgacagccagaaaaggctggtctgcatactctgcaggtaagtaagcaggagaaaagattggcctccaaagctacatcaaaatgcagccatggatgaaatttctggtcaaaagaacagagaggaagcatgcaacaatctgatgggtatagcatgcaatgcaaactcatgtacttctnnnnnnnnnnnnnnnnnnnnnnngccatgtgaaaatgtatggatctctgtcaggtactgcttttagttttgagcagtcacgttatactgacacgcagatggtagtagagcaaaagacaaagttcttggtgtttttttttttttaatctctgatcatgttgatattgttggctagctaggggaacttttttgtgttatcctctgaattcttgtggggaattca

SEQ ID NO: 39842 - DNA, 502 bp, Oryza sativa
caatatacacagtgcttcgagccttattatgacgattagttattctacacacacagaaaaatatgcattggtttataaaagagtttggtgacttcaattaatcaccaagttgcttatttttcagcagcaacttagattgcaagtttagggctcatttgacattctgtttgtagctatgagcctacaagctccgtttaagttggtttgtatatattgcttctgttaattgttttcttagtaatgtctgactatagttaccttaactccttactctccttattgaagaataacatccatgagtgatacattgatactttaagggctccacatattctctctgagagagagagagagagagcgtctgtattcaatgattggtaaaaaccacttctgaggaattaaaaagttaacttaccattgtagatcagcctattgttggtgtgcatcccctgctaactttcctactgtcgtattaaattgtgcaagcacatggcattttttt

SEQ ID NO: 39843 - DNA, 546 bp, Oryza sativa
ggtgacggtaaccgggcccccgggggtttttgaaaccctggtggtgctacattaaatatttgctaatgacagattaataggcttaataaatttgtctcatggtttactgacggattatgtaattatttttttattagtgtccaaataccctatgcaacatcctatataatactcgatatgacacgtcaaaattttacacacctgcatgtaaacaccgtcataaattgctctgctcttccgtctaagatttgagcattgcattcttaatttccagatgagccacgttaccccgaagtcgaaagttttccagtcgtgcttgtgttctggtttccaggccgtagccgccgtacaccatcaggagattagactcttcgacgctccggagggattatcttctcttatttggaccgtgttttggtccaaaataattattcaaactttcaacttttccatcacatcgaagtttttctacaacattaactttcaacttttcatcacatcattccgattttaactaaacttccaattttggtgtgaactaaggca

SEQ ID NO: 39844 - DNA, 575 bp, Oryza sativa
ggatataaagcatgtgcagttgttttgatggcttttattcataacgtatacacacacactctctctctctgtgtttaaaaatataagacgcgcacacacgtattttaagatttaaattttacaacttttgatcaacaagtagtctaatcatgtatatgtctagaaacaaaaaaaaagataatcgttgaattcgtatttgcttgcactttcatctattttttagtttcagtaccaataataatgtaatttgggagaaattgacggtcaaagtttgacattggagaccataccaaatcaaaccaagtcttatattttttttagtggagagagtatacctgttaagtgtagttactactacttactatagtagtattctagatgatgcattggtcctaaacccttgaaccctaaaatgtaacaagctaatataagctggctgatctcccccaacatgtatatatttcttctgcaaatgtaattaattagcccccaaactttttttgcaaataaataaatcaatcaatctcttggttaaattaattaattaacatgtgtgtgtatattataaaaaaaaa

SEQ ID NO: 39845 - DNA, 505 bp, Oryza sativa
gctttcaatattacacatattttcgttgtgaactttgaagattaacttttacagctgcatatgcaagttggaatcatttttttcatcaaaaccaaccaacggatttagtcaaggtaaaatatcaatggagagctcgaattcaaaatatgcaagtaatcgggtaaaggtagtctgaatgtaaagccagatcttcaaatggtatcgaaagtggataaccatgaaattcatttaggaattttgttgtggttgtattagattataatgattcaccatgtaaataaacatgtgtaatttatagaagttcagagatatgtttattcatatgtaaggttcaatataaatttgataatacattctaacaaaacaaattatcaatattgactctcttttctttagcatgattacaagcttctttatagtgtagcctccttagattatgttgatttgcaaaattttggaactccctccgtttcataatgtaagtcattctagcatttctcacatt

SEQ ID NO: 39846 - DNA, 564 bp, Oryza sativa
atatcaaagttgctcaaagtgtacaagcatgttgccaatgaattatgggcggtgattttatatctaactgggctttaatttggtgttgggcttcaatttagcttcagaggttgggccacttccagatttttaataagtaaactgtactttaaaaaaaaaaccaagcaataccatgccagatggcagcatttttttttccagagaggtacactaatttaatctgctgctgcgtaacctttgaattcaaattagaagcaattccactcaattccacccccattcattcaaaagtggcttaaagagttggtttaattagtgagcctaaataggccttaccaaattttgtcaatgttaaattttgacaagttttgacataactaattttggtaaggaaaatgtgtttggattaaagttaaaatagcctaagttatactattgaaatgacttattttcttaggcatgtcactaaacactattgaaattacgaaatattagtaaatctaatttaggcttcaaaccaaaccagcccaagccgcaaaagtggacaatttgccatcttcaatt

SEQ ID NO: 39847 - DNA, 591 bp, Oryza sativa
ggagtttttttttcctattctttgcatactatttattactccattctctagctgcacgtctcaaaattaaaaccaatgtcacaactcacaacatagtaaacagtcctgtatgaagttttattcaaggaatagttttaggaattcaggacagttttgcatttatcctgtatgagacgtggaaactgttgtttcttttgcttccaatgctttgtaggtttgttattctgacaatctcttcttttttctgaaactcagcttttgggccgatcattgttttgtcttggactgctccttaggtatggttctcaactcatggcagcatccgaaaatcaacttgatttcccaaagattatcagcttgctgaagaaggaatatcttctcaaggatgatttcagcttgaaggttcgaggtttgcaggtgtgcacacttggaatcaattactgcacttactggcactagaaaaactagatggatggatggcatgtccacctgtctagataacaagaatgtgctttagtttcatttatttttcatatttaaaaactattcagtactagatgatatatttttctgtgcatgcaggctttggga

SEQ ID NO: 39848 - DNA, 712 bp, Oryza sativa
caatctttctaaaaacaacattataatcattgcattaatcttggcgaaacagattatcccctcttaaagggccatccagggcaaataagcggagtcgaatggttcgctaaaagtaaaaaaatccgactcttcgtagtcgaagagaacaagaacgtgaattgaggaagttaaagaacaatcaatcgattccagtgagtttaattggttaacatttggttggttactcatcacacaggatgatcaaaagcagaaaattaagcagcagctgccctaggtagaataagatttgattacaagctaaggtgattagaaaggaggctatttgctcaactgaaagccagccagatcaggagtagccgggaaccttgacttgactattcagagacttaatttggaacagaatttttttttaatccccttcctcttgaggtaaaccggatcgaatgtaaagaacgaagtatgcatacaaagtagcgggtttgcggtagagaggagtacgcaccatcaacacctggatgtacctatcgagagggccctcagcctcggagatgtcgagaccctcggccgcttgttgatgtgcagccgtgtcggcagcgctttcgataacacgccgtaccggactgccctcccagccgccgccaccgccgccgcagccgccatcccgccggttcgctcctcagttctcaggcgttagggtttgcttttttttttt

SEQ ID NO: 39849 - DNA, 2242 bp, Oryza sativa
  unsure (1)..(2242): unsure at all n locations
ggtgtttccttttcgaatccctaatagtagaattactcttaatatggttgtcttgttttctggatgtggtcattaacagtagcaacaggaagcccgggtaaatcatgtcgttctgcagaatttggtgcatattgagagccaacacaacaaatagtcccccgttcccccgttctatttaacttgtattatcacgcacgtttatgagctcttaaatggtacgattttccaaaagaaaactgtttaccagcatctacatctcttagagaacttaaattaacttatcaactttccaatctttaatttagtcagttaaggctctgtttgaatctcctgaagataaaaataaaaataaagattaaatgttttacgtaaaagataataacttatgattaactgagttttaattattataaatatgaaaaatagattaatctgatattttagaacaactttcatataaaaaattttcgcataaaacgtaccatttagcagtttgaaaagcgtgccacgaaaatccaaaacttaatgttcactttgttgggttccgaacagcgcttacacccacaaaataataaagtaaatttcatccataatcccatcatccaacagcgctttaaaacaaattatgccataattatttgcgagacaaacaatatttagatattccaatcatcaaacttccagaatcatcacaacagacacagtcatcaaacttccaaaatcacatttgcttcacagtcatcaaacctcctttgggtgtgtcctctagaagtaacagtaagtatcaaacaaactagatgcgcaggtatcaaaagtgctcctccagaagtaccaaagagtaagtactacaaaatggggctacaaaatccggagtcactctcttttgccctgctgaggagcccatccctgtgactgcgaacctctcactcgctctangacatcaatcttaccgaacactttctcatacgcagccacaagccgaagaaagaagtatccaactgtgggtatcagaatgataacgagcatggtgaacttccccttcttgtcctcaggaaggcggtagccgatgttgtccaacacgccagctatgcccttgggtttctcaaggctacaatgcaaacaaaaaaaaaaggttcaaacgtataatgaaaacaaataccacagaaaaaagaacaaggtaaataccaaaaagccataccttttaattattgtgctcatagacttggtaagcttggttaacatttccacattgccctcgctcaaagtaatcatgtgctcagccctaagtaacaatacaaagaacattagagtttaacagcctttcatgagaaaaaataactcttaaacttgacctaatactaaccaggtctgcatggctctagcaaaaatgcgcttttccaagttggacatcggctgcacaacatgaataatattcagaacaatggtaggtgaatggccgaaggttttctatttgctgattgctaccattcaacaatgttttatgttagttttgacatatatctgaaaacagcagcctgtatccacacattagatgtcatggtcgggattacgtatcgtcgcagagggcgtgtggttccgcaagcgtcgccgggcggaacggcggagtagcgcgcggaagctgcgtgccggatgactacagtgcggcgattggatgagttcagattgttagtctgtttatcagtttgttagcttggttttagcacattggttaattcgtgtacccctatttagaggcacagtttttgtggagtttaattaaacagattcaaggggggggttctctcatatactattctctatttgctataccttgctgttcatcacgggcgtcgttccaccaaaccccctcgtccaccggccatcacacattcatatcacataccttcttaccccggggctcgtgacaacttggtatcagagctcatggcaacggacgaatcctccaccaacgcagccaccctcgcagccgcagctgcggtcgcagctccggtctccaatgctgacatcgccaagctccgcgagtccatggccgacgtacttcatggcatgtccctcctcgcatccaaaagtgacttggcggatctcagccgctcagttgccgtcgcctcatctcgccttacatcgctggagcagcagggtgctgcatcgacctcaactccgccccgactcggtggcgacggaatgttccggtgaccaccaccaccaccaccaccaccaccat

SEQ ID NO: 39850 - DNA, 1557 bp, Oryza sativa
gggcgttcctcgcttctataaactggaatttcccaaatataacgacaaagacgatcccctcaattggttcaatcattgtgaacaattcttccgaggacagaagacaccggatggtgatcgtgtatggctggccacgtaccatctcaccggtgacgctcaggaatggtattttcactacgagcagcatcacggacccccagattggtacgccttcaaggaattgtgccatgcccaatttgggccgccaatccatcgcaatgccctgggcgaactgaaacggctatatcaggcctcctcggtggctgcctaccagacaaaatttctggcattggcaagccggacgacggagccgctcactgacttgcaacaaatccagcttttgatgacaaatacaaaaatacttatgttatgcttaaagaacatttgatgacaaatcaaatcccaataaaataaataataattacataaattttttgaataaaacgaaaggtcaaacatttgttaaaaagtcaacagcgtcatacattaaaatacggagggagtatattccagtgcatgggtttgctgaaccaaagtagttgaaagcttagaaagtgtagagaagcatactataagcatgttaccatatttgggaaactagacccacaaagaaatttcatgaaccatgcatccaaagaattctgactcatattccatcagcgggcaaactttgacatcttgaaaggaaatcaggagaaaaaaattatccccatgtggtatgtgaagtatatatattgcattagtgcaattatgttctatgggtatcctttattggagatgcatttagtccaagtgacagcacatgggaccgcccgaaaagtcgattacccccatgaaagaacatttccaacccccctaaaaacaacagaataatataaccccagtccttatgccaacaatgtgtgggcaataagaattgaattaaggtctgatatgcaaaaagaagtgaatcaattatgatgagtcaatgacccaattgtgtttattctcaacaaccaccgcagactattttggacaaatgagtagaaactttaacaaagcagttatcttattcgctacagaccaccaaaatggagtgatatccagcaagaaagagaaggaagaaatgaaataaacatgccccctttcacatcagttggtgggaagtagatgaaaagtactcaataccaatacgaattaagaatccaatcccaaacagaaagatatcaagcaacatgataactatgcccatctcagatttctataccaacctttaactctcccatagccaagcaggtaagtggatgaaacaaaaaggcttacacaggtaaatttatcaactgatgcatgtcaccctgctaaattacaagggaacgaacctgagtaagctaacctactagaataccaaccacaggacaattgggagatattcccccaaaataacttaaaacaactattaaggaacaccctaaaacaacatctaagaaagaaccgagggcataatcatgtaatagaacaagtggtatcacacagaaaaag

SEQ ID NO: 39851 - DNA, 700 bp, Oryza sativa
cttgttaaatcgtctcagtttctgacatatactccggttatgaattagtactatatagtaatagtagaaccatgcgtaaattttcgtattgttctatctcgagataaagttgatcttgtgaaaagatcgatcatacataacctttcaacattttgagactgtatcctatgggttgcgttgcattatttaatatacttatacattccctcctttttctttcaataatgctaagctgaactgattagaatcgagtgccttttcctgctaaatattgtgctttttttaaaaaaaaaaacgcagacgctcataacacacgcacactcacgtacacccagctcaactcatttccgttcacttttagccaacatctttgagccccatcatttagtttatgcttatacttcctatgtgttgcgttgcattatttaatatacttatacattccctcctttttctttcaataatgctaagctgaactgattagaatcgagtgccttttcctgctaaatattgtgctttttttaaaaaaaaaacgcagacgctcataacacacgcacactcacgtacacccagctcaactcatttccgttcacttttagccaacatctttgagccccatcatttagtttatgcttatacttatacgtcaaaatttgaatttcaaatttaatgtggaagttgcctttatgattttttttca

SEQ ID NO: 39852 - DNA, 785 bp, Oryza sativa
tataagtgctccctccatcccaaaaagagtccaattctagagatgaatctggacatgctagctactagctatatgtttaatttagacatataattagaatcaagtttgagattaagttatggaatgtttattccattattaaaaaaaaggaatgtttacacacgtctatatatatatgtgatttcgaataattgaattgaccaaatttaataggtcgttggaattaatttgcattataaatttcttattaggtactacgtatgtaccatatatatagaattgtactatatagtagtgtatatatattaagctagctagctagctagtgaattgaaacacaactaccttccgttggtaattgttaattagggaaaatataattatatcatttcaacgctaaacaaagttattgctaagacatgtactccctccatttcacaatgtaagttattctagcatttctcacattcagattgatgttaatgaatctagatagatatatatatgtttagattcattaacatcaatataaatataagaaatgttagaatgacttacattgtgaaacggaggaagtatatatgtatatttagctacagctagtttctcttaaaaagaatagtactccctccgtttcacaatgtaaatcattctagtatttggacattcatattgatattaatggatctagattattattaatgaatctatctagattcattaatatcaatatgaatgtgaaaaatactaaaatgacttacattatcgaacggagaaagtagcta

SEQ ID NO: 39853 - DNA, 727 bp, Oryza sativa
ctctcccgcccagatccgacggtgggcatcggtgaaaggtgacgatggcaccgccaccaacggtgacaacgacgacaacgacgacagcggcaaccacgaggagggcggcggctagggttatgttttttattttatttttttgggggtctttttttttgttgcgtgtgggcgacataagccacccgcatacgaaaaatctgatttttcgtgtgctggtgcgtcacccgcacgaaaagtttcatattttcacaggcaccctgttgtagacgggcgtgagatccgcacgcgaaaatccctttcaactgcaaacaaaaatcgttttggtattagtgtttgatgtatgcctcgcgccgatgtagtagtcatgatggctgacatggtcgaacgatgttgcacggaaaggttcttataaaatgcatctaaggaaaaaggaacccgtcaagtcgtcctcacctcctttttcatggccacactcgaccgtctgctagtcacccatattttttttatttttgaaataaaccttttcaatacttaagatatgaaacttgaactgatgtgacaaaataatactaccacaccatcctggttgccgtggtaggattaaattatcacacccgcagcaagtagcgtgatagtaatttttcctcgccagatgggctgacttggctacaaggtttaaattttaaaaataagttttagaagagtttatttttaaaataaaaattta

SEQ ID NO: 39854 - DNA, 633 bp, Oryza sativa
agttataacattgcagcagcatcagaaataccgaatttaaaactgagtgaagtttgatgttggcacttgaaccgaatatttgggaattggtagtagttaaaccctgacaatatgggaggacaagtatatttttgtaaaaagaaaaaaaggaaaaggtgaaaaaagatttcccaagtttgtaggaaaaacaggtgtaactgtgaacaacacagggattgttttctgagccacgagggtttcaccaaactaactttgaacaacataggaaggaggaacaaaagatgaaggctttaaatgcatcatttggcacaagtgcactgtgcgcaagaaagcttttccttttcttgtgagagcgttcttaattgaacctctaagataaggtatttaagttatagagataaataaattagagatggaggcttgaacaaaagacaagcttttaatctgtggtaacagcaagagtcagaattctagtgcaaattaagtgacagatgcttaacacacaccttaaaaacatcacaacgcctgaaaccttatgaaattatataactcaattgtacaaattcattcatcataaataagcatggacaatctatggcataatggaatttgacagtagtgccatctattacc

SEQ ID NO: 39855 - DNA, 1636 bp, Oryza sativa
ttcaagggtgcagcaacatgatcttatattcactcagtgatcataaggaattttgcctcattaaacaagaatcaaaattttgtcgacaaactactttcaagcaaagcaaattgtttctgaccaaagcgaaaaacaagcaaaagatttggaaacaacagtgaaaaaaggatttttttttcttttccagttgatgattcatctgagattaactatttttatttatataatgagctagagaggcctgactatctgttattatacccagaggtaaagataagagggatatgatgtgacagaacccaacaataaggacacaagagcaatcaaggcaccatgctcattttctgatgccaatgctgcaccagacacaagaagcagcatgttgtgttcagattttcagaattcagaatagagcagcttgcaagtttcaggctcagtgcctgcatggaccacatgcattctggtcgatcattagatggtgcagtgcaactgtgcaaaggcagcattgcagcaacaacaagatggtgacaagaacaagcatatgcatggacagtggcactcaactcatggtgttggtctctcttggccacacacacattgggaacaggttgccgttttttttttttagcctgtaaccaagatgactgttgaacatatgatacaagatttcagggtgagcattggagcattgtcaaaggttttcttccaactgaaacttggtttatataatagggaaactaatacagtgtcaaccatagattgaggttgatttacaatgatcggcacctcgattcggaagaactcgtaagtcaagtagttggttgatactgctgaatccaaagtggttttcagaacctcttctatttgggagtagcttggagagagtgatgttactagcttcagtatctgcatttcttcagggacaacaggaactatagtaatcaagttcagttgcaaggcaattctagtctgattgctgcaaattcaggccgcctatgtattttagcatcttccaaacttcctcaatacatgagaagttctgattaggtaatcaaatcgtaatacaaagatacgcaacgtgcgaattcccgaaaaagttttgtttaggtaatggaatgaatattacagctgcacataaagcttgaaacagtatgatacactactcaaagctaatgctttggtacagaaacagtagaatgaaggataagtggcagttagattccagtaatgtgttatcgatatcagatcgattattacagtataagctatgcgcttcgctacaaaaaacgtcgcaatgaggaggatttttcttctctaaaagcctcttgtctcctctttgaaagagacaagagctaccctgtttcaatattgacatatgatgactgttcctcaatgatgaactctaagacctctcacagaaaaaaataataataatagtaaataaagaaaaaaaaaacagctccggatatgactgaatgaaaggctccttccttccatggcaaataagataatatacaaagttccgtacatttcaggttttctagcctatgattaaagttgattaggagtagtagtaatcctgaagcaactaatctgcactgcttgactgcaaaggatggcttataggaaccctgaa

SEQ ID NO: 39856 - DNA, 604 bp, Oryza sativa
ggaaccctttcagcctttcagatcgttgacattgatcttaatccacatcagaaaggaatttaagggaattaaagaggattaaaggaacaatgcttaaagattatttttagatagtacgtaaaaattccaaagttcccctcaaattctaaacttaaaaataaaaacattcctcaaattccaagccgttggtcccaaataatcccctttctctggaccatttgtggcagtccatcatctttcttcgttctcctccccttcccttgccgtggaagtcgccatggctcctcggatcgcggtgatgccaccgccacactgggtcaaactcaaactcaatcctcctccgccttgcgcaactccggaaacggaatccccatcgccgggaacacatgcttctcccccgttctcatccgttaattagttcctccattagagcaatgatatgatcatatgatacactggtggagaaacccttcgtagtcccagttcgtaacccccctttagtcccggtttccaaaccgggagtaccaatccgggactaaagatcgagctgacctttttttttttttttgcatggccctgttgctgcatggtttatatatatata

SEQ ID NO: 39857 - DNA, 739 bp, Oryza sativa
aagcgcggagcattatctagtatatatataatattaaaatacgcatcatctcgtagcaaagctcgtagaagtgttatgttagatggaccaaacctttgttgctttgctactaaaatggtgcaaagcccagcaaatgcaaagttagacaagcctcccattggcagtagatcatggtgagttcctagttagtgagaatgagattacagagaagttagggctcccaaggtaaatttatgtattcttccgctattatagttcacaacgaatggctcggaataagtcggtgtcctgaacactaaagctagcatcaccgatgtaattatcgacgacctgataaataagacttactacatctctatattgagaagctcttgtataaactataaagtaagctagccatcaataaagagatagacaagactttgttcttattatttttattaaacttacaatttttaacataccttaaattaatgttactccttaatccgtataagttttataaaagaaagtttatccaatagagcagtacatttgatgcacatgtatctggaactgagatatgattggactgaaatcccagaaatgccagcgatcaggcgcccgatcagtggcaaaaaaaaatcgggcgcccaccgcttcccgcgcctccgcgctgttcttaccacgcgcctcaccacacgcgccattgcaacaaattacccacgtattagaaacgctctattaagtgaatctgttt

SEQ ID NO: 39858 - DNA, 534 bp, Oryza sativa
gaactaacacaaccttgatttcttgtttgtatgttttccaagctactagtactactttaaaagtcaaatggctatcacaaaaatcacattatccatcaacctatcaatttcagctatctcagacgaggccttagagagcaaaatctggaatatgtgaatgcaagaacctgtatgtagcatatagaattttcacacaaactttattgaaatttcgtagaaaacaacgaagatatatgaactgaaaacaaagataccataccagtactaacaacatgactgtacagcacacaagggtcaatcaaggttcgcacaactttacttgaaatttgaagggtaaaggtgtgttctaccatgcaaacgcaaacgaatttcagcagcaccacgcaaacatgttatatacctgcaccagttacactttcattaacccaaccatctcaagaaaaaagaagaggatatgcaacccgagcaggtcaattttcttcttcttctttttcctcttctctttttataaaagattatcacaagctacaacag

SEQ ID NO: 39859 - DNA, 640 bp, Oryza sativa
taagaaactccttccctctcaaaataaataaattaacctaatacggggatgtgatatatcttagtatttctgtttaaatttatagtattagaatacgtcacattaattctatattttatttatttattttgaggcagagagtagaggctatcaccttctcaatttacattcatatatttatattgtcgatagtactatagttcgtatagcctctataatttctgtatgcctcgtatatgtagggatgcatatatgtgtgtgtctggcttatgctaccgatcaacacagctacaaaggtactccaattagtagtattgtacatgcgtgcatatatattttagtttgtcatttatatattaactagaaaaaatgtatgtgcgttacaacaggtgaatgctattttaatcttattattgttatacggtttagctaggatgaaattcaccatgagaattcatttggatttttttttagaaaatcatgagcttcaattagaagtctgactttcctttcaagttagcatacaagttttttaaagaaatttcttatacgacttcttttgtatttttaaaagcaaacgaacttaaaatccaactcatacacggatctctatttccaaaagtgaaataacttaaaaact

SEQ ID NO: 39860 - DNA, 1087 bp, Oryza sativa
ccgttttcagccctaggccggtccgctacctccctccgtttggcttgcttccttcgacccatcaaatccggctgaatctttctcgatcacccaaaaatggttaagggtttttgatccacttacctcttttcgttttacccaaaatcaaagcgtaaaactcgagataaaaacaatgggggaagatcgtcgtcatcatcggcaacagttagattaaatccgcaaaataaagctaggaaaatcatggagaaaataatgaggaaagagtgggaatcgatttttttttcaatcaaattggagtgaaaacgcacaatcgatatggcgccggcacagcgcaagggttcaactcggtagacgtgccgcaaatagattggataaaaaacagacgagaaaaaccaaaagcgcacgggataaaaaaacaggtgacaaaaaaaccagaagtgctcgggagacacgcggtgaacaaatcggatttaaaaaaccggaaaaaaaaccgatagcacgtgcatagaaaaaactctttctcgtgaaaaaaaagcaaacggactttttttttgtttttcactggcgagacttttcttttccttttttactgtagtcggacgatttttttttctttttttactggtgacgacataagctttttttttctttgttgagtcggaattttttttaccttttgagtcggactttttttttcttttttacctactatatggaaatttcttattatttttaagtggagatagagatacagagattaaaccaaaacataaaattaaaaccgattgaaacacggatgacgtatcaaataccggcaaaaacatcttcaatttttataatagtagagatagagatttgacaaaagtgtgagtaaactataacaaattcttttgacagcatccaccaaaaaatgcatatatcgaatcaaaaagcatacgtacatatatattttagatcaaaaggctatcgcccagctttactgaaagcataagaagtctgtgtacagaaataaggctggggattccagcttacatatcaagttcttagccaacgacaccggcaacaaagctgctgactcagcacaaac

SEQ ID NO: 39861 - DNA, 830 bp, Oryza sativa
tagacatgtacagatattcttgaactatcataatttaaacactttgaaattaaattgcccctcgttccgtcgctggcctggcgaatttttttttaatactctgaatttgaactgagagtgatagcctgataagattatcactacttacttcagttcagatagtcacagaagaaaattgcaagtagaaataaaataacatacactgatcaaacaaagggtatgcagctataggtttgttataaaccatggattgtcaactgacacaacttttatggtacacaaagcatattgtagtgatatatttttcagttatagatggttctaagataatactcttcgaacagtctcctggcagtatgctaatgcatactaggcctcgaaattctgtagaaatcttatgggaattagtcaattccttcaatgtctgcagaagttgggaaaacattttcagtatttctgtggatgcattagcaaaaaaaaaaaaattgtgtcaaataattgtggcagataagagctactactaccagacacttcggggcagaccgtgggccactaaaatacgacagatttgatgaatccatgtgaaatgctgcaccaaccaagtgggcctattggcaactgaccttcagaaactaataaaataacctgacaaatctagggaagatttacacggtttgttaaacccaaactgaatcaagagaaaaatcaagataaaaattaatcacatattctcctgtatttacaattggtttcaggaaagaaaaaaaacaaaaaccaaaaccaaaacaaagagaagctaccacttacaaaacttacagtaggttccttcc

SEQ ID NO: 39862 - DNA, 4617 bp, Oryza sativa
ttccagatgttggataatggcatggtttttgcccactcagaggatgttgaggctgttatctgttcttattttcgtcacaaggactttgataggttggatctattcttaaaccgaatacggagtttgtacaagctcacccggtctacttatgatatattgatttctggatatcagaggttgaatttacacggaaggctcgacttggccataaaagatatgagggaagctgggtttgcatgagttcctgcaaaacattcattgttctgtgacctcctaaaaacaaatttcctgtggattttggaaaagaaggtagcgtcctctttatacaaacaattccgtgctttcagtactttggatttgttaaatgtcatttgacgatgttgctaactcctttgataaactaatcattctttacttcattattgatgttgtactttattctttactcactgtaaaactgggaaacggctaaacaaactgaaatctgaaagagaagtgcagaaactatgttgcatttgaaacaggatgtttgtgctttcaacaagttgaattggcttacaacttttaagtgtataggtttgatatgcgcttactgcttccattattagcctgaataaaatttacccttctaattgtaattgaatacattttcttgagctattgtattatatatatggagtctgaacatattttaagatgcaagaaagacaattcacacaatacaaccttaaagaagttcagtcacaaaagtttgctccagtatgtggaatggatagttcctgcactgaaacatgattaatcttgcttgcataattttccttcggttttattcataagagatagtgcatctcacttcttaactcaaaatatctataagtgctgaattgtgctcttcttttacagcaggctccatgtcagaaagcttcatgcaaagtttgagcttaaagcattgcctcctgttcattcatgaaaacaacgcctcgatgacaggaattaattaatacttccatgatgcttatgttccttgcaaaacaagctagtaaacctgtttgtatgttacttttcagaatctcaggtccagttttgtacaaaccatcaacttgttttcttctcctaataggaaaaaaaaaacgtaccagctgcagtcatgtctctaaactttttccaagtatttgtcagccattaagcatagtcagaaaattaatttgaaatgcaaaacttagatagaactatactgttatgtaaccatgccgacaaacatgcttgacttgctttcacctgaatgacggtataatccagagcttggagtaccttgctccaggattgactttgatttttttttcaaaaaaggtttcgagctttgctgtggccatgtctcaaggtggaactgtgagaaaccttctatgagttgataaattctgacgttgtgagcaatttcttgaatacactgttcatggtaaccacattcgtgagttgattatcatgaggtttcaggacgatgaatctatacatgaacacaagattcagactcacaggatgacatgcatgatcttttcccattatccaacaaatatatgggatcaattgactgaagactttcatacctagccaattcgtgagcttctggtggagccgagctttggtgtcatgcaccaattaattcatactcctatattagtttcccctttctattttccctttctgttctcactttcagtttcaactcaggtagcaattttcttttattcttcttggcacattggcattcatcctcgacaagttcgcatgtgcatcaagaaaattttataagctgtaaacgttctaccattcatttaatcacctaaacatgaagtaggttgattgtgcacattatatttccatttcttacataaaccatttaaaaatattacaaaagctttgtacatattattcttgatgattgtttcagaccttatgtgaggaagaacaactatttttaatgattttaattattcttacataaaccattcaaataaaagatctttgtgaggaagaacaactattcttgattgtaattatgatgattttaaactacacataagggaggttactgtcgcgcgaatacaattatagactagtatattctgaagaaccaattactgagaatttcgactacttgtgcagatgcacgtgagcactgcgaatttgtgattacagaaacatttagatgtattttatgtttgagattcaacttcactaatccaatgtggcaatatatacaggctacaacaatctccgccgcccgcctccccgcctgactctgccttaggcgccaccatgcggcagcagcgtgggtagacgaggaggaggctgggagcggggcgaggagctcgacgacagcgccggccgcggccctgctgaggatggaggagcggcgaggagagaagagaggcttaacctgctgaggatgtacatatctttaatcttttattaatataacatagtaggagcctctcctgctgtttaaccggctaaaaaaaaaagagaggcttctggccgccgcccctccgctcctccccgccgctctgctggcatgcttcgaccatcgtcgtcgtcagaggcggcgtcagaggcggcggggactaggacgacaacaacggcgacggctacggagcagcaccgaagacgacgcaacgaggaaaaagagggagagccgacaggaggagagggaatgatatgtggggcccgccccaccataatatttttaaactgatatgtgggtcccactattcttaaattattttttgcgtgtcgctggcatgtgggctcacggtttttattatttctctgagatataattactacgttagcgccacgtcaataccacgtgggatggagacctagtcaaaccagccacgtaggcgccacctcagccaaaaccactttttaaaccgccgagggacctcgtttacaccggttttgacagttcagggaccggttgtatctgattttggggttcaatgacgaaaattggatttggtgaaaaattaaggaaccttagatgaacttattccttttttgtttgagccgggctgggattggatggaacatacggggaaaaagtgtagcgaaggtccctcaacttgtcatcgagttataaaatcgtcctccaatcacaaaaccaaatatatgacatccctcaacttagggtgtgtttggatggtgggttttgcctggataggagatggctgtttggtcgctgggcggtgtgggatatggccaccaccccagagaatattcgcggatgaggcgatccagggatgggcgagcgcacgctagggaaaaaagtgacgtgcgctcacctccttcccctcgttttctctttctgtcctctcctttttttcctcttatttgagagaactcattatatgccattgactttatcatacgttcacgatttgccactgactttatcacgttctacaatatgctatcgacttttgcttaacttatacaatttaccatcgccgtccggttagtttccgttagtattgtataaatttgtcaaaatgaccaaaatacccttgggacaaaaacttttaaaatttggataaaaattctgaaatataagattttaagtttttggccaaaaattggatgtttacaatcttatgtttataatatgatattttgaattttttatccaaattttagaagtttctattctaggggtattttagtcatttggacaaaaattgtagtactaacataggctaaccggacagcgatggtatactgtagaacgtgacaaagccgatggtaaatcgtaaacgtgtgacaaaattcaggggcataattctctctctctctctcttttttttttcctttctaaccggtcaaaccctagcttctcccttcctctcccctggcggcgacggcctcaagcccgggaggcgcacgggtggcggcgttcggcggttcagggagcggtgtccggcgccggagcttgcagctgaagaggcggtatcttgctgaggctacaacatcgattttctccatccactcatctcccaaaaccaaaggtatactcccagatctgagcttgtttgttgttgtttggtgatgggttcgttcagatctgatgtattatgcttatttgtttgtatttttatatcttgtatgcatctctgtccatgtatatgtgtgtgaatgtagtaggcctgattgtgtatcaacctttggcattgtagatggacaacagaacaaggtttatgatttatgcgtaaaggtaaagcagccaaacgataatgttgtctggaaaaaaaattaaagaagccaaacgacaatgttgtctggaaaaaattgaagcaaaaatatgttgcgactcttgccaatagtcagcttgaagccacacctaggactcagccgccacctaggacaaaaccgggtcaaaaaccaccgaaggacctaaagttaaacctcctctgtgattatgcaaatggacaaggtaatagaactaagccctaggtgtggcttcaagctggctccgcccctgaaattgacctcaacgttaactcatggttctgattgttttttttcttaacatttttggtagtatgaccatgtgcaaacacaacg

SEQ ID NO: 39863 - DNA, 4420 bp, Oryza sativa
  unsure (1)..(4420): unsure at all n locations
tactatgacaaatttacggtagattcagtgaataaatggatttaccctaatcattcccgctggtcactactgtaatcaccacttccaacacgcagttgagagcaaccttggcgacgcgcttcgccgctcgacgcttccaaccatgctgcggccagcggcggccgctggcgccgccggcctccatcagcagcggcgtgcaccgcgggtgcacgtcgacgtcgcactccacgcagcggtacatgcagcggccggcgtcggaggtctccctgcaggcgacgcaccgccggctggccgtgaggacggagagcgtgagctcgtggtcgcgatggcgccggccgagcttgactcgcttcggcagggtgaggcaggcctcgtggacgtcgaagccgccgcacggggcgccgccccggcatctgtaccggtagctccccccgaagatggtgcggtcgcacacgttgcagacaccgaaagcgccccgcttgccgccgtaaacgcgcctcgttagcgagtgctccgggtgtaaccaggtagtgtatctggcggaacccatattgatatatatatcgatgtatcgaatcgctagcttcgtgtggcctagctgtgggctgataatgcttggttttcgttgtgcaggaggtgaatgcttagttgtcctgagtggcatatgagtacatatacatacatacatacatacatacatacatacatacatacatacatacatacatacatacatacatacatacatacatacatacatatatatatatatatatatatatatatatatatatatatatatatatataggacactcatatggggcaccatggtgcccgggcaccatggtatgaaatacacaaattcgcccaaatttttcaaaattttcaaattgtgagtatatacttagttataagtattcgattcatacctatacctagcaacaaaacaactcaaatttaactttatttcacaatccattattacatacctaactaattatatgtttggatgctatatacctagaatcaaaatctaacaaaagcaagtttgaattcagttcaaacttgctttgaactagttagtaaagtagttaatgttaatacctaaatatttgaaaaagtttcatactcatttgaattgggtatatagtaaatttcaatcatggtgcccgggcaccatggagcaccaaacaaatttaatatatatatatatatatatatatatatatatatatatatatatatatatatatatatatatatatatatatagtagtttcgactttcgagtcatcggtcttagtggtgttttttttttccaatacagacaaaagatatgtcaaaattatgatttgtatacacggtaaatgtgataagtacgtgagttagccacattcacccggagcatgcacttgaaactcgaaagaatagtctagatgtgttgttgcgcttaacacgtgtgcaatttattttatataaatttcacaaaactacaagtatatttgagtaatttattgtaagctacagatttaaaataatatatcataaaactatatatttaacactaaaattaccacaaaagttgagtatcacaaaactaaatgtttaacatcaatttaatcacaaaacttggatgttgataattcaaacataacattagtactaagaatttaaactctaaaatctgtagtttaattaattttattattaaatttatagttttgccatacctagttttaaacttgtagttttatgataatattatataaaatatatagctttgtgatacaccaccttaaatctgcagttttgtgataatttagtaaaagtatctgtatttttgtaaattttactctattttttcattatatttattgataaattttcttctaaaagattaatagatgtaaatataacataatcatagtgtaattatattataatttgaatttaactataataaaatttgcatgtaacttttaaaaatcgcacggtaacacgttatttgtgggaagcagacgtttcgtacgtgatggagggacgcgcggtaataccttatttccgcaaaccggacatcatgcgacggaatcccatcacctttatgcttgccatggttttttaattcccgcttgcatgaatcttgaagcacatctaacaatttaaaattttaggaaaatacatgcaagttacaatgtaattacgcgataattataccgtatttacatttgataaagttttaggagaagaaaatatcaacnaatgtatagcaatatcttttttttcttcatattgacaaggatccatggtaaaggtgtataagtttcaattttaagttacagcattatttatttcatccagaaaaagtaaaaaatacacttgagagttgtttcatatcgatctagtgttgaaaaaggtaattgatgatagaatataggggagagatgaaacaattgatatggaattttaggggttttcttcacagcctttgttgtcgagctctcttttttttcgttgctaattaacatggaaagtgaacaaaataactctaattaaaatctgcttaagttaacaaccaaaattcctttgggttttaagaataactatatggtaaactagcctggcagagcaaattgttatgcatagttctatgttttccttggggctccccctctcaaagattcctgcggcgatggagatgaaaagagccagtggcgtgtcgtatggtccttgtgccatctagaagaaggttggctctgccattgctccgtcagtggttgtgtcctagtgctcattttcctcaacgacggggagcggcggtggtggtaggcggggagcccaggcattggtggcggtggtagctagttggcctacggtggtttaacgatggtaacatggaatgttggcatgactaaggtggtgtcgacgacatccagtgtggatccagtctaatggccagatcgcccttcaagtgagcgaggaggctacagcaagaaagatagacggcaggctcattcagcggcaacaagtgtatctagatcaagcctaatggtcagatcggtagtgagcaaggcggctacaatgaggagctgaagcgacaatttcctgatgatggctaggcgtgactctatatttagtatctaagtgccactagttatgatgtgtttgtgcccgaatccgtccgtacgtatagttgcaacttgatgttggaggatcttcttcttcttcactttatctggatgatgttagcgtgcgaaggcacaaggggctaggagctatcggatctggatcgattgaatcttgcctatggcaaaggcaacatggggattagaggtggatagattgaggatgtgggtactacattagtttaggcggcgtttcaactttcaagatcgacttagtgtcgtttttggttcggcaggactcgtcaagtaagagaacatctgggtttagggttacagtctttttccattttattttgtttattttgtagtttccaagttatgagacctggaatatatctatttttctgtgtcccttgtgtatatccacttgatatagagaccatcattttatttattattaaaaaaaagttgtattatttgtagtgattatgaatgcatcggtgagatagtctttttagtttcacttctgtgaaactcgataggagattcattctatttggtttgacccaaacagtataagtgactaatgagtgagcgtgttgaatcggtggagcatatgtacatgtatacttaatgccaatgcaagttcatgataagcataaattgagaagtcagcgatcctcgattccttgcaaccccctagaccttggtggcagaggaaaacaacaaagctttctaacttgacacgcattgacattcgaaagtacgtgtgcatgacttggtcaaatagtacttactactccagtagttactcgtaccaacatccatcgtactcaggtcgtgctttttatgggctggccgcacgagggctactgggctttagcggttgcacgcacgcaagaccgcaagtccgctcgaggagaggacaaagagggtgtacacgaatgttcgctactattagacagtcacgcgaacagttccgacaaccttcctcttactcgtacgtctaaccacgcctgcatgcaaatacgtgttcacatgagagttgctctaagcctgccttttcaaagaccaagtccacccatacctatgttattttattctcctagaatcgtacacgtgttcacgtacgtcaacaatgttggttcgtcgcaacggacgtttttttaaaaaaaatatatatccttgattaactccttatgtttctgttaaaatttatatatacattattaaacattctaattacatatataaatttttatacataatatttatacatatacgtatatgtataaa

SEQ ID NO: 39864 - DNA, 589 bp, Oryza sativa
cccccccccccccccccccccgctatcagaggcgacgtgtgcgccttcattcttgcagaaataatgaacaagaaaggacgttttcatgtgaaatagactcatgaacttggctagataatttattgtgatgtaaaaaagatgtttttataatttcttgtgatgtaaaaaaatatgtttttatggagtgcaatgtaatttactttcatatgtgcaatatttatggtagtttactaaattgtcatcaaatttgatcaactacgatttacgttgtactattcatctgttttctcctttttttttccttattgacaggttgtggaggttcacaacgaacagaatacaagaaattttggtaatcatttgaggactttcatggggtatgaattgtgtgctataataaattaaattgctgcatatgtgatgttgtaaattgttgctttgtgatggatctgtgatatgtgatgcatctgtgatgttgggcagttggagaatatgtgatatgggatggtgattggcacctgtgatgtttctgtttttcagagggcatggctagcaattcctgaggctagccaatatttagcattttatt

SEQ ID NO: 39865 - DNA, 520 bp, Oryza sativa
ttctaaaacaaagcgctaatgcttcagatgagaagaatggccagagatcaatggtcaatgccattttgtttcctattgctagttataatggattaggcgaagaagcattatgtaagtgcgagcctaacactgctgaaatctgtcaaaaggtcaatgcactagagctatttttgacgattaggtaatcttctgcagaaacctgcagttcaagtaaagccgtttactgtgcaatcaaatgaacatgggttgtgtaggatctatgcccaaattactcaaaaattcagcaaatcgacacgcttattcgtgacaactttcatcaaaatttcgtttacaaatgagcacggtgaaagcaatttttcagaccgcactttgtcgttcaactcaaaatcaaagtcagcctataaagtcagacaactttgtacaagtgtgaacttaaaacgagttcatgtccttggtcgtgccaaataaaaatggactgaaatagtccgtatttgtatgagggattgatgaattcaatata

SEQ ID NO: 39866 - DNA, 714 bp, Oryza sativa
ttatttaaaaatttatgtaattataatttattttattgtgagttgttttatcactcaaagtattttaagcaacatttatatcttatacatttgcataattttttttataaactaatggtcaaacatgtattcaaaagtcagtgacaccatctattaaaaaacggaggaagtatatacggatttagtcctctttggaattttgtactataatttcttcttttaaaatctgcatgaaaaaaaatatagaatacatttttatcgacaagataattatgaagcaaaagacttagggcttgtttattttgctaccattttcaaccttaccaagttttggtattgccaaattttagtcaaattttggtaagttaccaaaattttggcaatgttactaaattttggcaagatttcatatgtacttactaaaatttggcaacagactgactaaatgtagccaaaattttggtaactttgtaaaaaaaaatggtatggttgaaaatggtatcaaaatgaataagcctttaggtgtgttctttttcctcttactattatggattataaagggcatgcttcacaagcttatggtttattatttgatttgttttatatcaatacatcaactttataatatttctaagctctgaaataattgttatacaccaacttcatctatagtccatcatcaatcgaaacttaaacgctacagcagcatcgtca

SEQ ID NO: 39867 - DNA, 3420 bp, Oryza sativa
caaaaaaaaaaatcaagattaccttggactagttccacagggaaatttgcaggagttagtataagatatgacgcaagagcttcacgtttggaatgtgtcttacgtttcctatcagaatacctttcaatctctttatcatcattctctgatgggatatcaacacacaaaaaaaacttatcagaaatagctctacaaaagcaagcacaaatctctacaaatgcaaggaatgaagcaaaaccagaggatgcttgattgcttggaaggaaaaaaaagaggctgaaatgttcattaatttgtaaaaatgtttcaatggagatatagatagggctaatacaaaagaagagtaggtactaaaatgatgaatttctggttaaattgagctcgcagggaagcaaggcccaaaagaatattatgatttatggattctaggccccatatcaacaccaagctgaatgcaagagaaagttctctgtgcatgtcgaagtcaaaattatgtagtccatcaaagttcaacaatatataggaaaccataacaggttccactcagtaaaacagacagtcagtccaaataagccagagctccagtaaaacacttcagtacccaattctttgacccaacaactcaaaataaacatgaattacttcttgtaacatgtgttaactatctgacctatgctacatatatagtcgatttgtattaatcgagaagcaagatatcctaatgggcaggaagaagaactaagcattgtcacgataagttgagccatagtagtacttttcttggggacatcctcctccaggtggtagcaagaagtcttccagaaatcctcaaatttcaaggtggactgtatcagagccttctcctccatggtcgccctggcgcacgtcatctccggcagggtgatgtcctgaatataccgacgcccaaatccggtgaatcgccccaaaaaaaaatcacaccacgagcatggcgaaaatcgcattcagcagcaacaacgagaggagagggaaagaatgggtgcagggaagtgtggggatggcggagcggggaatggagtggagaggagaggaggttcaccgggaaatcctcgtggggggtgtgcttggccgggtggtcgaagccgtaccctcctccccgcctcccccggcctctcccgcggccccgggacgccatctggaggggggacggatgtcgatcgaggcggcgaacctctccgcgcggcagaagcgcggccggagaagagaacagcggcgcggcgcgaggggaagtgcggcgtcggcggcggtaccgcgcggcgtggtggtcccgggctggctgtgttagggtaggcggttgggctttttatgggcctcatggtgactattgggctttgcgagctaccaggttgcacgtcagttcggctgtagatggaataagttcgagcatgtttattttgagggactgtctgaaaatcattcgacagatttttagtagaaaatcagtcggattttcaagccaccacgacgtgcggttcaaatgaaaacatatccacgtacgtcagtcaccggacggtaatcacgtcaatgatgcttaaagaaaaggaaaaacaagcaacttacatctatttacatcaacttacatatataattttaaaacttacagtgtaaatacaccgaaattacatatgtaattttgaaacttacagtgtaaatacactaaaattacatatgtaactttgggtacttgcaatgtaaatttattttatgaaaaatataacggtatatatagtcccaaaaatatcaaatcacacctcaaacaattaagttaactatagtgcaacaaaacaacgatgagtaaaaaattccgtacatgtaaaacaaaaattacacccgcatatacttaaaattacattgtaattgtagtgcacttacgttttaatcgtggtataactatgttgtgagtgggtgtagtgtaactgcagtgaaagttttaaaaaaagttacgcatagaaagaaagtagtcgtttgctgcttgctcagttggtacgatgcatgtcgtagcatcccgacatcatgggttcgattccctgttctagcgacattttttttttcactcaatggcacatacacgtatctcaaagtaaatcatacggtcaacaaatcgactgatttttaacagaaaatctgtcgccagatatgtagcaattccgttattttgatgccaaaaaaaccttaccaaattttggctatggcatagttactaaaattttggcagggtttcttatatagttaccaaaatttgatagcaaactaaatatagccactttttgtaactttaccaaaatttagtaaggttaaaaatagcatcaaagtgaacacgcccttcattttaggtccctcaacttgccagcgaaattgatttttatatccttagaccgaaatatcagatacaacgggtcattaactgttaaaaccgtgtaatgtaggtccgacagaagtatgacatgtggttttgtccgacgtaaaaatttgacccgaattaataatgttgagtcagtgtgagcctcacatgtcaatgcctcttcacctatatctctttgttcagttgtgactgagaagcatggcggccggcgacgggtggtgaagaggacagtcgctcacgggaaaagatagctcgatggaggaaggacaccgacggtggccatcgatgacggcgatggcaaggcagactagaagagaggcaagatccgggagcatgacatcgtcctcccctcacccctcgctcccctcgcccgttcttcccccacagccgcacgggacgggagccggcctcgccgcccaccggaggcagcgtcctgtctcgagttcgctcagaagccgcttgtcctcctcctctctccacgaccccatccgcgaacgccgcctctaccgcccacatcaactcctccacccacatcgccgcagaggtgggtggtgatggtggctgttgcagagaggcgcaaagaaggctctgtagtggtgagcccttgccggaaccaggatagccacgcagacttggaatagggagacctctagtaatgttgaacccgagagcctatcggcggtggcgcgcggcgcaaattggtagcggggaagagccagtggaggaagaaatcggggcgacgaataccgaagtcaacgggtggaggtcccctccgcttgccggccatcggccatggcttgagccccacccttcctcatccccttactcctcgtctcctccttgctcacgccttttgccgcagtggctgcattcgtcggcctcgagtccttcctggcggcggtgactacccgcgacccctctgctggcaataacaccttcggcgccctccccaccccggtcctccgtcagttctcggcctcttcaccttcttcagatgatgagctttgcagccccacgag

SEQ ID NO: 39868 - DNA, 575 bp, Oryza sativa
aacattgcccccatcgaatatagacacgacctaatgcataacccccaataaattcccgactgactgtcgaataaactccaactaaaatttttctaaagccctagactgagctaattttttttttttttaaaaaaaaaatccgatccgaaagaacgaccaagatttttcccgcaaaccaaagaggcaaaactccaaattttcccgaaacaattccaggtgcaaaaaggcatatgcagatgaaaaaggggttcagagggctcttagggtttccagttggcttgtcctacggtcaaggtcggctctgataccaacttgtcacgcccagaaattctcgaaccagaatttctaagctgaatgtgcattaaatccctgtccaggaccagccagggtacacaaacgacaattgttgacatacagatccacgtcttacaaaaatagaaaagattacaaatgcagcggaaaagataaaagcgagctaaaccgggaagcttgacttcagcagcgggcgactccactccacaggcaatccttgacggcagcgacgaaaccaactttgacaaaacagctccaactag

SEQ ID NO: 39869 - DNA, 626 bp, Oryza sativa
caaggcttatggagattcctgtgagctaacagttaaataaggagtaaagccattaccctttttttttctcaaagtactattttggaatggtaatgtgttgccaaatgataactcatagatactactcgctagctctatcctaaaatataaaatataaatacttctagaatttctggattttttacagcaattaagaatagacgtgaagttatatgagtgatggatatgattggttgaaacaaataagtagtggagaaattagataatagatagttgctattggttgagataagtgagtagttggagaaattagatgatagatggttgtgattggttcagataaaaaaataggcggaagataactatagttttgaataacgctaaagatagctatattttaagacaaagcgaataggatgttccttttgtttggacaacacttgaaacttgatgttgcaacattgagttcttgagttggaacaactgcttttttttagttggaacaacagtcacgcggctctaaacgtgttgggtgctttctttattttaagagtatagatgggagattcatacacttatacagtgacatatacatgcacaacttacaaatgcttggagctttttgg

SEQ ID NO: 39870 - DNA, 508 bp, Oryza sativa
ccaagaattggccgcccagttcgagcaactctacctggatccagaccaaccccagtagaattttgttagaagtagttctgacctttgagctgtactcttttctttgtcatggttttctcattttcccctatgagtttttacatgacaaattttttaacgaggcagcatgtatcattgtatcctgtaatgatataaacatcaataaaggtcattactatttttaacaaattcttttgcaatattttcgcaagtgtggatttatctttaaattatttcaaaataatgaatcacaatctatatttttaaatttttcaacacaacaaaaaaaataccattttttcttttttttaacattagcaaatcattactttttttaaaaacttttatttccattttttaaataccattttttcattttttaacattagtaaatcattacttttttttaaacattttatttccatttttaattttttttcattatacatttcctttgctttttttttta

SEQ ID NO: 39871 - DNA, 682 bp, Oryza sativa
ttcttttttttcatccaaccgctctcctcatcaaaatttccctatcttaccttaaacacactcctatttccaacatgttctgagttattaaggggtatatagaacattttcttttgaactaatttgtcttttcctaaatatttggaatgtattttttttagaatgaaggaaaacatgtttggtagggctccaaatctactactccatccgtcctctaatataagggattttgatatttaacttgtattgtttgaccattcgttttattcaaaaaaattttagaattattatttatttttttacttactttattatccaaagtcctttaagcataattttttgttttttatatttgcacaattttttttaataatacgagtggtcaaacagtgtaaataaaatattaaattttttatattataggacggagggagtactcccaagctagagttgtgtagcttgaaaaaaattagcttcatccttcgtatatatttttctagagcaaattcttccactccacttaagaaactaacgatttaataatgtttggttcccctaaccagatcaggtctaggagctatagcccctgtgtggctgtgtggcctgatactggaaaaatcttttgtgaggtggtcgtcggctcgtcaaaagccgttgatcggatgggccatcacaatcggat

SEQ ID NO: 39872 - DNA, 941 bp, Oryza sativa
  unsure (1)..(941): unsure at all n locations
tataaatattttcatgaacgccatattaatattaatattgaattttttattgaattaaaatccccttaacacaatccaaagtagttttggtcctatattatgacagctcaatcaataattttcataataaatcagtggaacccacctgtaagaagagatggacgggtcctaccaattttttttttaaaaaatattgactagtctatcacataagagcaaaaccaatctaaagtctaggtggtaattcttactcactcactagtttggaggtctaattcaaactttttttcctttccctaatccctagtaccaattgtttcagcgtattatatagtaatatgaccattgacaggtcgttcgtctttatgataaagagcattgcaatagaaaaaatagtcttatatataaacttcttccttataatgatttcaacattttatttaattagtcgcgagttataaaaaaaaaatcaagattcgttcataacgtggcacaatcaacatttttataagaaatttgtatgtaaccaactccactaaaaaaaattaccgcatattctctctctctctctaaacttctgtctttttgagcgggtgtgctgggagcctgggatggccaaactggagcctgcagtttcaagataagcttcgctcgtgtgatctatggtgcatgtttattatgcttttttttacaaacacacgtttactcacccttataaacacacgtataccatatttctacgtgcatatccgaaaaactggaccgacacatatttagattgatgaagttatcatgaatgtccgnnnnnnnnnnnnnacgtcgcctatcactgaaaaaataaataaccataaatgcgagcatccgtgtcaagtctaggattttgaaatcgggtagattgattctcccaaaggaacctaactaaatgagctatgctcacttcg

SEQ ID NO: 39873 - DNA, 550 bp, Oryza sativa
aggcgcagtgccctccgccgaagaaggcgttgcggctgcacagacggcggtgctgcgcccgacgatggcgacggcaaagacgatgcggggagaccgggagtgagtcatgtgaaaatatgggcgtatcaatacgaatcagcaaagtatccgtaattctttcatttgtttgaaaatcgagaaaatgtcagatacgtacgggatgcatatcggagcgtgtatccgttggcgtatccgatacagatacgcgacactcagcgacgtatcggggtaacatagcttggaaatggtaacctaacaaaaggcaagaaaatacggaaacgaaaatgattttgatgttctacttgccattttcttatttaccatatttgcacgaaaattatagtttttataatactgtaattaattaccatatttctaaataccatgtctctattttactagaggcccatcaacttttcaacccaattcctaatttgagtacatgcctaaagaaaagatggtttgtgatttacgtagtgtaagtttgaatttcttttttttaaaatagtgt

SEQ ID NO: 39874 - DNA, 968 bp, Oryza sativa
tcagagtcaatctcttaattgattggagcgaccaagcccaaagtaagccttaatttgatcgtggagggatattgcaacaatacagtgatcaatgtacaacttgtcttatgggaatgtgatgactatatgtatgttgatgcatgttaatttattgaccagtgtgacgatctccatgcatgacacagatgattctcaataggtagtatactgccccgttagaatcagcttggctatttccttgattttcatgagcatatttttcaaaatgttaaatgacagacttcgtacaaaaaatttatgtataaaggttattttaaaaaagatagataaattttttatttttaaataattattactcaaattatatacaaatcacgtttctcgctttatgtgcagctaatgagttgtttttatccctggtttagaacacacccttagcttgttttcgcctagctaattaactagcacaactcgcgtaagagaaacatgcttgtaaatagttttactcttactctatataatatgtcggtattatctggtgctggttcgttaaaaaaaataattggccagtttaacgaagtgagcatagctcatttagttaggttcctttggtagaatcaatctacccgatttcaaaatcctagacttgacacggatgctcgcatttatggttatttattttttcagtgataggcgacgtacccgtcgatagcaagacattcatgataacttcatcaatctaaatatgtgtcggtccagtttttcggatatgcacgtagaaatatggtatacgggtgcttataagggtgagcaaacgtgtgcctgtaaaaaaaagcataataaacatgcaccatagatcacacgagcgaagctcatcatgaaactgcaggctccagaatggccatcccaggctcccagcacacccgctcaaaaagacagaagtttagagagagagagagaatatgcgg

SEQ ID NO: 39875 - DNA, 1662 bp, Oryza sativa
aaaaacaaaaagaagaaaggattttcctgggattaaaaattgcactttggtgatttttaattggtaaaaattatttccaaggctctgaaaattccactaaaaatcctgttagcattatttgacatgtagaatccaagaaaaattccacatgccgattccgattattatttgcatttattaattagggaattagctctaggttaattaagataatttcttcggacgatttatttagccaatttttaaagcaagcaaaggggggaaaacttcagggcgtgacagttcaatcaagaggaatcaacaacagaacaactaatcaaacgtattatgaagggggttaagatgctgatacatagcaagaatattacttcaaccccgatttgtaacggtatttttatttgattaatcaccggaggggagagattcctcacctgaatctttcattgccaaagaaagatagttctgagttacagagattgggctataccagcggcaagccattacagattaaacagaaaaaggggaggagatataaagaatccaaaagagaggcccccaccttcccaaagagacaacaattgatgttaggcacctgcaaaaaacccaaccaaaaaccagagcaacctaaagctatcacctaagctcatcaacaaacattttcttatgcagacttggaaacgccagtactcctcactgaagggcctttctgccacaaggtcagcttggtttaacagcgaccaaaagactgtggaagtcaaaaaccacccgcatcagccatcaagaattcaacttaaacttgttgctgcttggatcagtgcttgctgacgcaatttgtgggaaggaagccccagaagagggagggccactgaaggttgcggccataggccgcccgtatcgagtcttcttcaatccgactataacaattgcttgcaagttccatgacctccaaggtcctttcagggaaggaagcctcaaaggaggaagggccgctgaacaatgtggttgaggacatgccaaggtaaagagaggagacgaacagggagctagacaagagagaagtggcagatggggggaccctacggatggaattccaacaactgcgacagcagggaagtgcttaagatcagatgctaagccagccaaaagagagccatcagttctaacaacaaagacctaagccatcaagcaaggagcatgcctaaaagagatccagagagaggtgaggcacgagcaacacctagatgatggatgaaagcctagctggtcagggcaaggagcagcgcaaggatcggtgactagagagacatcacagttgtcggtgacatgggaccgggagtatcatgactagaggcttgaggcagacacaatcgcccacgtggcctggcaccctcggggggtgtcacgcccagaaatttagcccaaatttccagactattttgtgtattaaatccctgtccaggaccagccagggtacacaaaacgacaagtaataaacagttccaaacgtaaataaagcgtaaaatacttacagaagaggcacttagtcctcacaccgaaacaaaagcagcagcagcggaaaaaggcgatcctagcggggcttcagctccactccacaggcaaaactcaactggggtctgagccttggtcctctaacttcgtctt

SEQ ID NO: 39876 - DNA, 690 bp, Oryza sativa
ggtagacaccaagtgaattagcatattatgattaagcattcgaagttggggttgcacaaactgaactagcgacgaaactacgatgacagaaataactaagcaaaacccaactctaaacgataatgactactgaataaatatgattagggacgctatagggttagacttaaggcgtctatctcttggatttagtccacgacctgatcattacaagacccaatgcctaaatcagagtcgggctggatgaaatatgtggcctgttttacagagtcccgactaccgaggaagaattttagcgtgggaccaaaaacatataaaatcagaccctataatctttctagcaagtacacatggactgtagcgcccgttccgtcgtggcgcctagcgggaaaattaattcctaaaaaccctaattgcgaaatttgtttcttcgcttgtcgtctagtgtccgtgccatctcaagatctcaaatccccgatctatcgtcgagttcaattccgaatccaaatccttccaaatcaaattcctccgtaaaagtctattttgactcccccggggtcgatgggccgaatttcgctcggaccaccttctcccctcccccggcgcgctcccgctctccctctccctctctagacctctcccctcccccggcgcactccccctccgctgccgccgcgccgagcgcccccc

SEQ ID NO: 39877 - DNA, 1445 bp, Oryza sativa
gtacaatggtgtttaataacgggctctgttcgttgtcatgcaagtaaatttggtgacgtggaagaaagagaagtaaggaatgagaagcatggttgctacgcataacaccggctcagagtcgactcttagcatttattaacagaaagtttgttgcatgagggtatagaaaaggaaagaagcataataaaaaaatatttagtgcattaatggtttagaaatcttattgtctctactattgtagaaggatagtctctagtgatattaattaatatagagagctcatattaggccctgtttagatgggactaaaacttttaagtccctatcacatcggatgtttgaatattaattataaatattaaacgtagactattaataaaacccattcataatcttggactaattcgcgagacgaatctattgagcctaactaatccatgattagcctatgtgatgccacagtaaacattctctaattatggattaattaggcttaaaaaaattgtctcgtgaattagctttcatttatgtaattagttttgtaagtaatctatatttaatactctaaattagtgtctaaagacagggactaaagttaagtccctggatccaaacaccaccttagtctctacctttgtacatgcccttatgaacgcggtagtacatcccatttggttgaattaagatttttctgcgaagaagttgaactgccataaaaggtaagatttgtggaaacatttggaaggttcaaagttgttggaacaactgaaaaatacagttatgtttgttggtaacaatatttgagtacatattttatcccaacaaatattcgattacaattacttagttattactttctccgtttcacaatgtaagactttctagcgttatccatattcatatagatgttaatgaatctagacacatatatgcatatatatgaatgtgggcaatgatagaaagtcttacaatatgaaacggagggagtattgtttaacggtcaccggggaggaaaactccccacctgaatcttattgaaaagaaactatacaaaaccttcccttggccatctgctttcagatctggccgtggtctctttcggtgcttgaggagtttgttcgtccacggtgttggtcttgcctgtctgtagttaggtctcttaggcctcgccggtgcttcacgtgtcctgtggcttattgaactcgttgtggtgctgagattggagcggtgtgcttatctctccatggtgcgagagttttgctttggcttcttagaagttctgcaccttttgagggagtccggggcgaaagccttgcttgcccgtcttctgcggttcgcagttgttttgtctcagactttctgtgtcttctgcgtaatgttttcgtcggtttcactttagtatgcttttttttttcgattttccttacaaacaggttcaacactat

SEQ ID NO: 39878 - DNA, 889 bp, Oryza sativa
attgcaatagaaaaggtagtcttataaacttcttccttataatgatttcaacattttatttaattagtcgcgagttataagaaaaatcaagattcgttcataacgtgacacaatcatcaacatttttataagaaattagtatgtaaccaactccactgaaaacaattaccgcatattctctccctctaaacttctgtcatattgagcgggtgtgctgggagcctgggatggccaaactggagcctgcagtttctagataagcttcgctcgtgtgatctatggtgcatcatgtttaagtttgttttacaaacacacgttcactcatgcttataaacgcacacacgtataccatatttctatgtacatatccgaaaaactggaccggcacatttttagattgacaaagtcatcacgaatgtcttgctaacgacggatacgacgtctatcactgaaaaaataaatagccataaatacgacttgaaattgggtagattgattctaccaaaagaacctaactaattatgctcacttcgttaaaccggctaattattttttttaacgaaccagtacaagataataccgacatactccctccatttcataatataagactttctagcattgcacacatccatatatatgtcaatgaatctagtcacacatatatatctagattcattagcatttaaatgaatgtggataatgttagaaagtcttatattataaaatggaggaagtattatatgtagtaagagtaaaactatttacaagcatgtttctcttacgcgtgttgtgctagttagataggcgaaaacaagctaagggcgtgttctaaaccagggataaaaacaacacattagctgcacgtaaaacgagaaacatatcaggg

SEQ ID NO: 39879 - DNA, 706 bp, Oryza sativa
ggatgtatgagcgtgccagttgatttgatcctgcaatcaacaagaaacaaagacaaagaaaccgggattatttctttttatgatagccgatcggctagatgccgatgacatatcatttatctttgagccgatgtcatatgtgaatcgatcggcaattgtaaggaaacaagtcagaactaaatctgctcgatcggctgtaaatatcaatgatgtataatccttatatcgacatatacttaaatcgagtgattgggatagatcggtcaccttgccgagacaatataaatcacttagattgaaatatatattaataatgagattatacatattcatagcatagccgatcaaatagatctagcatgtatcggctaatactccgatactactttatattaagatatttaaagcaaatagaatatactaaatagagatctaatatacttaaatgccacaagatcttaacatgaagggcatatctaacatattaattgagcatatagagcaagagcaattagatcagataagatcggctgaaactccgatactaccctaatcgcaaccagtaggcaggctagagaatgaaattctaaacacgacttaatagatcaaactcaactgatacagcattaagtatgaaaaaaaggacaatatctagacaatcaagccgctggatgtttcatagagtggtggatatctcatataatct

SEQ ID NO: 39880 - DNA, 686 bp, Oryza sativa
aaatgtgttccaaaataatgcaactcatatcttcttacctatcatcgatgaataaatcgggggagggctttcaatatcccatcaccgtacctactaatataactttcctattaatttggggcattttggctctttgtctcctttcttaactccaccataggaagctaaaatttgagtttttttggggagtatgttttttttccctagatctaaaagatgcacttgtactcatgatcatgattttcatgaccaaatacgtactttggcagtttgcagcatatggatcgattccttcagacgacgctatcaagtattacggattagaggccaccatggacatttatggctttaatctagagcatggacaacaaaccggaggttttatttggatttacaatacggatgaagcatctgccgtgaataaagttatagctggatggaatgctagttaaacttatctgcttgatttggaattgtaatttcaagcctacattagcttagctggttgatgctcaacaggttcatgagcttctcactgtcaatcgaagatgtgtcactaaacaagatactttgattaatcatttgcttcatgtcttttagatttaacatttaagtgtattgtacctcatacaaggtgaaccctgaatcgtacaatgattcacagacgcacttcagtacttgggttg

SEQ ID NO: 39881 - DNA, 725 bp, Oryza sativa
atgaattagtttagagttagaaaaaacaatgctgcaaccagaaaaatgggttgaattaaaaatgatgcgaaaattacctctcgttcaacttgtcccttcttactttttccctgcatgctttggagcttggtcgagtgccactttctgatctcggactaatgttttgtggtgccaagttagaaatgatcaaaagaaaacaggaaaggaaatgtagattggataatggatgtgaacaaaccgtttatttgttggctgttctttgccatgttcacagtccacagagccattgatttcagcactggtgaaaaaaataaacttgtacttcagtatgccatatgtcacgataatatacagcaataagtacataaaaaactatacaatgacaacaaaagaatcaagcaaatttaacacaacagaacaatacatcagttaagatgcactgtgtggttcataacaccacaacctatggcaccagaaggtggaagcacaagtcaaaaaccaggacagatttaaaaacacatgagatgacttcctggtgcataaagaaaatgtactagcaccacaagactacaaggtatcataaataaaagaatactcttaaatcaaagagttgcagtaaacaatatcctaacatgaacacgttcttcaataaatttccattccacagtaagcttcgtgctggaacccaagtgatacagattaaccacttctctcaccccgtttct

SEQ ID NO: 39882 - DNA, 612 bp, Oryza sativa
attcctgcagcccctgattaagatgtacattttctctcgatttctattagcacgtttttcaaactactactagtacgtgatatgtttcttgcaaataatttctatataagtcgttttggaatatcaactaaatttatttatttattgtaaataattaaaacacaattaatcatatgctaatagctttcttattcttaatctatctcaaatgccattgtccatcgataattaattactggttgattgatcaaacgagctcatcattgagatcaacaatggcgtgcagcgttcaagtacgagccgtaccacaacgtggtggaggtgccggctgagacggactacgacggctgcgtctcgaccaaccccgtctccgtccactccggcggcaacaccaccttcgagctcgccgccgccggcacgcgctacttcatctgcagcatcccgcgccactgcctcaacggcaccatgcacgtcaaggtcaccaccgtcccttactccgcctcggccgccgccgccgccgccgcggacgccggcccttccccggcgccgctcccctcgcctcccgccgacgagcagcagcacaggtcgaactcggcgtcgtcgccggcggcc

SEQ ID NO: 39883 - DNA, 650 bp, Oryza sativa
tgataagcggaaacagtttataaaacaaagcttcctaggctttgcaacacccagtgcaaatttccaactctactgacagtggcggatctaacatgggacattgggggttcagttgaaccccccaaaccttcttaggaaccatcaaacagttactagtattaaggttaaggcaaatttctagagcagaagctagggttaacgcaaattcgagaaaaaaagtgcgtgggtagagagagagagatgggaaagaggatgtgcgtaacggatgcggcggaagcagcaggacgagcgacggcgacccagctcgctcgctcgctcgcacgcgcgattggatggggatcggcggtggcggaggatgtgctcaccaggatgcagcaggatgaatgacggcgccctgctcgctcgcgggatggatggggatcgccggagccggagccggaggcggcagcggtgggcaagagcaaactaaagaggaggggtcgtcaggataagggttaaggcagtgttcttccccataaattgcacccacggtgcaacaacttgtcaggtgggtacaaataatttttaaaagttactttaaaaatcatatcaatctatgttttaatttttttaattaatacttaattaatcacgtgttaataggcaacacc

SEQ ID NO: 39884 - DNA, 814 bp, Oryza sativa
atgcaacatgttcaccttcaaagtaacatcaatgcaatacacaaggattgcactaatatgttgattagcagaagatgtttgttcgaacctggaagatgccgtcctgcgaggttaggttggctgccaaagtgccaatgaactgccacagccagtgaagtcacgctctgagtcaatggcgccactcgctcccctgttgctcccatgatcaccaaggctgccagccgctagtcgctagacacatccgggaccaaatttttttattatcaaatagcttacctgtactttttcttgaaaaatcatcatccaattagatcataacttgtctatattcaccagccaatttggatcctcaaattacttaaataacttacagtgcatgattccttaatacctccttaatatattgtcatcaacccatatttgtatcgtaacttgtctatcaaatagtgagcatagagagaatttatttaacaaataatcctgcagaacatgaataacgagtatagaacattcagaagaaaatcagtgtaagaaatataaaagggtgaatacccaacatgatccttgaactttcgtttaaggatcattttagtccctgacatttcgtattgtccaaacaagtaccttaagtttattgtgtgattcaatatagcccttagaccctctaaacatgccatgtgtacatgccacatcatctatgcatgcaaattcaatatttaaatgtcctttacacccttatgttttcataggaaataaaaaaaaattattgagaaaacacaaaaaaaaacagcttttgaccattggcaaaaatatg

SEQ ID NO: 39885 - DNA, 2342 bp, Oryza sativa
ttgtagtaacacttatacttttatacagtaacaactatatggttagcatgtgaggctttaacccatatatttttgctttaattcctagtttaacaagtgagatatagtctagtggttgttcttatgttgatttagttgaaggtcttgtgttcaaatcctattgattgcaaatttttattttattttttcactctaaaagaatagtcttatatatatatatatatatatatatatatatatatatatatatatatatatatattaaaaaatgccctgtctaacaatttaggaagcgtgcacgcaggacctttcgacgacaaagagacagcgtgagtgcaattcggagagacggcggcagtggcgcttgcgtgagtgcaattcggagagacggcggcagtggcgcttcaggcagccgcacgttgctggaggggcaaggcggagggatggcagcgtgatctctttgaaacaaggggcgcttccggttgtgtgcgtgcttcaaacaactttgtcttctccatattaccacatctatagagtctaattttctatgaggaactactgagttcaaatgcgaagacggtataataatacgctatgatgacaatgcaacggatatcattagtaaaaaggaaatccaaatggaacttgcgtttttggcgcgatcgtcgagtaattgagagaattgaattttactaaaatagtttctagcttatgaagtattaactgtcaaaagggaaatttgagccttctttgttgtacttgctaattcaatgtatacacatataagctgtaacagatggtttcatatttgagccttttttttgctgtacaagctcattgcctgtaacaaatgctcattgttggaaaataagagagatcaatctagaaatcagctcctctagttgccaagctgcaaacgcatgtgaatggaaaaaacaacacagtgggtaagttaggagaaggtgactttttctctttttctgaagtaaaggttggagctttgctcattatattaagaagttggtttcagactataattcgaggatattacatagaacaaaaagcaactgaactttcaccataaactccattgcatagcgaatatagtaagatgcacggccagtttttttttttgttaaatttcctgcagatagaaccttgtgtacaaaaaccgatccaaagaacatctgcctgggttcatctggtgcccaacataatgcttttgaaattgttacaggtcattgaatgatgacatgagcactgattgcagctatcaatgcctccaaaaatcctaagctattattagaggggcatcaagcttacaaagttatcttgaaaggagaggctaagtggctatggagaagagaaattccaatgaccgcttcttcatcgtcaatctccagccgccgctggccttcgtgaggcattttgccgcttcacccacagttgtccagcaggaactcaatggctgggtgctagcagccaggaggatggaggtgggcacaacgtgagccccaatcagaaaatcgaagatgaatgtttttattgaaatggcattgcaactttaacactgcacttcatttgtcacctgttaggatctggcatgggcacagatcacttttcagtttgtcccatacattaagaacttggaaattaagacaactgtaacaccacgatgtgcatcagaaaccttttgggacagcaatagaatgcaaacccatcattgatctgctcaatctctgtagttgaaagtaagctacctatgcccatatacacagaaaaaaactcacaatgtaattgcttatataaccaggaatgagaaattagtaaagaaataaatgaattttaatcagatggtcgttattacaaatatcggaaatctccaatatgcacagttctgcaagatgcacataattatcactgtaaacaggttaacaaggattcatgattatggaagaatgactacaaagtttgattgcaacagcatggaaaataagtttattttttttatcaagctgatggagagaaacaatggctatatggacaggtaatcacataattaattatgagtacaacatatatgcgtgcaccacaacattgtttcaggaaaaatgaatttgcatcctaactaaagaagaatgcgatcagttataagccaatatggaagtaggagtgcccacaatcccacatgggggaaaaattccaatggtcaatatatgattcattcaggaaatcaactgattttttttccaatgatccatatatttatatatatatgatttatcataactttccaagatgatcatacctatattgtttctgaatataatccaaaatcatca

SEQ ID NO: 39886 - DNA, 603 bp, Oryza sativa
tgatgaatcgtgtttaagtgcaataagggcaccgtggacaattgttcataataagccatttctttgtaagtttgaatcctttttgttcattagctagtgtaaacaagtaattctacatttataagggctcatctagctccagaaaggcattcatattgagcttctggtatttgagaacctatgccttattattttttagttcaactgttgggaggatggttggattaaatttcagattcacctaactaaattgctattctaaagaaatggtcgacttagcatgtttttttctatgtttatggctttcaacatttcttttaagcttggattctgttgcttgctggttcaatatatttgtttcccttccttgaaaataattctgctaatggtggatcactggaatttgatgtcaatttattagatacctgtgcatttttttactttatacctcacaatctatatgagaaattctttgtgtaaactatagattttcggtcaatgtcttacatctgcttcatttttggtaaaacttccaatgtttcattcatgttgatggaaaatatcttatgcgttatcttaatattttactatacaggccctttt

SEQ ID NO: 39887 - DNA, 573 bp, Oryza sativa
aaaatgtgtcatgcatccaaaatatattttttttcatgtaaagtcggaacgttattcatcattttacatgaaatctgagaattcacttttaggcatagtagtgtagatttttaagtgaactaaaataatttagaataatttcaatctgatgaattggctcatgcgtaaaaatatattgagactggtttctggccgggccaaacaaatacgggaagctacagttagccgaccatagataagccaaaaaataaaaaactgactctataggttagattaactaggtgattccccgtgctttgctgcggaaattcttaatatattttttcgacaatcaaactaggagtgcaaaggaaaaaatgatgaaccctcacatatatgccgtacttatcaagaaataaacaaatgatactcgcactttaatgtgaaacatattgataagtatgtattaaatattataaaaataatagatttgttaaagtattgtgcaaatgatgtgaatgtgatgattggatatgtttgcatgttgatttgtggaattaaataaattgtagataatgtaatatgcttgcgtga

SEQ ID NO: 39888 - DNA, 681 bp, Oryza sativa
gttgcatagatagaataagagggtatatttgtaaaatagttttttaattaaaagtgtgcattgtaaaattatatccatagcctgactgttttttcttagtaggttaagaaagtttctagataaagtgaatccaatggctcggatttcttcttgccattttgtcttcatgtggatccagtggctattatcttgttgattatgtggttcatcctatattaagttgtgcattgtgcaactataaactccctctctattaaatatgtctatagattgtggtagcaataataagcttacatttgtaatgatgattaatcataacatctttaatgggtgcatatctaatagttacatcagcatatctcacacacatatatatgctcatcgctaatatatataactttgaatgatataaagcttagttggatcatattaatctttattaaaaaatgaggtttatttgtaaaccgtgagagttgtaaaattatatgcgcaacatttgttgaatatttctaaatataggtcaatgatctatttgtatttttttcctcaaaggaaagttgcatagatagagtaatagggtatatttgcaaaatagttttttaaataaaagtgtacattgtaaaatcatatccataaccttactagttttttagtaggttaaggaagtttctagataaagtg

SEQ ID NO: 39889 - DNA, 615 bp, Oryza sativa
  unsure (1)..(615): unsure at all n locations
tcatttttttaatataaactagccacatgtcttattcacgtgtttaaggattggcggggagggatattttttctctttttttacattgattagctatagttgccacacgatttaatgcccctcgaaagtacctctactttcttatagagacattttataaaatgcatcttcacttctagagataattcaccaaaaggtattttgaaaaatgcctccattgcattgtagaagcattttaaaaatgtttctatagtattaaaaagatgtctctacagtgcatttttgttgtagtgtttgctggatcgattaacaagcaattcgtgtggatcaaatagcagtgcccaattccattntaaattttatgattgttggtttataggtgcctttctagtgaaccgaggttaatagttggtcagccatatattcttgatgtcatgttattacaacacagcagatacctggtaacttttcattgtgataatttgcatatgaaaattacaaataaatatcttgtgacctgtgaattttacagaggatatatatgggtggaaatcttgatggtttgctaatgaaaaattttttgacataaatgaaaaagggcccttattttttgca

SEQ ID NO: 39890 - DNA, 565 bp, Oryza sativa
tatgttattttgctaaatattccatgtgatgcacacttatgtatgtttttgcaaagggatggaagagtattactttttctacttgaaaatccataagaagatatatagaattacaatggaaaacaaatgtttgaatatttaagcacgaattttgcaattaacaggagctggtgggtgattaagcaatgaaatgtcacatgtggagtggatgtttgagtatcgcatatttttaacttgtatgctttcattgaagattggaagcataaacaatatatgggttagttattaaaagaaattgcatgacataatattttaagagacactgcatgatctcaaagtccacaaaaaggacgatggaccaattgaattctacggtgcacattatgccaaaaccggagaacttcttgagcaacatattacttcaactattaataagaatttggttaaaaaattgacatagattgcatctatcattctctaccgtatcatctgctctgagaaatggcatatacaaaggtgtgtatttaactactttatagcaataatatctatggcggcgctttta

SEQ ID NO: 39891 - DNA, 569 bp, Oryza sativa
  unsure (1)..(569): unsure at all n locations
tgtcaaaattatgctacacctgtgctaggaacaccataccatcgtagcttacttgcgcgcggtctgttaaccctttttcctaataaaaacgtattcctccgtatcgatgttatcgctttgatcgtgtgggtttcactttatatccgttgaaacctctgttaacacgtccaaattatttatatcggtattatcactcaagatcgtgccggttgttttgctttttacgtttcttgaagcttctaaagaggggacaaacctatataaataggagaggagagcaccctctcaactcagttcaaaatttaaaaaaaaaagaaaaaaaaagagaagaaaaaaaaacccatggcttgcgtagccgtagctttcccaccatttccttctcttcgaagcctnctcctctcccgttccttccgcgaaaccaaaatccaaagcatttgatcgaatttctcccaaactttttcagccgtataaatttccgcccgatttcggatcgaaaacctcttgcgaattcaatttaaactcgttcgagagcgcaatggagcacgtgttccggcgtcaacaagatcccc

SEQ ID NO: 39892 - DNA, 669 bp, Oryza sativa
aatttttttaaataagacggcgattaaaattaagcacgaaaacttggacggagggagtaccacgtagtccaagaatttctttattccacatgaaatgaaattctttatctcacgcttggtgttaaattttttgaagaggaatcatatttttccatcttttttctcggtgtagctctattttttttctaattctttcagtagtaggtgataaatccttccacagcgaagcacctgtaataacttcatcaatctcaagacatattggtcaatctttaaaagtgctaatagggataggttgtaagtgtgtgcatggatagcggtggacggtgggtctgcgcgcatatggacacctatatctatattatgtttagaaaagaaaaaagaagaatctgccacctaaacttcggttgattctcatctgtataaccaaacaaggggagtgttcgctaccaggggatgggaacggtgtacagcgcacacgaaaaacggggcggaacattaacacgcgattaattaagtatttatttttttaaaaaaaatatttaatttgatgttcaagcagcttttatattaaactatttaaaaaaacacaccgtgagcagtgcgaaaaacgtgtgctcggaaaactagtgagagaagttaggaaaagtactatccgaacacacccaa

SEQ ID NO: 39893 - DNA, 525 bp, Oryza sativa
tttccgatgctaacctacattggctaagtgttatctgcggcatatattgggaacggtgaggggcgtacaccaattaattcaatctaaaaacttaattaaattgaccagcgaatacttatatttcaacactccccctacactatattggaaaacttcccctcgatcaaggctttcttacccaatgggcccttatatctcaaacgtcgaatataatatacatgagtcatactattttatttaatagtgctacctaagacttggacttaaaacatctaactctcataccttattgaattacatgagaaaaaatggacaattcacaatatacgaacacaaacaaattttaactatagttatgctaggaaaattggaaaaaaccaatttagagcaaatccacaaaataatttgtctagttatgaacgaccttgtgaacgcttatcagatagcttcgcatgagcaatgaattagcttaagcccaggtgcacggagaatcacatgtacacggaactaaatcaaattggtgta

SEQ ID NO: 39894 - DNA, 786 bp, Oryza sativa
ggcgcgtcggttccatcgcgtcgcgtcgcgccgccccgcgcgggggaggacgagtttttgtgtgctttggtggaggggtttccgaacgaggcgtcgctgtcccgtctcctggtgcgtgtttatgcgctgacacatgtccatgtgcattttctttcacttaaaaaaaatcttttttcttgttatattactctctctatccgaaatacaaagaaatgagagagaggggtgcatatcccaataccatgaatctgaaccgtactgatactcatcatgatatgttacatccctccaaaatcttttatattaagggacgaagagattatgaaccaaatgagtttcggatttgctaaaatgatgtcgccatattttatggctaattatagttgaatttctgactatctgatgttgttcggtccacctcggcatctctcggctatcataacatgactaattaaaacttaatatgattcattagttcaagcttttgatgttttaacccacaagtatctaatatagtagatattatatcaatatgtgtaatttacaatgcaaaatatagaagttgcattgcacttacattataattacattggacttacatatataattttagaacttacattatgaatacactaaaattacatatgtaatttagatacttacaatgtaaatacatattgatttttttttaaaaaatatggcaccataaatatagctactcccatgagttttcttcccaaaattcaaaactatgaacacatttagtatttagagtatattttactg

SEQ ID NO: 39895 - DNA, 648 bp, Oryza sativa
tttttggcttttccaataaatcaaatactctatccgtcctgaaatatagcaacatagtatcaaataatatcatatttgatataacttataagaatatgaaggaagtagtaattaggatatatttagtactaattagtactaaaatttttaggatggagaaagtactaatttgtactctcgggtcaaaatatagcaacctatgactgggtgtgactcatcctaatacaatgaatttggacatacatacatatatatatatatatatatatatatatatatatatatccatattcgaatttggacagatatatccagattcgttgtactataatatatcacatctagtccttcgttgctatatttgggatggaggaagtaagaaattagcagactagcacaagtaatgtgtatttttttatgtattttattacaaatcttaatatagaataccttgaacatatgagccttgcaagaactaagataggtcaaccacaagtcttcatatcaattttcataactataaaaaaagtagccaaatggttactcataatcttttgagaacaaatccatgaatatttgcccgggtttcctcacccaaaaggtataattatatcttcatggaacttaacttatttctctttttttctg

SEQ ID NO: 39896 - DNA, 638 bp, Oryza sativa
tgctaacaaatcctgtaattgaagtacaaatgcgaatacacctagatgtacccaccttttatatgaacacatacatatacattaccaatgaatacacatctaaaagactaagccggtatattgaaaatatattgaaagtaacgaagtaataagagctttgttgtagtttggcacatatctacattagtgaaaagtaaatttcaagatttcatcacaatgagccacgtcacatattgattcagggccattggatcagaagcaaagaaaaggtgaaatgaatattaaccgtccgatgtacagagagaaaggcaatcaaaaagtgggattctagacaatttcacgataccttacccagcgggagaacaaaataatctactactacttaaaaaataagaggtgctttcatcgtccgtcaaaaaaaccgggtaaaaaaaaccgggcagaaaaaaccaagtttgtccgataaaaaaaccggacgaaaaaaagtccgatccaaaaaaaaagtgaaaaaaaaaccgggcgaaaaaaaacacccgtcctgggaaaaaacacccgatcccttaaaaagggaaaaaaaaagttcgagagacaaaccgtttaatgaataaaaaaagcgaaaaaaaagagtcgattccttg

SEQ ID NO: 39897 - DNA, 655 bp, Oryza sativa
ctgttgaagatactactacatctcaaaatataagtgtttagagttttaaagaagcttaaattgatcgataatataataattatgattagttaatatgagaaaactattatgtgaacatttaacaatagatggttgtttagttgagatgacaaaagcatgcactactacagaaccacatatcggtgccggttgggacattgaaagcggcaatgattagtccgccgacaccaatgtcaatcttaaaaaccggcaccaatataaaatcaatgagccaaaaaaaaacggctcctcgagccgacgcaggagccgatacttcgatccgatgaactccacatgaatccacatgatgaataagaacaacacatcaattctcattaataaatctcagatgaactcacatcggcacatcaatttcaagaacatcatctcacatgagcaacaaatgaactttaataagaacaaatcacaaatcacaaagagagagggagggggagagatggattcaccgacgccgtcgaaccttctgtcgacgccaccgttcgaccaccttcccgagctgaggggcgcgggccggctgcctccaacggtgaggggcccaggctacctccattcaaccgtctcatgccgcttccgcagctgagggggcatgggccac

SEQ ID NO: 39898 - DNA, 724 bp, Oryza sativa
  unsure (1)..(724): unsure at all n locations
gatgagttgatgcctctgttggaccncatcaacatggtgggaacacctgctgaaaaaaaggattgcccacctaaaacctgggctgggcatttggtatgtttgtttgttaaaacggataatatgccactgggcaagattgcaaaagataaaatgccactcaatacgttatcattagtatactttgccactttgagcagttttgagaccaaaataccctctaatgtgaacagaggtagggagaaaggaacgatggcggccgcgactccgctcccgcgggcaccgagcgcgccgtggtggtcagccagaaagggaagaggactgccaccgggggggagtcctaaatgacaccaatagaagacacagaattggacgtcatgagttgctggagatcacgatatggctagatgtcactaccccaggcctcactccttcaaggactcggcgcggatgcattccagattgcggcgcgcctgctcctcctgcgctgtcttgcggagagacagaatgacctccagcctttgtgtcttgccatggactcatcatgagctcgctcccggtgaaaagcgcgctctcgcgaagaaggatcccgcactggcctgaggcccattaggcactattttacccttccttcaaccttagccccaaccagaagcaaggcttacccaggagaaccatgagttgaaaaatgagagagaaatattccaaccaaccaaccaaggtggcc

SEQ ID NO: 39899 - DNA, 732 bp, Oryza sativa
  unsure (1)..(732): unsure at all n locations
cgtgtaaactgagatgcagtngcacagtacnncatcagncacaattatttttgtaacttattccgaaatgtatgtaagacaaatatgtttcttaaaacatataacttattttcaaacttattatcagtagcacactttaggatggttaaagtcgcgtgaatgtgcaacttcataagctagtagtgttggatttaatatgtaagtagagggggcctttgtcccctcaaaatttacatctcacgtataccagaattacttgactttataatttaatatatacgagttataaatttatcctgtaagttagtataaatataatatatatgcatgccaccggtaaaaatttattgtgctttcacccctatgcacacattcaaccaagcatcatgatgatacaatacaccggcgtcgatagcggtctcaaactctcaatccttcacatcatctatcaaaaaaaaaatgtccttcacgtcagatccgaacatccatggcggtggggaccatggttctatgatatgtgcatatacaggttacggttgcctcgacgcgcttcagcttgggattgcgaaaccacaactcgggaccatgcgttgagcaacaccggagccctgtgatatgcatgggaaaaaattagaggtcgaggcgaggcctaggacttggtgtagtcgttggtgccactcgccgacgttgtggtagccttgccactccccaccactggcaaagacttttctc

SEQ ID NO: 39900 - DNA, 691 bp, Oryza sativa
ctaaaatgctaagacggctgtgtcatcaactgtttctatgaatgtctacatgcctgcatatgcatttggacaaaaactcacacacattacagctgtattatgactatggagaagtctttttagaccctaacatagaacatatataactggaattgcttgcatgcatgccatgtaaataaacatggaaaatttgacaacatatactatggagccatgaatcactccacaaatatgcaaataaacaaaggatagctaagtttaattaattgatatgccatcaaggaacataaatctcacagtacaatctgtagattccctcagcatatgcatattacaactactggatccgggacatattataagactttctagcactacctatattcatatagatgataatgaatctagctctatatatgtgtttagatgcattgacatctatataaatgtgggcaatgctagaaagtcttataatatgaagcggagggagtattaccaatattgctatacttccgacattgcctagggataaacattgagaaatgacatggataacattgcgatccttacgtacacatatgcatgaaagttatttgcctttaaatatgctaagaaacatatgcatacattagtcatgggccctatctcgagcgactacccttcatgcatgctttattgaagggtagcaact

SEQ ID NO: 39901 - DNA, 651 bp, Oryza sativa
ttttcagtcagctacccctcagatgatcagcttagtatgaacgcactgtttttaactagttattacttaaatgttgagttagccataacttgctatagtgtcaactcttttgcaccaacaatcttggtttttattaggacatggtctctttgttgttagtttctccaatcaattttttcgatttgtagtagagccaagtggactatggcagtaagttctgatgtgttgaagattgtcttggttgctccatacctgttcaaacaaaaaaactgatcaatatattattttggactgcttctagtttagatttgcagtagtgtagtaattcacttttaggttgctttacgtgtattcttttatttctagaagagtgaacatgattaataaaatgcatgaatttagatggcttaagaaaatggaccatacaaatatatcggtatagtgtatagggtttatatgttccaaagaaccaagaaatattacatatatttctattaaaaaagctaggcattgcattcccgaaatattaggttcctttttgctaacctttatgggtatgggatattggcactcatcagcgatatagcagtcattgccaagatcgagagcattgactctttgaagaactggaggagataatccgtgcttcag

SEQ ID NO: 39902 - DNA, 599 bp, Oryza sativa
ttgctgtagcaccacattgtcaaattatgaagcaattaggctcaaaagattcgtctcgcaaattagtcgtaatatgtgcaacttttttaagcctatatttaatactttatacaagtgtttaaacgttcgatgtgacagggcgtaaaattttggggtgggatctaaatagggccctagtaacatcctagtaaaagtcaagtaaaagtcatgagtagctagacgtgttcagacataacgcatcaattcaccgagacttcgggtatgcgtaaaagatattacctccatccctaaatatatgaactaactgacgtgatatatataaagaagaatggaagagtatttgaacaagtatctacccccatattcgatcatttgacaaacctataagacagcatcaccaaacaaattgatggtctaggccttaaaccctgttctgtcaattggatcatcggcaaccaacaaacaaactttcatggatggatcttcattgaggacctcgtaaatgtagtggcaatcgacatataggtaagagagacaaaagattcttaacaaatctaccttcataagaatattaacgataaacctaattacctcacgca

SEQ ID NO: 39903 - DNA, 613 bp, Oryza sativa
ttgattatggcctgttacctgttattagacaccacatgtataatttggattcactgaatggtttgtgctacgtcttgttactgatgactgttaatcattatgttgctttttctacactgttagaaattttatgacatggcagttagcgtagtagacaagttggatcaatttattaatttaactttgcattagcagggtcattttcccttttgctaattattgttgccataccttctcactgtccaagtatcaacttttataggaagagcaagaagaagctctgaaacaactaaggaagaatctggttattagagcaaaacccatgccaagcttctatcaagagggtcccccacctaaggttgaacttaagaaggtgatgcaccgatctcctgctatatgtgcttgagctaaaatgattatttctgtttttcgatgtgtgctcattattgttcatgttgttgaatgcaattttaattcaagtgataatatctcaacccattactgtttagatcttttccctttaattgaactgattgcgtatctgtaaaaacatactcgactacatgcttgttcctattgttatctacataggccctgttcaactgcacttgtt

SEQ ID NO: 39904 - DNA, 528 bp, Oryza sativa
cttttgtgcttaagcattattgactgcattaccaaaagatacataaggttaattaattttaaattcgtccatgtgtccaagtgagacaagtccttcagagctttcttgagtacggatttgacattaatgaaccatggatagtatgaattgcatacagcaaattggacccaatacaatggcagacacaatcttcaagtgcatgtctcaaatctttattgcaaacaaagaaatgaatataaatgagacactagtatagtcgtggataagttttatggaattaatgtacgtagctgaaagcatttcgcatcaagataccaaacaggcatgtgttaaaaacctttccgatgtatgatatcaccagatatagaacaaattttgccaaaaagaaacagtgttcttttcagttccccaaataatgacataagccttaattgacactatgtttatgacacgcttgtcaagatgcatagttaaaagtagctatattttgcgggaaaatatgtagtgcaaaccatatatgtagtggaa

SEQ ID NO: 39905 - DNA, 553 bp, Oryza sativa
acacgagatcggcacaagttatctcctctatgggaagggccatttattatctctgaagttacccggccaggttcatatcgactcaagcgcgaagacggcactctcgtcgacaactcttggaacattgaacatcttcgtcgtttctacgcttaactttatcattgtatttccctattttgactgtcaacatcaagttttcttcttgccgttgtcagtcgggggctattatcataataatggagtgtgattttttttatcaattcagtttgcttacttggtttatcattgccttgtttggtttttctacttagtttgagaggactgaaagtttttaatagcttctttgggttttaggctcaacaaagcttagcaaaaacttttaagaatcaaaaactttgcaagaatcatcaagcacagcataaatacaccagtattgtacaaattgagcctccatgtattacatccaaactcagtcagagtcagtcctttcatcatcagagtcatcattactcggctggaggtcgttgttgcgaaattgctccacaacatcact

SEQ ID NO: 39906 - DNA, 635 bp, Oryza sativa
cattcccaaaataagtatttctataattcaaattttatataccaaatataaacatttctaaaacactaatttcaatacatattggagtagctcgtgttcggaaaaagccaattggagtagctcaaattaaatttgatagtaagtgaaaaaagagatcattcctccttaatcttactctttactaaacaaactagaaatacttatatatagaaattaatgaagtatattagagaacaaagaaaataacgtacttacgaaaccagtcccttcaattaatatcaggatcaatggtctaattatataggtaggttatgctaacactcagagtcgcgcaaaacgcgactaagtagctagtctataattgaaaactaaatctagaactcaaactttcaaacttaattagataaaattatttcaccattaaaaaaaaatctaaccttcgatttgtactacgtacgtacataatccggatcatgagacaaaggtggtgttcttttcttctaaagatgaagatgaagattaagttttttatgcaaaacgatttggtattaacgtatgattaattgagttttaattattacaaacttgaaaaatagattaatatgatattttagagcaactttcatatataaagt

SEQ ID NO: 39907 - DNA, 1840 bp, Oryza sativa
cttgtggaagggtcgacggcagcaatgtaggaatcgtagttagccagcagtttttcccgccggcgagcccctgcaaagttgcgcatttaccgtataaaggtcggtgtcagatgacaccgatgactttcggtaaaacctatgagaatttttacggtacaatatactatcattatatactaccaatatataaaagggtatattcggaacttaaaaaaaattgaataagggatttttagtaattcgtcagatctgatggggagcaggggcggatccaacgtgagtgcaggggggttcgagtccccctgcacccacaagatctatggatacccctggagcacccccttcaattttttcaccatgaatgataaattaaaggtccttatatggctggagattgaagaaactgtgtaattgagcactctcaattttttgtttctatatctgccccctgatggggagtaatcggtcttggatctcatcatgcatcgcgagcgcgattagattatggcgcgtgtggcggctgcatggtttgatgagcaacgagaagccgaggagacgctggacgcaggccccaagcattcgcggtggcctgtggcctgccttccggctgagcctcaccggccacggcaagaaactgcgacgagctgattcatagtgtacattgagcgatcttgttagttcaatgtagattctactcaaaattgttggctagtacggacaacgtgaggcaaataaatcaggtactgatttagtgctcttgggcttgtcttgcgttcagtaccagatcggcagatgaacatggaagttcataaaaccgactgtgtacattgcccttacaattttatactggaatctcattaagtggggaggagaatgaatctacaccattggatcatttatgctagcagtgtatactggcagtatagtgtaccgtctaaacataattagcatactatgacatcgataaatacgttatgacaccaacgaatcgattttctatatccgccaccactgcaaacctcacacaaacgctacagcgtaacaacgtgcttttctcgatgcattatatatatcccctctacttaaaggaaattacatgcaatgcgcgcgagcagcgcacgactgaactcctgctgtcctgcacttgccgcgcagacccacgactcaaaaaagaaaagatgccaccgcatgaactcggatacttaggcctatagctgtgcacatgaacgtgttcgtgcagatcctaagaaggatactgtggtacatagcgtgactcgcctgaaatatgtcaacaattctcagtacgggcccacctctgacggtccacaaactatgagccaaagtgctcaaggatgttcacagctttgatgaatccattgagagatcgtaacaggtgaagccaccggccgaggctcgtcccaggtatctagacacatgtgacgggccggcacccacacctaccagaaggatacctctgtcaggtgccagtgcaagcccatcacaggtgaccaaatacctgtgacgagcctcgcaattacgtctcgtttgaggtgagtataactcatatctaacgggcttaaaccctaacccgttggagttgtcttgtcgtctataaatacccccaaccactatatgtttttcatcccaatcctacgcactgttcacattttgggcgggagaataaggggggtgaatttttgttgcaagaaaacgtgtgataattatttgatgacgaatattatgtattttgtctgatacttgtcatcttattgtttgcagatggaccaaagttggatgtacggtattgatagttggtcccaagagtatagggatggggtcg

SEQ ID NO: 39908 - DNA, 547 bp, Oryza sativa
aactagccatgtaagcgacatggcagcgaaaaccaccgtccaaaccgccatgggacctatattgcgccggttttgacagttgtgggatccgttatatctatttttttggttgaaggaccaaaatcggattcgttgatcagttaagggacctcaagtgaacttattcctaaatgatatgaaaagaaggcaggcgacctatcctaaatatagaaacggcccatcccaaactcgcctccactcccactgacccacactcctcacctcacctcgccctccaaatcgcccacacccctggaaccccattccacccacccacgcgcagccgcagcgacgagaggagaaacgagagagagaaaaagaagaaagagaaaaatgctgcgccacgccgcccgccgcctggccaccacccgcgccgccgccgccgccggccgcagcagcagggcgctctcgacggcggaggtgccggccgaggcggccaccgactccgccttcgcggaggcgtggaagaaggtggcccccaacatcgaggcccccgacacgcccatgt

SEQ ID NO: 39909 - DNA, 872 bp, Oryza sativa
ttgttcttctgctttgaagttccagcaatatctgccataaagcttggtagaaatgaactatttggcaattctgggacacaattacgaagatattcattgctagtgcccaaagacaagttgggaaatagatccggtactgacttcaaatgcttaagtggaatactgtcttccagactaaaattaggaagacccagtttcccttgaaatgaaggaatggacgatacaggattttctacatgatcaccaatccccttcccggatataggaggaatctgcacacaaaaaccttgtcattctttttctttaatgatgctcttaactagataaaacatcatatatgctgtactcaagaatggattctttttttcccaattttgcatccataaaaaatattttaaaaactaatatcagggtaggttgcaccatttcctcctaataagtataaagtggacaactatcttatatttttcacttttgaagaaaaagcatgaacaacgataaagcaactagatgaaataatatgctaccaaagaaagaagaggacatacaggttggaaggggaagtaactgtctggaatgatattattcagccttcgcaaagtctcctcggaggaaccaggaaacataggcttacaaggagttggttggccatcatgtatttgttcgctagaatgaccaacagcttgagtcaacagcggtttgttggctaattcaccactagctcttttttgctcctttgtgcttggcccacaaactgaccctttatatgagttcatctgatcagcatttggagcacaaaggccaagaacaggtaaaaggtgatgtggagttcctgaattggagatatctgctgcctttgggtgatgttttga

SEQ ID NO: 39910 - DNA, 649 bp, Oryza sativa
cccatgaacgtgttgatctcttatttcttctttcttcctttgctgataacctgacacttggttttgttatgcacgtaagtgttgtctattggccatgctttgcagctcgacaacaccagtcacacacgatcacgagtccttccaccacggcaccattagccagattgtggtgaactcatttctcgccaccaacaaccatgttagtcgtaaaaaatgcattacccttattttattgatatattcatacataagctttacttattgtattctcgagcatggttgccctaataatttatataccttttccctttaggtgtgactcaaacgtgcctctcaccatgataaccctttgaaaagaccaagacaactccggcctatgttgacagcccctatccaactagatccatctttcgtaaatgttaagtaaaggaagaaagatactctacagacataagggtaaagacactcctagacgtaataatagttagatctttgagggaagacactttcaaaatatgataatttgctaccgatatttgcaaatatttaattttggttgactaagagagagaaataacacgaaaagtcaaaaccaccgtagacccacgcatattcttcctcttgctctctatttttccttttctcctag

SEQ ID NO: 39911 - DNA, 2168 bp, Oryza sativa
tagggtagggtagggtaggggtggctatttcgggaaaggaaggttctggaaggtgggggagcggcggaggcggcggaggggggagggcggagaaggtgaatgctactgccggtcggtgagggtgggggagggacacgtgtcggaagggtgggcctagttgggccgcacatgggccttgtgtgggtgacaagtgtcggcgtgtcggtagctggaggaatccgaatcgatcaggagggggatatgctggcacaggaaatggatgggttgtgcaccgtccgatccaaaaccaacgctcaaacagtagctcgttttttttttcttctttttgggggtggtgcctacggggagtgccattcggcttaggagctgttcacttttatgttaaaaaaaattactaaattttggacaatgctaaaattttggtatagttgtcaaaattttgacaacttatcaaaattttggcaggattttttatatagttaccaaaatttagtagcaaactaaatgtagccacttttttttttgttttgacaactttaccaaaatttggtaaggttaaaaatagcatcaaagtgaacaggccattagctttattgacatgaaaaaaaaatatagttacatcggatgatgatacaaagcacttatatgtatttgtagatgtgttgcaaacatgtctgccttttgttctacatttccaggataaaatgaaagctgaaaggagaaaaacaaaatgctctagtatagcaaatcaaaggcgggaaaaaaaagagaagcacttaaaacatcagtatctctgctttagaaccaaattctaagtcttaatcgtttctaacagcaatcagcgggtgacacacgcgcggcggctgggctgcacctggcacttggccgacgtaatctcgctccggcgacacggccgccggaggctgcaattgtgttgcgtggcgccatggcccgccgtagtagcagccgccgccgccaacgcaccttgcgggcggactgtagctgtcttgcaatggcgaatgtgtaatgattggaaatttggggctaaccttgcgtgtttctttttgcgcggacgtattatacttcttgtctgtttcttcaggaaaaaaaagaatgatgttaaaggagcataaaaaaaaggaaataataacttcaggtgttcatgcacactacatataacattggtattcacaggccagtcaaattaatacagtatatacttactaaagcctcactccgatgctttctacttgtagtagaaaaaaaatctgaactgttgatcttatttgatcgaagggttcagatctatttttattaccacctcacttagtggtagtagaattgtggagagtacttttatctatataaaattatttacggagggatataatcgtcactttcactttataacaatagctaccctatcttctttcgttctggaactgacgcctgcatctggagcccatgccgagagaacctccctcgcgactcctcccttccgccgcctcagccgacctcgcctgctccgccaccctcgccctcgtctgccgcctcccgacgcactcgcctccgccgcctccaacgtttatctagctctctgagagaaatgcaccagcacatttgcccgcagctgctccattgctcgatgtcgtcaaaaatcttgtcgacaatctactgaattgagcattttgctttgcatcttttctgacacatacgaagttggttgcgtataccattgaacagaccaagggagagcttgctgaagaagcatgatagcagcaaaacctgacaaactattctttgatcaaccctaattaactttctgtccagagtttatggttgatagcatatcactgtcaatgcattttgcgaccatcgaacaagtctacagtaaaacggttttgctatataagagtacataggagtgggatttcaattaaatatataagaatgacaacttagcagcttgggatttcacttaaatatactccctcaatttctaaatatttaacaccgttgactttttttaatatgtttgaccgtttgtcttatttaaaaaatttaagtaattattaattcttttcctatcatttgattcattgttaaatatacttatatgtatacatatagttttacatatttcacaaaagtttttcaataagacgaac

SEQ ID NO: 39912 - DNA, 723 bp, Oryza sativa
gcgtagaaatctgcaagatttatatcttaagagaacaagctaaggtatgcttcgggcccggcctactcttgggcccgggctcaccttagttcgcatgagtcacgcactactcgaggatgatgagtgccaagacatacaaagcataaaggtgtaaactgaggtttgcctcaggcccggccttgtttcgggccccgagctcaccttggtccttatagggctcactccctctgcctagaggagcatcgagacgtacaaatcttggaatattccttcaccaacgacatcttcgagaaactcatccgaggattgccaaacttgccgggaagttgggcgtgctccatagccagctgtgaggcagtatgccccgccataattgaaacaggatcatgggggatccccaactagtctgaagttgaaaggacgtggacaagacaccagcgctgagtcacctaggactagtgacgccttggacacgcgtcacacatgcctcgcaccacttgatttatccaagcaagtggagaagcaacggtggcactgtttcgggcaagtcgggttctcaggcccaccacgcaccacgtggcgagcacactggtgagatcctactgtctcagatggagcccggggtaatatgaatcgcaagactcaaagggtttcttgaagactgtgttagggaaccagccggcgacaataagacagctgataagacaagactaatagtagatt

SEQ ID NO: 39913 - DNA, 737 bp, Oryza sativa
agcccagtcgttcggttgtggaaacggctgcaacccactccccgcaaaaaaaaagttggtttctcgcgaaaaaaaagaaagtacctatacatctttcgaaagatttttataatcgtatcacacagatttttaatctttatattaaaatctgatagatataataaaaagcaaaaagcataagaaacaccataatggacactaaattaccatatcctcaagaaaaagaccaaatcaaatataaaatttaaaatttacatgcgaagattcaaaaattacagtgtaacttacaaaagttatagtgtaagtttcataaattacactgtaacttacaagaaaatgcactgtaagtttgagttagaaaatcgagtgagagataagaaaaaaatctttcgagtgagatatagcgaaatccaaaaaaaatgacgcccctcttctagttcccatctcccagtcctatcgcgtagcccacactccaccctatcgcgccttctcttccatcgccacggcccacactctgccgagcgcgtctcgatcccctccgccttctctcccgtcctcctcctgccgagccacgccgtgccttcccgatctcctccacgttctctcccatcctcatccctccgagccgtgccgtgccttccggtcgcgcccgacgccaccccttcccatccccttccttttttcctctcaccactcccgatatgatcgattaaatccaataggatgtgaagttcatc

SEQ ID NO: 39914 - DNA, 733 bp, Oryza sativa
ccgaatttgtcgtgatactttctaattggtgtgcacgggaagatatgttcccctttccagacaggtggtgaaaatccttttcgcgtgttattttggttacatttggtttgggggagtttgagaatgctaatggaagcataggatgaattagagcattttaatctttgaagaacatggaatttgagagagattgaaatgggaaattgatcgaactcccatcgattccatcccaaccgttcatcataaattatgataataatttcttatctcaaaacccacaaccgaacaaataacataaattcccttttaaacatcccctattatttctctctagcaactaaataaggaattgacagcatgtttggttagggggaattgttaacagggatggaactttgagaggtacacctactgtttggttggtggatgtggaagcttgtgagggatttgagaaggagtttaaagagcaaactcccaattgggtaagggcatgtaatttctagggaatttcttttctaagtatgacgagataaatctgagctttacatcatcacttaaaattcaattatcatccatactacccatgattctcatctctactaccaaataaaagactgggaataaaaaaatgaaactcccataactcactcctctaaaacttccaatcccctttcattctcttggcaaacaaaccatgggactaaaaattaaattctgatattaattctctttg

SEQ ID NO: 39915 - DNA, 727 bp, Oryza sativa
agaaatttatacaaattcatattcatgaatatgcaccattttggattctaaaacaaattaaggacatgagtacattgttggagttctaattacatgatcttaagctttagtctataaacaatcccttttgcttatgcggaaaaataattgatctactgacctgagttagaagccttaccgttcttctttcttcttcttccagagatgcctcacgaaccccttccagtgcctagatcgattgggcgattaattagggtttgagattagagagagagagagagtttggtcgtctgcctctttccttctctttctttatataggcgacactggtggggctcgggggttatctcaattagtttaggattctgttttctgtaccgatcacataaaaaacaaatttattcttagtttgtttcttgtcaggataaggaaaccgatggtttagatcctctcctaacccttatcgacacaagtcgacaaaatcaaccaacattctccccttgattttgagacttacttacgagtttattaaataaaatagctccccaaggcaatgtgtcttcaacaacattatgcgtcactgagacaacaagacctatagctcactatagtactcaaataaactcaagcttaacttagtgggtgttgattgaaaaatttagtccccctcatccaggatctcagtaaggctctaatttacatatatactggccagaacataatctta

SEQ ID NO: 39916 - DNA, 1217 bp, Oryza sativa
tgtcgatttttcaaaattgtggacctaagtgacacttcgctccaactttaaggaccggccttgtattttactctttctaaattattagtcaatactttgcaagatggatatattcgctgctcatttgcctggatgttgctcatttgccttgatctagttttttttatctgattgtttatctatttatctagacatttaactcagataatattatcatcacttgtgatatgtctccctagaacccgtattgctgaaagtgaacagtaaatctaaaaaaataggtccttgagaaggtacctatttttttatagtaaaattttgctacctcgagttacctagtacttacttgtagataataagttttacactagaaaatgtgatacctcctactaccttctgaaggatgataaattatcattcttatgataatgtttttttatgttgatatacgatatattacctttgggaagccttaaaatttgatattttttactatattttctaattgttatgatcacttgtcaagttgctcccctcatgcttagatgctggcttccccagtgaatgcaccactgatgatagaggcatggaggttgatggcttgactggcctttcatgatatggagatcaattaaactggataccattatatcattaaagaatacaaaatggagaggaaaagtacaagggaaactaaagccgttttactaaggacaaaggtcactagatactaggtcgtggaatagggtcaagggaagcatggaccttacctgtgaaaatcatatctgtaacacattgtgtttgtatttcttttggggaaaatgaggatgataacatgaagtggaagaggtagcagaggacaaaaatgtggatgattattgtaatctgatgagcgccttggaaacttatacctgacatttttgaagtaaattttaggaaagcttgactggtacggttgaagttgcacaaatcacacgtgttatgttacaccagatattgtggtagaggcttacagcctagagtatcacgaaatcatacattaaccaatctaacgtgctaatactacataataaaaataaatacttaacttaggagtactccctccgtcccaaaataaggcaacctgtgaccactcctaatacaacgaatctagacaacccttcgtccagattcattgtagattagatgaccaaagaagatgcgaccataagttctca

SEQ ID NO: 39917 - DNA, 511 bp, Oryza sativa
gtaaggcacaagccaaatgtgaagctcttgcatcatatctcaaactaactcctgcaaattccccgtggaactggtgcaacgtaatcttgaatatttgcccgtattgtgtacatataaaactgggtatctattatatggctgcattagaatactccgttggcattatgttcctttcaggttctataaagggaactaagcaacaagaagctcccctgggagatagaggctcaggttagctgtattgtaaatttcagaaaattgcaactatagagacactctgttattgcagcaaactgaaataggtcactaatgttgcagcaaactgatagttttgtcctacgttgcagttttctaaaatttactctttcataaatgataaatctaaagaatgatttccgttttgcttcttctgtcatgaacttctgcattgcctgtgcgggcgcaacaatctatcgtcatgtctgttggcagcaataatttctaaatgaccacttgttattgctacgtgtta

SEQ ID NO: 39918 - DNA, 663 bp, Oryza sativa
ttcctgcagccctcaatcgtttctcgaatgaaaatcgtgttcccaaattcacactccaaatttgccattcaaatccctgcacctctacaaaaatttctactgttcattcgaaaacacaaacaattgtttattggatcatcccaactccatacatatatactatatgatgcccgcggatcatatatcctaactccatacatatatactagatgatcctcgtgcttttctgcgggatatatgttagatattggagaaatgatgaaatgatttagtttgaaatattatgaaaatgatttgtcaataatgaattagcatgtgtatgtttagttttataataaaatagattgtagatataattactatatgcttgcatattgagttttgtgtgcttaatgggttaatgtagcatgcttgcagtaggttttaggagtacgaataaatacaatgcttgcatgttatgttttaggtgcttaattagtagcttaataaaaagaagggatatgaaaaatcgacaatctttccttcattttattggtctgaatggcccaaaattaagtgcagccaaagcaatcccagcgaacacggccacaccaagggaccccaagatcatctccatggagctcaccgtggacacctcctccctcttgacatgcgccgacgcgg

SEQ ID NO: 39919 - DNA, 934 bp, Oryza sativa
ctgcagccccttagtaaaaggctctagttatttttcctgtttttttctttatcaatttgtattctcgagtattaatggtactatatttgatttatcttcttatcattgaaggtccattaagccacaaacttcatgcgtacatcggtgaaggtgcataagttgacgacagaagatgcaatgaatacattcttaccatcaagaataaatttttgcgtcaccctgagaagttccatgcattcatacacaccatgattgatttctccaggggcaggtgagtaataggcattaacatagggtggttgcttacaaaatcatgactggatagattggagcaagaaattctcatgtgttactagttgtatgtggataacaagttttattgaaactttggttatgcaggattaacactcatactgttattgaacgtgtgaagatcctttttgatgggtatcctgatctactccttgcattcaacaagttcttgccaagaggcataaatgcaatatgatgaagaattttgtctaaatatgtttcctcgtttaaggctcaagctcactagctataataaatctttgataactttatgagttggtttactcatctattttaattgaataatttagcaatgctacatttgttcttatcgtacttgtctaagtacctaagtgccgactatattttggagtgctgttattcttattttatctatgccatctatttggtggagatagagattctaagtagctagtgagtatccatttggtgaaaaatctagagaagctaaggcatcatttgatgagattctctaattggctacttcctcggttatcgtgaacacactaactaaactactacgatgatttttttccaaacattttctgtatagaagtttattttaaaaaaataaaacatttgtcatgtttacaatagttgg

SEQ ID NO: 39920 - DNA, 719 bp, Oryza sativa
ttcctgcagcccctttctagcaggaagcttggacggcagatggcggttttgttgacagtaattatcttcaacttggaaggcttccccttctccatcttaacaggtcctttccaacagattcctcatggctttcaccaatcatggaggattcaagatcttctgtgaccactgggttcagtttctgttttctcctcgccaggagaaatggaaagcttttgggacgatggactacttttaaaatttttttcctttagtatagtgaaaaatatgataaactgtaccataaaaaaaatgaagggacaattgcttatttaaccccttttcagagcctaactaccaatgtaaccctaccttttctagttagttcatttgaccccacttttcaataacaaaggtaccgtcttaccctatttcattacaccgttagggttatatatatttagtaaaaagaaaaaaaaatcaaattactattcaaactgaccaaaatacccttgaggacccaaccctatccattcactcccaacctcatccctctcggctggcactaggtgaggaggccgcgacggcagtggtgtgcagagaaagggagcagcgcgctggtctatctgccataacagggtcaaaataagcaagggcaaaagggactatttgcccttagttaacactgttatcttgacttcacaaagtagggtcaatcttcatcttcgattttgaaaaac

SEQ ID NO: 39921 - DNA, 733 bp, Oryza sativa
ctagttagcactggttttataagttgaggaacgcgttgtatctggttttgcggttcaaggacgattttgtaattcgacgacaagttgagggacctttggtgtacttgttcgtaaaagaaaagaaacaccggcccagtattgataatgaagcccagacggaccaacaggccaagcccatcttatcccaagaaaaaaaaggggaaaaattactcctttctaagcgaaggcctaggctaaagaacagagaagagacctgctcttgcgatccttctcactctcttcctccccgagtcgacggccggccaccgacttgggggaaaccaagccaccgccgccgcagccgccgtaccccaccctccctcccggcggccgcgggccatagccgcgttctcccccgcgcgtctgcctgcggcgtggaggcgtggggggcgacggcgatggggtccatgacgatcggcgccaagtacaagaccacgctcaaggaccccggcaccaccggcgtcctgcgcatggtgcgtcgcgatcccccctctgttcctccctccctctctctctcccgcatagcgtcgcctctctccctccagctccgattggtcgggtttaacccttgcggccgtgccctactggatacacactccgcgggaggtgcggtgggtgtgctgattctgtggagggatgtcgcttgacgggagggttttgatcgggtgttggtcgcggtagtgtttgattgggt

SEQ ID NO: 39922 - DNA, 1270 bp, Oryza sativa
cctgcagcccaccgctcaacacacggcggtcagaccggcccactcggaggaaaccggtagacttacaaattttggcaatctttcctattttaatcctaggtgccaaatttgggtgtaaacaatcattattcttctgtgcatccttataaacaagattaaatctcctgcgatttagcctaggaccaaagaatgcaacagaataccccaaagatcatgaaggaaaagaatcgtctcatctcatcttgtggcctgtaaacacaattcaatcaccatgacccctatcttgggacagaactggactgaggcactatgtgaatcaaccctaccggaactaatggatccaagcttgcttctccatgcaatcaagataccaccagttgcccccaccgaaggaactttaacaaaattgttatcaaatcagacccaagcatagccaagatagtgaaatgaaggaagattgtcatgtttatagagttgggatgatctaggtgacaattaattgtttgttttttaaaaaacaatagaaattttgatagagatggaaatatttgagttgcaaatatgcgtgtcatatcaggtattatatagggtgtcgcatggagtgttcagacactaataaaaaaaactaattacaaaatccgtcagtaaaccgcgagacgaatttattaagcctaattaatctgtcattagtaaatgtttactgtagcaccacattgtcaaatcatggagcaattaggcttaaaagattcatctcgcaatttacacgcaatctgtgtaattagttattttttcgtttatatttaatactccatgcatgtgtccaaacattcgatgtggcaggttgaaaacttttgctaggggatctaaagaggcccttagaatgaagattcaagatttggtttgaaaagtttaattccttctttttaatgattggttgatactgaaccataaaaatttgtgttacatagtctagtatgaatgtcttttcagaatcaccaaaaataggtttgctacaattctgctgaggcgagggataaatttctagacatcacaaaatttctaattaagcttccgtgtgcgccttcagttttttttttcaccataggtctttcctttagagaagtgcaagggacgtgctcatgttcactagcattaatccgttcgtttccactaaaaaggttaataaaattttggatatttgtggcacgctttttaaattgctaaacggtgcgttttgtacgaaaactttctatataaatgttgctctgaa

SEQ ID NO: 39923 - DNA, 733 bp, Oryza sativa
atcacccccttataaacaaggcatggactccccagcgacccccgtgggcttatctctgccacttctcagtctggtgccccgcaatgaaccatgctatacaaaagataaagccgttgcccatgctggcttgtggttggcacgattaatgtttcacaaccgaaactcgtgaaccggtccttaattgtcatgagcacgaccatcaaaaccatgtgctcacaacccaccattatcaggttttagttggcacattaattaattaactaatcacgattgaccatcgtgaactatcaattaagccatcatgaaataatagtgaatcataagttatcccaatagtgtgctaatgtttctaagcagggctaagcaattatttctaatatctagttgaaccaatataaataaagctcaactagtcaaattatagtaacccaaggtatcaaggaataaagtaatcaagaacaaaagggctataacaatgaataggttaattccacccaatgacattcgaaaataaatgcaatagttgaatagaaataatagctttaaataggatcaacatgctcaaagggttgtttgggatctgtgtgacttgccttgttggccttggaactcttcaaactcttctccggcgaaaacggactctccggaaacgacggaatctaagcagaaaagagcaaaatcaccaaaacagcacataaacaagcatgaacagtacatgtggatatttttaatg

SEQ ID NO: 39924 - DNA, 753 bp, Oryza sativa
cgaattcctgcagcccttttatacgtttactacacattgtcatttttaaaagtatctttacatagtttaaaatgtcacaagaaaatacctttacatatcaggcgcattttacagtaccgaaagaatgcctctacgagataaaatccaataaactgagctgaaaatgtctctagagtaaaaattttctaggcaatttataaagtgtctctactcctgtaaatctctcaatgcgatgaaaatatctgagctcctgagcatacaaaatatactgacttgctgctgataaagatgttatttgtgctaaactagactagagggcagaaaggcaataatagtttggaaagatagaatatatctgttggtcactcttttctttcagtgcctatatgtatgcatagaactaaggatttgagaggagaacatgtatatgtttgtcttcaggggtttccatgtctttatagatataccaccacatcacttcatgaaactttgggaggcattcaagagtgttatatctccatttaacacaatgatggaatattgctggctaacttagccgacgtgtaataacgatggaaataatggagtccaactttggtaggttcaaataattatctcttgttaggaaacagtaataatacacacactcactccctctgtctctaaaaacaaatctacaccttttatttttagggatggagggagtatatatatataactacagaaaactattaaaatgtacctccagtacct

SEQ ID NO: 39925 - DNA, 513 bp, Oryza sativa
ttgaggagtcctgttcagctaaacctgaccataagaatggtaatgcccattggttcattgttgcaatatagttcaatgacatatcttattattcaccatatgtaatggctagacattagatacatctgctgattatgaatctgaaatgtgtggtaatacaacttctgatccttagtgtcaacagctctaaccataaacaatttctgcatctttgttcttgttaaaagattgcatgatttcaatcacacaacaatcctactatttatatcaagtatatatacctgtcatttatatcagttagtacattatgaagttgggataaaaaatatgttctttgttctgttccaactcctgatcaaacatacaaaatactaaactagatcatctggcagcacatctaatgattgtgtcctccatcttaactagctgcaaagtatgttaagatcagcacttgatgccacaaattttaaaatattataacatttcagaaaaaatcattgaacactatcatgg

SEQ ID NO: 39926 - DNA, 509 bp, Oryza sativa
tttttaactaaccaacctaaatatttaaaaaaaacatagcttaaatgacttaataatttctaaaattatattttgatttttaatttgttttaattattgttttattttacagttaattaaataattcaatatccattatagttgtattttactatatagaaattaaaatactcctatgcagggcaactgaatgaaattgaaaaattataacagaatgaaaacatgtattatttcatattaaacaatctacgcaataaaaaccaaaaccaattaaagacctttagagcacacttaagtcaccatatgtcacattttaaaattataaaatatttcatttaaatcgatggacccattattttcaaccattagatttaatttacgaaaaatcttacgctgccacgtgtcatgtcctgaaaatcataaataatcttaaaaattttgagaaaaaattaaacctatcatcattggttttaagttacattatttggagaagttataaaaataaatcg

SEQ ID NO: 39927 - DNA, 731 bp, Oryza sativa
aaaaagtgacactttgctatggcaaacccatcacttatgatcacaaccgtaataggtgcaattattggaagagcataaattacacttaatttttctgagggaatctatcctactatgtcatatcaaatatataacagcaataaagtaagatagatataaaaaccccaagcgaaatctaaggggcaacgcacacggcggtcccgccatgtgaaaaccttaacgacataatcaaattatgccgaaaccgagtcaatctcattggctcatttttctcattggcatgcggttccagtggacatcggactattcgatgaacacaatcgcgctcggccttggtgagtactagacattccattgaagtcaccaacacacataccgactgatctcatcaacccatgcggctattggttcatctcatgttccgatcacctaagaactcatatacaacataatagatctcatctactacatccgcatatcaattatatgcaatgatctagatcataaactatacaacgcggctctgataccactgttcggatacgcgtaggctacgatagcataaatcaaaattttctatcggggaaaccaggaaacatgcaagtattagatcatagatcgtaccactcgacgcgctgtggcagcggaagaagacgctgagaagtcgaaggaactctcgcgaaagagcgcgcgtcgatgtaaaggaagtagtcgattgcaccggattgacc

SEQ ID NO: 39928 - DNA, 1866 bp, Oryza sativa
atagattatataacttgtgattgactcctcaatcacctttggcatggtaatgcacttccataatctacaacatcgaggggcctagagatatctctccataggaagcgcaaatcccatcttgattattcatatcccactacatgtttcatagcatacccgaaaactacttttataactacccaattacggagtagcatttagcagtccctaagtaagctattacacatgttgagaaccatgataatctcaggtctaaggattcaacaccaacactaaatgagatcagtgatgacacaacacatatggctcttgcagtgtctcatgttgggtctatccaacaacatgttcactaacatgtgtccacattattaatttggtatctctataccatgatccatgagacatgatcatcaattaatacatgtgctaatcatataaacatatttgttccacatatgatatttgatcagggatcctttagaaatagtaacaaacaacataaagagtctcatgaaagaatcacatattcattaaccaataaggagttatctatttcaacgaacaatgtcggataaatatgtaaacatagtatgagatacaatcatctctatgattacctctagggcatatcactaacatcctcaacgtgccacacatcctgtcgactccagagtcgccaacccgacgcggtcgttattctagaagcccatggttaggacgtcgtcgtcaatgatggcgtgggattgggagaaaaagggaattaaggaggaagaagaatttgacaagtgaggtcaggggtatttttgacctttcacgccatttatctctcctattcaaccgaaaattaatattttaatgggcgcggtgtccactaacaaataaccatgtttagagagtattttccttgcaaaagtgatcatgtgcggtattctacagcttaaatcatcaagtcgcgatatcctgtagctaaacttgcctttcttcttcataatttcagcaaccatgatttctccatgaagaattcactagctcaaaaaatccctcaagctccacccaaaagttttcaaatatgaaaatagaggccttaggaattgaggtaccaatctataccaaacactgggtgtgtttgggaaattctctgttgagtgttcttggattagtgccctaaataagtaaaagaatagagagagtagacatcatgtttggtctattaaatacacatggtatgtgcgatattccatatactaagtctgattaattaagtgacacaaataataataaacagaattcatgcaataaaaaaatactatgtaataatagttgacctaacaaaagtgtactttagtctatgatgtttaactatatatactaattatatttttgtaattgtgctcttattttatttttaattcatttcttcatagaaaatagcaaagcatataaaaaaagtgggaggagtaaatagaagtttatttttaattagataaaacattgctatttaccttattttttaatacaaaatatcttcaattaatatatccttaaatccacaaagacaactgtagtatacaagaaaataatgttaattaaagtttaggaactccaaaaataaaatatgccaaatatattcaaaaaatatatgcagactacaaatgatacataggaacaaactcaattatagtgtgacacaattcttataaattcaaaatcgcaaggtttcaagtaatttaagtttagaatttatttgttgcaaggataattacaagaaattcataaccaacaaaataattaatcccaaacaaattattgacgaaaacaggtttagaacaaagataatgaatatttcaagaaaaattaatcaaccac

SEQ ID NO: 39929 - DNA, 656 bp, Oryza sativa
ttgacaaagccactccctcagcctaagcatgagacacacactagggcaatgggtgtaagatacattcatgattgactctagtgcaagtggaagactgttagtgacatgccctagagacaatcatagagatgattgtatcacatactatgtttacatatttatctgacattgttccttgaaatagataactccttattggttaatgaatatgtgattctttcatgagactctttatgttgtttgttactatttctaaaggatccctgatcaaatatcatatgtggaacaaatatgtttatatgatcagcacatgtattaattgatgatcatgtctcatggatcatgggatagagataccaaattaataatgtggacacatgatagtgaacatgttgttggatagacccaacatgagacactgcaagagccatatgtgttgggtcatcagtgatctcatttagggttggtgttgatccttaaacctgaaattatcatggttctcaacatgtgtagaagcttacttaggactgcttaacgctactccgtaattggatagttttaaaggaggttttgggtatgctattgaacatgtagtgggatttgaataatcaagaggggatttgccctttctttggagagatatctttaggcccctc

SEQ ID NO: 39930 - DNA, 839 bp, Oryza sativa
gggtaaggttttttacggtgaatctggttgaccgcccataaccgcgggcacggctattcgaatagttttactctgatcagaggtgtacaactatacccacaagacacagccccataacacgtttccgtgcgccgacatgccaccacgacataccggaaagaggccgtgacaggacccttcgcataaccccctctaaccaagcacaccacacctcaggtttcacccccactccttgcaaagcagcgggcagtcccctctcgtgcctaggtgaatccagaagcgacagaggccgtcgcagggcccgccccgctccatcacgcccacccttgcctggatgcgtcagctagaggaaagctacactacaagcccagccgttgcccatgctggcttgtggtaagtatgataagttcttccagggcatcccgcgaaccggtccttaactgccatgggtgcgactagcagaaccatgcacccacagcccaccatgtgattcattttaattgaccaacaccaaaacggtggtactaaaccaaccttaccaattgaacctaaagtctatattttagtgagctttccccattgtgtgctagtggaactaagcatggctaagcaattcctagtccaaaatctattcatgttataacccaagctaacaaaggagcatggtatcaaaaatggcatggctgtaacaataggtaaacaccccatagtaacattataaaacaatgcaatatttgaagaaaaacaatagagcatttgcaatataggatcaacatgttcaagtgacaagcatgacttgccttgctctgctgctggagaaacctcggcgactatctcga

SEQ ID NO: 39931 - DNA, 2360 bp, Oryza sativa
catatgcaatagtactattcatatatgttgggttgtcttttttatttctcaacttgtgagttaagttttaacttgatttttttgagtagtttgtgtgtgtgtgtgtgtggagagagagagagagagagagagagagagagagagagagagagagtttgaatgttgttattttttagaatttttaacaattatttgggtgacatttgaacaaataggaaacatctcctcgagagtttaaaatacttaatccaatagtgcaccctaactttaactgtccaaaatagcagctccttccgtccacaatgggtgtaatggatcatatggatgttagaatcttttggaaagattaaggatgtagagaaaaaatagtatccacttattaaaagaggggtggttgagaattggaggacgattgaggtaagatgagaaagaaattgaataatgggtgattgatgggataataccctaattttattatatttgtggacaaattgtgacctccaaaatccactatatttgtggacttggggagtaggtttaaaatgaaagctaatacaagattcactccgtcccaaaatataacaacttctccacatgaattctcttatcaaccaatcataattcttttctatttaattttctaacctactttctctttctcttgtcaactaattagaaacttctcctatttcatttcatatactttcttaatatttatgtctaataaaaaagtaggagaaagtataaaagatttcagaatttgcagaataccaattgggaagaagcagtcatatgctttagcactgtttaactttttttccccctaaccgtagcactgttaattttcaccatatcttgagtccaacatgccatgcatcttgggaaggtcagaattcagatgtgtcaaatacagaaatttgacatgtcagtccaagtggtggatgaatagcatcatgggacatagacaccttaggaagaaaatgaaataatgatacttgtaattatttggttcgacttgacagatgctggccatcgacagaacttgacaacagacaaatattccaatggaacagaagaagcatcggttcatattccaataaatcagaataaaataattaatactacctctattctaaaataagtgcagccatgattttctgcgcccaactttgaccgttcgtcttatttgaaaatttttttgaaaaaaattaaaaacataagtcacgagtagagtactattcatgttttattatcccataacaacaaaaatgctaattataaaaaaatttcaaataagacggacgatcaaagttgagcgcgaaaactcatggctacacttattttgggacggaagtagtaatgaattaatttatggtagtagaaaattagggagatagtaattaattatgagaccacaatctttcatgctccatacgtcttgtccttgaatttatctctatttctaacaaagaaatctaatgtgatgaacagaagttacaagttacagaacgaggttggaatattgaatgagtgcagcggcgaaaaaggactgcaaaaaaggcactgaagaaaaagaaaatccctctcttgtgagcatctctagctaaacgaattcacgaactaaagaaaaagaattatttttttctcttaattcgcacttaccaagaaggcaagaacccgctaattaatcgcgcacgcatctctcaattctcatggagaattacaaggtgagatccaagctcacattctcccggttaatctctgccaggtctcccaggcggcggcgctcgtggtgatgctgcgaagacgacgacgccgacgacgacgaggacgacgaccgcgacagccgcgagccgggttgcagttgcaccaccgcggcggcggcgccgcctaccccgttccctctccttacctccaccattgcgtcctcctcctcgcgtccaccggccagcgacagcggcggctgccgttcttggcgcgccagcggcgcggcggccgccgccacggcgatggcggcggcggggacacgccacagcgcagcggcggccggcaccaccgggctgccgttgatcgggtgcgagacggagcctggcggcgccgggccgtagtacctcgccgccaccatgggcgcgggaccgccgggcgggaggtggtggtggttggaccacgaggggtacggcggcggcggcggcggcgccatgtgcggcggcgaggggccgaagcggtgcgagccgtactagctgggtaggcagggtaggccgggtagtgcgcgtgcatggccatggcgctctggaactgcgcgcgcttcaagtgctgccgctcccgcttgtgcgcgttctggtgccctcccaacgcctgcg

SEQ ID NO: 39932 - DNA, 2021 bp, Oryza sativa
acttttcgttttttatttttggcggaattattttaattaaaacaggggccaacctttttaaaaaaatagtgaatatcccttatattaggggacagaggtagtactagaactagtggataccccacagcttgatgtgggatttgaaaaatccttcaaaagcacttaaaaacaacattaaattaaaggccagacaataaaaaaaatacaaactgcatgttaagttactaaaatgcctgaccgcagaacatgaacagagcaaaaaccgaaaaataaaagccatgctatagttaatggtcctagtgaaaaaaaaaacacttctcccgtaaaaaaaaccaacctcgtactccaacgaatctggatactctctatgtccagattcgtcatactaaagttggtttttgctatacatcactagcatgtttttttccaaattgcactcaaatttctagcctttggatggacgtcaagattcgtgctatgttatcgggcccacagtcctttgtcaggataggatccgttttgttttggcccgtttccatccgaacccgatccacatgcatgtttttttttaacttccacaactccaatggctccaggcaacatcgttgaggagaggaggtgaatctggcgacgagcggcaagcgcaacgccttcaccgacgggaggagctaggacagctcgcgcagcaagtccacgagtaggatgccttcaccgtgacttgttattttaatatgtagatcttgtatgtctctacacccttcctaaggaggaaggtatgacataacaaggtgaggggggctaggacccggtcaggtcctgggctcctccctaacttgttattttaagatgtagatcttatatgtctctacacccctcccaatgggggatgtatgacctaacaaggtgagggggccctgggacctggcctaggtcaggtcctgggctcctccctatcttgttattttaagatgtagatcttatatgtctctaaacccctcccaaggagggaggtatgacataacaaggtgaggagggccctaggacccggcctagatcaggtcccgggctcctccctgacttgtaattttaagatgtaaatcttatatatgaattttgtatgtttcgacactcctcttgaaagaggggtgtgctacatagaagggcttaggggacttcgggacccgacacggggtaactctcgagcccccttccttgccacgtggatatttttaatcgctgctaatcaatgtgttttctttatataatgagaatataacctcgggtcctcggggaaaggggtaccctggttcccatttcaccgacagcaacggaaccaacggactaacacccaacaccatagacgacggcagggaaccatgatgaaaccctaattttcacttctcttcaacttcaccttcagggtggaggaactatatatatagagcaaggatgagtacttacgtactcaacacgtcatgggaacataggtgttgagtgaaagcatgaaagagaggcaagattgttttgcaaattctttatttggaaccattttgaaaccactaagtggttttcttctttttaagtttaggtcgaaaagagacttgtttctcgattccacttaagagacttcccaggtcggttcattaattcttggctcccaaagccatttcacttgattaagcagctccccgagccattgtcagtttctcggacttctcactgcccccatagcacaacaatcttcttctactcagtaagcatagtctatgatgccgcaaacatcccgaaacacacaaatccattcctgaccacctaggtcatccatctgccacaaaggttgattctggtaatgagtctcaatccacaatacttttcacaaagcacaggcaaacaaaactacgcaattggaaacacttcacatctgtagagggatatactttacccacacaacacgaaacttactccagaaaatagccggtgtcggaggtttgtgacaaagccctttccaaccccaccccagg

SEQ ID NO: 39933 - DNA, 617 bp, Oryza sativa
aaaaatacacgtatacaaactttgtatacgtgtatataaaattgatatacgtacgtaaaaaaagcccaaaaaatacacgtatacaaactttatatatgtgtgcatatgatatatatatatatatatatatatatatatatatataattttttatatgcatgaacttttaatgtataaaaaatatacacatgtatataaaatgtatataaagtttgtgtgcatatgaataaagaactaaaaaatacacgtatacaaactttgtatacgtgtatataaaattgatatacgtatgtaaaaaaagcccaaaaaatacacgtatacaaactttatatatgtgtatacaaaatttgtatacgtgtatacaaaattggtatgcgcaggtataaaacccagaaaatacacgtatacaaagtttgtatacgtatatacaaagtttgtatatgtacatattaaaaaaccgaaaaaactaaaaaaatatggaaagaaataaaaacagaaaaagaaacgtgcgtaacaaaaaaaaccgcacggcaaagatacagaaagaaaaaaaaacagaaaaaacaaaaagaaagaaaaccgtccaaaaaaaaaagaaagaaaaatcgttcggaaaa

SEQ ID NO: 39934 - DNA, 586 bp, Oryza sativa
tgtgttaaaagtgaaatcttacatcatattgggttctgtttattctcttcaaggaagagaaagtcccaccgaacacgtgttaaagtagcagaatcacaaaagacggttgattattcctgggaaattttgttttattcgggagacatttcctggttcaattctcttctcattttctttacggagaaagtgagagctttcttactcaattaaagatgctttcgttcaccaagaattaaagattcaattaatggccggtggaatatcacccaaattaactatttaaccaaaccgctaatccagctgaggaattttttttttagaatgggaaatcgcaaaaatatagatcggtaggcaaaatcgtaagtttagcaccctgtcaaacaaccgtggtttgacggggacctatcaaactgcaacagttcaatagggtagttggtcaaaataaaaaataaaaaaagtacataaacagtgacgctacagtgattggtaggggcatgtcgaactacccatgttcgatatgtttgatgaacagtgccactacagtgataattctcttttttaaaatttttttatcacctcgacaagt

SEQ ID NO: 39935 - DNA, 712 bp, Oryza sativa
ccatagtatggggtgcctcggagaggcatatgcaagagaaagaagagcgaagaaaatgaacaagctcgagatagtcaaaactatatttatttattacaatacaactttgtgctattcactgaaaactttcttttttttagtttggttgtttctcttttatcgaaacaatatagtaaatcttttgctagttcctcctggtgaccctctcttctgagttgttcatcagagtatactgagtgtggacccccgtttttataacaggaatcaatcgtgtaatcagtaccatttccctggatcaagtagtttggtacacacgaattcatagctggaatatcaagtgcacatacacgagtgtctaatacgaattattacatcataggcccgcaggcatagtcttaaatcatcggaccgagaggtccggaatacatccaaaagcagaaatagataaggcagcggaattcaggcagcggcatgccattgccacaggcaacgaacgtactaagacctactggacgccatcgtcttcatctctctcctgataataggcatagggatcctccgaggcttcatctcccgcatctgataaattttatatttgcaaggatgagtaccaaccgtactcagcaagccaccacagcaacaatgcatatgaaaggggagttcaaaggatggccatagttcttttgcgcaaagcaagtttttgtaattcttt

SEQ ID NO: 39936 - DNA, 512 bp, Oryza sativa
taagagaagcgtttcataaccttcattctcaatatgtactatgccttctcatgtacatcactggtggactgcctttttaatttattgacagcaaaagtgtggttgacaacaatgatatacgaacatttcttcactttcagttaagaaatataaattcagaggtcgctcatgcaattcttttctcccattatatatattgaaaaaaaatacaagagacagatcctcgcaaaataaatggtgtgttagcttatatatattgtgtcttaggaaaaaaatgcttgatggtatgtaatttcatttacgcctgaaatatacatgcaaatttctagcaaatatttttttgtgtttttgcggatacatacttctagaaaaagaaaggctcaatcgtggctttggagaaagggttcttttcagttgtaggcgatgtacccgtcaatagtgaaacacttgtgatgattttgtcaatctgatgataagttggcttagtctttgaggtgcttataagatagggt

SEQ ID NO: 39937 - DNA, 564 bp, Oryza sativa
cctgcagcccttaaaaattgcctagaaaacttttactctagagacactttagagacattttcaacatattttattaaattttatcttgtagatgcattctttcggtattttctgaatgtgcctggtttgcaaaggcattttcttgaggcattatttactctatagagacttgttagaatgcaatgtattactaattaagggactaaatataagtaacacaagtcacaaacctacaaggaatcgcatgtggttgagttgattagtgcattgaagatacaaatgatttgcccaatagatcttaagttcaaggattggcaatatcaagggaaaatattttattatatttttttcccgtttcatatgttcgtggtacaatttaatgtctctaggaaatacctctactgtcttcattgggggtaaattaaaagtgactgcgctcctcccacagcgatttagccaatttcagggcagcgtattcgactccgccgctatccacgtcgcccgcgctccctcccgcacgcgatgtggggtctgctgtgggcccgcgtgcgcgcttcccgcgcg

SEQ ID NO: 39938 - DNA, 832 bp, Oryza sativa
gttctttggtgggccatttctgcaacataacaatttatagttggaagcccaggtgattggtgttgatagaggaaattagggatatgtagttagtctctctggattgattcgtgaaacatggcttcgtgataacaagaagggggtacattgaggcatgcaaacctatgtaattccatatgttgaaacatggcaccacaaattcgggaattggcgcactatttggtttggttttgttaaattttgttcagttgagttcatttattggttcaatgttgaaataggtttattgcacatgaaacttgtttgtgatggatcactaggggctgttaattgattttaaaatagcttctgaactatagcaagtcaactttgaataaagctcaattaaactcagacttggcttgattgccatacatgttttcagacaacagtctgttctagggggtgaaaacttctgaaaaatttcaaattggtttttcaggtagatttagttaatttaattgactagtgtaattcaccaacttaggatagttaatacttcagtttgccgcatttctcttatcaactgtattgggcattgtatatcttctatcgtaataatcaaactatgcaattttctttttcttactctaaaatattggatatgtgtttttcttttgaggcaaactcatatacttatgaatcgtcaattgattgttctctcctctatgtagatgttactaccagggttcaagaatcaggtatcgacatgatgattagctcctacatttttcttctgcgccagcctgcccattgtcactcctataatttgctcagactgtcgtatgtgtag

SEQ ID NO: 39939 - DNA, 530 bp, Oryza sativa
cttaccacccacttttgttcatttaatattgtagctacaacaataactaatacccactgaaacaagacctaccattatacacaaagtaggtatttcctccgtttcacaatgtaaatcattttagcattttccacattcatatcgatgttaatgaatctaaacatatatatctatctagatcattaacatcgatatgaatgtgggaaatgatagaatgacttacattgggtaacggagaaagtagtaaacattggtgatgcccttatagacattagctttttaaacctaataatccagagaaacaaataactcatgacttattctactatagcttatccaagggatccccttagttcatcgatcgccttctcaggcctgtatctaggatgcaggtcgttggtctgaccgcttccgaagtaacgattgctttgtggtctccatctggaaagctattttctcgcttccgctgcatttgctgaaacttactctgtgcccgttcttgggtcttcttcttcttctactgcctgttg

SEQ ID NO: 39940 - DNA, 633 bp, Oryza sativa
cattggttgaggcttccgtcgcacaacactccatggtcggttgttgtcgccatggctagcctccacatgagtggcgtgtgctttcgtcagtattatttttgcaatttagtcttcaacttgggccagcggcgcccatgatgttgcacgcctaccttctctttgtttttgagggaaaggctcaacggacaccatattgacggcatggtagtctgggttgatggcatctgcatcaagattgattcttttctcgttgactgccctttggagccattctttgaaggcgatgcaatcttcaatagcatggccgacatacctatgataaggataatataatggattgtcagtcatggttacctggtcaggtctccgtggttcaggcagattcaaggcgcgatgttccatcaactggttgaatatatctttcaccaactcccggcggaagatgtattgctttttgagaagatcttgaagcgtggagcgttgcctgcccccaacttgctcattctttgctccaatcatgggcacctgtccttgaggtgcggtggagaagacttttgtggaattagcttcggttggaactttgggtttgttcccactaccactaggctttgttgcgttaaagcgtttggtagg

SEQ ID NO: 39941 - DNA, 620 bp, Oryza sativa
aaaaagatgccgctcggtttggatagagagaggccaaagaaaaaactaggggcagtttcggcacaaaaggttctaaaagagagcaaaatctttttcatcattaacccaaaatgataaaaatagcaaaatatcaaactgcactctgttgacaatggtattctagtgaagcccgttttaataataggatgtatctaaactcattcttatgtatagctagatctccaatatgcatggactggatggcactgattccttgacttgttcatgcttgggctgcaccaatcgacctgatcaacacatttctttcacatttatgaaccaaactgctgaacaaataagtccaacttcgctggaatacaaatttatgttcgatataatttatataccttaaccgtaataccctaaaactattaaaaccagtctaatttgacttccaagacagtaattacaacggtaattgttgacgaggcttattgatatggtccaactggctgactcagcagatgtcagtggctgactcagcagatgtcagtgtcccctcctctgtatctctctcttcatctcttctatcccccacattggattgcaagattgcgactcacatgactttgagtcactaa

SEQ ID NO: 39942 - DNA, 3621 bp, Oryza sativa
tttaaccattagatcaatctataaagaaaaaataatcctccaatccctatcagtattgtacctacgtggagtcgtagtaggtatacgtacgtacttggacccgtatgcctcctctcttcctcctctgttccctctcttatttcttattcctattcttatgcaatattaggtagaaagcacaataggtgagcacaattgacaattaaacaaatataacatctaaactgcttatatttaatctttcaaaaagaatgtcatgttttggttacaatttctgacttttacgtgccatttaaataattccaaaatattatgaaaaaataacgatatagattttatcatcaaacataattacacaataattaaattagaaaataaattactccccggtaagtcaaaataatataattatacgtgtcttatattatattatatactataaacgcttataaattgccacatgactctttaataaattagaaaaattcctacaaattctaagaaaaaaagaaaaatatctttagcattgattttcatttaaaatgttagaccaattaattttaaccattagatctatataaaataatataatggtgtggaccatgcgtacatcgatctaatgtaaaggatatgagaatggttatagcttcgttcgtacacttacggaagaagaaaacattatatagtagtctaaaaaatcgagattcatttttctttctgaaacttaaaaaaatactaaaagtccattatacttccaataaacattatcaagccaccacatgcatattctacaaatgctcctaaatcatcactttacgctataataaattaggtaaaatcctataaattctaaaaaaaagaaaaatatcttaccatcggttttcattcaaatcggtggacctattaattttaaccattagatatatataaattaatggtgtgggccatatacattgatctaacgcaaaggaaaagagatcggttatagcttcgttcgtacatatagagtacaagacattggatagtagtctaaaaaattgagattcatttttttttcttgaactgaaaaaaattaagactttgatcggtcacaattttgcccccatcgacattactcaggacactgtcagcgtgagggggcaaattagcttgggactacatgtatgtatcatgcatgaccgagctaaaagctttatctaccaattattttagaaacttaaaagttaaaaactatttagtatttaaactaccatggttgtataaatggctaattctttcaaacaacaaagataaaataggataagcattgtaggcttcatatttaggattatgcaatataaacataatcactaaaggcctaatgcatgttagctaagataaaatcacaaagtgattgtttgcattatgtaaaatcctaatgtttaatcataaattttagagtaaaaatatttaaatcatgacaacaatcataccacactacataataatcacacatgcggagttatttttcgcaatgaaaattatgttcctgctaagctacatggagtctcacacactctacacgaaacaataaactatctcctacgctgcaaaatcaatttagactcgagaaggctttttatttgaaatatatattgtgtcacgtggaccgaaggcatccattaataaacaatgagacaatcaagtatacagagaaaaaaaagcaagtgcatctcagcaaaggatacagtaagttgtaaaatatgtagccaatttgctacataccaaaaggaacaccaaaagtaactatcaagttcgttgattgttggcaaacaatgatatcggcacaaagatttatatataccattattttcataaccaatcaatgtgaaatgacaactttaagccacttttctaacgtttttaattgaatatacaattatgttcatcacattctaaacaaatgatttccgcgagaatattgttctcatgttcctcaaatgtgcagcctcctatgtgatgagccttttgcctcggactcatgggctacctttagaaataacttttgtaatgtgtttacatataactactttagtggagtacttaacccagaaggtagagttgaagcttttacacagtgaactattttagtggagcacttaacccgcaaaagtagtattgaatcaatctattccattggttacagaggaaaaaaaagttcattttacatcctaacgatattttattcttttaaactttttttcttctctacatacaagtcatatttcactttgacacatcaggagatgaaggtcaatgataattaaacgaatacactaaattccacgacctgcatgtaaatgcctctaaggtgtcaatacaaaatcaataagcatttcgtataacgatatgattagaaatttcctactaatttttattttaagactcatattaacttggtatttttcttaaaaatactgtaggatcctacgcataagaatcactatcttacatatgtatatttggtcaatttaaaaaggtgatagcaggttagtaaaaaatatatatttatgagcaattaaagtttctcaagatttttaaagaaaaaatacaatgaacattcaattaagaagggaaacacctcactttaatttaaacttattttgttagacatgttttcgaaacgaaataaaaacatgcccgcgcaaatgcgcgggctaccttcctagtttcataaatagacagatccacacttattctgtgaaaatagaagcgacgaactcaggttccatacttaagctaagtcaaacagcatccgtaatacctctcagatataggcatatatcgtgccatgaaaagaataagtggacataaaaaatgaaacagttctacaagttctgctgatctgcatctttgatttcagggattaaatgcgtaagattaataaaaccaacattgatgcactaacacgttactgagattagcaaacagaaaatggctttatgcttgaggggaataatgaaaaactacaagaataaatttggcatcccttcaacataactcaattttctcaactatgcataaacagatttagattgttctacagtaccccttcactgtgtatttaagacattgcaagttgcaacaactgtcatgctgcatcgcaaaatgagattgcctaaggaaacttggacctgttcaagtactggaatttgaaacacgttgttgaataattcaaacaatctcacagtagaaccacagagatcattgcatttattaacaaaaagagtaaaaaaaatgaagaccaaattttggaattctgatgggcacaaaaattctacataatgacatatatagcaaacatcttcaattgtactgcacgaactaggcagcaaattagatggttatcagagcatccaaaataattgccatgaccatttccatatgcgcatcacggtacaaaagcaactcctacttggcaatcaacacaatgtagcatgcctaagtgccatattttcatcagtactgtctgccgctgacagcagcaaggcaaaattcttactttcagttcaagttcgcttcctttttttccaataacttatgtcaataaccatagaatattccaaaaacgggtactaaaat

SEQ ID NO: 39943 - DNA, 1251 bp, Oryza sativa
agaaaataactgccatatactcgagacatatctacatcagtatgcacctttcactttacatagctaggcttagtgcttttttagcatttttcattgttttttattagaaaacagtttcgaatatgcgtaatttactagtcttaggaagcatcgggaatataaggtcaacgatcatcgtcctcatgatagaaattatggtagacacgtgtaaaaaaatatacatgtcggaacatgagagtttggttgttctgtgggacaggacacatcagcaccttatgtttagattcttgacttacacctgccggtggaatattggtggtaccttccaccatggtgcatcaagatgcaagatgtggacaaatatggcatttgcatagtttgcttaagaaccagaggcagatttaaaagtcactaggaatatggtagatgtgcttcctttattagtccttccttgaatactagctttactttgtgtttcttctcttttcttcgaccatcacatttgtttctctatgacatgattagtaagcatcaggaacgaaaggtcaaccttctcagtgaacgctcgatatcaatcattgcacacatattggagatgaccaggatttccttaggtgaattctggcaaggaggaatgatcacacacataaccccagcttcaaccgatggaagaagacccgaaacacaaccaatgtaaatactaatgtaaatcaaccgtgtgtacatttaatcatactactagaatactaacactacgtgcaggggttgaggcaagatttcaccgagagtaggaccaagctatgctgtttcaaaattttcaccgagtttctatctaaattttggtatatattttgccattgaaattctttgtcacgtgtggggcccaagcccaagctgcctcacacgtggcttcgtccctgactacttagtggaatgtactgtaaaagctcccacaatccttaaaacaagagataataccttctaatagcttagagcttcagtgtacaactcgaggttgggctgtggcggtgcagttgggctagtagcaaagcaaggtcgagggttgggtgaagcatcgctcgcacaaacgcatctagctagctaccgttccgacaccacttgtggaaggagctcatgtgcatagggatcccacatgcatgcctttcactttttctgtgatattttcattcccgagtaagatgtgttcgctcttcaagctcacgccacgcatttttggcccaactaattaag

SEQ ID NO: 39944 - DNA, 748 bp, Oryza sativa
tgcgcccccaccacccccactagagaatttttaagtagtagagatatgtctccaccacttcttagtttcctttctgccaacccatcctgacccaccacttctcagtcggcccgccactattgcgtccacctcgtcgatgaagacgatggctgtgtcctgtccctggcgagccggaactagccagtcaggcaccatactcggcccattgtaccatgcaagcctggtgctgttcatgccgaagaatgcctaccgaggtctcgcacacgatgaccttggcccgcatgctcttcccggcgcctggtggtccatgcaggagcactgggtgtgtcagcggcagcttgacgccctcccggagctcctgcttctgcgcctcgcaaccattgatgtcgtcgtacatgacgcccggcttgtcggtgtccgccatgatcggaaccgtggtgccgagcagccggcgatgtcggagggaaccacgccgacgagtgcgagcgatagacggtgcagcttgacattcaccgagggcttgaggaggtcgtggtggagagaaatgggaaaaaaagagaagacgatgaatctgacaggtgggcccacgtgcagatgaggaagaagactgaaaacatgacgtcgatagtatggttcccattttgtaaaatttaagtggcacggttacgaataaatgaattataatgatatttatctgaatagacacatttgtaatgacacggatcaaattaacccttttcagtttgag

SEQ ID NO: 39945 - DNA, 635 bp, Oryza sativa
attatagtcctgaaaagaaactttaatgaatcatacatttgtgctgattctggatgttatttccttccgttaagattatacctggatcatggtttgctgaatatattgaatcataattcaggacgcatttgtgctcattctgggtatgtgtcagtcattaagcttccatctggatgcattactcttggttacaacttaaaaggcatcatgatttgctgaataagttgtatactcttccaactggctgatttccagggaagttcagctcttgatttggactcattcatacgactgcagctttgggccaggtactagtcctactacctagtatatcatccatgttcctatttgcattattgtcaaggtatttggttctacaaccagaatttctggaaactagaggtctagagctaatagctactagtaagttattgcttaacgcatcatcttgcaactatctgcactaatagccactagttgtcgacaaatctgtctgcagcattcaaatgggcgattttatattggggtactattggcagtgcagctagtgaatccattgaaggctccggtcaaatatgaatggtagataatgaagctgcttcccccttaagggtcaaggaatgaccattttcaaa

SEQ ID NO: 39946 - DNA, 740 bp, Oryza sativa
gactacttgagagtttggatgtccagcatgtgataatgcaacaatagtgagttttatgtgtgtttagcataacaactatatgcaaattttggaaggttggagagcacaagcgataagcacggagggcaggatatataggctgatgtgggtgaaatttgtcgctagatgaaggctttaggttacattgttcaacgagagtaggaggtggtggaggtgacctgatatgaatagtggtgagaaagctcaatttgattgtcaaatgtggtatgtggagtaagcaaaatagaggttggttgtgcaaccgcgatcattttggctcaaccgccaaccaaatgcaacagtaacatttgtgtcgatctgattctagttatgtgattttggagccaatactttggagaaaagatgagtattaaaaaaaactttgcatgcacattcaatctgacgtcaacatttcgcttttggaatataatgttgctttactgagcattatatttgtgtgaatcgtttgtgttattgtgtacattttgctttgagcctaaattcttccgttttagttcattgatgaaccccaaaaaagagagcagctactggacaattaatttatcaagtactagtattacggaactgctattttcaaacatattactgtataccatgctaagcatacgtgcctctgttatactagagttgaaagtttgtgatgttcatagatctacctcccatctctgatgtccatgtaa

SEQ ID NO: 39947 - DNA, 713 bp, Oryza sativa
tgatcaatgattcgatcctctccttaatggatctagctatgaattagagggatctgcggtgaatcagggacgggacggggtgggctagcttccgagttcccaactatgaacgtggaagtatatatattgtgcgatgcgcgccccctgcggcttccagcttcctgtgtgtacgcgggatgcgcgcaaataatttcatggaagttctccgttctgaactttgacgaagggttaagattaaatggatgatggataatgaatggttaggatttaaaaatgggtgggaaattatttcccttagacatttgccaaacactgccaaagcgtcggtgacgtcaccctccatttatgtccctccctctattcgtggtatgtgtcgttactgctgtgattatgatggtgatgtttaatactataatatctaatctaatgttctttgtgtatgatccatggtggtttcgtgtaatctactgttttttcatgtattcatgtccctgtgatgtttaataaattaggcgggtcgttaaagtatgcagtagtactcctggttcctgtgattgccacaacgaagggcctgtaattaatttcttttctaattcaggattctggattgtcgcgggcatggtttccaagttccaagctcctaaacaatgtgttttgtgtaaaattaattggtaaagaaacattagaaacatcacatcaaaggggctgcagga

SEQ ID NO: 39948 - DNA, 795 bp, Oryza sativa
gtcaagagatccaccaacgaagaataatcgtgcgagacgtgtgatgcagcgatatttttttctcaccgcgctccaagtcctacctctttttttttactcacctctcccacctacctctctcccagattgttctcttcaccacctctccctcaacctctcaagctcgaggcacgactactaataggcggcaaacagtggcggagctaagtttggaggagaggggggcctcagccttcttcttcctcctccagcccactctctccccccattttcttcttcctctccctcttttccccctctcctccctcaaatttccatggagtccagctgggtagcgggggctcgagccctccccccttcccccgcccccatactggctccgccgctagcgacagatccagccggcggcggagctcgaggcgcggccgtgtgggcgacagatccggtcgacggcggagattgaggtgcagctagggcgacggctcggagtgtggtggagctcgaggcatggatccagcagtcggcggctcgaagtgtgacggcggatcctgggcagtggctcgatcgtgggccacggatccggccgacagcggagctcgaggtgcagctagggcgacagatccgggcggcggcggttcggagcgtggcagagctcgaggtgtggccggagtgcgacgacggatctagccatgcagctcgggggacgggcggcagcttggattgtgggcgaccgtggctccgggcacgggctgcagatccgccggcggcggaggcttcgggagtgggcggcgctgc

SEQ ID NO: 39949 - DNA, 725 bp, Oryza sativa
aaaaaaaagagacgagaacaagcaaaagatttgcttgtcttttgtacaagtagagaatgatttataatctgcacttccatcactcagaagaacagcattccacctattacacagtacaaattttaaaagttgaatgttttttccgagacgcattatggtatttcgaaggtaccaaatgccctttatatttctcctaacacctcctctgctctggttctgctatttctttgtttgctcctaaagtcctaagtttgtaggaatgcctctaggccctagttcctggccttgggttgccatgccgctattcatcgagacaaaaaaaggtcatcttgaacaattcaacattacgagatgttctcaagcgttcagcaataagtcaaaacgtggacactaactactatcaaccacagcatatcacaacaaaatatacagctgaatacacagcttttttacatcaaaacaaaaacaattatagatgtaatacaacagtagggagataagcctattcttagaagtttaacaattagagtatagtgtgtggattgacatgtatgagttatcacgtgttgccccgaggccatttcacatcaaaataaacacatacagttcacatttcataaacctatcaggcaaacagataaccatattcatgtacgaaatatggctgcagtgctgcatcattgggtatagaattttagttgatctcaatgtcttgtaaaaatgga

SEQ ID NO: 39950 - DNA, 753 bp, Oryza sativa
gcccctttttttagtagtgcttgttgccaggctttacataggctatcttttccttgttatttctgctcattagtttctccttccattttctctgacagagcggataccccataaaattaaagaaatctgatgatccaaggaagaagaaactacaaagtgagctagcgttcatacttcataaaaggactgagactgagttctttccccaacttttcaatctagatcacttccctcgttttccgtgcgtacgcttttcaaactactaaacgatacgttttttttcaaaaaaaaattctatacgaatgttgttttataaaaaaccatattaatctatttttcaaaaaagtacttaattaatcacaagaaaatacgtcactctattttgcgtgcgcgagaggtgagttcccaacctcacctcccgagcacagcctaataggttttatgaaactcacactttcttttaaagactgtgcacatgcacctgattctctgcactgagatttaagtcttccatgtattctgaatactatctaaacttaccacgtatcacataaaaaatagggtgtacagtactaagcaaataaacaacttaaacaagcctactgattactgaacaccggtagaagaggaacaaggttttgcgcaggacactgcatgtgtatagtggtgcgcacagagtaaatcttatactcccaaaatggttcctagtgctttgcatgttgtattgtaatatgttttcttctagttttctgt

SEQ ID NO: 39951 - DNA, 660 bp, Oryza sativa
cctgcagccccaacaatccgatgtgacagttactgaatcctaagttctcatcacctacatgctaggctttatgcacctaggaaccaactctagcaggtggatgcaacatccatacttgtagacgtagagaaagaccacactactagaaaaacgatttttcatggcattggtttataattttcgctggcggagaaatgccaaaactaccagcaaaattgtaacgagggggtaaaggacaccgaccgccagcgaaaatggatcttcgctggcggtcgcattataccagccgccagcgaagatatgtctattttcgctgatggtcacttaggtgcgccgccagcaaagatagataattttcgctggcggttgtgtcatacagaccggtagggaaaatacaattattttttctggcggcccacttaagcaaccgccagattttcgctggcggtagaaggaccgcttgcatagatggaccaccatctattaatattgaccacgcggcccaccaccaccaccaccagtccaccacccacccgccccctctctccagctcccctcccttctctccctctctcctccctctcttctccaccgacgactacgctaggcgggtgcgcggcggcgacggtaggcgggtgggcgacggtggcgggaggtggc

SEQ ID NO: 39952 - DNA, 752 bp, Oryza sativa
agataaaagatgagagagaagagaagcgggctacaaatctgtagccagctgcagcacggactataagacgcaatatgtgtatgacgggtgggaccatatattaattgtatagtaagcaactactgtattaattggctattagattggctatagatgaattggagctattagtgggctatactattaaacttgctcttaggtgtaacatggaggatccctataggttgtgtgcactgtatgcatgactctcttggttgctacactacaatgtttgacggccacatctgtcctttttggaagctgtgtcactttctcttttcttggaccatcaaatttttttaaatttacggggtatataatagggttcgtaggcattaggaatgcagggtcgagcttgcaagtgaacacgatatcaatcattccacatatatatagtaaaagtagtaaggcccaccatgattatctgctaggttgtgcatcgagagaatggaaggtgaaattggtgaggaaaaataatcgaggagggagacgagtaaaaataaaaagtgagagagagcatatattcctaaagcctgggaacaagagcattatccacaaaagagatatgtattgagtattgtctactgatgagatggctatggggttaaacataccagggttcaatttgtgaaactcaatagatggatgacatagttagagccgtacataattccaatcgattttgctatatatttatcgaaaaatttttctct

SEQ ID NO: 39953 - DNA, 653 bp, Oryza sativa
cgtggtttccggcggcccgctcgggcagcggcgaggtggaaggagggcggtgggggtggtgcggtggtggcggctgggtcgcctcccgtgtcgcccctaccctgggagtgacgcgggggcaaagggtttggcctagcccccgagagaggttttcgcagtgaggcttccttgacgacatctccagtgagaaaaacgatgatgaacaccgacatcgccatccgtcgagatctcaaggagaaccaagacaataggttttctcctggtagcccacctgaggaagaggggtggctcgacaatgccccaaagatggaaaacaatgcctaaaacaccattgttgtcgacctggcaagaccaagctgggctttactatgtcgctcggtccatgaagacctgaagaaaaagctccaaagctccaccacctaccatcctctatcggtacatggtcaccactgtactgacgccctccaccagatagcctcaccgacctctctttcgtcggccctccgcgccatcgaccggggcggcctccctgccatcgcccgaaccaacctcctggagcaaccagcatcagccttcctgaaccactgacgccacctgcgtcgtgctagcctcccttcgttccccgccggatgcccctcgtcagtcagcctcag

SEQ ID NO: 39954 - DNA, 731 bp, Oryza sativa
aaaaaaaagaatttctaggaacaaatctcgacaagtatatttctaggttaatcctaagaagttgattttttttatagagagtgtatcttgtaaccccccaccctcaatgcacacactggtaactagttctttgcgtagtgtacagttgatttttttttttggaaattaatcttctgtaatattgatccttcataaatctattgtttgctctttttttttttgctgatgaatgagctgaagatggaacagttcaggcacgaaacaaaatgtacacaatcacacaaatatgcgtaatgctcaggaaaagcaacataaagttatccgtccttaaacaatgtaacaataacccttgatcaaattctaaaaaaaaaaccttgatatagctaccaactccacaccccctttcgtatcgttgatggacaatgcgtcacaacaatcgaaggcccgagacatctgcttagctccagtataggccctaaatcttgatgaggtttggacgtgccagttagtttgatcctgctactaacaagaataatagaaagaactgaaccaataaactagttagctaatactgatatagtgtggtaagtgtaagtccgaaggtaaaagcatacatttgctagagatctgatgcaagtagattcacatatatattgcctagttagctgatacatcccgatgaacgatgaaacattgcacaaaaacctatcggcttactaatataaaactta

SEQ ID NO: 39955 - DNA, 714 bp, Oryza sativa
taaaactttggtactgcacaatgcttgatactgtggtttgcttcaaacaaaacaataggcctagcaaccctacaagaaattcagtttaaattcggcgacaaaaccaaacacaactttatcaaaattttggaaatgcccatgatttgctgactatttccatatcaaaactttactatgcaacaaccatgcatgtatatatttcgcttcttttcttcaactactgccgactatatatagatattagcattcttggatacatgctagagcaaaccaaagttaggagtactccttcgagtgagaaccaaagtaagatctgcaagcctctgctcccattgctcgcccattaggcttttgctacttttattgaattcaagatttgcccataataatcatgtgtatacattttttgggatcatgataaaaataggtttaggaggtattcggaagcttgaaacacttgtggttgatagcacagtagatggacatgcctttaccaggaggatccttctctggtttgctatctccatgcaagtcagacctcctcgcaaactttgaccccatctacgatctgctgtgagaacaaccatgatctactctgcgacaaactccaggcagaacgtgctgcaaccatttttccaagaagctaaagaggtagacaaaactctgaaattggggacaaaacctgaaaccaatgacctccctgtagaggcattt

SEQ ID NO: 39956 - DNA, 670 bp, Oryza sativa
atttggaaaaagtggcaaacacagattttaaaatataggaaaagttacaaagcggagaaaataatactgaatcacattttcaaattttgttgagaaaaaaaatcctaacccgatacagtttagcacaggcgcgtcaagggggttatatgtttttacgatcgcagtcctctatatacattgaaaaaatataaatataaaataatgataacaaaaagtgcatggatgaaaggatttcataaaaataaaaataaatcacatttcgggtaaagacgccatgtcagcaatatttgttatgctcctacctcaaaaccggaagtactattgtcttgttatcgtatcaaatccgacttcagacaaaattgcttttgaatcgaaacaaatatttgttggtatattgtggcaaagacattcctgtgtgatgtgcatcctaaattactgagcaacatgatctgacttcatcaagagctcttccgtcaagatagtacttcacttggcaagaaatctggattgggaatcgccaaaaaggaggaggagggctggagaggaaaaaaaaaaaaagaggcattcaacttgaagtacaacgtggttgtgcgcttgttgacttaatgaagacaatacgcagacgaagggaaaacactttaaaatggttaatttgagaggagagaggagc

SEQ ID NO: 39957 - DNA, 519 bp, Oryza sativa
aaaaacaatttcaaaatgagataaactctgtttatacaattgtatcttattggccgatcaccttccagaacatcgattgatattgatcagaaagttgctaaacagtaaacagcaacagttttcacagtgatttcagctaataaagtatcactcactgtcatgaccatacgttaatctcgacgggtttatttgacattatacaggtaccttatataatgacatcgttatgtgatagtttatacatattttccagcttcacacaacttttacatatttacaatgctcctacttatgtatagccgaatttgcatttatagtcgctgatccgaactaatgtctttcgatctacacgttcgcaaacatttacaaactttattttcaggaatttaagtatttttcattattaaacatcatttgtcatgatcaaaaagcaagtatcgaatatttagaaactaaaatccaaatatttcatcacactatcttaaactaaaggacatatgagcattatccatccatgcc

SEQ ID NO: 39958 - DNA, 1233 bp, Oryza sativa
  unsure (1)..(1233): unsure at all n locations
gtccaaagtaacagaaagcttatgtttttttttttcgtgaaatgaaaaaattattcattactgaaattgtttcaataaaatttagaaaattttggtaaactgacaggccaggaagcaaaatacaataatgttcaaacatacatgtctttctcgtgggatgggctgtcggtggccttgtgggctgtatagccggtatgagttataaccatgctaaacataaacattaattgtgtatgcgaaaaagaaaacaaagactctatcattcatctactaatgatttttgtaaaagtatattcatattttcttcttgtttacataacatttttttgttcaaaggtgccagaatanaaaaaaagccaaatgtaaaatctttgcttaatatgattaccctcaagcttttaaaataatacacgttattacaagtcaaactttgcgtatcattactactaagatcacaaaattacgttatattcatgactttaatatggatgaaattttacagggttcgtgcatcacatccgcttctttttattagcatgagcatgtatacatccatgcatggtatatttggttttaaaataaattgagaggaatataatatacagtatagatataaacactttgctgtgccttttctggtctgcctaagcgtatttcgggtaaattaaggtaatgcgactttaccaaatatctgatgtcgaatatattacttgaataatcaagtatccctgaacaaataaatacaaaaataaaaaatttagggggatactggggtgataaagttcggattttaaatttctatttattttttgataatacgcaaaatacacaatatcttcttcgatcatttatcaagtagttattttgaaatcatgtttgcgaacgatcttcagagaaatacgtctgttcacgtgagataatttgatccaaggggtaaaatcttcacaaaccaatatgaaattcatatttcaaaagtcaggctttatcttattataccaatattcgccattccaaaacggaaggaaataaaagtttgagggaaagaaactattacgcatgttaaataacttcgaggattttttttctggaaatggattacgaattgaatgtatatgatacaagcattttcttttcatcataagttgttattaaagatacctttattatgtctttctttgtttttactttatttgatttcgggggtcaacattaattgtttttcagtaccattcc

SEQ ID NO: 39959 - DNA, 672 bp, Oryza sativa
aagaggaagaagaaatcacaaaacaaaagttaaaatccagtttcgtagcaacctccacattttgtttctggcataagcacctctacgtttaagttggaatgctgcttcttgacggaggcgccactctcttgtcagtacaaaagtcgtatactagtctacaagcacagactctaagttgacgctttaccacaattcctaaagccttgaatagagcctagatctgtcagtttctggatgtgtcaggagcggctaaagtacagaccctattttagtcttatagtgcagacactgagcagtgtttgtgggtgcaaaaatagtcgtatgcagtgtgaagaaataaagaggggaagagccctgaagtagctgtaatgcgatcccctcactattactgaccagtgagcaaaaggccatggaagtagaaaaaatgatgaggtagaatgcactgcaatgatcatgtataacaaaaatatgggggggggggggggagtgattcattcaaaccataggaatatgaaaggaggatataggtggacaaagaaagaaatcagaatcgaatagggctccttgatatgccggtctgttacacaatggattgctaccaaatttaaattacatgcaaggaattttaagaaaatgttttaatttcaattttgctcgataacgaacgcattt

SEQ ID NO: 39960 - DNA, 516 bp, Oryza sativa
cggccataggcactatttgaaatttatcaaaatttaccgggagcaccggtaaatttttatattcaatttttcacgaaaacagaagtgttttaggggctattttttttagtgcttataatacatccacaggggcatccaaatatatcaaaattgtaaagattcactatccacccaattttcaaaatctcacaaaactttgtattacctttaaagaaaaaagtatagattagattaaaacatccagataaagcctgaaatatttcattcggatgtatttcattcttattttttacatttgtaaggcataatcagagcccagtagcaaagaatgacaacttcattaaattcccattaagaagggcacgcgcctgctaacgtatattatttattttcagataaggtaacggcaaacactaaaccgtgaatggcatggtgataagctttatctcttagatattgaagtcctacaataatactcgtatacatcagcaaatacattgataaatcatttgtttg

SEQ ID NO: 39961 - DNA, 1399 bp, Oryza sativa
  unsure (1)..(1399): unsure at all n locations
acagttttagaatagactcagttagtccaaaagtctaatcattgctaaacgtgtaggattcgaattattcaaacaggaattatacaggttccagaaactgtaagtagaaattgtgactagacacacggaatgattggtaatgttagataaatgaaataaacatctgtatggacacaaccaaagtagaaccatcttgaagtatattgcaatcttagatgaagccaaatgttttccttaacaggcttgtccgtctttcctcatacattgttccattctagtatttaccatcccacatcgagtcaatcattcgctgaacaaaaccgaaaaggtcaaattcgaaatattttgaaagatcatcgtcagccgcaaaattgaataagttattttcctttcttttttctatactttttgtcccatgcagaccagcgatttgatgatgtctgtgagaattgtctgtttgaataagaccagaagtcacccgttcgtttatgaatcccgaaaagtgcttcatttatgagtcgacctgtcgaagcaatagagtacgagtataaggcctcaaatgaaaaacgtgtacatgtagcagatattaacagcttcataatagtgcattagaaaagtgacagagggcagagtttacttgcacgcaggctcttcaaactagaggaggcagcccccttaacctcccccattagaaaaattgtgccgatatgtgccctcatgtccagtagcgtatagggaaggtatagactagggggggggggttacttgaaatgcanaaaaacaagctcatcgaatgagagtgaggtgtcaaaaaggggcggatcatctttatttaaagggtccctccaccaatcacaatttgtcgttattcaccccacccccccccccccgaaactatgcccctgtgtatatgctcntgatatgtcatccataacgaactatctggaatagtttgataatgaagaagtttggaaaatgatataaaaacaggtattaaaattgaaattagacacttctctctatacaacttcaacttttggcctgtgaaaaaggtaacgaaatctaaagatactgataaagcaatatgtcttgattttattttctgtgtgctcgttttcgtttttgttacatttcaatatttttgtgtttgattgtttatttgtttttaagtgtatgtgtgtttgtttgtctctttaaatacgatgtatgcgtaagatctgtataatttcgtcatgacaaataatatatttgagaggaacctcactgaaagatgttcgaggcaactatcatgactatgggattgtaaacaaaacctcaatgaaatccattacggtggcatatgtttgttattttccacaccactgaattctgtccaatccaattaaaattggatgatacc

SEQ ID NO: 39962 - DNA, 553 bp, Oryza sativa
tacactaaatacactacccagtagatcagcggcaatttgagaacaaatacctgatgatttgtaaaaaattacgatgatgcccggtgattcctcatattttattgcgattgatataagaggctcgaatattgctttcggcgaatgacaataccttaacgatttatgcgcttattttacagacaacgactgcgtgagtcactgaatagatttggtagtgtataaaaaggtttgttgttatcgaaacagtattttgctgtaattatgcaacaaatgataaactgagattttcatacattaatgaaattaatgatgatgtaatgatgggattactatatatattgacgatctaccaatgtaattgcttttttttgtattgttatgatagaagagcgtggttgaagtttattaaatatatttatatcgtagtaaaatacaatcgtcgacatttgtatcagtagctttttaagtaaatgccttattcactagacggcgttgattaattaattagatgaaaggaataagaaattaaaatttaaaattaaagatgaggaaa

SEQ ID NO: 39963 - DNA, 604 bp, Oryza sativa
cttctcgtgtattgttttgcatttgctcgactatttgcgattgaggatttcagtttgactccgataatcgccacattttatggtgagacagggccttgtccgtatttaaagagaaatatattacatgttacaattttaatgaagttgtataaggccagaataaacgtcccagtcggtaccctgtgcctttataatactactttctatcaatatatttgaaatgagcttactgaatccaatgaaccggggtaataatatatctgtaaaagcgctaggcacatcgttggatcggtgtattgagcgctatataaaaaaaacagattattattattattattaatcattgaatttgattggatatgagcatcttcttaaataatcctgtggcacctgttttatctcgtaattaagctcatcaaaaatttgtagtggaaaagtggacaaaacttttttaacacgtgaaacattgctgttaataaaaagaaaataaatattcctatgactttgagaaggaatcgccaaacacgcggagagctctttcctgcccgtcaaaatgtaattaattatctttaccttttttttgtttaacagagagaaaaattat

SEQ ID NO: 39964 - DNA, 537 bp, Oryza sativa
cacgccaatggacgctgaagcaaatggcaagatatcgcaggtgtatgtagtaaacgagtacctggtttgaagtcattgcttgaagtaatttcttgagcatttctgggatgaatatgtcagaggtttaacagtagattgtatcatcatcctatggccgtggttgtctacagttaatccatcaatgcaaaaacgaaaaaacaacactaatagcttaaataaaagtaaatcaaccaattatggggattgttatttaatttcctttctgaggacttttctcaaaagttcatttattatgggttctatttcatatagctgtacttctcacaagctctttcgttattttgttgaacgtatacaatgacaaaattcggcttttttcttcacgtatgatttcatacgttaccggggtgaagtaatttattgatgtgtagctttgttttatatgcgcaaacttaactacagaaaaaaacataaatttgtcaatgtacaatctgatatgactcgagtataatgcagaaatcttgcagttatatctct

SEQ ID NO: 39965 - DNA, 1135 bp, Oryza sativa
ttttttttactttcacgtgggggaaatcggccttgcggggtccaccttgagctgtgtctgagccgagactttcggcgcctaagccgacaaggatatgcactttagcacgtttccttgcgaatcttatatattcattatcaagacgaaaggttgatgatgaaacgtgaaataatcgactataaagagaacgtgatgcctccgataattgcgtgttcacagtgcggtgcgctttcaaaggatcccccatttgttattaaatatcttcctatttagaggataatatccttctccgccttcggtcggacactcaacggtcatgttcgtgtctaccttaattttgaaaatctcattattgactctattctgtattctcttgtggcgtatatggcattacgattcacagtgttatttcactttatagatattatacaactttgtgaatattttgtttattatatcgaatctttcaagaagatagtaataacctttgatcagaatgttaagatgtcacgttaccactgaacgcacaaagcgttgtgtaaaccacattttcacattcattatcattatggcacatcctccccccccccctttataaatcctgaatctgcccctggatcaggtggtaagtaaaaagtaatttatttatcccgggcaggatgtaaagtccaaactgtaaacatgtgtgtatgtgtgtgtgcgcgtgggtgggggtatgtgtgggtttgtaagacgtgtgaaacggggataatcattatgtatacatacatgtaccttcctagtggggatacactggcactatggatttccttagttgataactttcttatttttgaaagagttccaagatatccacatttgcatagtaggacgccacattttcgagcactactttgtgtatcatctgagattttaaaattttgatataaaatgaacagcgcctcgtaaactcccacataaaaataggtggctattaaaattcttgttattctttgaaaaaatgtaattttattcatttatctggcgttacatgcatcaaagaaaaggaatctttgaaaaaacacctcaaatactaatatatcctatttcatagttaaatatagttcaagataaatatccccatttggcacttttt

SEQ ID NO: 39966 - DNA, 1150 bp, Oryza sativa
gaggataagaagaaaggacctaggttaatgagggttaagaaagaaaggggaagaaagaaggagacaataagattatatttgaaaacagacggtattggaacctaataaatgataagaagcagacagataaacaagtgaagagaagacaactgataagaaaatgagacaagagagaagaattgggaaaacatcagcactacaaaatttcaatttcaagtgaagagggcgcaccataaagtcaattccaccgctcgcccgtttgtcacgccatttacatgtacatgtaaatgacgacgtttttaacatgtattccagtatgccatagacagtgatagatatatacgttgttttctctttgtttagtctataattcaaaattttggcgtattaggtgagaggaattaacaatataaatggaggcatgtgtgatttaccattgtttcattacgatcctaaggtctaatctaaatttttaataagtgttttgggcggcacatattcgtaaaatgtttattaaactttactctatttaggatgtatgtaaaatagttattatttgactgaagttcgtgtttctatagccacggataagtgcagtgccaactaaatgcagagagttggaactccctgctagagggaagaaaaatatgggacgatcgtcactccgtttcagaaatcatgataattgtcttgaaaatcaaccccttcacctccttttttctctttaaaaatcgatgacaataagcacaatggtggatattaaaaatcattctctagtgagaaattataggtactttttgaaaaaatggaattgaacctacggcgccggcacggagttaaaatgctgtccgggatcagacctctaagcccaattcaaagttttcttttacaatcaccaatttcaggagacgacaatcgtaaattttatgcgggaagctgtagaaatgtttcatgtcccaattaactcgaatcatatcgcgagaccgactctgttctcttttgttaatacgagaagggtgtgtaggcacggttaatcggactccaatgggtgcccattttttttttgagtggaaaatcgcacctatttagaggataaataatccatgtttgttgaataggtgcaaagcagttcatggtcggacaagagccc

SEQ ID NO: 39967 - DNA, 2132 bp, Oryza sativa
  unsure (1)..(2132): unsure at all n locations
tattaaactgttatatttttttctacgacgtacgaaatgatcgcgagggatgacggttgcatgcaaaataagcaagtcatattttcgacgtgagatggcaagatttctgtagttgatggagaatattggaaggttaagtaatagaggatgatatccaatatgcaaatggttgaagatgaaatttcaatattctgttcaaacattttcattataaaaataataagattctataaattaggaatttaggaatttgaagatctgcttttactgagacgggcatggttttagaatcaaattctaatgctgtattcttaaactgcatttcaaatgagatgttaaactaataacacataacaaattataatgtattatacaactatagatttgtatagacaaacggtttggttctcaagttcctttaatcaaagtgatgcaaaaataagcccatcactgcagtaacagtgatgttatgagcatgccttcattcaccaaaccaaacgagaatagcatgtaaacatttaaaggtattacatgtatttgacatactcanagaaatcaacgtgtttgaattttgcttatagggatgggggggggggacatttcggaaagttactttggcaatgattttccttttaaacgaaacatcgctcattttgttggtctttattttatttatatcattattttaagtattggcgtttcaaattaaaaattccgaaaatgataagaagtgaccgtcatccattgcttgctgcatttgtggaaaatgctctgactcgaaaaacaaaatataagacacagagggcttcgtcagtttatggaaccctttaaaattgaaattttcaattaggtctttcaaaaaaaaatatggtggggaagtggggtagggtcaaggtgataaactgtaaaagccttacgtaggatgatgccttgtttgttagttcacactgttacagctgaactcattgcgaccacgtccatgaccgacatttacaacccaagatggtgtgaccaaaagtgaatgcatttcaagaatacactgagggtgggtccgtgtgtcttaactgtcagagaaaatatctcattagagggatttgggattattatcaacgcaaacggagatcatttatgtataaattgtgctatgttattttcactatgtttttttgtactggacatgctggaaggtattattgaagaattttgacaagaaaaaatatggcgatttagtgttcgtcttggtatccttattttcataatacgttcatagtccctttaagttttttcagatgcaattatataaataaatttcctattttgagtacttgaaaccgattccatatcacctttaaatgtactgttcaactcttgaaagaaaacatcttgaaaaaagcaccccaatggatgattgcgatgacagtgatatggaatatcaaacaaatttactttctgatttacggtgatgtctgtgctttaggaaattcgatcacccggttaaaattgaatgaaacactatgctttatggggaaaaacattaacttctcttaataaacgttggctagtactgttgaagactcggagatggttgtattaaatgacaggacaaaattgtttaacggtttttgctgccatgacaactattttagatttgggagtttcaatgatcacaatataattgataaactaattaatctatcatcgaattcaaacacttattttatctcagatcattttttaatgtttctcccctttgaggatagggtactttaagttcatccggaattacataaaaagcagatggcgccaaatgggaagttgttaaaagtagattaatcgtaataacgtcagttgtcacgcgtgggactacgatggccggtacgtgcatcccatgcacaagaaatgaagttagtgcctgaccgttggttttggtcacacataacaaattaaaattcaggcctgggccattcacgtctcttacagctgcgatgagcaaacagcagaacggcgaaaatgaaaaaataacgagggtcagtgaccaagcccaagacgatttccacgatgctgaaagaaaataacagtccttgtcagtgtatacaatcagagtctcggttcacaataaatgcaaacaaaaa

SEQ ID NO: 39968 - DNA, 611 bp, Oryza sativa
cggatttaccccttaaagcatgttaagagggcaattcaaacaacatatttgccccagcccacaaaaatactcttcccctggttgtccctttcccccttggtgtgtccgccagtaaagccagtgagtactgtagtcagtgagtttgtcccaataaaccctgcatggcacggctgggatactatgacaagccacacgggggaatatcccacaaagatctcggtcactcatgggcgtgcaaacaagatcaagtccgtctcgtatttgttgatctttatccaggtatactgtactgggtactagtatgatttcactatgtgtgctttgcaatatggtgttctgagggagggagggagggagggagggagagagagagagagagagaaagagaaagagagagagagagagagagaggggggcgggggagaagggggaatgatagagttataaaaatagagagaaagaaacaaattggcagtgacggagagaaataaagagaaatgtagagaaagattgaaaagtagagatggagaacgggatagggatagaaatagagacagagattttaattaaagagagagagagagagagagagagagagagagagagagaga

SEQ ID NO: 39969 - DNA, 519 bp, Oryza sativa
  unsure (1)..(519): unsure at all n locations
tcctgcctgactctttgcctgcatgcatgccgtcaaccttgggggctccagttccttatatcctcgtcgtttccatgtttgcatttttcattgcccaaatggcgtatcccccccccccccatctctctctctctctctctctccctcactcagtctgaatgcagactaatgcaaaacagttactagtagtaataattaaagcatgcaacatccataggtatacaattaccgctgtaagttccccgtgataggatagtaaatccaaagtatgagaagggtctgtttattgcatacctcatccactgaatatcgatgcatacatgcatatgtgtatgtaccggtttacaaatgtaatggcaatcaattgcaaatccccaaaatcaagcgtaagtcttgcgattaattgcaaatttgcaattgatcgcaacttaactttctggcaacgccccattantaagagagagagagagagagagagagagagagagagagagagagtgggggacaataaaagctaga

SEQ ID NO: 39970 - DNA, 598 bp, Oryza sativa
aaaaaccaaagaaaacaaggatttatcttaaaacagggacttatcaatataattatcatttaaacataaatttagaattaatcgattaaaaatggaccatacaaaatacgtgaagtatcttttccaaaaaaatgaattcgatgattttgcacaagcttgatttattttttaaccatttcaaatgagatttgtttggttggtccaaatggggcgtttatgagagtagaacacttgctctttgaaactggaacgccgtgacttttgttgtgtgttgttttttgaatatatctaaccgccataataaatgtatattagagcaaattgaggaactgcataaatttagttagtattacctgggtagcatgaattaggactatttagtcattcttattgtaatttcttaaagatactatgtcccttttgcagccaacctcaaatgctgtagaactttgcaggaattatgaatatgtcatgtatgtcctatctgtgaaatttaaacgttagcagtgtcctcatattcaaattatgcaaggaaacccgtttacttgctagacttcattgccagacactattgagtgactgactggctttttttctt

SEQ ID NO: 39971 - DNA, 608 bp, Oryza sativa
aggaaaatcgtaacgcaaagtgaatgcaatttcttttcactaccgtcacttcgtgaaaacagcgacgaattatgtacatcaatttcaaatcacttcactttcgacaatcacatctgtaatctcttgcctagatttttcttggacgttataacatgcatttgttaagacaattaggagttgattgaaatatcaaaataaagttattcagtataatacattcaccgtaaaaagtaaatacggtaggtcatatacaaccaatttttgtcgatccgatccggtcttttttataacttcattttaaacagtgtatgacatatttcagactattatcgatttatcagatccaatagcaacgatcgaattttgtgttacctgattatttactaagccatctatagtgtagacagaattttcaacattttgaaaccgattttattgaatcgttaattttccactggtcgcagatcattatttacataggcgaaatgaacttgagcaaaagtgaaacattctaaaaatagtacatacaattgaatcgggtaaatttattaatcatgataacatctgaaattctgttgtgaaacaataaggaattgtgaactccataa

SEQ ID NO: 39972 - DNA, 690 bp, Oryza sativa
ctagggttacataaatttatggcagcatattcaggattttattccaatagcgagtttgaagtttgtgcatcatgtttcgtgtctatgctaagttcacaccaatggtaagtttgaagtatggttcatctcttttctatcgagggtactacatgatgttgtttggagattgaagatttttatggaggacactacggaacgggtgcccgatttttggagaaaaaaattgggccccctaagcatgcatgcaatcttttcttctgggaaacctccacatgcatgcacgcagtcatttcttctcttccacatgtgaggtacatgcaaacttctcccatccccttgtctcttctcccatactcttaattagcaaattataaaccattttttcttatgaaatacttatccaatttgtgattcaattgcaccattgaatttgttgcaattaaatctttacaaagagatctcacatgattatattttggagaaataaaacatatgtaattatattactaattgaaacatttttattataagtgggacattgatttgtgacctctaaaacaatacaaaatatacattgaaatattgaaagaacaatacgtgcaagatcctaaatgatctagtgaaacatctgctgaaatgtccaaaaaataccacgtgtaaaatttcaaatgagctagtaaaatacccagt

SEQ ID NO: 39973 - DNA, 521 bp, Oryza sativa
aaaatttcttcatggtacatatggactataatgtctagtcccggcgtcccagaaaggaggacgttctgctcctaaccatttgtcccataattcttgacgctggcagcctggcagcctggcaggcactagcaaactcctagacaagcacacataaaaaaaagggtaaataaaaaaaagaagtggggccatctaaaacagtactagcgaactctttcttctccaaacgatttttgctctgaagcgctaccttatcctctcctctcgtattctcttcttccccatcgctcgtctctcgttttcttctccttccacgccgcgtcttccacaccagcaccccgcttctccctcccatcagcacaccgtaccaatccccatccatgccccctcccccacccccagacgagcaagccatattcggtgtgcgacaacatgctcaacggccgcggacacactgagagcgccatctcagcaatggcggaaaccctaggggttgcagcggcggcgaacctaggggctatggc

SEQ ID NO: 39974 - DNA, 588 bp, Oryza sativa
ttaggggtcctgtccttcattgcacttgctaagtgggggggggggggggtaaacgtcaaagaatatggcacagcatggtagagaggtatggaataagaaaaaatgaattgtaatgacaataaataagtgaattttattatggcccgcactttttaattcgaatttccaaaaccggaaaacaagcgagctgcgggtaaatataaacgttacctccaagaaataaagaaaaattgggcaattgggtcagagcatacaatgaaaacatgactcttctttcatttatctgggttatgcattgaaatccgttgtgcgactcttacaaagattgtcatcatctgatggaattcctaatatttactcacattgccattgttgtgaaggatcaaagacgagagaacgaacgccaaaactctttaccaaattagaaacggcaccgctgaaaaacagtgcaggcgcacttgactgcatcgtcaggcgtgacatattcaaaacacgtctcgtcttctttgacacattacaatatggggttcattgtattgggttggtcgttacacggtttgctctaaaaatacatgcatctataatttg

SEQ ID NO: 39975 - DNA, 660 bp, Oryza sativa
caataactttaaaaatatttaggtttaaagaaactagaaaaacatatatagatttgtctttcaaaacactataataaaaataaacatgcatttatttattgtatatattataatagaaaaataaggtcaaagttatatcttatagaacgtgtcattgtccaaagcgtcaattaaaataaaactggagggagtagatgcttactacactattaataactggtcacacctatcatacatgtattacgtcttggagtccgtgctacagctgattataaatctgtaacccactgctcttctctctattcatttatctctttaaaatatgtttatagctagcttataatctgctactatacctgctctaatataacacctaatggttaagatttattgtctccatttaaaaatataaacgcttttagctgtgcagtgagtactgagggagtaacatttccctattacctggaaaagaccctcatgcatacacataatcacgcgcctacatcacacacacattaaaccttatgatttgaatgcaaggcatcctataattctatccactagtagtattcaaacttctaaattagactaaagcgaaatctgttttactattcatctgtcagaaaatgtattttataggttgtttagtatatattaagg

SEQ ID NO: 39976 - DNA, 549 bp, Oryza sativa
tcctgcagcccgctactactactatattatccatttgcactgcatttcaaagttgggcatcgctttaccacaagcgctcagattgtatacatactaatatatgctactcttagaaaattaagggcttatttagttggtgaaatgaaaatttttgggtgtcacgtcggatgtttgaccagatgtcgaaaggggtcttcggacacgaatgaaaaaactaatttcataacttgtctggaaaccacgagacgaatcttttgagcctaattaaaccatcattagcacatgtaggttactgtagcacttatggctaatcatggactaattaggctcataatattcgtctcgcgatttacatgtaaactgtgcaattagttttttctttttatctatatttaatgctccatacatgtgtctaaagattcgatgtgatgtttttacgaaaagtttttggagaactaaacagggcttaagtaaaactagtcatgtagtctctccttttgcaggacttttgatctagtttaagaacttttgtatatgatttgttagtta

SEQ ID NO: 39977 - DNA, 578 bp, Oryza sativa
aggagaaagaagacaaaaatggtgacaatgtataatgagttgaaggcagcatgtgcaagtgataatgagacatgtttcgccatgggacgtgggcatcctcgggagagagaccgggtccctggtccccggtgtacccccgtctggtagtaacgtcgctataggcgtgaaatatcaggcctcgggtaaagtgggataatggcacaaactctctccttccactttcgccaagtgggagaggagcagagaaggagacggaggtgaaagaatagagagatggagagatggaccgacagatggacaaagagagccagaagagagagagagagagagagagagagagagagagagagagagagagtaagagagagagagagagagagagtgtaagagagagagtttcaatggttttgtatacaaaaatgaaaattattagatgcatagaaagctatagttaatggtcatcctttggtaatcatgtgggaaagtgattaaaacgttcacatcacgattttagaagatatatcctcattttgacgcgggttttaatctgcttttgttggccacagaacagctttaca

SEQ ID NO: 39978 - DNA, 667 bp, Oryza sativa
cagcagcagcagtagccttaaattaaaaatttcctttgcatttctttttctataattgttatgaatgcactgggaacagagtgggtcatttggtagaaacgaatgactgatttccataccccgtagggttgataagtaagttgtcggataagaaaaagcaatgaaaactgcgatacccattctttatgcaaaaaatcagttcaaatatgagagcgttggtgcaccagaagtctttccaaaaacgaatagattctaacattaggaatgtatgtatatctaaaagacgcaaataatggggtccgggggagaggcgagagtgtctaaatgagagtaccttagacttgtcagatcgcttttgttcaaatatgcattgttatacaaggcaaggagatgctgcactttttgcccggttcagtgcttactggagacaaatttagacaatttcaaggttcacaacatctccagtcggctgtgcatggagttgcgcttcaaatgtaacaggttatggtttcttctttctctctatcttttttcttttttggatatattttcagtccggttttgctatgccgaaattttttctttgactggttattcttataatgatatataatataaaacgacatttcatcacagatcaccgcttataaaaagaggacataacatt

SEQ ID NO: 39979 - DNA, 651 bp, Oryza sativa
ttaatatatagaaggaagttcgatttagtttttttggaaaacgtgcctgacaaatcaatcataaattagaagtaaggtgttttgtccttttttaatagaatgtttatttgcctttttttaaacaaattctaaagaactatattgttaataaatatgttttatttgtaccatcaagtagttctccttatagtaggtttaagttgatgcaagttgttacatacttatatataaattaattaagacatgtcatatacctcgcttccttgtgatctatactatcttttttaaaagaatatacctagttaacatgaatccaaaattttaaatttaatagtaacaaatataacttttcaaagaactatatactgtgaaccttagtgtggtttatatgtgtaataatatgtggagaaactcataatgctatgatataggatagatgtaaggccattaatgtctaagcattttaaaattgttacgaaaatggaacatgcaatggttggtccaattttagtgaaatgtaagaaccaatatttttatgaacttatcatgttttctctaaatagtttaatttagtccctattgacattttctattacctgctttattttatattttatacagttcaaaatatagtctttatggatctttaaa

SEQ ID NO: 39980 - DNA, 562 bp, Oryza sativa
atgtcaattaagcacataaaatatgaggctaaatcaggtaagataggctgaaaccccgatgctaccctaattggcaaccaaaagtaggctagagattgagattctaatcacgacttataagatcaaactcaactgatgcagctataagtatgaaaagaaggacaatatctagataatcaagccgttgattgtctcatagggtggtggatatcctatataatctaagtcaacgttgatatttaacttgatcggtcgccttctaacaacagatgttagccgattgaaggttaaataacaatattgcacaggattatatagaatacatgataactcgacgaattacataaacaggattagagtatcataaagatggaagcactaatcccgagaacgcaagccgccataacaagttttacctcttagttgaaaagatccaaaaccgatgcagctcgacccagaagtaagaactcgtcgaaacaaacgaaagtaaaacgggggcgatgcgccgagattgtattgaacgtgtgttagattgattacatggggctcggggtctatttat

SEQ ID NO: 39981 - DNA, 524 bp, Oryza sativa
agggaagagaagagaagagaggagaggaaggatggatcaagtggtggtctaggccaggtgcacaaatgggcggctgtggaggagaaaggagacgaagtggtgtcgctcaagccttattgaggacagaaccattgcccatggtagaaaacttaactatttgccattttttcgtttggcaattatccaagtacttctcttaagtttacacatactaatttaccattggagagagaagaaatcttaattttataccattttttgtccacgtagcagaataatccgattgccagcatggatgatggatggtgtgaattatcaattttgccctcaagtggaccccacgtgtcagcctcttccctcatcctccatctcttttctctctctgtttactgcctgcgcggtcgccaaatccaccgccccattatcagccttggatgccgccgccaccatgtatatcagtgactccctgcgctgctgcacagccccgccagcccacgcacacaagaaacctcacggaaagcaaa

SEQ ID NO: 39982 - DNA, 1314 bp, Oryza sativa
  unsure (1)..(1314): unsure at all n locations
caggagcgtgttgccccttacggtggcgacggcttccaggtccacgaggagtgccttcacaagccaactctcggcatcaccggtggccgtgaggttgggaagaaggtggtgattagtttggtggcaaggtctccgcctctggcgatgccatcgtgtgcgtcggtggtgggtttggcgatgacactggccatctagtttgtcttgtcacatagacaaaagcggcatacaattaagaatcctttttctcccattactagtaagtagaaacctaaaaatagtactccctccgtttcacaatgtaaatcattctagcatttctcacattcatattgatgttaatgaatctagacatatatatctatctagattcattaacatcaatataaatgtaggaaatgctagaatgacttacattgtgaaacgggggaagtatttggataattgccaaacgtaaaagtggtaaatagttaaatttcctacacacgccgctcaggaaagaggatggagaagagatgagatggatgcttgagctcggtgtcaccgtcgccgcagctcggaaggagacgatgtcacaaactcacaaattcctcggtgttattttttagcattttcatttggacttgcggggagctcttagggcaatagcaatgcaaggcatgcatagagtatctttagcccggctgaagctgtcaaatcggcccaaggccatcaactcaaacagtacttgttacctttttagtgtgtctctagtgtccattcctgctgtactgaagtgagacgcagcgtctccatgtgaaagatcgaggaactcagtaggggcgcgcaagcagtcgacacgtcggcgcgagtccgaggtaaggcaactcgccacgtaatgcattggggnaaagggcccctttngtgggcttgggattacagtcacgtgcggcccataggccttaactgactgacagcgattctcttgcggcccatgtaatatggcccgaacaggatcgcgactgattgcaggccagacagtccagcccagcccaggacactttacggctgttttccgtgacgacagctgcattttgtctccatccatggctactccatcctgcctagcttgaatgctggaccgatcaggtgaggggaggaaccagttgaaggccagtggcttggcgttggcgttggcattggcattggcattggcaactactgactgcatcaacactctaccaagaaacagctttgccatgggcatgtttggtgcacctatttgggttgacgcccatagggtgttcgacgaaatgcctctgcgacaggagcctttgc

SEQ ID NO: 39983 - DNA, 4901 bp, Oryza sativa
agagcttcatgcctgataacgtattacgcaaccttcctgctacacgaagtagtccaagaggatcccgtaattccacagaaagtggagacacaaactttaaggtgagactctcttttctattcaatcctccaatcaactatactaatgagtagccccccctcctctgtttatatagtgcattccaatatatggaaggttcggtgatgagcccaataagtgtatttgggccaggcccaatgcaagtccctgcatgcaagaacaagtgaaatatatggccattagtcaattatttgatagcaaggaaatgaggggagtacaatgcgtttatggagtacagagaaaggactagggattatagcatgtgctcaccttgctttgtcgtcgtcagagcttacggggggaggaggccgaagccatgtcggcagaggaatctgtggcggcagatggcatgctgactagcgacgggccgcgcaacgacgggcggaggaggcgggcggcccgacaacggtcaaaggcgccgtgcgagtgttgacggctaggggcgggaccgcgctcacgcgaggagaggcagcggcgctgtgcgtaggtggagattggagtctaaaaaaatttggagatggggagggttgactggttgactaggattagaaaatacgtggtcattgggcttcatttgggccaaaacgactataaagtctagaattggtccctagctgcactgcatgcatgccaccgcagggacggggatggggagtggtgcatcatctccgcccctaccatccctaatggtgatgagttttggaccattagatttcccatggatggtagatatcaaccatcctcatcccctaatatgtgaattcaccgcggggaattggtgatcgggtccccattgccatctctaattaggaaggactaacaatgtttattgagaatatgtatagtgttttagtctttcaaatggcatgaaaagaattgttttggtgattcaattcaattggaatgaaatgtacggcaaaagtgttttcgaaggtaatcctttttcattttttatccacagcaaaagccatactataaagagatatgccgctttgaaatctatggttgaaaaactgaaatctattcgcaaagtgtttcatttggaaaaactttcaagttgctggaattttcaatggatcggaatttcttatatggctttggaagaggggttgttcagattgatgccatttttaactatatcattttttggcaaagttgccaaaaaagtatctacatttagtttattgccaaactttggtacatacataaggaatcctgccaaattttggtaatattgccaacttgccaaaattttggcatcgctagaatttggtaaggttaattttggttacaatctgaataggccatctaatatggcgcaaaatgcttatgtatggagaaatataggaagggccagtttggattgctaccctaccaaaattttggtagacctctattaaaacactacttatgccactaatttagctctgcccatgaacttgtctcttattggcatattttggcttcaatccaaatgaacattttcaactctaccctaccaaaattttggtagtgccaaaatttgtccaagatttggcactactaaaattttggtagggcatcaatccaaacatgcccgaagttccgatatgcttattggaatatgcgatgtgttggtttttggctaggttggaggatgtaattcaaactggttggaatttctcatgatcgcatcggaatatccaatatgaataatctttgcctctaacggtagatttaggagtgggctataaatacccccctcctcttcttgagattcactttgagccttactttccaaaccttatcctctctcattctacacaatttgattttgtgcgaatgagttggttttggaagatcttgtacttggtgagttcttgattggtcttttgagcactagcttttcaacttcaaggagttattgttacatctattactattggagattgagaactcctagatgtttaggtgtcaccattgagccaccgatccgagtgtggtaggttgagagaagtttgtgaaagccaagatcttagcttgcttggcttagcttgctgccttgtgcagattataatttttgattttcatatcaaaatttctagttgtattagaatatctaacacttcggaatatccgacttttccttttagcttccgcttcgtactaagttttatattgcatattcaccctccctctacgcctaaagatgtccttctagttaacaaaatacttttggcatttcaagaaggagagatgtttatatatatatatatatatatatatatatatatatatatatatatatatatagagcggatttaaggggggtgggacatagagaatttacaagagaaaaaaaaagaagagaggagcagctaattgagggagctaatccatgattgccagagggggatatcaacaacttttgctctatgcatatgtagaacaaactctcctttgaagccacttttccaaggtagagaaggagatatgcatatgtagaaccagtggcagagccagaaattttcttgagcctaggcaagtctaacaagagataaaaactatatataaaaaattggaccgcttatcatagacaaaagtaaagttgattgttgccaagttacaatttatggttgtttattgttaatgagttagagtacggggctactatacatcaggaaagcaagattagcgatatgatgattttgcccttgctttgcttgtttgttggctagtcatctaactaaccttcattggaaccaggaagcaacataattatgtaaacaattaatgagtaaatgttgtttatgctgtggagcaatgtgtgtaagtgtgttgcgatggcatggagcccgggcagctgcccatgctagccgggccctgcctgagccactgtgtagaacaaactctcctttgaagccacttttccaaggtagagaaggagacagggatgttgttaaagatgaagtcattcctccttgtccaaatattccaacaggcaattccaataacttcaacaaagaaggggtgcacaaagtttcttcgagctgtgattatcatgtgtaagaattccatattaaggttctattaaattcccaagagatgccaacattgctgagaaaaatggcatgtaaagaatagatgcgaggcatcttcaaccattgcatgagtgcacatgacacagtttggcccactttagagatttacttgttttctttggagcatttctcgggtgtttagcctgttcatcggaaggagccagagaaaaactttaattttcattgtacacttactcttccagatcatgacgatggcaggagagggttgatactgtgagaaaaagaaagggtgcaatttcttggattgataaacttaggagttccagatataatgagaaggagagaagttaaaagaaaaacacatctcgctaagcaaaacgaacaacttgatgttaaaaaaaggttttgaattgtctatttcatatcgcaaaagcaataatgcttatcatccctccttttagcaaggttattctttattagaactacttttctatgcagcaaccatataaaaactttgattttagtgtcacttatgactccttttcattctcttcgaaatgctcgtactggagtccattataatcgtgtacataaaatataccaaaaaagtacatttctatgtaatggcccacaaagtaattttttaaaaaacttaaaagagttacctggatcaaccggtggattaaatcatttcactcaatcaaattgagaacaataattgctcgccttacttattacttctaccaacgaggcaacggcgtattaatgactactccatcggttcctaaatatggattatataagcatttttagttttgtttagcaaatattaagaatatggggaacattccttttcagtcatcttacttgtaatattttgaattgtttgaatttttcctcctaagcacctggttgggtagagaaatgcttagatttctttgaatttgaatcatgtactagaaatatttatattgcgtaaaatttcggatattagagacggtttgttaccggcaacagtaatcttcaaaacagaaaaagaaaaaagaaaaaaagagaacactcgagaacattcgaagcatcgacaatcaaaggaagaaaggagagagagagagaggaggggactcatcatcactcatgagagcgaggggtcggtagatcgtgataaggatcagctgcgcacccgcacgtacgtcctgcgctgcatttcactgcagctggacccgcccgaattcacccaattctttaatccctcccacccagcggacgcgagacgcctctgctctgctctcttgcttggagtttggagagatcgagagaaaggagaaggatacagcttttggaggaaaaacaacggatcgaaatccctcccattaggggctttgggattaaaatagcggtaacacacacacaaaaggttcgttaattcgtttccctgtcgataagtttatcttcttcttctctcatcgtcatcctgtgcacatatacctgccccgtgcgtgcgtattttatctacagctttcttgattcgcttggcttcttttattattattattattattattattattattattattattattattattattattattattattattattattctctagctttgttggcttgtggcgagtcttcgagaaggggcaaatgctaaccgcaggtgggttcttcagttcttgtgagttggggcttgggtttgttcttggttggattgttggtcactcggtcagtccggtgctgctgctgcaagag

SEQ ID NO: 39984 - DNA, 704 bp, Oryza sativa
  unsure (1)..(704): unsure at all n locations
gactgcaaaggtctcgggggctactgtggagattatggatatcccatatctacacggcgatgatatttggactgaatataggataccgaatatagatagaatatcttatttgtatctcgggtttgtttctcaacttgtacatcaaggaaataccttgagacttagtcggttacgactgtattttatctgtatctgcatattccgttagggatatagattatcttttgtaatacggactccttcccatatataaggggggtccgggtgcctctaggggcatgtgttgattttctccaaatcatacaatcaataagatactcggcggattcatccccggacaggagtagggtattacttcttgaatgagaaggcctgaacctgtataaatcctttgtctccaaaacccattcacttttcttcgaggcccttgatagccacccccttttattattgccgaaatctagtttcgacaattagttcaatttatgagttttaccagaagaaaaatattaatataaaaaatagttgcaatccgnaagagggaccccncgaaaaaaaagtcctcatacatatggctcataaaatcaacagaacgaattctcttccaaaccgtatctatcgcacaaacaaccaaacaatatctggtacaagccangctagactgatgcaaacaaccaaacgactgcgtgtgtatccacttaaca

SEQ ID NO: 39985 - DNA, 2193 bp, Oryza sativa
tcacgtaccatttttttataaggactatattaacccaaataattaatttagaggacatgtctggacgatttgaaacctgactaaactgagcctgaagcgaaacttcagtgaccatattagctattcaccctttttaattccaattttctattatttcctaattgtgtttctatatggactctatactctacttctaatattccttatttttaattccgaatttcagttatttcctaattgtatttatatatgtactatgtactctacttctattattccttatttttaattccgaatttaagttatttcctaattgtatttctatatggactctagtctcctcttctaatattccttattttttaattccgaatttcagctatttcctaattgtatttctatatggactctagtcacctcttctaatattccttattttttaattccgaatttcagctatttcctaattgtatttctatatggactctagtctcctcttctaatattccttatttttaattccgaatttcagctatttcctaattatatttctatatggactcttctttttctttttctccgattaatgtgagaattttctaggccatgagagcgaacgtggaggcttctttttctattccaaattttagtttgttttaaattcctatatggactatatactatgcttctaatatttcttattttttaattcggaagttctatttttttcttaattgtatttctatatggactctatactctacttctaatattccttatttttaattccgaatttctattatttcctaattgtattattttatctcatataatagcatatatgttttctcattatattattcaaatatattaaaatgacaacataattctaaattttgcaataactttacaaaaatactaatgtgtaatattcatattgtattttatatacgtgttagttattaattatttttaatatcaaattttagttaattttctgtaaattgtatttctatataaactctatgctcttgtttcaatattatatatttttatttctgaatttttattatttctaattgtatttctatgtggactctaaacttatctttcaatattctttaatttttaaatttgtatttttttattaattgtatttctatatggactctacttctaatattccttatttttaattctgaattttaaatatttctaaattgtatttttatatagagtctagtctcctcttctaatgctccttatattttaattccgaatttcagctatttctaaattgtatttctatatggactctgcttttttttttctctaattaatgtgataatttctagatcatgagagcgaacgtggaggctcctttttattccgaattttagttagttttaaattcctatatggactctacactctacttctaatattccctatttttaattccgaatttctattatttcctaattgtatttctatatggactctatactctatttctaatattccttatttttaatttcgaatttctattatttaaaaataaaaagattagtttaaaaagattattattattattattattatttataataaaaagattagtttaaaaggttgtttataaaattagtttattattaactaattaatagttttctattttatttatttagtttattttgtagtatatttataaaaacaaactagttcacctgaacatcgtttggaaattctgaaaactatttcagtttgacagccgccggctctcgtgagcgtcggacgtggtcacgcatccaaatgttcaatggaacgcgtttcctctcccacttgtgaagatataggttgggcagaaacctactccattcgagtgggtgaccaagtgaccaggtgaaaaggatcggaagcgacagaagagggatcggctgtcgcggtgggcgcaggcaccaggcgcacgatgcgcctccgtccgcggattgccgccagatactacgaacttttacacgcatgaaatgcaactctgcccgaaaggatagtagtactagatgtctagatggcaattagcccatgtgcaccggccagccacatcagtcgaggccgcgtatgcatggccggaccgcaactaaccgtggcggcacccgtggtacgttactcgcgcgtggccggtcggcgccatttttg

SEQ ID NO: 39986 - DNA, 1184 bp, Oryza sativa
ccgattaatgtgagaatttctagcccccacagcaaacgtggtgcctcctttcaaagctgttttaataatataagtagcatggtggcctgcgcagattgcgcggctagcatcattatattttctatcatataatagcatatatgttttctcatcgtattattcaaatatattaaaatgacaacataattttaaattttacagtaactttacaaaactactaatgtgtaatattcatattatattttatatatgtgttagttattaattattttaatatcaaattttagttatttgtaaattatatatattcctatatgtactctagacttgtcttttaatatttttttaattccgaattttctgtaaattgtatttctatatagacggtatgctcttcttccaatattatttatttttatttctgaatttttcatattatattttatatacgtgttagttattaattatttttaatgtcaaattttagttatttgtaagttatatatattcctatatgtactctagactcgtcttttaatatttcttttttttaattctgaattttctgtaaattgtatttctatatagactgtttgctcttctttcaatattattttgttatttctaattgcttttatatgtggactctaaacttatctttcaatattctttaatttttaatttcgaatttcagttacttctaaattgtatttctatatttgtattcctatattgaccttaaactcttcttcccatgttattcttaatttcgaattttagttatttgtaaattgtatttttatacagactctaaactctacttttaattttattatgtttattccaaattttagttagttttaaattcctatatggactctatactctacttctaatattccttattttttaattccgaatttctatttttttcttaattgtatttctatatggatactatactctacttctaatattccttattttaaattgggtgaatagctaatatgctccctgaagtttcacttcggctcaggttagtccttgatgttttaaatatccaaacaagtcctctaaattaattatttgggttaatatagtccttggacccacaaaaagtgccacgtgagcatgtcaagtcatcctcgcatacagcggtatgaatgaaatgaccattctaccct

SEQ ID NO: 39987 - DNA, 850 bp, Oryza sativa
cgccggagtagtggaggaggtggaggaggacagagagagagaggcgggattcaaatcgaatcccggccatctcgcgggcgcgggggtgagcgggagtggggcgtgggcgcgggagggcggggcgtgcgggaagtgggcgacgtggcccggggcgcggagtggggcgccgaaagcgggggaggccggccgcgatgggtggtggtttcggcggcggttggcgcgggcgtgggcggccagaggttagggaaagggctgacaggtgggccccacctgtcagcgcccgagagggagaaggaggccgggtgaacttcgggagtaggagggaggagcgggccggcgcgggaggaaatgggccgggcccaagaaaaagaaaaaaggagggaaaagaaaaataaaaagaagaaaggatttttccagggatttaatattgcactttgctcattttaattgattaaaattattttcaaggctctgagaattccactaaaaatcgtgttagcatattttgacatgtagaatccaagaaaaattccacatgtcgattccgattattatttgcatttattaattagggattcatctctaggttaaattaaacaattacttcggacgatttattttatgaatttagagcaagggaggggaacttcagggcgtgacagaactcgagataacaagttcggcaagtggtcaccgaattgggaagggccgtttcaaattcataaggttgtgtccaaatgggcttatatgttgcaaggacttaatggagaagtctatggacgagcgctcaatggcaaatacttgaagaaatattacccaagtgtttgggtgaatgcatgatcggctggat

SEQ ID NO: 39988 - DNA, 568 bp, Oryza sativa
cttttaaatcaacaaagaaacatatccataaaattgctataaatcattttaatttcttttcacttggttcatttttgcaggtaaaacgatcataacaatggaaaaatcataggggaaaaaaaagaaaaagtagagtcgtgagtgcatgattctatccacgaagactgaaattttggtgcttacgaatattacacacgtatagatgattttttaacaggattttcatctttagagcatatgttacgagacgtattcacgggtgtgagtgtggtgttatgcgtctgccatacaatccaaaaaaaaaaacaaaaatcatggagtaaaaacctgattcacgaatcaacggtgatgataacgcgcaagaacaaggaataagttcatctaaggtcccttaacttatcaacgaatccgattttcgtccttcaaccacaaaaccagatacaacgggtcccttaactatcaaaaccggtgcatattaggtccctcggcggttttggctgacgtggcgcctgcgtggctaattttgactcggtctcgatctgacgtggtatgacgtggcccttacgtg

SEQ ID NO: 39989 - DNA, 588 bp, Oryza sativa
atttaaactcggtccaaaatagagtaaagcaaacgattggaaccacatttggttctagctccactcctaaccatgctcatgtgggcaggagttagctagctctcaagggcccttcgccgatgcgtgcggtggcgcggtgacggacgggccggatggtcggagacggccaggatgcggcggcgctccggcgaggtacagtacggaagcacggcgtgtgttctttgctaccagcgggggttcaaagttttaaactccgaacctcctgggacactactagccgttggatcaggtgcgtgcggttcagattgagtggatctccttcgcgaaacgacctcggtttcagaaacaaatgaggcccagcccatttaggggttgccttaatagagcccaccacggcccaagcagccttctctgtttctcctctcgaacgaatcggaccaccctcttcaccgccgtcgagcacggcaccgccgttttgccggcggcggcggcggcgaacatgaatgttcaagcaggaaggatgcaatgtaaacgtttgctactgaccggcgttggcaggtgagtagagtagtagtagccccacgagct

SEQ ID NO: 39990 - DNA, 615 bp, Oryza sativa
aaaaaagctcggattcgtgagctcagctcgggcttggctcgagcttggatggcttggctcggctcgtaagccaaacgagctaagcccaagtatccttttcagctcgttgctgaaatgagccgagcccaagctggctcacgagccgtttgttttggctcgctagcctaggccattatgtgtttatatcgattatttaactttttatagagttattatttgacaacttgaaatttatcattaagatttttaagaattgaatataaaaacttatttaaattttacatgttgatgatttgttcttactttttttaataattacaaattatatatgaagaggtgtttcaacaggaaggcttgcaagctggctcgagctaggaaatgagccgagccgagctcaagttttagcttgtttctctaactgagccgagccgagccaagccaagcctagtttgttacaagccactgcaagccgaactggctcggctcgtttccacccctactaacaaatcactactaggtcaaaagaggaaagaaaattttgaatgggccctccagcattatgaatgttttttttagaaccgatgccaggatttgctggtgttatattaaatagga

SEQ ID NO: 39991 - DNA, 752 bp, Oryza sativa
gatttcacctagtcacctaataatcaaagatccccgtgggggcccacctgctgatcgataacggtcgctgtgacggtgggcccggggtggcctgggtcgtgattgggtgaggccgtccgtcggaggggtaggtgtgtgtaggtaggcttggctctgagtgtggggcccatccgacgtggcgtggtgtgtaagccaagacgacacgcatgcacaaatccggttcgtcgaggttgacccatcgcgttagacacatacaagcgggggcggctaacaccccccatcctttctttctcctcatcttcttctcttcctactacaccataaatttttaaaaaataaaaaacataagcttgaaaaaaattatatatagaaatactatatataaaaaaattaaatttaaatttaaatttaaaacaggtatgtaaacttttgacttataaactttgggtctataaactaatatttgaatttaaattcaaattttaatcgggtatataaacttttgacataaactttgggtctataaactttagatgtacaaaatactatatataaaaaatatttgaattcaaattcaaatttgaattggatataattcaaattcaaatttgaattgggtatgtaaacttttgacttataaattttgggtctataaattttaggtgtataaactttagatgtatagaaatattatatataaaaaatatttgaattcaaattcaaatttgaatcagatgtataaactttaggtc

SEQ ID NO: 39992 - DNA, 740 bp, Oryza sativa
attgatgccacaaagggtcaaaaaagtgagcagcttacaatcaatctcactgagagtagtctccctttagtacaatagaagattgtcttccatacatgcacacgtcactaagcatgcatcccattatgacacatacaaatccaaacaaaaaaaatggtggtcaaaattgtggcttgaggggcccatttgggagaggatgagtgagaacattataaagcaattaagctctagctcaatcgttcctagcttactcttccatgagggggatggacaagccgttttctttacacgagagggaatagatgctttcttctttgacaattaagcaaagattcctagatagcttccaatgaaacacccattttggttttgatttctagtgcttattaatataaaatttataggttagtgctgcataaacaaccataaaatcaacagattaaacaaaaggacagtttgtagtacttactcattttcataatatatattaaaaaagtcatttaagtcttaagttatgttattgtaaataactcttaacttgtgttcagtcagactcgaatattatatatgcacgttaaacttaaaaaaactaatcattttgcaccatgaacttttcaatctagagtaatattaattagcatagttgatgagacttcagaataacctagtcatttccgatatatagcaccaaactctagattcacaatgcacagaaagacgtacaattaatgaataaagaa

SEQ ID NO: 39993 - DNA, 694 bp, Oryza sativa
gatgtggtacggatctcttcgggaaatgaagatgttttgcaaggcttttgggcaatcgaatccatgggtctcctgcacaagtatatttaccgaagtaaatatctcatttttgaatggtcggacagtccacagtatcagagtcaaaagcataccactttgtatggtgtattctctgacgtccacattcacaggctagttgttctattaaaaatgtacaaatagatgtgctagactattattaactgtgtcaccattgatccggttgcagtagtacaaaaaaacagcgtattaaaaaacagtgtgttatatcataagaaacttatgggcttaaaaaattgcaaatcttccacggaaagaaagtaactgaatttattaaaaagacaggggcttaaaaaattctaagcaaacggtaaaattcggaagcatcattaatcataaaaatagaagaaattcctacttttaataaagaaagtactatattattacttctgtgtccgtccgagcacacatgtgcagctcacagctcaagaacaacatggtcgatccgtttagcggagggtcgtgctggcacgacctggctagccaggctgtgcttcagttgctacccgggttgtcatgccaacacaacaagtgcatgtgtgagccagcacgacatgacccaggaatagcgcatagcttggcccgtgcgacacga

SEQ ID NO: 39994 - DNA, 750 bp, Oryza sativa
  unsure (1)..(750): unsure at all n locations
agtaaatgaacattttacactccaaatgagtgctactccagctgctaagcgtatgactgagatgtgataacaatctcacaaaaaatggacctattcttttttttttaaaaaaaagaagaaggatgaaatgcatgtagatagatgcgagaaccagaatgcagacaataataacccacgcaaccctgacactgcacgcaccgacaattcgtcgagcggcttgggcgcgtcccgtccggccgccaccggcacaccaccccccgccttcccccgcgacagctcggcgttcccgggcgacgccacgagcgcggcgatgcgcttgcacgcgctctggacgtgcgccacgaggacgacgaggtcgtcggccgcgccagcctggcccatgtactcgagcagcgtgggcggcgtctccgccgccgcggtcgccgcggccatgccgtcggctgctacggcacgcgcccgggagacgggcgagcggcgcgcgagcggctagtggcggaagatggggaggaggagggcgcgagatggatgctgcggtggcgggtaatttgaagttggcggcagcggaactcggtggatggggaggagggaaagagaggataacggcatagtgtanccagtggtagtagtggatggttggttgctggatgatgcgtggctcgtgtggatattgcactccacgtttcattgcaaaaattggaaaaatatattacaaaattttattttattttttaataagacgtttcattgtag

SEQ ID NO: 39995 - DNA, 763 bp, Oryza sativa
acaattaagcactgttcccgaatcacgatgcaatggcttaatttaaagtagctagctcaaatatatccacagttaattagcttggattaattttgctccaattatatcagtgactgagccctgtatagcatgatgcatgcagccttttcttgctgagagtggaagcttcgtttgttctgcgtcgcctcctttctgcaatgctgcatatgtatgtacagtctaatgtctatacacagtgcccctggaattgctgaacttcacactgcttgtgctagtgtacaattcagaattcagatcatatcatatggtcagggacacaagcaactgttctatttttttttcagcagctgttaagattaattattcgaggtataaatgaatgaagtattataaagttaggaaatagatttaaattaaatagtatttactataagaaattcatatatgtacaaatttttcaaaaatcacgtattgttaagagtttgagaaacgtgtatgttaattcatgttggggaatcccaacaagaatcgtgttcgacctttaaaatcccaataataataaatagaagaggcaacatgatagggtggggcagttgacgcgatattaaaaaaatataaaacagaaccaaaataacgattatgtttgatttttaaaagcccaataacaataaagaggaggggcggtgagcaggttgtacaatagtaaagataacggcgggtatgaatcagcccatttcatgcaccccaattatattggctgtat

SEQ ID NO: 39996 - DNA, 749 bp, Oryza sativa
aatagagtattccagttattgagtgaactaaccaaacagtgtagcatattagtctttgaaatcagaatacaaaggtaggaagctctgaaccggacaccatcttgattaacagtgattcatggaacagtattacggatattcagtgaaaaattcccatctcataactttgccttctacatatgcagatcccatacttgaacataagtagtgctagaatgatgcgaaatatttcagactagatccagattggtcaattgactcgaggctttctacagaagaacaggattggttcaatcactagcacttgagttttaagcattgtagtttactaagggcacgtttggatttctggaatattttgcctagccaagcaatgccaaagtagtcaggttaggctatatagcctatggcaacaagagagttcatttggtttcatggctgctcaagcaaaactaccaacgatcattgcttgccgctggagcagagctgatttggctctccctggtgggcaaggattttgaggcagttattgcataacttgccctcaaaatctagcattttttgtttgtaccaaatgcctctcctaacttagcaaggatagaacttcccttgctcaagattaaaacacaccctaaaaagcataagccaaacctaaactttgaaaggacaggggtcaaaaatactactctgcagttaacacatgggaggtaatgcaattatacatgacgaacaatcttcaactatgaaca

SEQ ID NO: 39997 - DNA, 686 bp, Oryza sativa
attgacgccattgatggctttacagacgggacaagcgtagaggctgctcttgatcttatcagcaatgctcaaaatgcggctgacaagattgcaagtgacgtcgtagatcaattccgcaacaccgaccttcagccgagtagtaataactctgatgatgaaaggattgattctgactgagcataaatgtagcaaatggaggcataacttgtacaatactggtgtatttatgctgtgcttgataattctagccaagtctttgatttcttaaaagcttttatcaagctttgttgagcctaaaacccaaagaagctattaaaaactttcagtcctcgcagactaagtagaaaaatcaaacaaggcaatgatagaccaaggaagcaaattgaattgataaaaaatcacactccgttattatgatgatagaccccgactgacaacttcaagaagaaaacttgatgttgacagtcaagatagggaagtacagtgataagcttaagcgtagaaacgacgaagatgttcgatgttccaagagttgtcgacgagtgtaccgtcttcgcgcttgagtcgataggaacctggccgggtgactgcagagatgataaatggcccttcccatagaggagataacttgtgccgatctcgtgtagtttgaattttcctcaaaacgaggtcgccgactagaaagg

SEQ ID NO: 39998 - DNA, 1852 bp, Oryza sativa
gtatgcgtggtgatttcggcaccttcgatcgaaggccttcgtaacatgcctccaaccgttattatgcatgatttgcttttcgttaattgagcttatattacactatgtgattccaatggcaagtctactgagtaattaatatagttaagttatttatgacagctatacaatagagttaaaataaagtttagggacaaatgtgatatctaattagtaagagtaagtctttaatataacgatctaaatagtaaatagtaagtactacctttgtttcacgttacaagacattttgagtttgaatacatgcatctatgcatgtgcttcatatataagtcaaaacttatatgaatgtcagtgaatttaaatgatggatagaaaggataaaacatatatattataacgtggaatggatggattgctctttatattacatgtttatgaaattgagtgaatttcttatatataccactgaaatttgatctgatccctttatatgtcacacaaaattgactatgaattattggttacttatctattactattcaggagatcaagagacatgtcgaaattcaagattaagcgaaaaagttttaggctttgctaccgtgaccaatatggtacgaccggtgcctgtgatgaatctttcttgctcagaatgacaccattgcacaaggaactatctttgcgcacagaagcgatatatgtttcagctttctacgaaatgttgaaggcaaacggtatgcaccagtgggtggtttttcatgagcataaaaacaccatcaagaaatcactcgataatttaaaacatgcgcttcgtagatataaaaagcaatcgaataaaattggggctattctacttggtgccaaggaaagacggcaagtttggattcatcgtccgtagtcctctactcgataagcccattgaatatcatggaaagagaagaataaagctccaattcaagaagagaagtataagcccgtcaatcacttcagcaaatgtaccagcagcgaatattttcactattgcttgctctttctttagtagtcacttggaggatgcaagtgaggttaaggacattgctaatatacacttgtactcttattttatgttttgttataatacttctataactgtgcataattaaattcatgtggcaatgtattcaagaatgtctatacactatgcatctcttctaattttatattgaaaaaagtggttgtaaacgtgcccaatcagctatggccgtcggccttcatcaggatttttttttcttgtacccgttgaatgaaacaatatttaaatatcaagcttaaatctttttatatgcacattcaaatgtgacgtactgaaatattttctgtacacgttacataaaaccatgacaataacaaacaaatagggaattccttgttaacttgggtgcattcatacagtaacacaatatcaatgaacacaatagaaagttctatacattcaactatacaactgcgggtagagccagaacacggcgaagtgggtaacatgcagtcattattttttattgcgatttggagatgtcagctctcagctcctcttcaagttcgtcaaactcccacccacttatctcttcaggtgagtatttgttaacttgaccaaattctaattctaactttgcaagttcagaatcaagatccagcggctggtcaggtttcgctggagattttggggagaccacagtttcagctttaggtgtagaaggtacctgaactggtgaagggcttgactcagctctctcctttgttggaacctttgctcggcggacttcaatgtctaacgtcggtcgttctacagactcgaatctctctctaagtt

SEQ ID NO: 39999 - DNA, 906 bp, Oryza sativa
ttcctgcagcccgggccaggtaggccaacaactatcagagaacaacagcgggagacaaaataatataagggcccggttaacatgccacaggcagtcgactggggaacgagacctagaacaagaccgcactccgatcatcttgttggatacgcaagcgtaccgacaagggcttctcttcaacactctcctaaaagatatatgaatagcaagggtgagtaccaaccgtactcaacaagccaccacaacaacaatgcatatgatagagggtatttcaaggaatggcttcaggttcttttgcataaagctaattttacaattcttttcacaagcctaaaacctagcatagactgatcaaattttagtacagtgttcactttaaacaacgacggttctgtccaccatccattgtgatcccaaggatagcttcccgccattgaatcgtcatggttttctgaggatgtccaccttccctcctctcgggaagtggctccatcagcataaaattcatcatgcaatatcccatcccccacaagttaagaatttagagtctagccaagtgtaatacatgtcctggtgctcaataaccgcgagcacggctattcgaatagatttggtttactcacactgcagtggatgtacactttatccgcactccgcgactgcccaacacatgagcctcgtcccaacacatgagacgcgtcacggcaaagcttttcgataacctcgcattggcagtatccgctccatgaacttaaatcctcatgcactctaggcgtccatgtttctagcagtgagaggagttctggcactcctgggaaagagaagtctcacacacatattaaattatggttcaagttaagttctctctctcacacactcatggcattcctaccaatggtgacaccg

SEQ ID NO: 40000 - DNA, 559 bp, Oryza sativa
acagatgtcggcttctacttctattgatgtcagcagctcgttctctctgtcttccccttgtctcttgattgtatgaactccggttgtcaagaccaggctctctgcttttgcttgacgaacgaccgcctaagcggttccaaagagagcgacttctatgcctccttcttgaacgctgctcgtggtcgtcttcatcatcagaccttctctccggcgccggaagggttctgcaggcttgaattgggtgagccatcgacctcatccgggtgacatcatcaggcactccatagtgccacatgaagacccgaccctgtcgagagaagaggtcctggacagtgtctatgtgaatgatgaccggataagtgaggcctttctttgtatcagttggagccggctgggatggctccaggtcaggaaaagggatctcagtagcccttgcttctctatctggccttgtgattgtgaactgggtggcctttgggatggtgctcaagtctaagctccaaatccaaagatcaaaagtacggttgaagttccggcgacgggagtattcttctatgta

SEQ ID NO: 40001 - DNA, 682 bp, Oryza sativa
actcttgaagtcggaggaggtcggccaaggattgagggattaagacgacttgcaatcggtaggcgccgagctactggtgggaatccatcttgtctcacaacaccagagtaaagaggccgggaagatgcacgatctttgggggcggggggggggggggggaagaaatctgcttgaagatctgcttggggattttctggactggatgcagatttgaaatcgactccgggagagagccagtctccttacctcgagctgtgcccaaagaaagggctggtggttggatgtcagatccatggaggatctcttctctatcttcagaggggataggatctaagcagctttcttcaatgagctctccctcctctaacggacaggaggagctttgaatggttgggaaaagacctggcgaggagtggctggtggggaagcattcaagaactggggaagagatatggagtggaggatctactgggtgggaggagcgcggcgccgggcgccgccgcgggtgggtgtcggggctgggggagaaggccatcagtcgaggaagcgattcaatcagttgaaatatattatagggaaattattttatatggtacctaggtttgatatctaggtgtatgcatgaagtttaaacagttatataaaaattcataagatttgttaagatatattataacaatat

SEQ ID NO: 40002 - DNA, 728 bp, Oryza sativa
gatctgctacagcgtcggtgatgaagacctccatggccggcagcaggggtgcgccgagcacatcgtcgtccgcagccggctgaggaggctggggaggcatggtacaaggtaggcaccagatctgttgcctcctcttcctcctccgccgccccgctgctcgacctcctcgaccccgcgactcctcctcctcctcctctctcttagggtatcacgctgatacccaggtaccaaggtctgatacctaggtaccagctcaatacccagggtaccaggtatcagtcgataccagggtaccaggacctccggaccccgcgactcctcctcctctctcttggggtatcacactgatacccaggtaccaaggtctgatacctaggtaccagctcgatacccagggtaccaagtatcagtcgataccaaggtaccaggggtaccaggtaccagccgataccagtgtaccaggtaccacctcggtaccttacccaaggtaccaggaggatttggcggtgaggtagctgctactctgggtgcttaggggcgacgacgctggcgaggcatcgcgcgtgaggtagctgctactctgggtgctcaggggcgacgacgccggcgaggtatcacccgagcgcgcaataccgaggagaatttttggcggtgaggtagctgctacttcggcaatgacaccggcgaggtaaggtagccactgctccggcgacgataccgagcaggca

SEQ ID NO: 40003 - DNA, 586 bp, Oryza sativa
aacctggagaaacaagaatcaggcgtcaatcggcgacacctccgcatctctctgaccctgctccagcagacaaggtttcctccccctgcaaacctttcagccattcaagagatagcagccctgaaaatgggcattgctctgcagttgcttctcctcctctcgaacctctctcacctgacatattgcctgtgtcacaggagcaaggggcgttgctcatgcttaaaaggcacctagatcctatgctgcatgaggctatggtgggaggttcaatttattcccctgacactactctgccacgccctgcttcccctgtttttgttctttcatctgctgcagaaccacaagagaacttagtggatgaggcccagcatgatgtggagacattcctagcagaggtgaccacgcccattcagcagccactgctgtctgcgccaggaacaaagctgcgtcgaccctgccgcaataaggtgaccactcctattcaaaggcatagtgcaagattggcactgaaagtcagacgcagtacaaagcttgaattaattgcacaagaaattcttgcaaagcaatttggtgttcttgatgataa

SEQ ID NO: 40004 - DNA, 1317 bp, Oryza sativa
tgctggcgcagacaccgccaaggcccacccacgggctagcccaggtacgatgccgcaaggcccacccacgggctagcccaggtacgatgccgcaaggcccacgcacacgcagacgcactaagccccgatagttttttccttttttcgccttttttcggttttcgcttttttttcttgaatcgcttccttattttcttcacgtggtggcgcgatttttttttctgctatattttataaattgaatttttcaccttcaatttcagttgaaagtttttaaaatttaagttgaatgctttgaaatttgagatgaaagttttcaaatcttgatttgattttttttaaatttgagttgaaagtttcaaattttcaactgaaaattttcaaatccgagttgaaagtttttaagtctgagttgaaagttcgttttcaaatcttgatttgaaagtttttcaaatctaagttgaaaaattaaaaaaatcttgagttgaaagtttttaagtctgagttgaaagtttccaaatcttgacttgaaagttttcaagttcgagttaaaaattttcaaatctaagttgaaaaattaaaaaaatcttaagttgaaagtttttaagtccgagttgaaagttttcaaatcttgacttgaaagttttcaagttcgagttaaaagttttcaaatcttgatttgaaagtttttcaaatctaatttgaaaaattaaaaaaatttcttgaggtgaaagtttttaagtctgagttgaaagttttcaaatcttgacttgaaagttttcaagcccgagttaaaagttttcaaatcttgatttgaaagtttacaaatctaagttgaaaaattttaaaaattcttgagttgaaagttttaaatctttatgcgtgcggtagtcaaatgcgaaaaaaaaaagtgacagcgtcgtgtagtccacggcaaaaaaaaaaaataaaaaaagaaacgtcacagcgccaaaaaatgaaaaaaaaaagaaaaagaaacgtcgcgctgcgtgtacctccgcgggacatcacgtgggcctcgtgggcctgccctgcagcagcgcgcgacttcgctacctcgcgcgtacgcgccaactagtgtttctggcatttgctaccggtgtataggttaggtatagattctcattgttgattttttactctcctaagggaaaagtgaaaagtggtcagtggtaaaatgcatcacgccgatcgacattcacggtaccgagacgtgccagaaatgatatgcctatgcaagagagcatcgatctcttcttcttttttatgtatctcattaacaagctagagaatcga

SEQ ID NO: 40005 - DNA, 701 bp, Oryza sativa
  unsure (1)..(701): unsure at all n locations
ttttgtaagacttcccttgtgcctacgttcttgtggggatacactacattctacatttcttttgcattctctggtgggtttattttaactataaacagtgacaattatgaaagtacaactctattgagtatcataaatatatatctagtgctttttggcggtaggtctaatcattctgcagtgaatttttgaaacttcttcaaataagagcttcatgttccccnnnnnnnnnnnnnnnnnnncttnnnnnnnnnnnnnnnnnnntttgaagccaggaatgttctatgctcttcctcaaagccctcagctgttcaagcaaatgttgatggtctctggctttgaaaaatattatcagattgcaaggttagtaggtacaacattttgaaggatgtttgtttcttggatataatttttcttccagttatcttacaactctgcatgagttgctctatattctctgttgcataatctcttttcccctgtaacctgtttagctgggttcttgatttttttcctgtttgcatgaatattctcaatataaattgctcactgtacactgctcagttcctggaatatattactccctcactcctaaaattagttaacctagtactacgaatctggacatgagcatgtccagattcgtagtactaggatgtgtcacatcccgcactagggtaacttatttcagaatggaggga

SEQ ID NO: 40006 - DNA, 613 bp, Oryza sativa
tccagattcgtagtactaggttaactaattttaggagtgagggagtaatatattccaggaactgagcagtgtacagtgagcaatttatattgagaatattcatgcaaacaggaaaaaaatcaagaacccagctaaacaggttacaggggaaaagagattatgcaacagagaatatagagcaactcatgcagagttgtaagataactggaagaaaaattatatccaagaaacaaacatccttcaaaatgttgtacctactaaccttgcaatctgataatatttttcaaagccagagaccatcaacatttgcttgaacagctgaggctttgaggaagagcatagaacattcctggcttcaaaaaccatattggagggcataaggggaacatgaagctcttatttgaagaagtttcaaaaattcactgcagaatgattagacctaccgccaaaaagcactagatatatatttatgatactcaatagagttgtactttcataattgtcactgtttatagttaaaataaacccaccggagaatgcaaaagaaatgtagaatgtagtgtatcccacaagaacgtaggcacaagggaagtcttacaaaaaaaggtcttac

SEQ ID NO: 40007 - DNA, 1128 bp, Oryza sativa
tcctggagttggtatgtcagtccgggtcagattcattccaggctgaagcgcaagcacggcaaggaagtcgctggccattaaatgaaggttgaaatgggcgtccacggaaaaagcgggcgagcggagcaggaggcgcgtgctctgcttgtcagaagtcacttccggctgtagactagccctcattgtaaaaagcatgtttcctttcttaggcagctagaggcccatgtggtgacccctgatcagataaaaaggaggcccaggcctaagagagaagggggagaaaaaaaaggaggaggggggctagagctggaactctctctcgctctcgagctctctgtattcctttacacacagatccaccagaacacaggagtagggtattacgcttctcagcggcccgaacctgtctacgtcgcccgtgtgttgtgcgattcttctcgctgacgttcctcagattgagggcgaagaacctcacttagctcccccggccgaaccggcaaaggggggcctgcgcggtctcccggtgaggagcctcactctccgtcaattagcaagcgcgaataatatgagcaactgtaagttcgacctcaacaaatatattttgtttgtgcatatttgattgttgcttgaatattggtttttcttgcgtattctagactgtgtatcggttagtcgtgaggcaacgtatgcagcttccaggaggtgaaggttgatcaagattatattaagaataagaactactctgagcaggcaagtcatcactattccttgaacatgttgatcccaattgcgaaattgttttgtttacaaataaaattgcatgcaatgatgaacatcccacttgtgattatgccatgccttgattattgtttacccttaaatctttgtaaccatgtttacgtatgagtccctagtcaactatgacaattgcttagaaatgctattctagaatcatgcatactcatatttatcaaatgctatatgcttgggcaattacctttgggaaggtaattgagatgcggcatgtggagacatgagcgccacattgccatgatgttgatgacatgatttgtgaaaggagaaataaaattaaacaattgttttcgactggggtggacggaggatttg

SEQ ID NO: 40008 - DNA, 662 bp, Oryza sativa
ttttattaaagaactccctccgctttacaatgcacatttatatttatgacagaatggcctgctttgtaaaacgggtgaaatattttttaaaagtaatctgttaccttccttccgtacatacatatttttaactcaaatatattttagtcgttattaatagtgaaagtttacaaatagaccttgtccacaacgtatattatcaaccggaagggagcaagtaggctagataattaatgtggatggatgatggtagtagtcgtccttgctgagattcttccttgcagcatgagtgcatatatgtggctggcatggcagctcgctagtacttgctcaggctccgggcttgctcgacggcatacacacaaagtcaggttaagctatatatgcaagatactactactatggattgcgtagtacttcctcggtcctaaaaaatgaaagccaacctattattagacatgacacatctcgatacaatgaatatggacatactaatctatgtccagattcattgtcacatcctaatactagatttgtttttttagacagagagagtacatgctatatccatttcagaatacttgtttttctagattatttagcatgaattagggtgcaaagaaaagaactatagtactcttaataaataatgtatagttaga

SEQ ID NO: 40009 - DNA, 650 bp, Oryza sativa
ggttatgaaaactggcaaaagatcaagcacattccaaacaagcctttataagcatccatacatgttcaatgtaaagtccatgtgtgctcctccatttcttttttttttatttgaaaagttatgctctacggtgattatactgttactcatgttgattctgttttgttgatcaggaagtaattaagcctgtcaaatatactaaatgctgggggcggatcatggtgtgcacatgcacgccaatgcacggcatttggaacacagccagagaagaggacgttaagcatggtggctgagatcagtaagccaaaataaaactggcatggccagattgtgaatttgtgatctttggattatttcttgctaatttcagtataataccgtacattctgtgtttattcattcatttacctgtttcatgtttctcttattattccttgtgttggtcaagcgcatggccgggcttgtcggtgcagcgccctttgtgtttgtggtgttcctcatgcgtgggatgcatggcccgcgtcgcggaggatcatgttgcatttccacagatttcctgttcttgcttgctgttaaataagagaagaaaaactaagaaaagctgcacagttctggtagcacaaaacattttgttcaagtgtttgtctaag

SEQ ID NO: 40010 - DNA, 699 bp, Oryza sativa
aacccaatcccagaaattctttgatctaaattcatctaattccaaactctttattttgataccaaattacctattttaaacattttatttaaatttctttatttatttaaataccttttatttatttacattctgaatttaaaattgttttaaataaccttgttaaattattatattttattcaaatacctttttaatttattttatttatcttaaatacctttaaatttaaatctcttgttttatttaaaaaccccttttaaattaaattttcctataatttatttaaatacattttcgtcatttaaatatctttatgatttaaaataccatttcaaaattctttattaccctttttgaatattcaaatttctttaattaaaaacctttttgaattcaaattcctttgatttatttaaataccctttttatttctaaaccatacctataccatcccatagccactaaacagccgccgtgagaactttacgctttccatggagacattcacgtggtctcaaaccccgatgtcaaaccgttggtcgtaaaacccggcataagctaatcccaaggtcaaagtattgctcctcgcaccccacgccttaacgcgtacagtggttggagcctcactactccatcaacctccatagcacgccgcacactagctttcgggctctgtgcgaacctagcagctgtgct

SEQ ID NO: 40011 - DNA, 734 bp, Oryza sativa
aaccaaccatgtgggaagcaaagctcaaatgcagggtatcagaggcacactactaactactttggtggaatatttggctagaaagaaacagaagaatttttccaaattcttggcttttagtaaatgaagtagcctaccttatcaaacaagatatggatttgtgcaaaatagcttttaagccccccctgattttattttcttcttaagctgtatttcctctttgttatagtccatgtaaactctgtaaactctttgctgggtttcggccttttccctaatttaaattccggcagatctcctaccgtcgttctcctaaaaaaattctaaaagaatttacattattcactagccactatgtggtaatagaacattcatttcactcacagatactctaacaatccaggggctagtgacaaactggaccacctattagcaacttgccccatccaatgaagagcttgattgtctatatgagtggtgggagatgctctctacttgtcaatgcgtaaccaaggagaaaggacttcgcacatgcacttagggacgaatcctgaataagattagagggacactcatctcctttctccttcaaccattcattatcttcctcctctacctcttctccccctttccctctccttctatcaatagagatctagcggggtaggggggattcaatcgtaagtctccctagcatccacgctggattcgcctgtacatgccattgtccttct

SEQ ID NO: 40012 - DNA, 723 bp, Oryza sativa
attttggaaatggcagataagactccaagtttgtctggtaaaaatacattcaaattcttttaggtaatagtgatgaataatgtaattgaacagtctgtccaattactttgttacagtttcatggcgggggtgttccaatattattgtcgatgcgatagacacgaacaccacaacacggggccggctaaggccttgtttagttggggaaaaaatttaggttagttgtcacatcggatatacggacacacatttgaagtattaaacataatctgataacaaaacaaattacagattccgccagaaaaccgcgagattaatttattaagcatgattaacctgtcattagcaaatatttactgtagcaccacattgtcaaatcatggcgtaattaggcttaaaagattcatctcgcaatttcccggcaactgcgtaattggttttttatctatatttaatacttcatatatgtgtttaaatattcgatgtgacaatatgaaaaaatttgtttgggaactaaataggccctaagccaaattggccagatgtgatcgatcgttcaaatgggcaattatgtttgctaggcaaaccatgtggccggaggccatgcatgtagctatagagaagactctggacgaaagacttgtggagttaacggcacgtacggtgccgcacagggttatccttgacacttctgctttctatcactgctgctgctgatgatga

SEQ ID NO: 40013 - DNA, 615 bp, Oryza sativa
tttttaattagggtaattttactattcttgaaaataatatttagaggtaccacattttctaatataaaatttggtacctcaaggtaccaaaattttttttcaagtcctataaaattcctcttagttatcccgtccagatggttgcccgtcttgtagtatttatcgatataaccaaacaaaaatattcgaattcacgagcagttcaaatggccggtataaagtttgcatctttaaccgtaccggagcattaatttcttgtatggatgcatatgcttaaatttagatagggtaattatggaccttggtgatttcctttttgctgtgatcgatttattgatccgaaattaaaaaataatattttttatgggactatctatacaacattcgactaaaaattagtctaaaaatctgtcaaatgtaactgtaacataattacaatgtaattttcataattaaactatatttatactataattacgtatgtaattttcataattacactatatttgcactataattacatatataacttgcatgtaactcgcatgtaattatagtataagtaagatataagttcaaactggatcataaaaatatagtagcccaatggggcag

SEQ ID NO: 40014 - DNA, 705 bp, Oryza sativa
aatgaagataaaaaaggaaaggatggatggatgtggactttttaaactttgaacaaagaatttaggtataattttgaagggaatgaaaatgaaaagtatttgtttggagactttttgaactttgacaacgaatttgaataggatttctaggaaatagaaactaagggagaagtttgaggacttttagaattttgaaaaaatttaaatatagaaatttttagaatacaaaaggagtttgaaatctttttaaaataaaactaaagatatttattttaaggtataaatttgaaaggataaaataaagatgctccaagtttatagaattcaataagaaccaaatataaaacttgtcacaaaagattttctctaatattttataatttaaaattgaaatagttcacaaatgatttaatttctgactttggatgaatttttgggatggtggcaaaaataaaaggaagggaataaattggactttagcccaagattatgtggtacggatttctgagtgaaacatttgtgggctaaaggaaattggactttctaaggaagcgattggaaatagtgttcttaacacaagagcaatcatttaatatttgtattaatattattcttctgccgaggagaatcaaaccttgggaatcaaattggcggtttgatttatataagaatttggatagtggaacatctagaggagtttgtgga

SEQ ID NO: 40015 - DNA, 543 bp, Oryza sativa
ttcatctttttggcaatcttcttagcttcctaaaaccgttgttcatgcactccaactttctgggccagatgagccaagctttcgaagtcctgagccgaaaattttctctgatcggatgcaataaaccctggaaagccagatcggctaattgagaatctgaaaaggacaaactatagcatctgttcctcatatctctgaatctctgaatatagtcttgaatagattcatcatgcttctacttgactggaatcagatctgtcagcttcatctcatgaacgccactgtaaaagtagctatggaattgcttttccaaatcggctcaattactgatagaattgtatggaagattagagaaccaagtaaaggccgatctagacaaagacaaagggaacatcctaaatctaaaagcatcattagccgatgcctctcccagctgagctagaaatcggctgatatgttcataagtagaaaatttggaaaaatctagcaccttgtatcagtgtggtaatggaatcctatcaaactactcaagatatggtttcc

SEQ ID NO: 40016 - DNA, 629 bp, Oryza sativa
tacgatgctcatggaggaggacaactcttttttcagagtagaccagtagagagagatgagtcctatcaaactctgcagatctgttttgatgagtcagatcaaagtctatgattcacatgttcgcttccggctccctaacaaccgccaacctgtaccccaacgtcgaggccggccgccggcgacagcaacttactcccttcgtcctataaaaaagaatctaggaccggatatgatatttcatattcctataaatctggatgatgtgtatccggtactaggttggtttttttatgggatggaggaagtagctctcattgaccacgccggagcaagaggcagtggtggggatttgggtgcacgctaaatactactccgtagaagagaaggagcagagaagacagctgaaataatggtgaaagcagaggaaatctttcccgggctccgggtctgatgggcattgatagatgacaagggtctatagaaggagaaacaagagagcgggagtgtaaaatgataaaggatcggaagcattctcccctctactttcttttactctagtatttttttatatcagaaatttaaactatcatagatctgatttaaaattcatctatagtgtatattcattt

SEQ ID NO: 40017 - DNA, 897 bp, Oryza sativa
aaattacatatgtattttagtgtattaaaaatgtaagtcctaaaattacatatgtaaatcatatggaagtgatgggtaagttagacaaaatgagttagttgctcgcatggtaagcgtcttggtttgtaatgctcagggcatgagtataattctgctcgtctcttggatctctgattctttttgttttatgtattgcacgaatcttaacatataccgtatggattatgaatcgacatattctttccacaaaatatggagccatttttttagcagctccgttttttttatcattgtgcatatcctctaatacggtttttttttaagaactagggcacaaagcccccctttccattaatggaacggcataattgtcttacagattctaaactagaaacagaaagcccagaaagagggttcccacaaaaagaccagcaaaacaactggttgagggagaatatcctctaatacggttagaataatatatatgatcaagctaatattcggaattgtcttttttcctcttcttaatcccatcggccataagtggttagatctatattcttcttccctcatcttgctctccaactctattcttaacccatacccagtaatataggccggtatagtccttccctcatctttattttcaatcctattcttatcaacccatacccaattatataggcaagtatagtccatcctaatcatatagacccgttgcaattaatgtgtgggcatgttactggtgtatagaaagataaagatatactgtagaaatgaaaattgttttaattaaggtcttctgacctatagggtggtaagagcaaacaattgaattttcatttgtttcaccaataaaaaatcggaattgctaaatatttgttgacagatttttga

SEQ ID NO: 40018 - DNA, 1030 bp, Oryza sativa
tttgttccatttacatattattgttgtagtttaagatagattaaacatcccaaatctttacacattttattgttttttccatttacatattattgttgtagttttagatatatgttccaacattaaatgacataacttccttaagaaacattaaatgactttatatcttgtataatttattgctgtcatatcgttctatacatatatttgtatacgacaataatatttttggtggatgtgctaaatctgcaaaacatttgtatatgtacaaatacatgcttgttgccctcaaggttccataaaactgacaaaaaccattcggttttcacgaaatattgaggtttcaaaccagcttgagtaacaaaccgcttggttttcacaaatttttgagatttcgagcctacttgggttgacaaaccgctcaataaacagccaaattgaaaaaaattaaatcaaactagattccacttttttaaaaaaaaatctataactctggttttcacttttttcgcgaacatgtaaaagattgcacgtcaatatatttgaagaaaaacaatgtttttgttacacaacgcaatgcaaccgcccaggcggccagcccgagggcaaggaaacaagagaattgaaaaaaacaaagactgctagtgtaaaaagagcgttgctcctgtatagaggagaagttttacggtatttgcattccagaaatagtaaaaatccaacgctccataataaaaggtatcatacaaaaagtatttaagtattaatataggtacttaggtagaaagggtaaaatgataatttgctagaagatgaaaaatggtagaattgtctatagtattagttgtaggtacataggtaccgcatcagtagttcatcaccaaatatgcggtaagtcatctccatcgcctctaattttccattatattatttgcattgtatttttttatatttgcatattgtcgtgcccttttcccgtggctgtctctaccagtttaattttttttcttagtagcgacaaaataatgaaaat

SEQ ID NO: 40019 - DNA, 1196 bp, Oryza sativa
gaatattttaataaaagtataagtcttaccaaagaaagtaaagctaccggatcctacccgattcctatgaagacttctcggactagactcctattctattcctactccactaacttggagaaaactactaaactagagagaacggttgattctttttgctggaggtgtgtgaaaaaatggagggagtgaggggttatataggctggtaatgacggtgggaaaggtcggtattgccctccaaccatcattggggatcaatcccagccgtccagccaaaccctacatccatcggtgttacggctggttcggccgaaccctgggctggctcagttcttggcaggtggcctccccgtttgctcctttccgcagacttgtgaattttgggcctggtggatcttgtgaatttggtgttctcagcccatttatccattagtttgttttttggcagggtttgaaagaatgatcggaaggtttgctgtcacttttccctcaattaaggtcaatctttgccaaaaggtaagaacctaggggtagggggaaattttagttgacataaatatgcattgcaagcataataagttctctttattttaataatattgacgggcgaaattgatcgctaacgaccgtcaacaaaaccccccaagctggacccttggctcgtcccgagtaaaggactcacaaaaaaaaacttggtagctgatcaggagttgctcctatgcttatatctcaaaagtataggtgcaagaagatatgtgtactctctctcaatcaaataaatttggcacgggggcttacccttacccctgattcccacgagacactgtccttccttgtcttgagcggttgagagacagaacacaaacaacaacttgaatatcttgtggtacctcctcaacctgcctacgcaactctttcaaaataaccatagctctttcatatgcgaccttcgacttgcatgctgccctcatcactccaaatgcttcaatcatcatcatgtttgttatgtaattttcatgcaccccatccggtcctgcagtctcacgatcacacttgtcactgtttgctttcatggtatacctctttaggaatagacaacagggatcttctccagttggatgtgtacgaacgccctaatcaggtgtgtgcaaaacattcctacaacacaataagaaaaaaacaaaacaatttttgtt

SEQ ID NO: 40020 - DNA, 1046 bp, Oryza sativa
cgctctccgccgccggtcggtccggtcggccgccgtcttgcgccgctgccgcatgtgcgccgcgccgtcgcgcgccatggtcgccgggccggtttgcgccgtgcccgcgcgcaccggccgcgagctcccgccgccgtccgatctacccttgggtagatcggggccatcggttcggccgccgcgtggcgcgccgctcctccccggtccgtggacccgatccgccgtggaccgccctccccgagccgctgaccggtggggcccgcttgtcggcgcccttcctccctccccgagccgctgaccggtggggcccgcatgtcggcgccgcgccccccttgatgacgtcagccctgggacttattgcgcaataaatgatttaaggactttttttatagtaataaacacagtgaatcttctaaaaatcataactaattcatccgtgctccgtttaagcccattcaagtctcagtaaatcaagaaaaatgtgtagaatccattaaaaatggttttgttctctgtttcagtagtcttatagcctgtttgcattgtttgccttgtatgtcgttaattccggttcttctacgctccggtgtattccagatagtcgccaaggttcctccaccagcagagcaaggcaagtcatgtttgtcacttgaacatgttgatcctatattgcaaatgctctattgtttttcttcaaatactgcattgttttataatgttactatgggatgttcacctattgttacaaccatgctattttggtaccatgctccttgttagcttgggttataacatgaatagactttggactaggaattgcttagccatgtttagttcaactagcacacaatgagggagatcctattactgtttagactgtaggttctaatggtaatgttgaattagtaccaccgctttggtgttgattaattaaaatgaatcacatggtgggctgtgggtgcatggttttgctagtcgcacccatggcaattaaggaccggttcatgggatgccctggaagaacttatcgtacttaccacaagcca

SEQ ID NO: 40021 - DNA, 1720 bp, Oryza sativa
actacatatatgcatgtactgattaaccggccagcatgccatttggcctaattagaatactcaggagcatttgatatatttcccgtgttctctctttccgtccaacaccaaaactaatactccctccgtttctaaatattggcaccgttaacttttaagaactgtgttgacctttcgtattattcaaaaacttttgtaaaatatgtaaaactatatgtctacataaaaatatatttaacaatgaatcaaatgaaatgaaaaaaattaataattacttaaattgtttgaataagacaaatggtcaaacatatttaaaaaagtcaacggcgtcaaatatttagaaatggagggagtaaaatagtgggatgatgtcagtagcaaggagccacattataacagtgtgtttctctaaataaatatttacttttacgctacaactaaaccacgaagtcgcaaaatccaataacagattttaccatatttggtgtttcagaaaagattaagtacacaaggataaaagataaatgtggcataaacaatatacataggaaatagaaaattgttagcatttcatgttcacattgtaaactatttaaatttatctcaagttaaacttctatagctttggctgacttcataaaaagaatataaaactaccacacccaactaattgagttagaattattatgaaatatgtctccatagtgcatttatttatattatagatattgctatacttttctattacttattagattaacttagaaaaaggattaatgaaaaggaccattattgaacctatgctattataaatgttcggataaacactacacctactatttggtaacaccaaaaattagaaattaaaaatattattaattacatatatttttgtttatagacgtatatgggcgaaaaaatagggcgccaacaggcgcaccgattttctagtttatatgtctatttttagtctctatactttgtgtgccgggcctggccttccggcccgaccgtgccgggccagcccagcatgccggttgggaggcccaggcacggcccggcggtcaggccgggccggcatggacccgaccccagtcgagccatgccgtgcttgggccgagccaaaatgccgtgccgtgggccggtccttcgggcctcgggttttatgtccatctatacttgtcagggaaaatcaatccttttaattttatttttcatccttcctctcgtcttctttcttctctggttcgttcttcccaggtagagcaaagggagaagagaaggggggcgccggtgctccggtggctgggtggttgcgacgccggcggccaaacgtgttcctgagggtggggcacccaggaagggtggtggccggcagagagagtgtgggatgtggccggaacagtcggtagaggagctcagctctggcgacaaaaagaggtggtggtggtggcttgtttcggaggggggaaaggaggggaaaatggtgaaatgggctctcctcggcgaggcgaggctggtggtgagagggaattggaagagttgctatggaggaggagatcggccggtgactttgtggtagccggccatggtggagagagaagagagagctcgaggagcttagttgtggagagggatggcgagcttgctggccatttataggcggagagaggcggtggagtaagtcggctgcggaggagaacggcgaggagtacacggc

SEQ ID NO: 40022 - DNA, 815 bp, Oryza sativa
gagctacggctccaacggctagaggaggaagacgaccgacaggtgagagccccacctgtcggcgccccaaggagagagggagggagggaggacttcggggaggggagaagcgggccggcgcgggaaggaatgggccgacggcccaagaaaaggaaaaaggaggaaaaagaaaagagaaaagggaaaaaggattttcccagggatttaatattgcactttgcttattttaattggttaaaattatttccaaggctctgaaaattccactaaaaatcctgttaatgtagtagagcatgtagaatctaagaaaaatttcacatgccgattccgattattaaatgcatttattaatttagggtttctctcttgcctttaaacaaataatttcttgcaacaatttattaattgaatttttgctaaggagaagaacttctgggcgtgacatacgtatacaatgaataaagggaaaattaacatttcttatacgtatatcaataataaataatgtagttgtactagactaagagaattaacatgaatgcggagattatacaccaaagtgaatgagaaatgaagctggcatgcaaagaaacacaccaccagcgaatcacgtgtgagcacacggattgatgggacccaaattaggccaaatgttgatggttctttaaatcataatatttgaccgtcaatacctgcatataatgaaataaaataatgaaataaaatatggtattcaacttagtggtagggattattactacccaattccactagtgttgcttaaatatgtgtatgcgggtattttaatgagaaaa

SEQ ID NO: 40023 - DNA, 1422 bp, Oryza sativa
atcacatgttaatacatcttcttaatttttttcaatttttttcataatcatttgaatgacatgcaaataatgagggttacattctgtcgagggatcaaaatagtttcccaccacaacaagcctatatataattaatgttggtatattagcacttctgaaatcaatcagttgcaaataaagagagattaatgcatgactcccaagtttaaatgcccatgaaaattacgcagcaaaactctgaaaaactatgcaggttattagcctgataactagcttcagcctgttgtagcataataggcagttttttgagcttcatttccttttcatatcttgaaatcacaggtcaagagggtgacaaattatgcaaaaaggcagcagagacaaaagaaaacaaggacatgtacatgcctcttactgagaggaaaggacgccattcctgaagaagttgcatgaactacatgctatgcataatagtcaattttaccttttgcttgaagatgagatgagcacattctgtatttttcccctctttttgtaagaaagttacatttgcaaattgttagtatattttccctggacggtagctccagaaatacatccttatccactggtgaaaaaagtttgccaaaacttgcttgtcacccaaaggccaaatgaaagaggccatggctttttgttgcgtgaggcttctcatctgaacaaaaggcctaataatgtagagcaccttgcacagaaagcacatatatatctcctttcaccatgagtattatttttttcttgttcttgccttttgattgttgatggcatcgcgagattcatccgatcttgaccctcttcttgtccttttgttatttcaggggagctttctctcagttttccatcaaaaaatgccaaggttgaacaatacagcatctgatgattttcagtaaaaaaaaatgccaaggttaaagctgaaaatttgcactttaacaaactaaaagacatatttttcttctcaatcaaattaaaagacatatagtttctcagaggcattcccaaaacaagtaaatataataatttaaaattatctatactattgcagcagttttttttcggggaaatattattgcaggagaaaacggacaatatgccactctatacgtggggtttcgatgaaatgccactcaatagaatgcaccaaataaaatgctactcagtacgttgcctaacggatgaaataccactttgaggagttttaaccatttttatgcccgaaatatactttgttgtggctgcgaagagatagggagaggggagcactgggggaggaccggatgggcggcgctgaaggcctcgctgcgggagacggcggtggcggcgaccaaagtggcagctgggacgacggggcggatggaggaagaggtgatgacaaggacaagttca

SEQ ID NO: 40024 - DNA, 519 bp, Oryza sativa
actatagggcgaattcgagctcggtaccctatattacaggtaggattcttgtgtcttgtttgtacctttcaaaactagaaaagctattacaaagaagttatcccttcaacttttttcctgattctgatgggtttatatcataggtatggttgtcatatgtcttgtttgccactttgcactctaactgtgatgattttgcattcttctagtttctcttatgcaacattggaactactgccatgttgccttgtacaatcaactagatatttagtgatgtttatgccctctgttcttaaatctagtgtgttgatcctgccacaaatgcgtgttttggaaactgacagtccacaaaacataacttataccatgtttctatttaaaaatggaggttgtatattatttttgcagttgcgattggagctggcatgaagagagagacagtgcgacacaagcgcgtcgacccgtgttgtgttggtcacatgtaccaccaacgggcaacagcctttgcacatgcacaaa

SEQ ID NO: 40025 - DNA, 1989 bp, Oryza sativa
  unsure (1)..(1989): unsure at all n locations
atcttcaactagaggtaaacttgtcatgacggcttgcgttctcgggattagtgcttccatctttatgacactctaatcctatttatgtaaatcgtcgagttatcatatatcctatataatctctggcaatattggtatttaatccttaattagctaacatatattactggaaggcagccgattaggttaaatattaaccgttgacctagattatatagggtatccaccaccctatgaaacgtccaaccggttgattgtctagatattgtccttcttttctgtcacgcccggaatttctatccaaaattccaaacgcttacatgtgtgtaaaccctcgtccatgaatcagccgaggcacacaataacaaattgataataaagtacaattattactctaattaataagcgaataaaatatcattacagaggtagatagttcctctcaatcaattaaagttctaagcagcggaaaataaaagaaacagcgcaggcgacttctcttcacagtagcttgaccaggactaggcctaatcctcaacaccatcagcatcactatagaactcctcctctgatgaatgattgcaagtaagtatatgacatacctagcaagccacgcagcaaatatacaagtgcacaggataacaaaagatggcatagtatagtctcatttgcataaatagcatttaacaaatatttcagaatttaataaaacagttaaataataattaaacaatattaatccaacgctatacaacataccctgttgcataggcccaaccattctgaacaaccaatcccggctgcacagttctatctccaaaccaggaattaaccattctaaaccaggagctaaacacttattaaacagcatcattaatatggtgagaaatgtgagactaatcagaaagaacattgtagaacccgccattaaccgcgggcacggctattcaaatagtttaaactctacccaaaggtgtacaactgtaccaacaaaacacaacctcaacatcatgtcaaccaagcgtcgcaatactaaacaggtccccgaatagaaatggggacaataccctctatataatacaattaaaagcatgcaccggtcttggatcataatcacccccttataaacaaggtatggactccccaacgacccccgtttgcttatctccgccacttcacagtctggtgctctactatgaaccatactatacagaaagtaaagccgttgctcacgccggcttgtggttggacggtaaatgtttcacaaccgaaaatcgtgaaccggtccttaattgtcatgagcacaaccatcaaaaccatatgctcacaacccaccattatcaatttttagttggcacattaattaattaaccaatcatgattaaccatcatgagctaccattaagccatcattaaataatagtgaagcataagttatcccagtagtgtgctaatgtttctaagcataagttatctaatatccagctgaacccatatatataaagctcaactagtcaagttataataacccaagtatcanagaatagggtaatcaagaaataacaaagcaataggttatttccacccaatgacattcaaaaataaatgcaattgttgaataaaaacaatagctttaaacgagatcaacatgctcaaaggattgtttgggatctgtgtgacttgccttgctggccttggaactcttcaaagtcttctcctgcaaattcggactctccgggaacgtcggaatctaaagagaaaagaacaaaatcaccaaaacagcacataaacaagcatgaacagtacatgtggatatttttaacatgtagatctcaattttaaaaaaatttaaagacttgaaccaactaaatccgagctaagatgaattagttatgaattttcaaagattaaatcggattaaaacatttatatagattttaattgaattatgacacaataatgaattatttttgaaaaggaaaaagggga

SEQ ID NO: 40026 - DNA, 657 bp, Oryza sativa
aaggtggggaagggagaaagggagaggacttcggcccaaataaatgttttctgaattttagaagggctttagaaaatttggtttggatagaatttgaatttggaggaaattcacaaaagaaagattttccaaaagacatattatctagtttatttgagtgcaatattttgagagaaagaatacattggactaaatattaaagcactcaaataggaggggaaataaataatatgattactcacaaaatatatttttgggaataaggaaggaaaatacttagaggcaaaaaaaaaaggatttgaatccttaaattggtagtatgaatatttggggaattatttgtggctaatagggaatttagattttggatgagaacgatgaattaaaatctattttcttagcacaagagcaatcattccaaaatttgtaataatactattcttgtgccggggaggttgaagccatagggattaaattggaggctcgatcgaaaaaggaatttgactattggaatatctacagaaggattggtaacatgtcaggatagagaagaattagagataagactagatcaaaggtttggtcaaggattaattccaatgaaattagaatcatggttggtggtatttcttaatgatattactagaaatataattc

SEQ ID NO: 40027 - DNA, 859 bp, Oryza sativa
actcttttctccccataacaatactgaaatcaaagtggaggaattgataaacctcgccgtcgccggcttattcaatcgatcgtccaccgttacgccatagcttgcacggtggctcgatcattcactcgctgtgtttttcaacagcacgcgtcgccggcagcgcttcatcatcatgtgcaggcagctccgacgagccgtatccatgcagctgttgcttcccggcgccggagtagcatcgcctcaggttgctcgcatgcacgacggcctgcacgtatataataaaatgagttcaaatattccacggtgttatttattttgggatgaggagagtaactcgctacttactacttccgtctcaggatatctactactacttaaaaagtaaaacctgcttccgtcgtccgtgaaaaataaaacgctgagaaaaaaacgaaaaaaaaggtccgattcccattaaaaacaaaacttccgactcacttggaaattccgttgaaaaaaaggaaagaaaaattactgtatgaaaaaaaatcaagcgcgagaaaagggcaaaaattttgttctgccgatcccaaaaaaggtgcgacaaaagagtttccgtcttccgtaaaataaggaaaatctatatctatatctatacctattataaaaatacgtaaggtttttgtattttttttcgtccgtcacttttttttttgttattttcgccttttttttccgttttttccgtccctccaattttttttgcctttggttcatttttcctttttttcacccgccgttttttcgtccgtttcaggttctcttttttttttcctttttgtcggcattccttccttcaattggtcgtaaaaatcgattc

SEQ ID NO: 40028 - DNA, 992 bp, Oryza sativa
ttttcaacttatttttttttttgtaatttggtactgaactgagttgtatgttttttcaacttctatgtgataatttaaaagctgagtttggtactgaactgaactatatgttttttcaacttctttgtaatggtctaaaagctgagttcatatgtttgtgtttatcagctccgtaattgaaaactgacctaagatgttagttttttttttcaattgtctactctgaaactaagctgagcagccaatttttgagtgctaggtgtgttatttggatttggagttcttatgtagtttgatttggaactgaagtgagcaaccaaaatttgagtgcgaggtgtgtaatttggatttggagtttctatgtaatgtgatttgaaactgaaccgagcaacaaaaacttgagtgcgaggcctataatttggattggagtcttgcctctgtccttttccgttgaacatttcaattgatccactctttaatttccttgacagtataaaatcatatacccctcaaaaaggttgcaaattttgaatacaaaaacaatataatcagatatacaactaacacagacaaggagacttctcagacaagcacagagatcactgggcgtggagctcacaagaacgcggcgagatcagccgcgtcggcggcgagctgtgtcgcgccgcccttgcgccgcgccagagcgagcgccaacgcggcggccgccgcggcgaggacgacgagaagcagcacggcgaggccagcggacaaccacaggcgccgccgccgcgcggcgacgcgcagccgatgggcctccctcagctccccctcggcggcgcccacgtcgcccgcggccgcggccacgtgccgctcgatgtcgtcgacgcgcgcgccctgggactccaccagcgccgccatgtcgaggaacagctgctgcagctcgaggaggccgccctccacctcctccgcctccgaggaggacttcatggccgcccgcaccgccgcctcgg

SEQ ID NO: 40029 - DNA, 847 bp, Oryza sativa
tatatatatatatatatatatatatatatatatagggagagagagaccgtatatgactccagttaatttacgtgatatcgcttggatggtaattgcaggttagatggaaagcattggctgttacgtcttagagaaattcccaccttgtaccgtaattgattctaattaattgatttaggtgacatgattagaaggtaaattaatatgttttgtttaacatgtcattatatccgattgatggtaaggccccacaacataaaatatagataggatctacggtaatgatagtatcatccatctaatcaatagctagatctttttaattaacgtgggagctcgtagctagaaagtgtctgattagtatgattagtataggtatacatagacagaaaagacagaatagatagatagatagatagattagaaacaaaatgacacgagagagaaaagggcatttttatcatggcagcaagttgcaagtatgacaggtgccttctttcttgcaaatgaagctaattagttaacggaatttatcatggcagcaagttgcaagtatttgacaggtgccttctttcttgcaaatgaagctaattagttaacggaattgctagtttactgtcgacagtaaacggggggaaaactgtcgaatttttgaccgtcggattcgccttaagattagtgctagcgcgttggtggaaaaaatctgcgcgataactgtaatttgtgttctgcgtgggggtggggtttgaacccaggacctcattcccaccagctatatgtggtagccacttcatctcttgcaagtttttgaaaagtttgcaaccctagttatattgtagttacatcg

SEQ ID NO: 40030 - DNA, 598 bp, Oryza sativa
tttggacatcagattcgtgaagccatcagaattattgtgcggctcatccctactttggaagttccatgagaaggtattaataaactaccactcttaccttaaaatttggacatcagatttgtgaagccgtcagaaatattgtgcggctcatccctacttctattgttagtggaagttccgtgagaaaacaaactaccactcaaatattgtgcggctcatccctacttctattcttagtggaaggtccgtgagaaggtattaacaaactaccagtgttaccttatttacttttttaatgcttatgaaattatttctccatttctaaaatgcatgctataataaattcgtgagatttgagttaaaatttattagcaccattttccctcaaaatttttgttactaacagcccaatttatattgctgtaatttcagttgtaattttccttcgaaattttctgaagctgtaatttcagttgtctcgtattcacatttaataagcctttaatttatgtagtctatgtaatctatttggtatattatgtcagatttagttatttgtattgatcctcaatttatatttcaatctttaaaagtcttt

SEQ ID NO: 40031 - DNA, 686 bp, Oryza sativa
tgtttcaattttattggtaaattagatcatgtttcaactgttgcttttcatcataaagaaacttatatggttgttggagaatgaaacctcctcatttagatagtgctagttccatttctcttttcaaatctacattttgatgtaggtttttagaactttgtgataatctaacaatatttgttatgatttatttatttagctgatcgtttgcttatatatttctgttggagttagctaactcggcgctctatagacaattgggcttggctacttcctcatttattgtgagcacgtttttcgaattattcgtaaaaaaacatttatatagaaatttcttttaaaaataattaaatctatttttaagtttataatagttaatacttaactaatcctatgctaatcaccttgttcgatttccgtttgaagaactaattaagccaaattgtagtatcgaagaaagcctaagactgcatagccacttgcaaaataagaacatgtgactaattgaatatagtattttaagaaaataaatatgtactttaactaagggattagataaaaaactgtcgagtgttttttgggaggaaaactttcaaatctaactacagtatataatttcactagaactatatactataataataataacttggttatatgtattaaaataatatatgcaactttat

SEQ ID NO: 40032 - DNA, 594 bp, Oryza sativa
gtcttgccgatccagcggcgccgccgccgcagcggccgcgccgacgaaggagtcggtcatgagatcgttcatcttgggcgcaattgggggagattgctgagatcgatctcgcaaatctggggcaacaaaaaacgctgacttttttttccatttcttttcgattaaagacgacggcgacggcgaggtcgagttgtttggttggaattttgattttataagataaccgcacattcaagtttgaatatccatagaatttttgaggttttattttctacgtatagtgcgttatttgagactagtaatatgtccgtactaacgttacggcaaaatttggtaatacacgtgcaaagcatatggtaaaaatataagttaaactgagagcataaagctttactggtaatgcagccggaaaagtttacctggcacatgaaattcatgttaccaagtaataaataaataagcatgttttaaaccacgttgtataaaaatacaagtgcgtttaaggatacaataatacacaaataatacacagctccaccattgtacatggtataaaataaatgcaaaaaaaaaatcacccctcaaagatgaagg

SEQ ID NO: 40033 - DNA, 826 bp, Oryza sativa
acatgcaacaatattttgggaccgtaaacagttttaattcaaaaacgtttcaactacaaagttgtaggtcgcgtcgagggctacaattttgatataaagtttttcttcattagagttcacatgaaaaagttataaattattttttatataaagtttttagaccgtcctgtttagggaccggggtgacacaactgaacaagttgaacgacctaaacgagtgatctgcaagtttagggaccgggatgacacagtcgaacaagtttgaggacctgaacggtcgatttgcgagtttagggaccgggatgatacaacggtacaagtttagggaccggtgatggacttttttagaggctgtagttccgggggggcattttcctttgtttgctgtgaaaacaatcataaaaaggagagaaaaggtattttagcatagtgaccctattttgatatgatagtactacctccgtttcaggttaaaaaatgttttgactttagtcaaagtcaaaccgtttcaagtttgactaagtttatagaaaaaaataataacattttcaacccaagacaaatttattatgaaaatatattcaattattgatttaatgaaaataatttgatattagaaatattactatattttactataaatttagttaaatttgaagtagtttggctttgatcaaaatcaaagcatctcataacctgaaacggagggaggaacaatgtaccgaacggttttgctaaaaaactggcaacagttttatgtggtttcccgcaaaaaaaaaagttttatgtggttgaaacttttgaattttcaaccgttcgatggact

SEQ ID NO: 40034 - DNA, 643 bp, Oryza sativa
taatgctacttttaacaataagcttgaacatgctatgagttgttatttttataagtggatttaatcttttatgaattccaaattcagttctcttatgaccgatttgacatctacttctgttgcaagtactagtcaacctcctgttcaccacatatttagtaaaaatgatggggcaaccatgcaacatgctgggagtgaaaaccctagcgctgctgtatgttcaagtgacttaatttggttttggtgattaatgacaaatctaactatatgagactaatgtttttatgagtctttctttgactagtctcatttggatatgaaagtaaaaatgatgagaggtatgtattaaacttcacatattctaatttggtctctcttgtggatccaaaatatagtgtgagcttcctctttgatctttattgattatgtgcatatgcgttccttcatatccatatgtatgcacatcttgagggagagcttattctatattttatttattataagatctctacctggatttggaatcatctttcatctcatctctctatattggttatatcggggtattatctatcacacaagagagaaaagattgaaagatcttggattaaacaatttgggtaattggtgctctggtgataga

SEQ ID NO: 40035 - DNA, 584 bp, Oryza sativa
ttgttgatgggtgatgatgagcaacagctgaaggtggcttctattgtgggattgttggaattaatgaatgggccttagcccactcgaagattaattctttggaaaatcacaaaaagcccacctcatgggatggcatgcatgtggagtttagtaccaccttgcttattctaggagagggggacctccttaaaagggaggatgccctcctagccacttgaagcatgtgtggtggagagaagaggggaaacacgcgcgcgctcgcctcgcctggcagggcaggcggcgcgcgtgcacgacgtagctcctcacccttgcgcagatgcagcctccttttgcagttttgttttgctgcaaattcacacggcgtggagtccggataagttacgcgcgacttatccggttcggttacgcgcagtagagatcgtgcgggcgccctgatcaagtgacccttctctatataaaccgacccgctgtcttcacgcaatatatgcgaaaatcaatctagggtttgcctcctactctgtactgcgccgtcgctcgtagactactccatcccgctcgccggggggcaccaacgattggga

SEQ ID NO: 40036 - DNA, 709 bp, Oryza sativa
tcgactctagaggatcccctcaaaatcaaagcatctcataacctgaaacggagggaggaacaatgtaccgaacggttttgctaaaaaactggcaacagttttatgtggtttcccgcaaaaaaaaaagttttatgtggttgaaacttttgaattttcaaccgttcgatggacttgaagattcgtgctgagttaagagaaaaattagcaaactgctcacaagagatggggatccaacccagaacttttggttcacaccacgcacagggtaccaactgagctatgaaaaattttctattagctacaaacaaagcatatataagctatacgtagttacagtatatttacactgtattataagttacaatgtagtcaaattatagttacatttgaaagttttttaccccagaaaacttgttacagatttttagataaacccttctagcgaatcgtgattattcggatggcatttgagccaaactcgttttcaatgattgcacagtgtcaattttcttgtggactcactgctttagtccataagaagatgacacgtgtcctcagcatttgaaaaaaagtgtggtctctgtgcagggagaccagacggaggagtgccctctccctccctcccctcccttgccaagaacggcaaataaagtcatgtctcccagagtctccctttctaaaagcagcaaacatagtcacgagcggagga

SEQ ID NO: 40037 - DNA, 503 bp, Oryza sativa
aggtaacaatgtacactgtataagttataatcccatcgcatgaaaattatatcccaaaatcctaattcaacattcatgtcttgaattttagaaacatttgcaaaatcagcaatatttcttggtaagaaaataaaaacacatattcgaaactttgagcagttcaaagaaaggttcacatcttgcaaccttggaatctgtacattctgaaatttaaaaatgtaatctgccatttgtaaatataaaatccgctagttgtttgcagttgacagtgttccgaagtccaaacaccaccaaattcattaagacagaaatgatcacacagctattctgaagacttttccagacagataaacacgctgcaatcagggttcttctgaagtgatcttgctagtctaaaatgcatgccatccaaggtttcaaaaaccagcaggtactgcccataaccgctctaccagcaggctgtcaagtccaactcaaaattcgcattttaaatatagaatttt

SEQ ID NO: 40038 - DNA, 608 bp, Oryza sativa
gtaatttggttctgaactgagttgtatgttttttcaacttcttttaattttttaaatttggtactgaactgatttttctataattttttttttaatttggtactgaactgagttgtatgttttttcaacttatttttttttttgtaatttggtactgaactgagttgtatgttttttcaacttctatgtgataatttaaaagctgagtttggtactgaactgaactatatgttttttcaacttctttgtaatggtctaaaagctgagttcatatgtttgtgtttatcagctccgtaattgaaaactgacctaagatgttagttttttttttcaattgtctactctgaaactaagctgagcagccaatttttgagtgctaggtgtgttatttggatttggagttcttatgtagtttgatttggaactgaagtgagcaaccaaaatttgagtgcgaggtgtgtaatttggatttggagtttctatgtaatgtgatttgaaactgaaccgagcaacaaaaacttgagtgcgaggcctataatttggattggagtcttgcctctgtccttttccgttgaacatttcaattgatccactctttaatttccttg

SEQ ID NO: 40039 - DNA, 510 bp, Oryza sativa
cgtccccgcccgcggcgacgagggctacctcgagaggcgccgggaactcctcggacgttaccgcctcacgtaggccgccggcgcgctgagaaggcggcgcggcggacagtcgccgatgagatcatgagatcggccgccggcaagacagcaagatgcatgtgcgcggagcggcggaggacgatggaggcctcggcgtcagatcaaccatggcgcggcgcggcagactgagaaggcggagacgacgatgctggtttatcatagaataagatcaaaatcctctcttcatatttattacctgcaaagcacctctttgaaatgtttatcatagaataagatcaatattgtcactacttgccctgagaaaaaagattaattaatactgtcatatttaaaatagatacatccatcttgtgaaaatcaaatatttttcttttacaaaatccacgtaattctaggtacattgaattaaccatcagttttacagggtaccgagctcgaattcgccctata

SEQ ID NO: 40040 - DNA, 3003 bp, Oryza sativa
tgctggtgggtttcatgctagctaattggtgtctctcacgatcctttgggtgagcaacccatggtgacatacaagcggctaaaagagcgctaggtaagaaaccctctctataaaactgggaagcgcacaagttacgatggtgaattgaaaagagagagaataagagctactccatatgtgcagatgggccatgcggcaccataatccaacaatgcgtgatcaaaccagtgcaaacacctaaaagaagagggaagaaaatttaaaaaaagggaaaaaatactttttctaaaattatttgcaaattattcggggcaagcatcatgaccacatatcttatatttcaataaactaaaaatggtaaatagaaaaataaatgataggaacaatttgctcttttttaagattgaatcgatctctataaccctgataacaattttctaaatatatgtattttttttataatataaaataaataatatgtagattctaaatatatgtatttttatttgtactataaaataaataatatttagatatttcaacttttgaaaaacattacaattctgataaaatcaataaacaatactggtgttggatccatacatagagtcttatctaagcactctgatgctaaaaatcacaaaaaaaactaaaatattagtatattaacaatatatggtttttaaaggttatacacatagattaatcagtggaagcgccaaccggcatgttgattttctaatgaaattctattgctggatgttggatcggcatcccggtccacgtgagccatacacttactgaacatgtgcacacggttatgaggagtaggcgtgccgtgcgagtagtgaccttggcttgggcatttgttcatttattattttttattaaaattaaaacaaatgcaaatactgatgaaaaatggctggagaaattattggtgaaaagttggaagaaaaagagagaagagaacagagaaaatgagaataatattaagattatggccttatcgtaatataatatagtttgctactatgcttgaaaatattcaaatagatatgagctgtaataggttacatctgaataaggaataaccttttttaattaaaaaaaatgagttaataagccctcgaccttttatcttatcccctctctacacattcctttagtttacaatgttttaaccattatttttttcttttcaatataactatattgaactactctcgtacttaacttatgtgctattttactgataaaaaatatattttctcattgtgaaaaaaatagaatcagatgtaaaataaggagatataattatttgaccaaattttgtaaaatcaaaattttaattttttagataaaatttcaagtcaaatatgtgaaacccgtattatattttctccaaatttcaaacctaaacagacaatcattttggtgttcaacatcttgatggaactcttgtttggagtcaataaatttatttataaactttttaaaataattatttttattttttcagtttttgatggaaaataattttgtccatttagttttattttaaagtactttatttatattgagatttatgtttttgatgtaagtagcgcataatgaagtaatttttttttaaaaaatccaacggtcaactcacaactgttacccccatcccaaatttgtggtcgttttgactttttttgcttgcaacttttgaccattcgtctatttaaaaaattattgtaattataaaatagggcaagtcatacttaaagtacttttggtaataaagcaagtcacaaacaaaataaataataatttcataatttttaataagacgaataattaaaatttacaaacaaaaactcaatgtgacaagtactttgggacggaggaagtacatatatacatataggagatcaaaatgataacccaagggtttggaattttctcataagatgagataatcaggggtaaaaaactcatagggtaaatatggagttttcttctagtttataaattattgatcgtttggtatatgcatgcatatgaatatctatctaacaaaaaggtgtgtgcaggagggtcttctcgtggtattacgttgtatcatcatatactgcctatgcatgtattaatttatggaccgaaatcaatattattatatgaaaaattttagtagtattatattatcaagtataaattaattcaattaatggatcaacacatgaattgatttaaatggtttaattaattcctcccatgatcttttttgagttctttttggtacatatatgtgctaaccaaatgtgaaagcatatagtaccggttagtcacttggtctacacaccacatggctcggtggctgggtttgttttttgaacgttggtgtgtacgattaaagtgaatgcgcacgcaccagtgcaccatggcaccagcaccagcagcagcgagctagctaggttttccaagatgatcgctccgtgggaaaagcagggagtacgaatgccatgctaatttaatgcaagttttgctcacctcaggtgtcacatgctatgatgctaatgcatggaggaagataagcaaactgtactatctagcacatccagagatgaatgtagtatacaagtagtataatataatacacacccacagttccacaccagcttcttaattattgcaatttccaactaattaattagggcacacaagaaatatatatataattgagaaaattatatatatatatatatatatatatatatatatatatatatatatatatatatatatatatatatatatatatagggagagagagaccgtatatgactccagttaatttacgtgatatcgcttggatggtaattgcaggttagatgggaaagcattggctgttacgtcttagagaaattcccaccttgtaccgtaattgattctaattaattgatttaggtgacatgattagaaggtaaattaatatgttttgtttaacatgtcattata

SEQ ID NO: 40041 - DNA, 599 bp, Oryza sativa
gccggatatcgacttcagggataggcatggtattcccctacggtgtctccggataccgtcaggagagacgaaagcgctatctctgatctcaccggacacggattcgaggagcaagactaccttgttgtcgactacgagtcagaccttcagaccgacatgtcgacaacagttagataggttacccacatattgtactggtgttattatggtgaataaaagcaactccggctccggccaacaggatgtagggttattacctgacaactcagggtcccgaacctgtataaaaatccttgtctccatctcttttacctcagtctcgcatatatcctagtaccgacgatccccatactatgcaaataccataattgcgacatcaaacgtcgacagtggcgcgccaggtaggggtattttggtgctctaagaatccgacgagatgggttcaaaagatggattcttcgacaacaagctactcgacgacttcggctggggagatctaacccgatcggagcatgccttccgacgagatccgaaccatcatcgtcattgacaacttggtctatcgagatcaccccaaccctcaagatacgtggcatacc

SEQ ID NO: 40042 - DNA, 535 bp, Oryza sativa
tatacattctgttagtaaacatgaaaatatggatgcatatcatatacaggaaaacatctattgcatggcatattaatatttaaatccatgcgtgttgattagatcagcacgtcaggcatgtttcctgggaaccgtgatttcctagcttaagtcttcctgtgcacggggtaggcatggcgagagcacatatgcatattaaatcacaggcatgcctgccagcttcagcatgtcgcatggttcccatgaagacgcggccggcttacgacttgtcttgcatggcagcgctgcagcggcttgtcaggttgttggcacccatcggagcaactcagccgccggtagtatatatgcggacaagcaaaataggaaccaaaaagacaatatcaatctctgattagaaattaatctaacagaaattagattagaccgatgaaccggatcgtgcagcgtggcttgcatcgtgagcgattaaaaaaatagccactagatattggtctctctgtttgcatgccgcatgcatgtgcacacccctggatgg

SEQ ID NO: 40043 - DNA, 527 bp, Oryza sativa
aaaaaaaattcagccggcagtggtgtagcaaccccccctcccaaaaaaaagggggaaggtttagcccaaaggaatttgtcaacagagaaatagccgtctgtttataaattatgagagtagctacatgatagtggggacaccttaagatccactgcacttaggtggccctgtttagatcccatcccaaaactttacaccctgtcacatcgaacgtttacctgcaggctaaaagataactaattacatagattgtggctaatttgctacacgaatcttttaagcctaattgctccatgatttgacaatgtggtgctaccgtaaacatttgacaatgacggattaattaggcttaataaattcatcttgcggtttactgacggattctgtaattagtttttttattagtgcctgaacaccccatacgacaccctatataatacccgatatgacacgcgaaaactttacacccctgaatctaaagggtgttgctagttggcgcgtgcgcaccagcagctcccggcgcaaaa

SEQ ID NO: 40044 - DNA, 887 bp, Oryza sativa
caaaatgacacgagagagaaaagggcatttttatcatggcagcaagttgcaagtatgacaggtgccttcttttttgcaaatgaagctaattagttaacggaatttatcatggcagcaagttgcaagtatttgacaggtgccttctttcttgcaaatgaagctaattagttaacggaattgctagtttactgtcgacagtaaacggggggaaaactgtcgaatttttgaccgtcggattcgccttaagattagtgctagcgcgttggtggaaaaaatctgcgcgataactgtaatttgtgttctgcgtgggggtggggtttgaacccaggacctcattcccaccagctatatgtggtagccacttcatctcttgcaagtttttgaaaagtttgcaaccctagttatattgtagttacatcgtagttacattgtagttacattgtaactatagtgtaactatactataactatattattatctctatatttattagatataaagttgcatatattattttaatacatataaacaagttattattattatagtatatagttctagtgaaattatatactgtagttagatttgaaagttttcctcccaaaaaacactcgacagttttttatctaatcccttagttaaagtacatatttattttcttaaaatactatattcaattagtcacatgttcttattttgcaagtggctatgcagtcttaggctttcttcgatactacaatttggcttaattagttcttcaaacggaaatcgaacaaggtgattagcataggattagttaagtattaactattataaacttaaaaatagatttaattatttttaaaagaaatttctatataaatgtttttttacgaataattcgaaa

SEQ ID NO: 40045 - DNA, 808 bp, Oryza sativa
atagtataatgaggagcggttgtatatggccctatcgtctagtggttcaggacatcgggggggggggtggcaagtgctgctatggctatgggcctgcccttttgggccaggccttcgattttcctttttcctgaatggaataagttcaccatagatcccttaggttgatccacgtaccaaaatacttaatataacgcgcctttcaactcctgaaactgttgcaaacttaatcctaagacggtttggatgatggtttcaactgacatggtatctacgtatctagtttgactggatcctcatcccacatgagacttgcaatcataaaaaaaaggggctttgtttctgtttcacccattcgtatctattagtcttgtcaaacttagaaacttttgttttggacgaagagttgaaggacaaattcacaatcatctataagaatttagttttccaacgtcgaaatctataaatggtattgtaaatacaaagagtgtgttctcagggatgtggggattattaatgaaacaccaatgaacataggagattgtttgaggagaagaggtgtactaaatacagggttatggatgtcttttgtgctagtttttgttggctagtgtccttaacttgcatgtggtttccaaaggaatctcaacatgaagagatgaagagacctacagcaagaggaataaccaagcagaaagactaatggaactgaagccggtggtgtaaatgatctacctgatgctatatagttatagtggtcgatacaaaagcaaaaagactacaatgcccctgctttatcaaatctcaa

SEQ ID NO: 40046 - DNA, 519 bp, Oryza sativa
gggctcggacatggcgaagaaatgtagggcgttggcgatggtggtgcgtcggctggtggtgagggcgtgttggagtgggaagaggaacgcctggaagcgttgtcaagcgcgttaccgttgaggatagccggaccacagctacggagttcgtagccaggatcaggtgcggcggcagggttcttccatgcacgctcaatggtggaaagaggaggattagggaaggagggagattaggaaatttggtttcatattgcttgcttgcaaatgttgctgattacatgccttataggcacttggtctctaatacaaggaaatgacatttattttctcctaattaatactttccttgcatgattctttctaatttgcacccttgactcatgctgcttgctgcatttgcgcctccggcttgctcctgtggtggtagtggtgtccccacatgacataatcgttttctaatgtcaaagccaatttgacctccatagtaattccaatagttttgagcctcatctacagtgc

SEQ ID NO: 40047 - DNA, 557 bp, Oryza sativa
tagtgttttaattcttaaaacctgcttaacaactaaaatgtggaatggttggcctgggttggcttgggacgagctgggacgcagggtcgggttgccagttcggtctgaatcatcgtaggccttgggttaaggcaggttcgtgtgggttcacggccttgtttaataatcttgtatagctctaggatcgtatttacaaaatagctttgagcaactaagtgtcttttaatgctgtttgctgcaaaccctaaccctttatattataacccccttgtactcccttgcatttatcctgcacttgtgggtgtgtcttgttgagtacggtggttgtactcagtcttgctcaatttttcccaaacctagaagaggagccctggaagatgaaggctttggtgtctagctcgcgcctgccgtcaagcgcctgtggtcgtcaccctagtcttccgctgtttcccgtttgtctttgtgtgtgctgggtcttcgccgcccatgtaataaattaactatttacgcttccgcttgttaaactctgaactatatcaacttttggtgtaccttgc

SEQ ID NO: 40048 - DNA, 679 bp, Oryza sativa
atatatgtgcacgttctatttttcttttcaaatatattacgtgatgaatatgcgaacggaaagtggagcgtgtacatattttctttcttggagataagatgtaatggtgaaaattagtataatttaatggtttataaaatattaggtccacctaccacgtggcgatataggagcgtttgtaggagcgctacgtggcggtttaaaagcgtttgtaggaagtttaatatataattaatttttataatgtatggttgttagaggtagaaattaggagagagaagagacggaagggaagagggtcagacagggagggagggagagtacgtacatatatgtgcacgttctatttttcttttcaaatatattacgtgatgaatatgcgaacagaaagtggagcgtgtacatattttctttcttggagataagatgtaatggtgaaaattagtataatttaatggtttataaaatattaggtccacctaccacgtggcgatataggagcgtttgtaggagcgctacgtggcggtttaaaagcgtttgtaggaagtttaatgtataattaatttttataatgtatggttgttagaggtagaaattaggagaagagacggaagggaagagggtcagacagggagggagggagagtatgtacatatatgtgcacgttctgttttctttt

SEQ ID NO: 40049 - DNA, 937 bp, Oryza sativa
accccccaaccccccgccccctcctctcctccacctcctgacttgggtattacgtttccttgtatattacggaacggtctaaagtcctggtttgataatattgtaaaatagatttaggaaaccgataccgtattggttaagatttctatcttgtaatcctgccctccatcctatataaggtgggcaggaggccctctagggggcatgacacacaacctgatcatcagatcaataacacacccggcggattcaaatccccaaacaagagtagggtattacctcattgagagggcctgaacctgtctaaatccttgtctccgcacccatccacttttaggtctcatgcgctacccccttttattattgccgaattcttgtttcgacacccgtcggcagagcgcggcggcgagggcagcgccggcgctgggacgacgaggcggcacacggcgacgaccccccagcccccgccccctcctctcctcccaccggcggcatgcagcggcgacgaccccgccgcctcctctcctaccagcactcagatctggcgccccccgtaccgagcagcggcaacaacgtcgaccccgtcccgacggaggcgccgggtggagggacggcccgagcagcgacgacaacatcgggtggccctagtagcgacggtgccggttgcagatcgagctcgccggcgacctgccccgcggcgccgccgctcctctccccgttggctgcctcgcccctcgcccctctttcctgtagcaatgagtgtggggcccgcctgagagcaggaactcatagccaaagttggctactcggacttgagaaagccacgcggttggatgatgtggcaaggaatattcgcttttaggggttgagactgaatgccatgtagacccattgtgaatggcctaatagctctgctacactaaaaattatcagaaac

SEQ ID NO: 40050 - DNA, 678 bp, Oryza sativa
cccatctgagttaacatcctgtgttcgcatacatctcttccttctaatgcatggaattataagcatacatcctgttttcaattctttgaaccatatagtttggtgatggtggatatcttgaatatggtatagtttggcataaaaaaaaacacagtaaggtacctacatatgtttttccaagcgattgacaatattgtggctgcgagtggcagatgtagatccaactatcagaatgaacaatgcaaccacaaccttataatagggaaatactgaaacagacatcatgacatgtttcttatgccttgcatgaatttttttttggttagcttatatgtgatgtagtagatcagccaccaggaagaaatttatcatagtaatttactataatttcattattgtgaatttatatgtttgtcatggtttgctttgtagaatgtgaattcggctaatatgattggtgtaattttagtaagtcacgtatgagttaatattcattggtattagctggtatggtttgtgcaccattagtgtgttcttgcttgttctgattcatggacctcacatggaggaaagcttcgcaagccctgcaactgtaccccctaatgcctttggcccttcttagttaagttaatttttggatggcatctcttattgaaagaaggaaaattggaaatatac

SEQ ID NO: 40051 - DNA, 567 bp, Oryza sativa
ttgtgtttagactaacacatttttttctatgttgtaggaaagacgtcgtcgtcgtcccttaagccaaagtggtagctagccctagtaggaatttgcgcaggcaagtgatgtaattatatatgagtattagagtattaatatatgattattagaattttaatacaagagtattagagttttaatatatgattatttagacttagcatatatgactattagagttttaatatatgaaacttagacttagcatatatgattattagagttttaatatatgattattagagtattaatatatgattattaccaattttaatatatgattattagagtattaatatatgattattagagtattaatatatgattattagagttagcatatatgattattagagtattaatatatgattatttagacttagcatatatgattattagagttttaatattaaaaacttagacttagcatataccgttattacactcagcatatatgattattattagtttcaatataagaatattagagttttaatatatgattaattattagacttagcatat

SEQ ID NO: 40052 - DNA, 533 bp, Oryza sativa
tatagggcgaatccgagctcggtacccatagtcatctgtggtctgaaagaaaaatgttaaaataggtaacaagcttagcaaacttccagaataaaagaaattattgtgtgctaactaagggcacaaactagccgtaaaaccaacatataagtttgaaaagtgagctatactgacattaaaaggtacactcaacaaggaaattggcacatacagtttcagtctaatgccaacatcccgaatgaatgaacagtacaactgccgaatttctgactccattatctcagtaataccatctttcctagatggggaaaatttctccagttcttccctggtgaagtaccaagagtacatgtgctcacatgataatttactcgtctgggattccccatccatcagtatgtttgaaaaaacctgcttaaggaccctccaaaatcttcagtgtagtttcagacagaacttccgaattgcttgtgctgaacagcctgcagaaccatgaaatttatgtatataataaaaatatctacaatatgaat

SEQ ID NO: 40053 - DNA, 628 bp, Oryza sativa
tactttgtcaagaactagtggaaataggttatttctaaatgaatatgcatgcaagcatttctagttctccattatttccaacagtattgatggtcgaaattcgtctataatgaccgtcaacaggtaataggaccataaggttgtagtcgtggagacgtggatgtatcgatggtgttgatgtcctcatcatgagagctcatggagctggagtcgccaccgggccgtcacacgagatccgccaccggggatgccgctcgagatccaccaccggtcggcagcgtagagatccaccactggggccgcctctcgaagcgaggaggaggatgactgtcacatcctgattttcgttttaggatttataaattatttaataaattattattagaatttatattaaatgttcattaatttacaagagaagttaaatgtgggaaataaaatttcctaaatataaagcatggacggatttattttttattaaattctccatggttaattatactctctggaattttctcggatttttcggagctcaattcctaattttagccatgcaaagaacatttaaaaaaaaatccacatattaaattaatcattaaggggatcctctagagtcgacctgcaggca

SEQ ID NO: 40054 - DNA, 503 bp, Oryza sativa
atgcctagaataattaaaatccgtgtgaaagcctccaacaattaaaatgtgcaaagttaaaagtcaaataatacttagaggatttttgtatatttcctaaaagcctaaaatacgtaaataaattttagtggaattttcagagctcaaataataagtgttaagaaataaacaaagttaaaaaggttttataaaaaacaaaaaaccctaaaaagtcccccttccctctcttgggccggcccggcccatctctccccccctctctctctctcctctccccgcggcccatccggcctctccccgcgcgcgcgccgctgacgggcgggcccgcccgccaccatcgctgacgggtggggcccacccgtcatccccttcctcccgccgctcccgccgcctcccccgcgccctagcgccgccgccgccgcgaatcccgccgcctcccgccgtccccgcgtgcaataaagtggggggaattactccccgtgatcccctctccctttcccccc

SEQ ID NO: 40055 - DNA, 556 bp, Oryza sativa
ttcggaaaagagagggaaaaagaaaaagaaaaagaaagaaaaaaaaagagaaaggattttccctggaattaaaatatttcttgctcaattttaattggttaaaattatttctagggctctgaaaattccactaaaaatcctgttagtgaatttcgacatgtagaactcaagaaaattccacatgccaattccgattattatttgcattgatttaaaagggtttactcttgctttgcaccggtattttcttagggtctcttataaattaaattttagacttgggaggagaacttcggggtgtgacaccggccggcgccgtgggtcccacgcgtcagccgcacctaagggcgcgggcggctgacggccgggccccacgcggcagccactctgcgcgcccgagggcggccaagccggcacagccggcgggaggcggcgcccgcgcccctatggtcgccggcggtggccataggcacagcagagcggcggctgagagagggaaagggaagggggaaaagaagaggcggtccacggctcaccctacgtcgacggcgacgac

SEQ ID NO: 40056 - DNA, 676 bp, Oryza sativa
cctgcagcccatagatattgttggtcaaagtagtatctcggagaccatgtcagggtctaaaaaaagcttatattttgagatggatggagtactttatatcagctttgatcctgctagggaaagatacattatttccggttgacaacccattttaagcccatttgtataatcgagacgtataatctcgaactaaaaatagtatttttagtctaggttaaaataaccgggactaaaaatcatctttgagtactggtactaaagatttctttttcactgcatttttttatgaccactctttttttaaagaaaagtttatgtgtaattaaaaaaagagtaaattgtaatttgcaccaggacatataatttacgctaggttgaacatgtactttcacttttcattttgcaccaggacatattgaaataggtttcgctttataccaagttacttcataattaattaaaatcgaagggagatcttataaaatatgattagaattctataaatattcttgaaactagctacacagttattaaaaaaataaaattaaatggaggaaaattacaattggatgagaaatgtagatagcccgtaacattgaatggtgtagagttacaattgattagaaagagatcgttagtgaataagttaattatattttaaaataaattttaaaaa

SEQ ID NO: 40057 - DNA, 724 bp, Oryza sativa
tatatatccaatttttctatgcgtgcttacaaagtaattaatgtatgatgaagcaacatatagttgtgaaattgttttacaattttgtacggtaatttggattatatgcaaagtgtaatagtgtggtccctagataaattactcctttagccagtgagtttataaattcttatcctaataccgtcgatctaatttcgctatgaaattttgtggaatcactgatttaagattacataatacatgttcatttattttaatgttgagtaaattgcattggtggtacacaaacttgttaggtgggtgcaatttagtatataaacttataaaatgctcgtttcagtacacgaacttgtctggttcgtgcgaatgaggaccaaaataacttggcaatgtcaattttatgaagttgacgttgattaggatgcgacgtgtatacctgtagcaagtatgcataggacatgcaatatttataaatttagtctctactttatccttcatcattgaaatgatgaattttatatgtttctaacccttatatcagtgctcgatattttaaatctttttctactatcacttagtgcctgaagtattgcgttaggattaaaattaagttttccctggttggtgtccttggatgaactggaggaagatctgaccacacacgttcccttggattcgatacccttagaatactccgtatggagaagtgctacatcggtatatc

SEQ ID NO: 40058 - DNA, 1189 bp, Oryza sativa
  unsure (1)..(1189): unsure at all n locations
atgactgtttcccctccaccnnccnaagnnncggacctggcaatcctttggcctctactcttaagatcttatggacatgtaataattctctatttgtgtggatgtaatgacagttagatgctcttagctgctctttatttatattgctcttcatttatgctatgagtgtcttatttgttgtttgtgatgtgatgttgattttatccttttgagtgctcaccatgtcgtatcttttgcatatcatatttattcttactgctttttgcatcccacgaatgagtagggatgaaggaaactctcctcggttgctccgttatatatatgcatatgagcttcactcatattttccatatgcatacactaagggggagtttcattcacctctaaccattcaaaacaaaattattatcaatcttttgtaagctttaaccatgttgtcatcaatcaccaaaaagggggagattgaaagtgcattaatccccctagtgggttttggtgattaatgacaaatgtggttaagggactaatgagttcattgagtatctttcaggtgcattagtccaaggtgtggaagatggatgcgtggagaccccccaaaagtataaaatcaaagcggaccggaactcgagaagtgcataggatagtttattttttgcaatcgagtttttagaaaaaaccgtactattaagaggggttctaggtgatgctctgagatatctcaagtgctcttagtgtgaaccaagtgtcaagtttccctaggagtcatttttgcaaatgctccattggttcaaaaatgcaagtccggaacttactgtcttccaggtccggaacttcctgtctagtttccagttcaaatttgtgagtaacggctagatgacgtcacctagccgttatacatatacagctcgtttccagctcgttccttggccttccactttcactttttgaacctagagctgttgctagcctctcccaagtgtttcttgccttctccactcaatctagagcctaattcttgtgagaaagagagattgagagggagagaagaagatttggagatgtgtgaagactaggatcttgggtgagcacttggaatatttcgggggctgtcatctcggggctaattactcttggagatgatctcctaaacggttaggtgtcgcccacgagaatcccgtgcatattgggg

SEQ ID NO: 40059 - DNA, 632 bp, Oryza sativa
cggaggatgatccactatataggcgaattcgagctcggtacccaaaagaaaggaaggggaggaggagggagatgctcaccgagatgacgatgaccggcacagggaaggacgacgacgaccacggcgatggcggcgccggcccggcaagtgagggggcggccggggagcgtcgtggcccgaggaaggagagagagaggggttaggccgcgcgcggcgaccgaagacagcaaggaaaggccgccagaggcgatagaggtggtggtggctcgggttggcagcggaaccggggctccggtgatggtttggggatctggagtggcggctagtgtgcggggcaacgcggcgaagccgagggtggcggcggatttgcgtggcgatggctgacgcggcgaggagcggtggctcgaggcgacacaggcggtggtggagctcgggtcgacggtggaaacagtcctcatgcgatggaatggacgggtggagtggcggccggggcgtggcacgacgtggcgaacccgaaggtggcatcggcgcggtgcggcagtggctagagtggcggtggcgggcagcttgaggcggttgaaggggcagtggctcggttttatggtggagatggagttccgacgatggaatgg

SEQ ID NO: 40060 - DNA, 793 bp, Oryza sativa
  unsure (1)..(793): unsure at all n locations
ttccgtaatatacaaggaaacgtaacacccaagtcatgatctgttacatgttccatatatataagttatcccctataactagtcggataaccatgccgtgtgggtatggggtacccataatctccacactatctattccaggcctncccttctactcccggcccacctttttcctcctcttccgcttgggccgcccctaccctatcccggtccagccgacctgacgccccaagccaccttcctcctcttcctcgcgcccctctgcacgtgcggcgcacgtgcgcgcctcgcgccggaccaatgggtacacccacccggtcgtcttctaccttccagccggctcctctctctcctctcttccattaacccttgcaccaatttcttccccgaatccggtccattcatgccggattaattcaaattgggtagagaaatggaatccacatcccttcctctctagttcccctaactttccccatttaattccatccccaatcgccgggatttaatcccccttctttgacctcttccgtgactggcacttccttcttggcctataaaacgaaagtcctcatctccctccgtacattttggtccctttcgagtttttagccaccttcacgccggcttcttttcacttcctagcaccggncgacttcaacacgccctggcgccgngtnagttaagccggccggccgtggcattcggcttcccccggnngtggaggtcggccttccctttccccggcattgctcttcgtttnccggcggagaccttcgcaagtgctatctct

SEQ ID NO: 40061 - DNA, 733 bp, Oryza sativa
agtaactgatgcttacattttatcattaaataaagaacatacaatgccggagcaacacaattattactaatgtccataggaagaaccaggatcaaacaaggaattggaaagaaaatcatgtagtggtggaagagaagagcatgcacgtaccaccaagaggaggagcctggatgtgggaaggggaggaggtggtcaggtgggtgtgggggtgggggcagaaatggaggggcaaacagaaaaatagactcatcaatggcgcctattgccggttcccaaaaagggaagggtctataggctgcatattgtggccgggaaatggagttttttgttttaaaattatacaaggtccggttttcttccaattttagataattaaaccaccaaaaccttattagatgtgccctccgtgtataaaacggttggattttatataaaaaaaaaagacataaatttttagacacagtatagttgtttttggcaccacatttatatgtgaacggaaaattttgttatgacttatgcacccatacccttacatgaacgagtttaatttacacatgtatctcaaattataggttggttcaaaaaaaacacacccgcgcctgttattttgtgggatagcccatattttaatttcaatttttatataaaaaataaaaaaacctttttggagtgtgtgtactccaatacgaaagggggaatgggttacgcgcttaaaatcctttttattttt

SEQ ID NO: 40062 - DNA, 687 bp, Oryza sativa
ctctttttggtgccttgatgccaaagggggagaaaattgcaatcgaagggggtcaaaattttgtttttgctgcttgctgcctgctctgtctgtttatcggaagttccggatcctcttatccggaagttccgaacatggcagctccctcgctttattgtcatgtcagcttgtccggaagttccgggtatcttatccggaagttccggacctggcaatcctttggcctctactcttaagatcttatggacatgtaataattctctatttgtgtggatgtaatgacagttagatgctcttagctgctctttatttatattgctcttcatttatgctatgagtgtcttatttgttgtttgtgatgtgatgttgattttatccttttgagtgctcaccatgtcgtatcttttgcatatcatatttattcttactgctttttgcatcccacgaatgagtagggatgaaggaaactctcctcggttgctccgttatatatatgcatatgagcttcactcatattttccatatgcatacactaagggggagtttcattcacctctaaccattcaaaacaaaattattatcaatcttttgtaagctttaaccatgttgtcatcaatcaccaaaaagggggagattgaaagtgcattaatccccctagtgggttttggtgattaatgacaaatgtgg

SEQ ID NO: 40063 - DNA, 532 bp, Oryza sativa
agttatagcatcaataattattgtgagaggtgtgagactaatcacgaaaaacattgctcaacccgcccatgaccgcgggcacggctattcaaatagttttactctggccagaggtgtaccactatacccacaagacacagagcctcaaaacatgttaccatgcccttagtaccaccacgatacctcgaaacgggattgtgacagtacccctcgcacaacacaatccaccacagaggcatggactccccagcgacccccacggacttctcaccacttcacagtctggtgccccgcaatgagccatactatacaaaaggtaaagctgttgcccacgctggcttgtggttggcacgattaatgtctcacaacagtagctcgtgaaccgatccttaattgtcatgatcacgaccttcaaaaccatgtgctcacaacccaccattatcaagttttaattatcaattaattatcataacatgattaaccatcatgagctaccatttaatataatcataaataataatgtagtatgatt

SEQ ID NO: 40064 - DNA, 605 bp, Oryza sativa
caatatgggtcaaatttgatccctacttacaaaaactacaaagaattgaaacagattgtgacacgcgctgtacgcacaccaccctcttctggtcttctcccctgctctgctccaccaccatggagagcggcggcgccggcggcgaaggcgagacggcggggtggcggttcggcgcggcgaacccggcgctggcggtggcggggtcgcagagcatccgcgcggccgtgacacggatttaccgctgcctcgacgggagcggcgacgcgcggcccgtggcgccactcgcccacggcgacccctccgcgttcgcgtgcttccgcgccgcgcccgccgccacggacgccgtcgccgccgctgccgcctccggcaagtacaactactactcccccgccgtaggaatcgccccggcgtgcaggtacgtcgtcgcgtgcaaaagtggatgacagatcatacgtttttcttggatgaaatatcgtgtgaaaaatgtgaatacgcgtggtgaattttggccaaatattcaaatttatatatataaattagcacacactttagcatagggtacattgtacatatatttttacagaatttcaaggccgaactcaatt

SEQ ID NO: 40065 - DNA, 666 bp, Oryza sativa
tgcagttttgttttgctgcgggattcggatttgttttggtttggaaacattccaaaaaatcccgtgtgtgaaaaccggatggaattccgattgggtacccctgaattattccggttcggttaccccgacccccttgaaaggcaacttttttttttttaacccgacccgttgctttaacccaccacacccaaaatcaatctagggttggcctcctactttgtactgccccgtcgttcgtaaactactccatcccgctcgccggcgtgcaccggcaatcgggaaagcaggtctccggaacctctgccttcgatgtcctgcaccgggagaaggtagcaataaggtttttgggaagcgcttcgcgcgactgctccctgttcgttcgcgacggctcgtcttcctcttcgctcgcgtgcttcgcgccttcgtagacgctcgcaactgcgagtagttcctgccgagcaaccggtctttccgccacacctcggtattgtgttccaacattgtttgccgccaaatttaaaatttttttttgggggaaatttccccccttggggggtttttcaggttttactgcttattacatgtgtagatctaatgatgcgttcaatctagtttacatctgcaatgtcatgatttatttatggaataaattaaatcattatgtgc

SEQ ID NO: 40066 - DNA, 554 bp, Oryza sativa
agctaaccggccttagaggttgcgtgtggcatgagcaaacgctacatcggtagtcgagccacgcactatgtcctggtgtacccctctcggcaacatggtagcagtgggaagcattgcaccgacggccgtacatgcaataaaaaatcatgagaagattagtatacgttagtaattaatctaaatatataaattacaaggaggttaggaaccggcagcacagccaaatcccatcactcattaaggaacgattttttgatctcgattgccatcctgtgcatgcgaccaaccatcgctccagtatacatgcaaaacaaacagatatagtttgattagccttaaaatattacacgcttaattgtgtaatgcatatatcaagctagggtttgatattaacccgtgcatatcagttgatcaacacatgcacgtgaagcactcagtcgctgttgatcccatggacatgaattgtccccgtgtcatatgaaggttacgcaagcacctgtacagatcgtaccaggtgacgagcagacacaccgggagttcgtctcgatctcagc

SEQ ID NO: 40067 - DNA, 586 bp, Oryza sativa
ttgcatcatcagtgcagcaggggggctcaaccagccggttaggctcataggtatgagggttttgctatttcctgagacctctcattattatcacattttctctagcataaatggacgaatgaaaaaataacgtataatctctggtattgtggtatgtatatcaagggaaaatacatgcatggtggcatgtatatataggaaatggcagtgctgtagttagacctaaagcttcgatatttatatctatacttatactaatcgaacactttctatgagctcccacgttaatccgaaagatctggctagaagaacaacataaccttaatttctcgcttcctcttctactcgatcagacaaatttccagtattggaaatagaccatctaagaaagttcaccaggagatgggaggcatcagaatcaaaagtacagcattacagaaatggggcacaattcttctaactacagtaatgagacacaaaagtattcacattactagtagctttgtggagcgttgcacatcccctttgttatgctgtcaacagtatggcagtgttgcagaacacgctattcggcgggatgtatcat

SEQ ID NO: 40068 - DNA, 558 bp, Oryza sativa
taaagaataaaaagaaattattgtgatgcctctcattaattgagaggtgattgcagtgtgggagggtggttagatataaaattgagtgaaaattaaatgagtagtgattgttgggagaagtagcattttagaagttattatgtttttgtcaaatttcaaatgctataatgtaacaccccaaactgtctgtcgcctatagtagtgggttggtgcaagtacctataagttgcagcagatgtgatttattactatcataaaagttaggtgagtgatagccaggttaacccttttatatgaaacaatgatcataaaaatgtaatatggaatactacgtctatataggctaattcaatgtgtggaaagaactgatgcaaattttaaaggaacggaatgagatgtgtatgtgaatggaattgtgaaatatgtgaataatagatgtgtgaaatatgtgaataatggatgtgtgaattatgcgaatggggatgctggggatgtcgatgtgctgggaatgctggggaatatatatgtttctgtcattttacagcgggtatgactagc

SEQ ID NO: 40069 - DNA, 1184 bp, Oryza sativa
  unsure (1)..(1184): unsure at all n locations
catcacattggatctttgaacatgtgcatggagcattaaatatagactaaaaaacctaattacacagttatgggagaaatcacgagacgaatcttttaatcctaattagtacatatgattagccataagtgctacagtaacctatatgttctaatgacagattaattaggctcaaaagattcgtctcgcggttntcaggcgagttatgaaattagtttttttattcgtatccgaaattccggttaaacatccgatatgacgcttaaaaattttcttttcgcgaactaaacaagcaccaacagacaaggctgattcacgaaaagatatgttttgaccttcactttcttgatttcagcattaaacaaaatattatcatgttaggagggaagcatcaatcgcactctattttgtctcattaatcaaaccgaattcgtactatcaaattttgactcgaagtcaatattggcgacgtgcagaagtcgctgaaggacgggttctgctctggccagttaatttagctcgtaaatttgcattcaaaattcgttaggtacatcgtacaaatatgcaaaattaacacaagctacgactcatgagcagcatcccaagcacaatataatggtacggttcgtcctatcggtatcataatcttttgtcatgtacaatcgcaacacaaagtctctcgataatcccgtacgatgtccgatttggaatatgcccgttccgttgcatcatatgattgatgaccagcagtttaaattttgttttgaatactactatgtgaagtgcctgtttgtagagtcactgtaaaaaaaaaaaaaatcttcggttgctgatactgtgcacacgtgtaaagctcacctttctcaccttgagctccacgccaaatgatctctcttgtaacgcctcctttaatggatatgcttgttcaccttatacaagagaaaaaaattaactctccaataaattattttatagcatattatttaaaatgctttgggtttcacaattcctctcatattttctttagaagcttagctcttgaagaagagatagtgcattctctctccttatcttctctctcttccactcaacaaaagctgatatggagatttattagctagctgactcacctttattggaggaggcataagcagcacaaaattgacataatttagcttatcatg

SEQ ID NO: 40070 - DNA, 730 bp, Oryza sativa
tctcccggctgaaacaaatatgccctattttccgatacctgattagttggtgtggacaagtaaccctgaatctggactgtcgctctatttaatcctcttatgttggcccttctgcatcatccagcaaggctcggaagtctgagctataaggtctagttgacgtataagaggccttcgatatgttaagggagagaggggagagtcattttagagttgggtgggaatcgttgatagaaaatttttttccctgaggtatgatagcgtctgaactaaagaaagggaatatggaaagtgaatgtggtaaaggataccaagagccctgaatgatttttaagcgtcttttctttgaacaaataaatctaactctctcaaaaatataagtccatctcctagagacttatatttttgagagaggggctaaagtttagcccctctcttccaaacaccccatagtgagggagtaaacaaaattaaagtatgtacatcgacgtgtgaaagtcctcgcccgacttaaaaaggtcaaagtacgtaatctccccccaaatagaaactcttagaacttggacgctcctactttgacccaagccccagcctcctatttgattttgcaatcacggaggttggggatggcgatgtgtcgaaagattctagtgttctgctcgcataatagcacccaaacgatgagggtctatattctgaattttcgtccaaagattgatgaattgtcaca

SEQ ID NO: 40071 - DNA, 589 bp, Oryza sativa
atatcgccatctaacctacaatcggctatcgtctgttaatagaagccacccgagtaggttaaacaccaatgttgacttagattatatagaatatctaccactctatgaaacatccggcggcttgattgtctagatattgtccttctttttatacttatagctgcatcagttgagtctgatcttatgagtcgtgattagaatctcaatctctagcctgcttttggttgccgattagggtagcatcggggtttcagccgatcttacctgatttaactacttttatcttatgtgcttgattgacatgttaaatctgccctttatgttaagatcttgtagcatttaagtatattaggctttcgtttggtatattttacttgctttaatatgttaatatagagtggtatctgttaacaaccaaatttggtaatatcggcattgggaaagaagattagatcgatgcaaagtcggaggcggagatcgagttcggaaacagagcaggaatcggctggagtccagatcggctacaaattggatcggctgggtctgagtcgggctaggtaagccgatgcagccgattccgacaatgcaa

SEQ ID NO: 40072 - DNA, 634 bp, Oryza sativa
gtcagtaaaagatcactataggcaatgtatctaaagtgacattcttactaatgcaatcctttgtgggtgtgctcatagtgaactaagtgttaaaatggtgccataggctggtctttagggtcacggctacgtcgatgtggaaccaatgtttcagggcattatataagaaagctttggtagatacagtcgatgatgtggaaataagtgatgaacatcgagttaagtagtgtagattattttttagtgtattaataatatataatttattttagtggtactaatacagtttcatttattaaaaatgcacatagcttttaaaacaataacaatagaggagtttatatatgaccacgacaaaatgatttttatttaaatatgagatgtattcttattcttatcatatttagtagtatattaaaatataccatctattttacggtaaatatatttcttttttattgtaagaaaatttacattcccttacagtatatatatatatatatatatatatattgatgtatgatttattttaccattctttttcttgaacaacaaataagatgtcagtgtatctctgcgggctttattttcagtttatattttgaaaatgttttctgatttatattccatcctt

SEQ ID NO: 40073 - DNA, 551 bp, Oryza sativa
tgggcaatagctaatgatactacttcatctagccaaagatgatttatattacttatacttcctctgtcacataaatcggaggagttaaattttattctaaaacaatagaataatttatatgtaactgagacaaagtaattttttaaaatactagcacgataatctccaaagtaccgtattatatttttgacagatatctatagtgtaatgcacgttagttcagtgtctggtttcttttcaacacctattctttctaacgacatgagacacctttagtaatttggagaatacgtatgtacatttaaattagcattgtatattcatcaagtttttttacacctaagatatgatgtgaaattattatcatagcgttaattattacttgtcggttccatatgttttgatgtattttgggctatagacattatcaatttattgatttaaaggaatacaacgggatcacaaattggatatataattttaaaataatttaaaagatagaacacttaaaaagcattgattggacattttatattatatttgtgtaaatt

SEQ ID NO: 40074 - DNA, 552 bp, Oryza sativa
  unsure (1)..(552): unsure at all n locations
aatgtaccccaatactctacttatccggtctacgagtatcactcgtcgacagatttaaatttagaattaaaacaaaattaaattcaaaattagactagaaaaaatgcccatgcgttggaacgggtaaacaaaaattatgatgcgcaaggaatgatagacagatgagtgtgatggctggcattnaaggggtttaggtttttcatgnnatatgagcncctttaagaaaatatattctgaaataaagaaagaaagttctaaaaaaagaaaagaaaaatcgaaaggaaaaaaaaggccttgtcggacccccgccggcttgctagggtattcacgcacatagcccatgaagcgcgcgcggcccagcaatgctgcggtccaagggattttggactatttgccactttcccggatggcgtgttctcaaatgccactcttccaaagaactttgctttttttaccattggagagagatgatttctttctcattggccatttttgagctggtgaggcgctacgtcaccagatatgagggcaaaatgaccattttgcctttct

SEQ ID NO: 40075 - DNA, 579 bp, Oryza sativa
acaacttatcatcttaatgactttcttagatttaatgcatgactcttcattcttccacaccagattggttgcatgagcatcgagaaatgtaaatattaatgaatcgcttgtttacgaggaattactagtagcatatttaaatggatgataagtagaatcacttatccttggtctgtgtgtcaagatgaagtatgactatcaaaagtagatggagggagtatttagtataatttgctttgccatgcttagacactttagtgtcatttatgtgggaataattaatgcttccctcatgattaatgatgattaattagtgatatctcgtgacgattggtagtgctgattggtagtgcttggtttattaacttgacaaataaaattttactaatggtgagttgtgagcacatagtgtgttggacgtcctcatgacaactaaggactagtttacgagctagtgttgtgaagcattaaccatattaaccacgagcaagaataggcaacgacttagatctgtagtataatatgaccaacgacagatgccacggtatgttgtgtttttatcgtggcagacaactaagt
